United States Patent Application Publication US 2019/0348154 A1 - sequence listing, part 14

SEQ ID NO: 51296 - DNA, 1383 bp, Acinetobacter baumannii
  misc_feature (563)..(572): n is a, c, g, or t
atggctcaacacattaaatttactaaatcggtaatagactctattcctttgtctgaagagaaacaaatcttttacagagatacagtaactataggatttggcttatgtgtgggcaaaactaaaagctattttgctgaaaagaaaatgcctaatggcaagtctaaacgtaaagttattggaaaacatggcgtctatacattagaacaagccagaactgaagctaaacggcttcttatcttgatggatgaaggtgtagatccagttaagcaaaagcgtgatttacgagcttcagcaattcaaaatgatgccttacaaaagctagtccctacccttagtgaagcttaccaatactataaattgcgtaaaaagctggcggaaacatctttaattgcctatgacggatgcatagaaaactactttagtgattggaaagatttaaaacttgaccaaatcaccagtgcaatgattattgatcgtcatctgaagctttcgaaagcaagcccttcccgagctaatcttgcatcaaaatttttacatgctctctttaaccatacgattagcannnnnnnnnngtataaggatgagtccgggaataaaattctaaatataaaaaacccggttgttatcgttaaagaagaaaaagctttcaataaaattaaacgtagaaaaggccatgttcgtgcagatcagcgcgaagcatgggcattggctgtggccactacttattggatgggtgaacaaaataacgattttagagcgtacacaaaccaagactttttattcttacttgctctaactggttttagacgtagtgaagcagaatctgttgaatggaaaaatgtagatcttcaatttggtaccatcaaaattattaatacgaaaaaccatgaggatcttttgctacctatgggtgataccctttggcacattatgcgtgaacgaaaaaaacgtgccggtgataacaaatatgtctttaccgatagaaatggtgtttcccatatttcagaccgccgagcagcacgtgacaaagtaactgagaattctggtatcgaatttacgttccatgatttacgccgcacctttggcactatcgcgaacagcttggccataggaagctatacgattaaaaggctaattaaccataccactgacgatgatgataacgatgtgactgatggatatattcaagtttctttcgatgatttaaagaaagctatgaatatgattgaagacgtgattatttctgaaccagtaaaagcattaatcaaaagtcgcttatatttcgagaaaaatgaatcgagaaatcaggctcaagaattaattaaccaccacattcaagtgttagataactttaaaatggcaggccaaattctagatttttag

SEQ ID NO: 51297 - DNA, 270 bp, Acinetobacter baumannii
atgaaaaaattatcaacaattcttacagcaggcgtattggctatgttaagtgtttcggcatttgcatgtccaaaaggaactcaactacaaggcggtactggaccaaatcacaaaggtggaaagtgtgtagcggtacatggaaaagctacagctcaaaaagcaaagaaagaggcaactaaaactaaacaggaagttaaaaaagacttaaccatgcaaaagcatgatgcaatgaccagtgccaacacagctaaagctgcaacaaaaccgtaa

SEQ ID NO: 51298 - DNA, 192 bp, Acinetobacter baumannii; identical to SEQ ID NO: 45978

SEQ ID NO: 51299 - DNA, 243 bp, Acinetobacter baumannii
atgagtgaatcaaaagttagacatttggtacttaaaagagtttcagataaatcttctcatcttgctctttgtgacgaggaaacaggtattccattagctggattaaccgctgtaaaaatgaattgtagtgtttttgagggtccagcgactatcacggcaacatttgatgtaggtggtcctcaaggcatccgcttagttggtgatgaacctagacaaaaggtttggagtgcaaaggaaacgtag

SEQ ID NO: 51300 - DNA, 429 bp, Acinetobacter baumannii
atgttatattttttaaaacatcagaatttatacaatatgaaaacaatagcttttgtatgtctaaccctaatttccatcacttgtttagctgaaccaagtcaaaaatatcttaaagaatatgatcgattgtctgaagctttggagtcagcaatggcaaatgcatattcttttgatcctgcaactggtcaagtaaaacaggctactcaaggtttagaagctaaaaataatttatgtagagctgcccaggcgaaactaaacctcaccacgtttttaaaagacaatttagaggaatctaaagagctttataaatctattgatggtgcagagactctagataaaaattatcttagtggacaacagcaggaacaacaaaatctcgtttcaaatttgaaaaaagaccttgttggaactggatttaactgtgagtaa

SEQ ID NO: 51301 - DNA, 1104 bp, Acinetobacter baumannii
atggcaacagatatcaaaaaactatttgaagcactcactcagcaccaggcctatctttatcgtgcttcatcaaaaacggtaaatgagttattggctttattcaatgatgatacgagcaagatgctatctaagcttcgggatttattggatgagcttaatgagtcggagaaagttgctttagctggtggtaaatatacaacttcaaatttaagggaaattagggatttgattgcccaatggtttgccagtgttaatttagcattacctgaagcttttgccgtttctgctacggcgctggctgtttatgaggccaattacgtagctaagctctatggagcaaaaattaataagcctgatggggaaaagctatatgccgcagctaaaaaaataccattggtaggtggggctcttgttgatgatctgctatccagaattgctgaaaatgcccgtcaaaaggttgagtatgcaattcgagatggtattaattcaggcaaaactaaccaagaaatagttcagcgtattcgcggtaccaaacggcttaattatgaggatgggatcttaaatggtaccaaaactgatattgagcgaacggtaagaactgtgcgaagtcatgtagctaatcaagcctatctaaatagcttcaaccaaattggctttgaatatgtccgatttgttagcgttttagatggacgaacttctaagctttgcgcttcattagatggttcagtgtgggaaataaatgatccggcaaagcgagtgccgccgttacatcctaactgtcgcagtatcttggttccggtcgagaaggacggtcaacttgttggcgaacggccatttgtaatggacgaacgtagagttaaagacatccccaaagaagagcgaagccagttaataggacagttagatgcaaacaccacattcaaagagttctttaagaaaacagatgatttctttcaaagggagtggctagggccaaagcgctttaagctctataaagatgggaaatttgattttgataagttctttgatcctgaaggccgtttctatagcttagatgatttgagaaagttggatgaaaaagcttttaaaaagttgggtctgtaa

SEQ ID NO: 51302 - DNA, 1452 bp, Acinetobacter baumannii
atgagtgatgtaacttttcaacatgctgaatatgttaagaacttgccatactggcaaaaacttgatgatgtttgtgaaggtgaagatgcagttaaggctaaaggtgaaaaatatttgccgatgccaaatgcacatgataaatcacctgcaaataaaagcgcttatgaggcttatcttacccgtgcagtcttttatgaagtaacagggactacattaaatagtttagttggtgcagcttttgcaaccgatccaagttttaaatttcctccggaacttgctcatttagaacgtaatgcaaatggtgctggtttaagtacttatcaattggctcaaaatggaattcgccatttattgaagcattatcgttgtgctttatatgtagattatcctgatgtgccgccagctcgtaatctcgcggaatttaaagcgcaaaaagcctatccaatgattcatttattgaatgccatagatgtagtgaattgggattcagtaatggtcgataaccaaaaaaaactttgtctcgtggttatccgtgaatttaggtctgagcgcggtgctgatggctttagtaaaaccgaacaagagcaatatcgtgtacttcgtttagagcaagagggtaatggggaatatatctattcagtacaggtatacacaaagggagaaaagggcaattggcttggtggagagaagaaatttccaacggattataatggtaatttttggacttatattccatttacctttgtaggagccaatgataattctgaagagattaagaagccgccattacttcctttggccaatctcaatttagcccattatcgtgacagtgcggactttcaagagtccgttttttttatgggtcaacctcaatactatgcgaaaggtgttaattgggagtggtatgaccaagcgaagaaacgtggcatctatattggcgcgaaagttcttttgcctttacctgaaaatggtggattaggaattgttcaagccgaccctaatactcttgcccgagaggcgatgaaagataagtgggaaaaaatgaaggagatgggggcgcgtttaattgagaagggtactgcgggtaaaaagaccgccaccgaagcgaatagcgatgacgccgttcagcattcagttctttcgctctgtgtagtcaatatgaatgaagccttgtcagcagcattacgatgggctgctaagtttgtaacgcctaatgtggatgttctaactaaagatgatttgatgttcgaaatcagtcaagaatttaacaaacagggttatttagctgagttagctcgacagttatttgaagcagctctacaaggccgatcttcatttaaatcatggtgggaatacaaccaaacaggtatgttccctaaacaaaaatatgaagaagagcttcagaatgttgaagcagagcaagatgggactttaaatcaaaaggtagagtga

SEQ ID NO: 51303 - DNA, 1428 bp, Acinetobacter baumannii
atgagtactgatgcggctcgggataaagccatccggatcgaggcgcaagaagatttatatttcttcacaaggtacatgtttaaggagcgccgtggttataaatggatgcaaaattggcaccacttagaaatctgcgaagctttaatgaaagtttatcgcggagagataaagcggttaattattaacgttccaccacgatattctaaaactgaaattgctgtaattaatttcatggcttggtgttttggtaagaatccagactgtgagtttattcatatcagttactcggcaatgcttgccgcaaataatgccttccaaatacgaactcttgtacaagaagaggcgtatagaaaagtctttcctgagcttacattgcgtgatgatagtaaggctaaagacttctggagaacttctcaaggcggtgtctgctatgcgacaggtacaggcggtacgattactggttttggtgcaggaaaacttcgtaaaggctttggtggctgcattattattgatgacccacataaagcacatgaagcttcatcaaaaactattcgagaaggggtaattgattggtttcagaacacactcgaatcgcgtactaactcgccagatacgccgatcattgtgattatgcagcgacttcatgaagatgatttagctggatggttgctaggtgatagaaaagacggcgttcctgtagctggtggtaacggtgaagtgtgggagcatctatgtctttcagctattcaggaagacggatccgcactgtggccagcaaaacacaatatccaaaaattgaggctaatggagcaagcagcaccatatgtatttgccgggcagtaccgacaaatgccatcaccgccagcaggcggtttttttaagcccgacaatattcaaattgttgatgctttgcctgcggatgtagtgaaacaagttagggcttgggattttggggctaccgaaaatgagggcgactttacagtaggtgtgcgagaagctctaggcgcagatggttttacttacattgtcgatgtaactagaggacagcttggacctgacaatgtgaataagcgcttagaacaaacagcaaaaatagatgggaaaaaagtttctgtgcgtctaccacaagatcccggtcaagctggtaaatcacaagctagttcatttgtgaagcttcttgcgggttatagcgtgatagctaagccaatttcaggtgacaagcttacacgtgcacaaccatttgcggcccaagttaacgtaggaaatgtacgaatgctcaaaggtgaatggaataaggattttattgatgagcttcgtcattttcctaatggcacacatgacgaccaagtggatgcagcctcagatgcatttaatgaattacatgaaggttttgaagccttttttgctgatatgggatttgctcgatga

SEQ ID NO: 51304 - DNA, 471 bp, Acinetobacter baumannii
atggcagcactaaaagagcctgtgaaaatatttattgttcaagctcttgcatgccgtgatacccctcaagaagtggttgaacaggtcaagcaagagtttggagttgatattagtcgtagccaatgcgaatgctatgacccaacaaaatattcgggcagaaacttaagcaagaaatttgttgagctttttgaattaaccagagagaagtttgataaaggcttaattgatattcctattgctaataagtactaccgactgaagcaataccaaagacaacttgagaagactagaaacgtcaaaacagccttaaaaattcttgagcaagccgctaaagacattggtggtcaatttactaatcgtcaagaaattacaggcaaagacggcggaccagtccaaacagttaattcagaaattccagttccaatgaaagattacttaaaagcgcggagggaagtcttagatgagtactga

SEQ ID NO: 51305 - DNA, 174 bp, Acinetobacter baumannii
atggacaaaaacgaagctaaaaaaaatctggataaatattcacaggaacttgagcgctatcaaaatctctccagatcgggtcttagccgtgatgaaatgttagttatcgatagaataattcttagattaaaaaagcaagttaataatttacggactgccttatatggacagtaa

SEQ ID NO: 51306 - DNA, 243 bp, Acinetobacter baumannii
atggttattggaggggctttttcttttggagaaataaaagtgcgtatgagccgattattactagccactactgctggattaatggccttaaatacaaaattaagtgttttaagcaccttggttgcatcaggtggacatgcatcacctttgagctgtaaggcaaatccagtaaagagcaaacctaacaaactaagtcaaaagaaaaaacgccttattgctcgtcgtcttaataaacataagtga

SEQ ID NO: 51307 - DNA, 771 bp, Acinetobacter baumannii; identical to SEQ ID NO: 51200

SEQ ID NO: 51308 - DNA, 564 bp, Acinetobacter baumannii
atgactacagttgtaatggattggtcaagattttctatttttgaatggttcgtttgtggcttaaacccgaaatcaccttcatttggtgctgcgaacgttagatgtactgatgggaggtcaatagactttcatgacaaattaggggtggtagctgcaatgggtgaacaactaacaaaatcagttgcaatggtcattatgaccgaaggaaagtcccaacgggattatgaatatgttcgcaatcatttagctaaaataatgattgatggggcagagaaagataaaagaagagagcctaaggggatagctatttaccacttagcttggttaattgctcgtattgttattgattttgctttagatcccgaattagaaaacgcacataaggatcctggtcgacttgtttatgccggcattagaagtttccaaatggatccggaggtataccgcaaaacatggaaacgatacgaagatatgatgattgccgcgcttaatgaagaaattttaaaagctactgtaatcgctgaacgctataagaaagaaaccttaaatgaagcaagaaattag

SEQ ID NO: 51309 - DNA, 285 bp, Acinetobacter baumannii
atgagtgacattgaaacggtaggctggacggcagataagcggtttttcatattaaaaattaatatggaaacgaatttgactacagatgattgtgaggttttagcaggattgtttgttgaaaaatatagtctggaattttcaggctgccagtttcatggaaagctcgcagtgatatgtggagataaagtttacgtgaatccttgggcgcttgatcaagaagcaagtgtagatgaaccagttgaggaactgtcatttagtgagttccaaacgttattgaataattaa

SEQ ID NO: 51310 - DNA, 162 bp, Acinetobacter baumannii
atgacatcgatgagtttagctgattatcactctaaatttccaaacggccataaagctaaaaatggccgtaataaatttaatgcttcaaaagtcacattagatgggatgactttcgatagcaaaaaagaactcaagcgatatatcgaacttaaagccatgtag

SEQ ID NO: 51311 - DNA, 579 bp, Acinetobacter baumannii
atggataaatataaagttatcgctgaaaaaataacatattcgttagatggctatattgctgatcacaataatagaaattttggcgatgcagatgggtggctaagacatgtaagaaatggatgggaggaatttattgaagctcatccagacagccttaaccttcatgagtacttacagcaccatcaagcgaaagtggacgagcttaaagccacaataaaaggtaatcatgggcgcattgcagaacttgagcgcttaaaccgtgtgaaggctcaggcaattattgatttgcatcaagaaattacagagcttaaagcatctcatcacggtgaagtgattggtcatgaagttcactttaaaaaaatcaagcaagagcgtgacgagctgcaagccctatacactcaacaaggcataaacatgttgaagctgcaaaagcgggtggatgcggcattaaaagagactcaatttgctttgcagtatgttgaagaggacatgcgcggcaatcatgaatttctaaaaatggcgatgattcgaacctttaaagctttagagcaagtgctcaatggtggtgagcctaaatga

SEQ ID NO: 51312 - DNA, 231 bp, Acinetobacter baumannii
atgaggctaaataaaaaacaacgcgaagagttaaaacagaagtatgacggccattgtgcctattgtggtgagttgcttggcgataagtggcatgcagatcatctagttgcagtagtccgtgacttaactacaggaaagcctgaaaaacctgaaaacgatacatacgaaaacttaatgccagcatgcactgcttgtaatcacaacaagcgttcattgtctttagagtcttag

SEQ ID NO: 51313 - DNA, 270 bp, Acinetobacter baumannii
atgagtgagtttaaaaaaggcgacatcctagttaatcaaacggctgttaattcaggtcttgttgagctgctgtacgaacataagcactactttcatggctttagcaaagactttggaatcataacaattgctaagaagaaacttgataggtatcgcaaagcaactgaagcagaaaagcagatagggctccgcattgactgcgaagtattagacaaaccagaaaaccacatcagcccgctttgtgaggtgaaagatcatgaggctaaataa

SEQ ID NO: 51314 - DNA, 423 bp, Acinetobacter baumannii
atgaaagcaactaaattgattagagataaaggactgcaatacgcgaaggaaatcgtagattcagcacccgataacgcaactgaatggaacgagggttatgagttccaatgtggtcaaagtgtagaaatcagcccagcagatcgtgagaagtattttgtagatttggttgagcttaaacgtctggtggagtctttgaaaatcatcaacgatttaggtggagttgagaagctaacgcctgcattcattacgacagataagcatgttggttacacgcatgttcgcatggtgggaaatgggagattgagctttcttgatgatttttgcgacttcattccagatggttccatttcaattaagcgtgtgatgactgctatccgcgaccacgaatcaatatacggaggcggtgaatctcatgccaactag

SEQ ID NO: 51315 - DNA, 777 bp, Acinetobacter baumannii
atgagcttatggagtgatgctcaaaaagattctggctggcaaaattggtggacagctttctactggccatggtggatgacatgggggccttttgtaggtatgtttattgctcgtatttctcgtggacgtaccattcgagaacttattgcaggcgtacttattgttcctacacttgtaacagctatatggatgtctgtagtaggaggatcagctctaaaagtagaacaagatgctcgtcatgcttatgaaaaacatgctgctgctttagttaaagctggtgagccagctccagaaccatttacaggtgggccaatagtaaaagcgactcaagctgataatactcgtgcgctttttacaatgtttgataatattgatagtggtacactcggtaaagctcttagtatcattacctgcttattactggcgacattccttattacatcaaccgattgtggtacacatgtattatgttatatggacgcagaaggagctacggaaacaccaattaaaattcggatcgtctggggctcacttattgccattctggctggcgtattactttatgctgggggtttaaaagccattcaatctgcgtctattattgctggctttcccatagctatcttcctggcaattatgagtgttactttatttaaaaatttacgtagagaacctcaagcatgtatgttattaccagaacatgcacggcctaagaatgattcattagaggaaagtccccctgaaaaaagttcacttcaagtaattattgaaaagtaa

SEQ ID NO: 51316 - DNA, 2205 bp, Acinetobacter baumannii
atgtttagttcaatggcacatactcaagatcagtttgtcatggtcaatgtaaaagcaatagaacctgcattcccattaagaggaaagcttgagattgaacctatagcgcgtggtatccaaccaggtgaagtatggttgagtcaaagggcagccgatttacttaaagttaaactaggcgatatggtatctattgcagatgcggcatttcgctttagtggcgtgattgtgcgagattcaaatcaagaacttggtttttctggtttttcgcctactgtcattattcatcaagcagatattgctaaaactcatgcaattcaaactggtagtagaatcgattatcgactgttaatgtctggtcagcctgaacaggttcagtcattttcaaggcaatttaagcaacagcatcaacctgcaaatgaacaggaagaaaccatagggttacgtttacgcgatgccagtgaatcaaatagcagattattacgtccgttagaaaacctagatacctttttgcaattggccaatattttaacaattttattgtgtggtatcgccattgctttaacgagtcaaagatatgttcagcaaaaccaagatcacattgctttaatacgttgtttaggtgcgagtaagtttcaaattttatgggcctatatcaggttactttgtgtagtcagtgcaatttcgattgcgatcggtagtctcttaggaataatgatgggctatggcttgcttgagctcatgctacaactgattccacaactagagttaagtttctctgtggttggttttttacttggtcccttaccaattgccatttttaccagtgtaattgtgctacttggattcattttgccaagcatttgggagttgttaaatactcctcccatccgtgttattcgggaacaggcaaaatcccgaaaatcattattctttatgttttttgcaggcatcaccagtcttgttatttttagcttagttttaagtgaaaatttaatgctcagtatttgggtactaacagcgattattctgctttgcattttactttacaccgttgtctggctattgctccgtgctttaaaaaagatgaaaacccgtttgtctttttatattcgttcagcatcgcaaagtgccttacaaattacagcactggctttgggtttaagcctcattaccgtgttaagtgtattaagaacagatttattagagcgttggcaacagcaattaccagagggaacaccaaaccagtttgtttatggtctaccaccatttgatttaaaagcctttgagcaacagttaaagcaaaatggttggcaaagcacaccattatatccaaacattcgtgggcggttactcgcaaagaatgatgtacctttttcagaagaagccataaagcaaaataatgctttacgccgcgaattaaatttaacgcagtcgagtgctttaccaaatgacaatgtcattacaaaaggtcaagcggaatttaatgcagtaggccaagtttcagttgagagtaaaacagcagaaagtctaggaatccagattggtgacaggcttacttttagtctgccagaaggtagcttgcaagctaaagttataaattttcggagcgttgagtgggaaagctttagtcctaattttttctttattttttcacctaaaactttagatgaaaatgctggtagctacttgggcagtttttatgtacctaagcaagatcaacctaaaatgatccatatgattcagcaattctccaatacggtttttattgatgttgatcgaattttagatgaagtaaagcgcttaatgaatgttctagtcaaaatcgtgactgtgcttgcagcgttagttggcttttctggaatacttgttttaattgcttgtttaaatctattaatggatgaacgccgtcgagaagtggctttgttgcgttcatttggtctctctaaaaataaaatgaagcagatgctcagtctggaaattggttttttaggtttgttagcaggcattgttgcctgctgttttgccgaggtaattagcgctattgcaagttataaaatgaatatggctttacagtggcatattgaaatatggttgattttaccacttgctatgatgttgctttgcgctctgattggccgatatagactcggttatctttgtaatttaccgccactacaaagtttacgtgagctgaaccaaatttaa

SEQ ID NO: 51317 - DNA, 1452 bp, Acinetobacter baumannii
atgattgatctcaaaccttccattaacttttggcatgattttaaaagtaaccagcttgccggaatgtggttatttttggggtcaagacgttccttacagatcgtacatccctctattcttcagctcattgtttggggagtattaggtgggtgtaccaactcactttatagttggcttgttgccggtcaaattggcgacttcaactcacaaggtctaataggatacgcactttggccttttattgcgcttattgttggtattttcttatcacagcgtattaatcagccgcgtttaatgttggttccagccttattgtggttggttttagataccaatattttattaatacagtgtttaattcaatatttgggatctaatggttatctaaactttattccggatgctatttataacggtattttacctggtttgtttgtagcactttttgtgtggcaaagtttggcggtcatttgggtgttctcacgtgagcttaagtggccttggtgggagcgggcattggttatggttgcgaccattgcgaccatggtggtttggcaactttcagtaaaagatcagcctatttggaaagtggaagattctccacctacttttgccgaagatgctttttatgcacaaagtaaattacttcatgatgctttagagcaagttcaatatggtgagttagctaaaagtcattggtatttcttgggtgttgcaggcgatagttatcaagacgtttttaaatcggaagtggttcgtattaaagaacaatttgatacgcgttttggtacagtcgggcgttcaatgatgctggtcaataatccggatacccgaactgaaatcccgattgcatctaaaaccagtatagagttggccttacgccgtatgggccagcaaatgaaccgtgatagtgatgtgttatttttatatatgacatcgcacggtgaacaaaaccattttgaaattgaaaatgcacctctagatttggggcaagtcgatccgaaatggttacgtgaaacgctcgataaagcggggatacgttggcgtgtgattgtcatttctgcttgttactcaggaagttttattccggcgttacagtcacctgatactttaattattacggcatctgctgcggataaaacttcgttcggttgtaataacgaagctgattatacttattttggacgagctttctttgatttggcgatgcgagagcagtcttctatgaaagattcgtttaatgctgctaagcaaaccgtaaccaaatgggaagtagctcaaggtgtagaaccttcagagccacaatggatgattggtaagaatatggaacttatgctacctcagttggaaaaatatctttttcctcaaccaaatacaggtagtgtaaatattgctcagacacaaacagaggctaaaaacgatgcaactcctgcaaaaaaaccgctgctttga

SEQ ID NO: 51318 - DNA, 942 bp, Acinetobacter baumannii
atgaattttaagcctttggcatatatccttcttgcgacctcaagtttaacagcgtgtaccatggcacctgtaaaagaacaaaaaattgaaccgtttgtttttaaggaaccagagcttacacctccattttatgcattaaacccatttaattatgatgctccgcctgcatttgaagttgctttaaaagaagctgctgcacagcctgtaaccaaaatggttgtaactcgtcaggacgatccaaccaaaacacttacattagatacgaataaattgatcgtacctacagtcaacaactcacaacgttcaatgaagtacgcagttttagcgggcaataatgaaattgatgtaactgaaattgatgacttcttacaacttgttgaaggtaaagcgcgtcactatccgcctcgttttactgaccgtcaagaacgtaaaggctttgaaagcaaacttaaggaagtcactcagcgcttagatactttagctgctaatccagatgcttcatttgatattcttattcgtgcttttaaagcaagtgtacttgcccgtaaccttgatttaggtactgctcataccactaagtctttagaatatgcacaaagacttttaaaaattaatccagatgatgctgaagcgaatttctggtttggttttggcttatctgaaggtggtggtcaacgtgaggctattccgtatttagataaagctattaaaggtaatgttcaggaagcatatttagccgctgcaaataactatattgcaatggaacaaaagaaaaatgcgattcagactctaaaaaattacaaggttaaataccctgatgaagctgaagtagcagaccgtttaattcaagaaattgaaaaacaaggtcgctggaatgtatggcaagttttaacaaaccctgctatgtcttctgctaccccaagtgcagctacaaaaaagtaa

SEQ ID NO: 51319 - DNA, 1254 bp, Acinetobacter baumannii
atgaaaaaaatagatattaccggaattggtattgggccattcaacttaggtttagctgctcttttgtctcatcatcccgaaatcaaaagcgtatttttagaacgcaaaccagaatttcgatggcatgaaggactgctattgcaaggtacgacattacaagttcctttctttgccgacttggttactatggccaatccttgccatcccttaggctatattaattatttacatcaacatgatcgcttacatcagttttattattacgacagttttttaattccacgccgtgaatatgaccattattgccgttgggcttcaaaacaattacccgattgtcgatttggagaaaacgtaagccatgtggaatatgacgccaagctggataaatttattatagaaagtgaatcagcctcgggcgaaaaacaaaaatatataagccaaaatctggcgattggtattggaactaaacctcgaattcctaaatggctggaaacatgcaaacaccctttggtaaaacattcagcggagtttgcaaaaattcaggaacaactcaagcaatgtaaacaggtcacggttattggctcgggccagagtgcagcagaatgtgtacttgctttatttaattcacttacaccagaacaagtaaaagcaggtgcatctattcgttggatcacacgttctgccggctttcacccaatggaatattctaaacttggacaagagtgctttacccctgcatatatgcaatatttccaaagcctgcctagagataaacgccgcgatattgctgctagtcagggcctgatctataaagggattagcttctcaaccattggcgatatatatgatgtgctttatgagcgttcagtggctggtgaaaaatccggtttaagcctatacacaagctgtgaggttgaatcggttaaagaacttgaatcgggttctctgcgtttaacttgtttgcatacccaactcgatcaacgttgcgaattagaaactgatgcccttgtcgcagctacaggctatgttcatgattggcctgaatggttccaaaatatgaagggttctattttagctgttgatgataaaaatgattgtattgttcaagaagactttacggctttacgttgtgatcagggacaaggtcgaattttcattcaaaatgccgagatttttcagcaaggcgttggttctcctgacttaggaatcggacctaaacagtcttctttccagcactatggcttaccagaataa

SEQ ID NO: 51320 - DNA, 366 bp, Acinetobacter baumannii
  misc_feature (350)..(359): n is a, c, g, or t
atggctatttcaaaaatttctacttatctcatgcccgaaagagagagttatccaaataataaaacagactggcaattagatccttctcgagctgttttattaattcatgatatgcagcgctactttttaaatttttacgatgctgaaagtgaattaattaaaacggttgttaatcatttagttcaattaagaacttgggcacatcagaacaatgttcctgttgtctatacagcacagccctatgagcagccagcggcagatcgagcattactgaatgcgatgtggggaccgggtttgccagcctcaacaatcgatcagcaaaaaattattgatcaactttctcctgctgnnnnnnnnnngtcttaa

SEQ ID NO: 51321 - DNA, 273 bp, Acinetobacter baumannii
atgtttgatgatgtcggtttggatattacaagacatgctttatctgaacaccatgaaatggatgagttggtcgagcaacttgaaaaaacggatatgagtagcccaagttggttggcaaccgctaaacagttgagcgaaaaagtccatcaccacttaaaagaagaagagcataagttttttcagcaagccggtaaaattcttaaagacagtgaaaaagaaacgctaggcaataaatatttaaaggaatataaaaagtataaaaaacagcaataa

SEQ ID NO: 51322 - DNA, 339 bp, Acinetobacter baumannii
atggaagctcaagcaaatatcggtttagaagtagcagagaaatttgttgcttactctgataagggtatgacactttctgcggtaaacttcccagaaatcgcgttgccattgacagcgggtcaacaccgtttactacacatccacaaaaacgtaccgggtgtattgtctaaaatcaacaacttgtttgctgaacaaggcatcaacatttctggtcagtcacttatgactaaaggcgacatcggttaccttgtaatggacgtagatgcttctgcttctcaagaagctttagatatgttgcatgaagttgaaggcacaattcgcgtacgcgtattgttctaa

SEQ ID NO: 51323 - DNA, 765 bp, Acinetobacter baumannii
  misc_feature (682)..(691): n is a, c, g, or t
atgagccaacatctttcactacctaaagataaaatccgtttccttttgttagaaggcgttcaccaaaacgcagtcgatactttaaacgctgcgggttataccaacattgactatcgcaaaactgctcttgaaggcgaagcgcttaaagaagcaattaaagatgctcactttattggtattcgttcgcgtacccaattgactgaagaagttttcgaagctgcaaataaattgatcgcagtaggttgtttctgtatcggaacaaaccaagtagatcttaaagcagcgatggcacgtggtattcctgtatttaacgcaccatattcaaatacgcgttcggttgcagagctcgtacttgctgaaactattcttcttcttcgccgtgttcctgaaaagtcagcggcttgtcatcgtggtggttgggacaaatctgctgtgggttcttttgaaactcgtggcaaaactttaggtattgtgggttacggttccatcggttctcaactttcagttcttgctgaaagtatgggtatgcatgtcatttattatgatgcagtcactaaattaccaatgggtaatgctcgccaagttggttctttagatgaacttttagcaactgctgatgttgtgactttgcatgtaccggatgttccgtctacacgtaacttcttcactaaagaacaatttnnnnnnnnnngcaaaaatgaaagaaggcgcaatcttcttaaatgctgcacgtggtacatgtgtagtaatcgaagatttagctga

SEQ ID NO: 51324 - DNA, 1410 bp, Acinetobacter baumannii
atgaatgctccagtcgctttaacacctgagttactcacccaattaacagcaatcgtcggtgaaaaccgtattaaaaccgatgctgatagtctcgaaaactggggtaaagatcataccaagcattttaatccgaacccatcggtcatcgtttttccgtcaacgactgaacaagttcaggaagttgtgaagcttgcaaaccagtttaatatcgcaattacaccgtcaggtgggcgtacaggactttctgctggtgctgtagcaaccaatggtgaaattgtcattagcatggacaaaatgaaccagattcttgagttcttcccggcagaccgtatggttcgtgtacaagctggtgttgtgactgagcaattgcaaaattatgcagaagagcagggtatgtattatccggttgactttgcgtcagcaggttctagtcagattggcggtaatatcggtaccaacgctggtggtattaaagttattaaatatggcatgacgcgtaactgggtactcggtttaactgtagtgacaggtaaaggcgacattttacgtttaaacaaaggcatgattaaaaatgcaactggatatgcattacagcatttgtttattggtggtgaaggtacattaggtttagtgactgaagcagaaattaaacttgagcgtcaaccacaaaacctacaagttttagttttaggtgtgcctgattttgatgcagtaatgcctgtgttacatgctttccaaaaagatatcgacttaactgcatttgagttctttggtgagcttgcaatgcaaaaagtactcgaccgtggtcatgttcaacgtccatttgaaactcaatgtccattctatgtattgcttgagtttgaagcgccatacgaaccgattatcgacaaagcaatggagattttcgagcactgtatggaacaaggttgggtacttgatggtgtaatgagccagagccttgaccaagtagagagcttgtggcgtttacgcgaagatatttctgaatcaatcgcgccgtttattccatacaaaaacgatatttcagtattaattactcacgtacctgcatttattcgtgaaattgatgcgattgttcaagaaaactatcctgactttgaaatttgctggttcggccatatcggcgacggtaacttacacttaaatattttaaaacctgaaaacttgaccaaagatgagttctttgcgaagtgtcaagttgtgaataaatatgtgtttgataccgttaaaaaatatgatggttcaatctctgccgagcatggcgtaggtatgacgaaaaagccatatttggaatattcgcgctcagctgaagaaatcgaatatatgaaagctttgaaaaaagtatttgacccgaaaggtattatgaatccgggtaaattattcgatctttaa

SEQ ID NO: 51325 - DNA, 315 bp, Acinetobacter baumannii
atgcttactattatcgcggaaattcgtactcaatcgggtggacagcaccgccaaaacgtattgaatgcatttcaaaaaatcattccaactgttttagcagaagatggttgtcatggttatgaacctttggttgaccacatttcaaatgcgagcttccaaaacaaagaccctgacattattgtgatgttagaaaaatgggaaagtgtggctcatcttgaagcacacttagctacacctcatatgcaagcgcatcatgaagcagtcaaagatgatgtagttgacgtcaaaattaaaattctagaaagcggcgtataa

SEQ ID NO: 51326 - DNA, 2295 bp, Acinetobacter baumannii
atgtcaaacatgcaactcgacactctaagacgcattgtccaagagattaatgcgtccgtgagtttgcatgaatcgttagacattatggtcaatcaggttgctgaggccatgaaagtggatgtttgctctatttatttactcgatgaacgcaatcaacgttatgtattgatggcctcaaaaggcttaaatccagaatctgttgggcatgtttcattgcagttaggtgaaggcttggtgggtctggttgggcaacgtgaagaaattgttaaccttgacaatgcgccaaagcacgaacgctttttgtatttacctgaaacgggcgaagaaatttataactcattccttggcgtacccgtcatgtatcgccgtaaggttatgggtgttttagttgtccaaaatcgacttcctcaagattttagtgaagcggccgaatcatttttagtcaccttatgtgcacagctctcaggtgttattgcacatgcgcatgcggttggaaatattgatgtatttcgcaagccaagcaatgggcctgcctataagacctttcaaggcgtttccggtgcaggtggggtggctttaggtcgcgctattattttatatccgcctgccgacttaggttcagtacctgaccgcgaagcagaagatatcagcgatgaactccgcattttagatcaagctatttcatcggtacgttcagagattcgttctttagatgaaaaaatgcatgactcgctcatggcagaagaacgggctttgtttagcgtattcttaagaatgctagatgaaaatgccttacctgcagaaattaaagaactgatccgtgatgggcattgggcacaaggtgcggtgcgccgtgtaattgaaaaacacactgccctatttgcacaaatggaggacgattatcttcgtgaacgcgtttctgaccttaaagacttagggcgacgtattctagcgtacttacaagaagaagattcgagccaccgtgaacttagcccagacagtattttaattggtgaagaaattagtaccgctgcgctagtagaattaccagtagataatatcgcagcgattgtgacgtcagaaggcgcagccaattcgcatatggtgattgttgcccgtgcattagggattccaacggtggtcggcgtaaccgaactgcctgtaaatacgcttgatgatgcagaaatgattgtggatgcctatcagggccgtgtttttgtaaaccctccacgtcgtttacgtcaacgttataaagaaattcaaaaagaagacgagcaaatcgcaaaagatctcaaacaatatgagaccaaagaagcgattacaccagacggtgtctctgttcaactgtttgtgaacacgggtcttatgattgatgtagtccgcggtgtacaacgtggcgctcaaggtgtgggtttgtaccgtagtgaaattccattcatgttacgggaacgtttcccgggtgaagaagaacaacgtgccatctatcgccaacaattgagtcactttgccaataagccggtagtcatgcgtaccctcgatattggtgccgataaagacttaccttacttcagtattgaagaagagaactcggcattagggtggcgcggtattcgtttcacgcttgaccatccggagattttctcagcacaaatccgggcaatgcttaaagccagtattggtttaaataatttgcatatcctattgccaatggtaacgacagtaagtgaagtcgaagaagtactttatttacttgagcgtgactggattgcagtacaagaagaagaacaagttaaaattaccaaaccaaaaatcgggattatggttgaggtaccgagtgtactactacaaattgatgaattcgccgaacttgtcgatttcttctcggttggttcaaatgacttaactcaatacttacttgctgtggaccgtaataatccgcatgtcgcaaacgtctattcacacttccatccgtctattttgcgggctttaactcgactcgtgaaggaatgccataaataccaaaaaccagtaagtatttgtggtgagatggcgggtgatccgttatcggcaatcttactgatggccatgggcttcaataccctttcgatgagttcaagtaacatcttgcgtgtccgaaaagcaatttgccatgtcccaatgtcagatgcccaaaagctgcttgatgatgtcatgaaaatgaataatccgcttattgtaaaaagctggcttgagtactactttaaaactcacggtctagccgatatggttaaatctaaccgccttgtaagcgtataa

SEQ ID NO: 51327 - DNA, 891 bp, Acinetobacter baumannii
atggatcgattagactgtatttccacttttgtaagtgtcgtagaacatgggaattttagtagcgcagctagagcactcgatatttctcgtgatttggtagccaaacgtgtttgctacctcgaaaatgatttaaaaacaacgctattaaatcgaacaaccagacaaatgaatctgaccagttgtggggaaaaattttaccaacattgcaaggttatattgagtgaatttgaatgggcaacttacgagattagctataaccagcaatatcctgaaggcgaactcaagctcaatacgcccatgtcttttagcaacattttccttcaacatatcatttcagactttattgagaaatatcccagtattaaaattgatttgtttatgacagatcagctattagatgtgaatcaacacaaatttgatctgaccatacgcttagatggatctgcgccaagtttggcaaatagtaaaattttaaatacctatcaacgttatttatatgcaacacctgaatatttcaatcaacatggattacctaattctttagaagaacttaaagaacataagtttctaatttactatcaagatagccgacataaaaaattgatttttcaaaaagatcagaaagaagtgtcttttaattgtttccctgtgatgacgtgtaataatggtgaactattattggatatgtgtttgaaagatcacggtattgtttttcttccagagtttattgcagaaccttattacaaagaaggtaagttgcagaaatgtttggaagactacaccagtcagccacttcacttatatgtcacatggccaaaccgtaagattttatcgaaaaaagtaaaactatttattgattttttaacacatcaaatcattcccataaaataa

SEQ ID NO: 51328 - DNA, 1170 bp, Acinetobacter baumannii
ttgaaagctgcgaactgtgtaattcaaaataacccgcatatttttgataaaaaattgtggagtgataaagggcatggtgaggtcatcagaattattacctgtcgtaatgatgatgatgaagcagaacgtgtagtcaaagacttactgactcacaaacttatgaatggtaagaactggaaagattacgctgtattgtaccgtggtaacttccaggcgcgtgtattggaaacacaacttcgccaaatgcagattccgtacaaactctctggcggtacatcgttcttcgctcgtgcagaaattaaagatgtaatgagttatttacgtcttattattaacccagaagatgacagtgctttcttacgtattattaatacgcctaaacgtgcgattggcccagttactcttgagaagttaggcctatttgcacaagaaaataatttgtctttacttggtgcttcttctgaccagcgcttaagtatggtacttcctaaaaaggcagaaactcaattgcatgagtttgctgactttatctcgacgtttacacgtgagttgttggaagatgatgagcctgtgcctaaagttcgtcaaatgatgaatgaagcgggttatatcgactatattcgtgagcaatccgcaacgcctgctcaagagaaaagtaagctcgataatatcgagaacttgtttagcagtattcaaaacttaattaatcgtgctgaagatgttgatgaaaagaacattgaaagtgtgattcgaaaactagtcttgcttgatatgttagagcaacagcaagaggaagaagacactgataaagtgaacttacttactctacatgccgctaaaggtttggaattcccatatgtctatattatgggtcttgaagaagagctgttgccgcataagaactcaattgctgctgaaactattgaagaagaacgccgtcttatgtacgtgggaattacccgtgcacgtcaaggcttaactttgactttggcagagcagcgtaaaaatggtggtcaaatgaaacagatgaccccaagccgtttcctcgatgagcttccgcaagatgagctcgaatggttagggcgtaaaaagaaaattgcagcaaatgttgatcctaaagaacaggctcaacaatatttggcaaatttaaaagctttattaaagcgttaa

SEQ ID NO: 51329 - DNA, 546 bp, Acinetobacter baumannii
atggcaaaaaacatccgtccttatttagaccatcacccacaaattgatccaagctgttacattgatgaaatgtccgtggttgtaggtgatgttaaattggccgaaaatgtttcggtgtggccttttgcagtcattcgcggagatgtaaacagtattcaaattggcaaaaacagtaatgtacaagaccactgtatgctacatgtcagccataaaaatgatacaaaacctaatggttcacctcttattattggtgaagatgtgacagtaggccatcatgttaccttacatggctgtactattggtaaccgcgtactagtcggaatcaatacggttattttagatgatgttgttattgaagatgatgtgatgattggtgcgggaagcttagttccgcctcgtaaagtcttaaaaagtggttatctttatgttggaagccccgtacaacaagtacgtcctctaaccgaaaaagaattggcatttttaccttactcagcaagacattatgtaaaagtgcaaaataaccataaagataatcaaataaattaa

SEQ ID NO: 51330 - DNA, 321 bp, Acinetobacter baumannii
  misc_feature (306)..(315): n is a, c, g, or t
atgtttgtgcggttattttacaccttacgaaaatatggtgttccagttacgactcgtgaactgattgacttaaatcgtgcagtaagcgaagggctagtttttgccgatcaagaagagttctatcaacttgctaaaaccattttagttaaagatgaacgtttttttgataagttcgatcgtgccatgaaagattactttgatggcatagaaacctttgatattgatgagttactcaaacaagttcataaattaccaaaagactggttcgacttagaacttctagaaaagcatttaacaccagagcannnnnnnnnnctttag

SEQ ID NO: 51331 - DNA, 1638 bp, Acinetobacter baumannii
atgacccattttatttttgtcactggtggtgtggtttcatcgctaggtaaaggtatttctgctgcttctgttgctgcacttttggaagctcgtggcttaaaagtcacaatggttaaaatggatccttatattaatgtcgatccagggacaatgagcccattccagcatggtgaagtttttgttaccgaagatggtgcagaaacagatctggatctgggttattacgaacgtttcttacgtcgcgcgaaaatgaccaaactaaacaacttcactagtggtcgtgtatatcaagacgttttaaataaagagcgtcgtggtgattacttaggtggtacagttcaggttattcctcatattaccgacaatattaaagaacgtgtactccgcgcgggcgaaggctatgatgttgctatcgtagagatcggtggtaccgtaggtgatatcgaatctttaccgtttatggagtcggttcgtcagttaatggttgagctgggccataaacgtaccatgcttatgcatttaactttgttgccatatattaagtcagcagcggagttaaaaacaaaaccaactcagcactctgtaaaagagttactttcaatcggtattcagccagatattcttatctgtcgtactgagtatgatgttgatgctgacactaaacgtaagatcgcgttattcacgaacgtagaagctcgtgcggttgtcgtgtgtaaagatgcgaaaacgatctatcaaattccacgtggcttctatgagcaaaatgtagatgacctgatttgtgaacgttttggttttactgatttaccggaagctgacttaactgattgggataatgttgtagaagcattacttaacccagaatacacagtacgtgtagcaatggtcggtaagtatgttgaattaccggatgcttataaatctgtaaacgaagcattgttacatgctggtattaaaaatcgcgtaaaagtacaaattgattatgtcaatgctgaagagcttgaaagtcaagatgtttctattttgaaaacagctgatgcgattttagttcctggtggttttggtgagcgtggtactgaaggcaaaatgaaagctattcaatacgcacgtgaaaatagtattcctttcttgggaatctgtttgggtatgcagttggctgttattgaatatgctcgccatgttgcaggtatgccagaagcttcttctacagaatttaaccgttctacaaaatatccattgattggtttaattaccgaatggttagatgagcgcggtgaattacaacagcgtagccttgagtctgacttaggcggaacaatgcgtttaggtgcacaaaaatcagaattggttgaaggcacaaaaactcgtgaagtttacggaaaagctgagattaccgaacgtcatcgtcaccgttatgaaatgaataatcgtttcattgaagcgattgaacaagcgggcatgaagatttctggttattcttcagcgcaacatttagttgaaactgtagaaattcctgaacatccttggtttattgctgtacaattccacccggaatttacaagttcaccacgtgatggacatccattatttgctagttttattgacgctgcaaaaacacagcatcaaaaaagtaagtaa

SEQ ID NO: 51332 - DNA, 5676 bp, Acinetobacter baumannii; identical to SEQ ID NO: 50777

SEQ ID NO: 51333 - DNA, 894 bp, Acinetobacter baumannii
atgtcttatgagttaagaaataagggtagaacatttgttctatctttattacctcaggggcgtcggcagctaaatcaagttagacaatttgctcaaacaatgaatcaggctgcggctcctgaaaaactacaatcacattggcatttacagcaatggtggattgtaatcgcaggattttttttatttgccagtattttaatttttgcttttactcgcccaatcagttcaacacgaattgaagccgagtatcttaaaaaaactgatccgcaaatttatgcattattaaatggagaaatattatcgcctccacctgaagtagatgaaagcctgattgaagctgcaattgttgaagcaactcagttagagcagcaatatgcttctcaagaaagtggtgttataaattcttcaccaattgataatacaagttttgatggccgtgcgattttagatacgagtttagtcaaccgtaagtgggataaaatgaacccacgctataagcagcgtttgcttatggtctttaaaattatgaaagaacaatatggttatgaacttgttttgcttgaaggttatcgtagtccagcacgtcaaaatatgttggcaggcaatccgaatacaaccagagcaaaagggtatcaaagttatcatcaatttggtttagcggcagatgtggcctttaagcgaaacggtaaagttgttatttctgaacgtgacccatgggctatgcagggttaccgcctatatgggcaagttgctgagtctgtcgggcttacatggggtggtcgctggaaatctatacaagattatggccatacagaatatcgaatgccaggcttgaagaaaactcaagaaatggcggaaaagctgattgccgaaagcttaaatgacatcagttaa

SEQ ID NO: 51334 - DNA, 687 bp, Acinetobacter baumannii; identical to SEQ ID NO: 48635

SEQ ID NO: 51335 - DNA, 3303 bp, Acinetobacter baumannii
ttggaaaaaatagggctaaatgctcagaaacgtgctattcacgtacaattttctaatgaactactcaatcatcaagtattcttacaacgtatagaaggccaacatcagctaaatggtggcctaatggcagaattgatctgcctttcaaccaatgcccaaattgcattgaagcaatttattggtgttcaagtcgctgttgatcaggtcactgattcggggcaattgttccgaactacaggtattgtgactgaggccagttatggacaaagtgatggcgctttaacgctttataagctgactatagaagatgcgacaaatttatggcacaaacgccgtaatagtcgtgtttttatgaataaaagtatcgtagaaattaccgaagttctatttaaagaatggcaagaaaaaagtccactgtttgctgcgagtttaagtcttgatttgggtgggttaagtcaaaactatgatattcgtccgttcactatgcagcacaatgaggctgactatgactttctcacacgtttgtggcgaagtgagggggttagttggctcattgatgaatcagagctttttgtccctcattttactgcaccaatacaagctcaaaaactaagattaattgatgacaataaccaataccaagctttagcgcgtcgtagtattcgctatcacagaagtagcgcaaccgaatatcaagatagtattacaggctttgttgcagtgcgaagtctgcaaccgactgccgtacatgtacagcgttggcagcccgatgcgttagcgcaagaagagggtaatggttcagttgttactacccatacacactcagataactttgattcggccactttaagtcttgagcaagcatggcacgtaagccccgcctggatgcaagatttaaaaggggaagatcaggcaaccgcttcaagcagtagccaactagaaaaattaaatcagcacttcaccgacatgcatgcgagccgggccaaatactttaaagcctacagtagtgtgcgcgatacccaagtcggctattggtttaatttaagagagcaccctgaaattgatcagcatgaaggggcagatcaagagttcctaattattgctaaaaacttctataaccaaaataacttacctaaagatttacaacagcaagttagccagttattaacccaaagtcgttgggatcaacatgggtatgatgatattgagcgtcagggtaatgagctgacattaatacgtcgtcaaattaaaactgcccctgaatataatccagaacagcatcgaccaattgcctatccacaaagagcgaaagtcgtgggacctgagggagaaactattcatgtcgatgaatggggacgtattaaagtacgttttctatttactcgtagtgatgatcatggccatgacggtggtgcaggtagcaatgacaatgataccgactcggcttgggtggatgtactgactccttgggcaggagaaggttatggggcacgtttcttaccacgtattggtgaagtggttgtcattgacttctttgatggcaatatcgaccgtccatttgtgactgggcgcatccacgaagcacagcgttcgccaactaaattcgatgtaaaagggcagcttcctgatactaaaaagctaagtggcatacgcagtcaggaaatcaatggaagtggcttcaaccaattacgctttgatgacacaacagggcagatcagtactcaactccaaagtagccatgcggcaacacagttgaatttaggtaatttaagccatcctaaagaacaagcgacaagccaaggccgtggtgaaggctttgagcttagaacagacgcttggggagctgtgcgggcgggtaaaggcatgctcattagtacctatgcacaagagcaagcgattgcagaccatctagaggccgcacaagcacaatccttactttcacaaggttatgaaagcatgaaaatgctcagtgaagttgcagccaagcaacaaactgatgctttgaatgtaattaatcgcttacccaaattcatccagtctcttgagttaaaaaccacagggcaggcattaaatagtacggtaaacctattcaaagaaggaattaataacgatcctatccatgccctaaaagactgcggtggctttattcaagacattggtgcactagggggaaatgcaaaaggcgttgtagatgaatttaattctttctttagcgatgctaaagatgcggtagaaaatttaaaagcatttatcgaaaacgttgaagaacatggccctgatattgttaaaggaaaactcgcaagtattaaagaccgaattcataaaaatccatttgaaagtattcaagaggtcgggaaagtcttaacaaatgtcgagactaaagactttgatttgatgagtacgtgtggaacttttagtaaaggcagtaaattggaagtatcaccttctaaagcattgagttctttacaaggctttatggaaggttatacccaaggtttagaaagcagttccgatactcaacaacaagagcaaggcaaaatcttcagacaagcccttatgttgttagcatcgccaaatggtattgctttgacgacgcctgaaaatattattctacaagcttcgcaagatattgccgaaagtgccagcggttcaattaatttgagtgctcagaaaaatattattgggcatgcacaagacaaaattagtttgtttgctgcgcaaaagggtttgcgtgcttatgccgcgaaaggaaagctcgaactacaagcacaagatgatgctattgaagcaattgcgaagaaggtgattaagcttatttctactgaagataaaatcgagcttacgagtccaaaagaaattgtattaacggcaggtggttcacagctcaaaattaatgccaatggcgtattttcgacaacaggtggtaagtttgaaagtaaagctgggcagcatttgtttacggggggagccaaggtttcttatgaggttcctgagttaccaaaaaatggaccttatgctgttgattttttatttgctagtttagctggaaatggtatagaaaatgcaaaaatacagctgtatgaaccagacaaaaaagaaattatttgggagggtaaaacagatttaagaggaaaaagtaatttatctctccagaatgagtcaaaacgatatgaagctctgattggctttgatgattggtcaagtatatttgatgatgaagatgattatgaagaagaacatgaagaagaatttgaaataggtgagcatggtatgcaagctgaagaaaataacttagaagaatag

SEQ ID NO: 51336 - DNA, 768 bp, Acinetobacter baumannii
atgaaacttaaaacagtaacaatcgacggtaaagtttatgcggaagtagacggtgataagccgatctatattcatgatgacggcaaagaaatgccacatgatgcaccacactcggtagcaacaattgcacgcttaaacaatgaagctaaaacacatcgtgaagccaaagaagcagccgaaaaagcattaaaagcttttgaaggaattgaagacccagcggcagctaaaaaggcattacaaacaatccaaaatctcgatgataaaaagctggtggatgccggtgaagttgagaaagttaaagctgaagctatcaaagcagttgaggaaaaatatgccccgattgttgcgcaacgtgatgctctagaagcctctttacataaagaacttatcggcggtggttttgctcgttctaagtacattcaagacaacattgcagtacctgtggacatggttcaggcaacctttggtcatcacttcaaaatcgaagaaggcaaggtggttgcatatgatccgaacggcgaaaagatttattcacgtgtccgcccgggtgaacttgcaaatgttgatgaagctttagagtcattggttggtggataccagcataaagacttaattcttaaaggtggtaaaggaactggtggcggttttcaaggtgggggcaaaggtggagcacctactggaatgaaacgcagtgaaatgtctgtttctcagaaagcagattacatcaaagaacatggcaatgatgccttcctaaaactaccgaactaa

SEQ ID NO: 51337 - DNA, 459 bp, Acinetobacter baumannii
atgttagatcaaaagaatgctcagctcaggctccttggtcatgatgatctagaaatggtactgcaatggcgcaaccatgatgacattcgtaaatggatggttaactcggatattattactttaagtgaccatttcgcttggtttgagcggaacaagaatagaactgatcgattattttatatttttgaatatcagcagcaaccacaggggtacatctcctttgttatgatcccaaatagtacagcttatgaatggggtttctatataaaacccgatgctgaaaaaggaatgggacagttgctgggtaacattgcactgaatcatgcatttaataaacttggtttagaaaaagtttttggtcaggttttatcatttaatgataagtctttaaattttcatagaaaaatgggttttgtccaagaaggtttgttgcgaacagaatggctagagggtaaatga

SEQ ID NO: 51338 - DNA, 2940 bp, Acinetobacter baumannii
atgactgtagatgtcactgaaaccatttctcaaactgttcaccctgcgtttcagttgctacgtcagcaccatgttgaagcattagatattttagtgtctgaatataagcataaagtcacaggtgcggtgcattatcacttggcaactgattatgatgaaaatgtatttcttgttgcgttcagaacacaacctatggactctaaaggaactgcacatattttagagcatactgctttatgtggctctgaaaagtttcctgttcgtgatccattcttcttaatgatacgccgttcattaaatacttttatgaacgcgtttacagcagcagattggactgcatatccatttgcaactcaaaataagaaagatttccaaaacttattatctgtttatcttgatgctgctttctcggcaaatttgaatcctctggattttgctcaggaaggtatccgtattgaacttgaaaatggtcagcctgtatataaaggcgtagtcttcaatgaaatgaaaggtgcaatgagtgcgccttctgatcagctttatcaccagttggctcatcatctattccctgaaaccacttatcactacaactcaggcggcgatccaaaagacattcctgacttaacgtatgaacagttagttgaattttataaaacccattatcatccgagtaatgcggtatttatgacttttggtaaccaaaccgcctatgaattacaagagcaatttgaaaaactggctctacataagttcactgctggtacaactttatattcgaaaccagaaaaacgcttaacggcacctgttgaagttactgaaacttatgctgttgatggcgatgagttaaaagacaaaacttaccatgtattgtcgtggttattacctcaggcgagtgacattaaacttcgtctgggtatgcgattagtagaaggcgttttactcgaaaactcagcttcaccacttcgtcattatttagaaacttgtggctatgctcagtcgactggtcctttaatgggggtagacgatagtaactttgaaatgacgttctattgtggtgttcaaggttcaaatccagagcatgcagagagctttagagagggcgttttaaacgttttacgtgaagtagctgcaaaaccaattgactcatcgttagttgatgcaattttgcatcaaatcgagttacaccaacgtgaaattaatggtgatggtacaccatatggcttaagcctaattttaaatgggttaagtggtgcgattcaccataacgatccgattcaaatttgggatgttgatagtgccattgctcaggtcaaagaagaactccaagacccaatgtggttatctaacctgattcaaacccatttattggataatccgcaccgcgtgcaaatgactttagtaccggatgcaaccaagtcagcgaaagagcaagaagctgaaaaagcacgtttagctgcaattggtgaaaagctaactgaagaagataaagcagagatcatcgctaaaaccaaggcattgcaagaacgtcaagatacaccagataatcttgaactgttgccaaaagtaggtctagaagacgtaccagctgacttgcatattgtacaaggtcaattgcgtgaaattatttgtaatcgaatggatacgccgttgaatttgtatcatgcaggaaccaatggtatttactatcaacaagtcctcattcagattcctgatgatgtggttaaatcaccatacttcaatttgctctctattttaatgggtgaagttggtgcaggtgagtatgactaccttgaactccagaacttacaaacagctgtaagtggtggtttgggaatgggtgcttcgttacgcagtaaggttgatgataaagacaaaattagtgcttggttaactttaacaactaaatctttaactcagaagttcgatgcgattcatttattaaaattagcatttgaacaacttcgttttgatgaaaaagagcgaatcattgagttattgcagcaacgtaagacacgctggcagtctcgtttatctggtgctggtcatagttatgcaatgcagattgcttctcgtaatatgagtgcgttagctcaacgcgactatcaaaacactggcttaggtgcgttgaactggttaggcgagcttgttactaaaattacccaagatgatgctgcttatgatgcgcttattgctgaattgaagcatattcatacaaaattattgcaagcacctaaacagttcctgctcgtatgtgaagagcatcagtcagagcgtttagttgaagaaattcaaaatgtttgggataaattaaacgttgatacagcagcaactgagttaacccaagttgagcaagaaaatgataatgaacatgaagcttggttaattcaaaccaatgttcagttctgtgcctctgcatatcaagctgtggaagtatctcatccagatgcggcacctctaatggtattggcagcttacttgcgtaatggtttcttgcacagtgctatccgtgaaaaaggtggtgcttatggtgggggggctagttatgacggaaatgcatgttcattccgtttctttagttaccgtgacccacgcttagctgagacttttaaagattttgaagcgagcgtgcaatggttgttaaacacagagcaacaacctcatcagcttgaagaagcaattcttggtctggtggcaagtatggacaaacctggttcaccagcaggtgaagcaataacagcgtgttatgcattgttgcatgcaagaactccgactttccgtcgtacattacgtgaaagattattgcatgtaactttagaagatttacaacgtgttgcgcgtcaatatttaattgaacaaacacctgtaaaagctgtcgttgcaccttttgcaaaacgtgatgaattgcaacaactgggctttacgatcaaacaagttaattaa

SEQ ID NO: 51339 - DNA, 978 bp, Acinetobacter baumannii
atgaatacacaacgtgaacaattgatacatacatggcttacatctgttcttgaaaatgatcaatttcagatcgcttatttagcaggggatgcaagctttcgacgttatgctcgcatccagttacaaaataaaacgtatatgcttatggatgcacctcctgaaaaagaagactgtgttccgtttgtgaccattgacgagttttttgcagggcatggggttcgggtacctcagatcgttgcaaaagatttaaatcaaggttttttattgttagaagactttggtgatgtgctgctgtctacattgttaaacgatgaaacagttgatcaatattatgaacagagttttaaacagcttattcatttgcaatcgattaatggggctgaacatttcccggcttattcttatgaaaagcttttatcggaaatgcagttgttaacagattggatgttaccgtcactcgatatccatccaacagctgagcaaaagaaaactattgatgatgcatttgatttcttggctcaggcagcattagctcaaccgcaagttattgtacatcgtgattttcatagccgtaatttaatgaaaattgctaatgaagaagaattgggagtaattgacttccaagacgcggttattggtgctgatacatatgatttaatctcgattacacgtgatgcatacgtgcagtggaatgctgagcgtgtttatcaatggtttaaagtgttctatgagcttttaccagcatctgctaaacaaaaccgaagctttgaccaatttaaacgtgatgctgatttaatggcaattcaacgccatatcaaaattttaggtatttttgtccgtttgtttgagcgagatggtaagtctggttatttgaaggatttaccacgagtcatgtggtatttacttgaagagagccgtggctatcatgagcttgatgacttcatggcatttattcacagttcggtgatgctatggtga

SEQ ID NO: 51340 - DNA, 783 bp, Acinetobacter baumannii
atgctggaaaaatttaatcaatatcgccaaacctggactttacctttaaatcgccataaggctaacaatcaaacacaattccgctttgaatgggttgataatttaaaagaattacaagatgtacaacggtttcgtgcacaacaatttagtaaacaattcggcattcagtttgaagataatttagatcaagatatttacgattttggctgtgagcatgctgtattaagagaaaaatggacaggagagatagttgcttatacacgacttaagctcttccaaggccatgaaatagggcaaagttacagtgctaatgagtttgatattgtcccacacttgtcacatttgccaaatgtattagagatagggcgtacttgtgtgcatccacgttttcgtaatggtaaggcactttcaacattatggctgaatcttgcacctaaagtattgtggtcaatgcgcgctaaatatttgatgggatgtgtcagtattcatctgcaagataatttggctagagcgtactatacacaccgtcaaattcagcaattaccggacactaaaaccatcgatattcgttctaaaaaaatctatgaacctgaatatccggagtttagtttccctcaagacgagcggatgccgaaactattccaaatgtatttgagtatgcagtctaaattatccaaagatgccttctttgatgctgaatttaactgtctcgattactttgtatttttagaagtgaataaaattgccacttcgtttgtaatgaacaaaatggctcagcgataa

SEQ ID NO: 51341 - DNA, 978 bp, Acinetobacter baumannii
  misc_feature (961)..(970): n is a, c, g, or t
atgaatagcgctgaaatcatggctgatctctccaaccacactccaatgatgcagcaatatctcaaagtcaaaaaagactatcaacatgcgttgctgttttatcgtatgggcgacttttatgaactgttctttgaagacgcgcatttagcagccaaacttttaggtattaccttaacccatcggggtaaagcaaacggcaacccgattccaatggcaggtgttccctaccattcagccgaaggttatttggcgcgtttagtaaaagccggccgaactgtagctatttgtgagcaagtcggtgaagttactggcaaaggcccggttgaacgcaaagttgttcgtattcttacaccgggtactttaaccgacgacgcactacttacaagttatcagtcctctaaccttgttgcgctatgtatccatcaaaaccagatcggttttgctttactcgacttaagtgcgggtatttttaaagttcaacaacaagactacaaaccggaacaacttccaattgaactggctcgcctcatgccaagtgaaattttgattgatgaagacctggttgacccgaatattatcgaacaaattaaaaaacatttagattgccctgtaaccaagcgcccaaatgtcgattttaatttaaacaatgcgcaaaaaaccttatgtgaccagttctctgtatcaacactctctggtttcggactagacccgttacctttggctaaggccgccgcggcagcacttattcactatgccaaagaaactcaaaaaacggcgttacctcatatccgttcaattcttttagaacaaagttctgactttattgcgctcgacccaatcacgcgccgtaacttagaaattattgaacctttgtttgagcatggaacttctttatttcagcttgtgaacgattgccaaaccgcaatgggtggacgtttacttagccgaacactcatgcaannnnnnnnnngttcgtga

SEQ ID NO: 51342 - DNA, 765 bp, Acinetobacter baumannii; identical to SEQ ID NO: 46089

SEQ ID NO: 51343 - DNA, 216 bp, Acinetobacter baumannii; identical to SEQ ID NO: 46090

SEQ ID NO: 51344 - DNA, 1002 bp, Acinetobacter baumannii
atgagtaagacagttgtaaaagacaaaaccgtacactacaaaaaagtagactttctaaaaggcgcgaaccttggaaacttacttaaagcccaactattagataaagactctttttatcataaagctattaataggcagcaatttgtatcggctactaaagatgattttatccttataaatcacgcaagttcacatcaaagtatgttctttggagagctaatcatagtggagtctggtaaagctcaagctgttttaaaaatagacaatgatagtgctaccgaattcccaatcaaaacttacttaacggaagatttacctgatgatgaggatgaatctgttgaagtagtgcgcaaagaatttattgatagtgttttatattttggagtgattgataatcatgttgcaattattcaatccagatcattaacagcaagaactcttgagtcttatttaggttggcttttgggtgaagcagctaaagccttaccagcgaatagtgccttaatcttaaaagatgctccgaacccggcaattaaagaaaaattggaatcaacgccagccaagaccatctcaatctcatctggaattggatcaacagaattgcaaccgattcacaaaatagagtcgaacgtaccagctaagattgattacaaaatcgaagaaaatgtggttgatgttttaaaaactgcatttggtgtcgatttggatgatttaaaacttgaagatggccttgatgacgctaatttaaagcttaaattaacactcacctataatcgaaaaacatccaaaagcgggcaaaaagtaattgatactgttgcatcatctatgagacataatgatgattatgttataactcttgaagatggtactaaggtcacagcggataacttaaagatgagtggaaaaatatctgttgaaacaatcaataataaagtttataacgacggccttaaagttcaattgtacaattggatgactaccaatattaattttggtgattaa

SEQ ID NO: 51345 - DNA, 360 bp, Acinetobacter baumannii
atgtatcaaataccaattcagatgtggaatcagttggcgaatttcgtctcagatccagaggaccaattgtttctacaactggatcaggaaatgatgaatttgaggcttcagaagcaatcagaaatgatggagaaattggggtactccgagacagtaattctggcttatcaaaaagtgatgatgcaagtttatctagcgtccgaaatccaagaaatgaatcttcagatggaaatagtagagccaatactaaccggattaacagcagcggaggcggtgaactatctggtaagagatcatctcttaaacgagcaagagatcgatcaattgtacaatctgctaaatcagttagagctgccatag

SEQ ID NO: 51346 - DNA, 1512 bp, Acinetobacter baumannii
atgacaactttaaatctaatttctactcaagatattgctaagaatccattagttgtaattgatcaaatgattagtttctttaaacctaaacagccctttactgggcttttgaagggtagaactaataatgtgaaaacagccaaaggacaaaagatttctactgtattcgctttagttgatattgatcaagtaattgcatctcatacagcaactggtgcggaaaaccctaattatccgcaagaattgcagccacgagatcgtagtcgtgaatcctcacaagcatgggtacagaaaactgctaatgatttagaccccgaaagcctaggccgctcaggtcgggcagacacgggagcaccgataactggtgatgatttagttgtagaatcaggaaatggtcgaacaatggctatcaagcttgcctatgagcgcggtaccgcagatgagtataaacaatggttgattgatgaagccgattactttggctttagtagtgagcaggtccaagcaatagctcaaccgattttgatacgtattcgtacaaccgagattgatagagctcaatttgcaatagatgctaaccaagatgataagttgtcttttacagcaactgaacgtgctaaagctgatgctaaacgtttagatgagaatttactggcactttttaatccgagtgaagatggcgatttattagcagtaagtaatcaaaagtttattcaaggttttttaagtaaattaggtgatacagaagctgcccagtacacaacgaaagataaaaaaccaacacaagcactgataaacagaatcaaggccgcaatttttagtaaagcgtacaatgatgatcgtttgctagaaatgatggctgatcatacaaaaccagatcttcaaaatatgcttaatgcgcttggtgttgctgcgcctaaatttattgaagcgcaagctataagtcgtggaaatgttcaagatatatcagatcaaatcgttgatggaatggagcaagccattgatcaacgtgttgctaatgcaattattgatgcagcaaatacaattttatctgcaaagcaaaatgatcaagatattgttgagtttgtaaagcagcaagggctttttgaggatctaggagaaggtgttgctgagctcgccgtatttctcgccaagaatagccgcagttcaaaaaaaatgagtatgttatttaaagcattagctgaatttgcagagaaacaggctttagatagtagtaatgtaggcttgtttggtgaacctgaaccagtaagtgtaaaagatgctatccaatatgcacaacaagtgcttggtgatgatttcattagtgtgcaaatgtacgattccttggtagattccagcagttcaagtagtcctaaaataattcgattaacgaaagagggggctgaacgtttccacagtgctttgaaagttaaaattgatcaaagtaatgacaaggaaaatcaagaagggaacaaaattaatgacattctttttgaagaattagaagtttag

SEQ ID NO: 51347 - DNA, 582 bp, Acinetobacter baumannii
ttggctcaacagcaagcaggattagaagcaaaaaaacttattgatgccgaaaatgaagctaaacaaaaaagagatgaagaagtattagcagcacgtacagctggtatagctgaaaacaaaatgatgcaagcatggttagacactttggaaaatcctgaagattctaacaacatagactttatggcttgggtttcagatcgccgtggtgaattcttaaaaaactggaatggggccgaaggttcaccagaatatttaacagcattttatgaatattcaagagcatgggcagatgaacatttagcggatcgcctcagtaataaagagccagcccaaaattcagataatgatgaatctaaagaactcaatgctccgacagaagttgaaggtcttcagcctagtacgacaaatgatgaaggtaatcaactttaccgttcagtaattgaagggcaggttaaagttaatcttgagttattagagcaaattcgagatgaagcagaaaaagacttaaatgatccacttcttattccagcggtgacagaactcttgaatcaagtgcaaaaaatggaagcggagaatatctaa

SEQ ID NO: 51348 - DNA, 2205 bp, Acinetobacter baumannii; identical to SEQ ID NO: 50790

SEQ ID NO: 51349 - DNA, 3753 bp, Acinetobacter baumannii; identical to SEQ ID NO: 46872

SEQ ID NO: 51350 - DNA, 501 bp, Acinetobacter baumannii
  misc_feature (451)..(460): n is a, c, g, or t
atgaaatcggttgttttaatttttgcctctttggcagtgaatattgcgtattcagcagaaacaaatccatctattcaaaactactggtccattgcagaacaaaaaaaattagaccaagacattacatggcaaaggctcatgtatgccaataaaaaccagaaaagtgaggtcacttatgctggctattttctatcagaaaatggaaaaaataatttaaaagaagaactgaaagcagacatctcggcattatttatacctacgcaagataaccagtcaattcgctgtaaatttccggcacgcagtcagtggcttatacagcaattaggcattcaagaaaatgaattgccgcaagtaaaatgttcagaatttgaaaactggattgggcagattaagccttacaaagcgaccctaatttacgctacagattttatgggtaatccaagctcaatgnnnnnnnnnnagctcaatgtttggccataccttattacgtttagatcctaa

SEQ ID NO: 51351 - DNA, 1374 bp, Acinetobacter baumannii
gtggatatttttccaatctctttgaagttgcaacagcaacgttgtctgattgtgggcggagggcatattgctttacgcaaggcaactttattagctaaagcaggagcaataattgatgttgttgctcctgcaattgaagatcagcttctgcaattaattaaaacaacagacggcgagccgtttattgaagcttttgctgaaaaatttttaagtacaccctatcgtttagttattgcagcgaccaatgatgcagaagtaaataaaacagtttttgagcagtgtgaagcgcgcaatttacttgtaaatagcgtcgatgatattccacattgtcgttttatggtgcctgcgattattgatcgatctccattaattgtttctgtggcctcaaatggaacatctcctgttctatctcgtcaaatccgtacgcagttagaaacctctattccacatggcatgggcaagttagctgagttttcaggaaaatggcgcaatcaggttaaagaaaaaatttctaatccagatgagcgccgtatattttgggaaaacttgtatgcaagccccttaaaagaacaagtttttaatgacaatctagatgttgccgatagcatgcttgaacaagcactgcaggagtggaaagcacctaaaggcgaggtttatttggtgggtgcaggtccaggtgatcctgaactcattactttaaaagctttacgtttaatgcagcaagctgatgtggtcatttatgaccgtcttgtttctgcacctattttagaattgtgccgtcgagacgcaacaaaaatatatgttggtaaagcgcgttctaaccatagtgttcctcaagaaggtattaatgcattattggttgactacgcgaaaaaaggtaaacgtgtttgtcgtttaaaagggggagacccttttatttttggccgtggtggcgaagagatccaagagttattccaagctggcgtcccatttcaagttgttcccggtattactgctgcgtcaggttgttcagcttatgcaggtattccgcttacccatcgtgattatgcccagagtgtccgctttcttacaggccatctaaaagaaggttctcctgagttaccgtggaacgaactggtatacgaaaaccagacattagtactgtatatggggttggtgggattagagcgtatttgtgagcagctgattgcgcatggacaacgtccagatatgccagttgcattaatttcaaagggtacgacacctgaacagaaggttgtggtggggtcacttgctgatattgcatctaaagtgacagaacatcaaattcatgcgccgacactcacaattattggtgaggttgtacgtttgcgtgaacagttacagtggaattag

SEQ ID NO: 51352 - DNA, 246 bp, Acinetobacter baumannii
gtgagtttgattcctcctcataattcagaaggtgagtatattttatggttagctggatttatcgaaaaaattacagaaggtggacctaaaccacctccgcctataaagaaatttattccagagtatatgagcttcaaatctgaattagattttttacccttaaatgaggaaaaaattcaaaacgaaggtaaagaaattacggattactttaattcaaagctttataaggcaacttttaagaagtaa

SEQ ID NO: 51353 - DNA, 3297 bp, Acinetobacter baumannii
ttggttgaagagggtcaactaattagacaactatcagcatatcaatataacgaacaagatgatttaattaaggcaactaatgagtttgctgcttcttatgaatatcaataccaagctcatttattaactcgttataccgatcttactcatcgtgggatgaacctaaagtgggatggagttttacctagttcaaaagcgattgaggaatgggctgatgattatagttccgctactaaattagattgggatgaaaatgttcgcgtaacttcagtcatggatatcgatggtaacgtgactgaatattattatggtattactggttatacctatcgaattatttatccagataatttgcaagaatggttctttagagatcaagcaaaaaatataacatcgcatattgccacagatggaacagaaacatcatatacctatgatgaacgtggcaatgtcttaagtatggtccaggccgatggttcgactttctattatgaatacgatgaaaaagataatctgatcggttttgttgacgctgaacaggggcgttggtttaaagaatacgatgcttcaggaaatataattaaagaaattgatccgctgaagcgcgaaacagtctatgcctataatgcaatggggttggtaacttccattactgatgcgaaaggaggtaagaagacacttaaatatgatgatcgagggaatttaatcagttatacagattgttcaggtaaagagaccaagtggcactatgatgaccgcgggcgcgtcaaatttattgaaaatgctttaaagcaaaaagttgaatatttctatacggaattaactactgaactaagacagcctatagcaaaagggttaccgttgaatgcttttggtcagcttgaaaaaattaaacacgctgatggcgctgaagagcatttcattcatgatgcagaaggtcgtttattagttcatattgacccaaaaggtcagcagacacgttatgaatacgacgcagctggtttaattaccaagcgtactgacccattaaatcaaactttaaaatatcaatgggaccgtctaagtcgcttaaaacgtttaattaatgaaaatggcgcaagttatgaatttgtctatgatgctgcgggtcgattagtaaaagaaattgattttgatggcaaagaaactgtttatgcatacgatgaatataatggtcgtttaaccacaagtattgaagttgcttctacttatggtcaagatttcaaagaccgtgcggcacctaaagaccgtattcagcaatttatttttgacagtatgggacgtttagaacaacgtactgcaggatatggctatcaaggacaagagcttgaagaaaaacaaacagaagaattttcttatgatggcttaggtaatctagttcaggctaaaaatgccgaaactaacttgcagtggttttatgatgcagcaggtaatttaattaaagagcatcatcaagatgttgtgacacagaaaactgctgtgtggaaacatgtctatgatgaattaaataatcgaactacaaccatccgaccagacggacagaaaatagattggctgtcttatggaagtggacatgtctatggcatggcattaaatggtgaagatgttgttagttttgagcgtgacgatttacatagagagacgttgcgacactatgcaaatggacttagccaacaacaaagttatgatgaagtcgggcgcttaactcagcaattaatgttgagtgggcatgacaaaggctatcaggcccaaactcaaaataatgctatccagcataccaaccaattgattgaacgcttatatcactacgataaaactggtgagttaacgctcattaaggatactcgtcgtggggctattcattataaatatgatcctgttgggcgtttattagaggcaactagtaaacttgggaaagagacttttaattttgacccggcaagtaatattttagagcgatataacagtaccaaagagcaatcttcacagcatatttctgatgaaaaaggttatggctataatcgcttagtcaataacatcgtacaggaatatcttgaccaacaatatcaatatgatgcttttgggcaactgattcgacaaaagtcatcacaaggtgatttaaatcttgagtgggatgtatttggacgtcttgttcgtagccgaaacaatcaatatacggcagaatatcgctatgatgctttaggccgacgtattcaaaaaagaagtaagcatcaccatacaggtcaagagcagaacattagttatggttgggatggtgatactttagcgtatgaatcgagtgctgatttaacaaaacactatttctacgaaaaagatagtttcgtgcctttgttacaagcggcgtatcatcaccccattgagctacatcaaacccaagactggtcagataaaacatatagtatttataaagaccctctttggaatacagtaaaacaaagtcaaggttttgatgatgtatggttctatcactgcgaccatttaggcacgccacaggaaatgagtgaccaaacaggtgccattatctggaaggctgaatataaagcttggggtgaatgtaagctagagcagactaactcagatttctttgaaaagtcagaaattattagcaataatatccgtttccaaggtcaatattttgatgaggaaacaggacttcattataaccgttatcgttattattcgccttatgttggacgttttatttccaaagatccgattggattattgggtggttttaatgtctatgcttatactgcgaaccccgtacaatgggttgatccatatggattagcaccatgtagtctagttagatataagccagataaggtaacacctcaagctggaagtcgacaagatgctattgatagagcttggtctcttgagaagcaactaatacaaacaacaggaacaggtactagggattggagtaaagctgaactggatacgattcttagaacgccaagtggtagtggtaaaggtcatctctcatctgttatgtcaaatcttggctatactggtcatcacattaacagtgttaaaaataatggagcattaggcgaaagttggaaaggagatccgcgaaatattgttttcttggaaaaccctaaacatccaaatagtagtcctatgccaaatgcatataatgagcattttcattcgaaacaaggtcatcgaggaagtacgactaatgtttccagaggaagattgattgatagacaagcaatgattaatcagtttaataaaggttgtagtatttaa

SEQ ID NO: 51354 - DNA, 1845 bp, Acinetobacter baumannii
atgaaaaagacttttgatctttaccaaacagctcaagtgctccttgccagcaccagttttttgcttggcatgtctactcatgcttatacatggaaactcgacgatattagtacctcgactaaatatacagtcgagcctcactttttctatattggaaaaggtgctgaatggcaaaacattcagttttcgagtgactactcaactgaaaatgacacaacagtactcgtcaaatatgacgataagctcatttataacactacgcttaatggtgatggccaattcaaatttaatattcctgccagtcagagtggttttcaccgtttagattttattattcaacaatatgcaaaaccaacgacgcttaaccaaacaaaagaaacattctgtacagaagatattgatcacttaacttatttgagtaattctcaactcgactttacgcctattcgaaatgagtaccgtttaaaagatctaccggacgctttatttaaccctcaggctagacgacctacaccttttgtcggaattttaaaatataaccgtaaagaaattaccgaagcctctatgttgggccgattagtaagttcgtggagctccgtaacgccaattgaatgggttgattcaggccaaaccaatctaaatcctgaaacgaactttattattgaagtgattcgttcggcaagcccactcaaaggaggagccttagtacaaattgctaaactggctgaaggtgtaccgacgctatctattacttatcacactccacaagagcttaccgctgccattaacgggctaattaatccaacttatgtgcaacagcttgatacgggtagcgctatttttccaactacaatctcagcaccagcttgggcgcaatttaaaaaaattgatacgcttgcagatctaggtattcaggattttcgactaaatcatgccgaaaagaatttatttcttgattttccggcagtatggcaacctactgatattctgcaagggcaaatcgcacttcgtattcaaagtggactattacaaggttcaaatattacagcatggattgatggaggacttgcaggaagtatgaaaacggcggatctcgcatccgaccctgtaaaccgacagttcaacatctttgccaaggaaatttcaaatacaaccaactttagcttgaaacttgaaaactcggttattgccaattctcaatgtttacccaatgctcacggctcactttgggttgataccgccaaatcaacggtaaaacttccccataaacttaaaaatggtgttgctgctctttcaatgaccttagccaccaagccaacgattgcaattgatgaccaatcaggggcattaaatattgccattattttaggacaagtcgctaaaaacatgctgctgacacaggcaccaatgccagtgaacctagtacgcttctctccgacttccccacaagcagtgaatgtgagagtgaacaaagagatttatcagcaacaagtcttaatgcatcaaaatattatttatgcacccgcagcagcgaatggctttatcgtaagttataacaataaccgcttcgatgtaattacagactctgaaaacggtgcacaaacctttatgcatttatggggaaaaatacagcataaaatcccaaataatgtgaccaaaatgctggtgtctgaaaacggcaatatttatgttcttcaaaaattaattgtaggtaatcaaaaagcgccattagttcagcaatcatcattctttttattagttgtgattatctctgcaattatgataatagtgatcttcttgtggtattggttacgacgtaataatgaaaaaacagataccaattaa

SEQ ID NO: 51355 - DNA, 1251 bp, Acinetobacter baumannii; identical to SEQ ID NO: 50903

SEQ ID NO: 51356 - DNA, 1260 bp, Acinetobacter baumannii; identical to SEQ ID NO: 45761

SEQ ID NO: 51357 - DNA, 1110 bp, Acinetobacter baumannii; identical to SEQ ID NO: 45760

SEQ ID NO: 51358 - DNA, 360 bp, Acinetobacter baumannii
atgccgcacgttgtagttgattattcagataacttaactggactaaatgcaaaacaattacttgaagaaattaataccacgctcattgaaacagagttgtttagtccagaagacattaaaagtcgtgcgcgtagagatgaggtttttctgattggcttaggggttgatcaagcctatatccatgtaaaagcctatattttgtcgggaagaactgctgaacaaaaacagcttgtgggtgagcaattattagcggcgctcagcaacaaaaaatatctaccacaagagtttaataaagaaattcaattgtgtgttgagcttatcgacatgccaagagacgattattttaagcaagttgtataa

SEQ ID NO: 51359 - DNA, 903 bp, Acinetobacter baumannii
ttgaacacgttaaaaacgggacaaccttatacacgtcgtgaagccatcattaatgtcaattttaaagatttacatgtggattatacggtctcgcaattaaatgcaggtaaaagctaccacccgctcttacttattgagttaaatcctattgatcgtatgttgaaaatttctaaggaagaaaacctaattcaacaacatcaagtggctagacaactggttcgaggcgttgctcacgaaattaaaaaccctctggctggtattcggggggcaactcagttacttgctcgtagtttaaatgacgagagctatgctgaatttacggatatcattattaacgaggtagatcgtctcaccaatttggccgacaccatgttgggctcaagacaattgccaagttatgaaaatgtaaatgtgcatgaacctctagaacgggtacgctctttaatcgcaaatcagaccaagaaaaaaatcaaaattacgcgtgattatgatttgtctctacccgatgtaaaagccgatcgagatcagctcattcaagtcatgctcaatattagcgttaatgcaattcaagctattacagaaaataaatcattttttacagatcaagagcctgaattaattttacgtacccgtattcaacgtctagtcactattaatggagtacttaaccgctctgctgtacgagtcgatattgaagacaatggaccgggtattcccgaaagcattttagagtctgtgttctatcctttggttacaggacgagcaaaaggcacagggcttggcctgagtattgcacagaacatcatgcatcaacataacggaatgattgaatgccaatcagttcctggaaaaacaatgtttagcttatatttaccttgggagtcagaccgtgtcgcgaaataa

SEQ ID NO: 51360 - DNA, 1680 bp, Acinetobacter baumannii
  misc_feature (1656)..(1665): n is a, c, g, or t
atgtatattaagagacaatatatgagtaccgaatacactgcaccttctgaaagggcaggatcaaaagtttatcgctttttcgtaatacttctacatgtgttaatcgcattattcttaattatccaaggtggaaaacttgttagcttaggtggctcaagttattaccttatcgctggtattgcctatctactgattgctattttatatacattcagaaaagtagccagcttatggttatccattttaactttcatcgcaacagttatatgggctgtttccgaagttcaagtctttgacttctggcaatatattccccgtctagttgttccaacggttttatttgtactaagcttatgggcaagccgtagtttaataacgctttcaacagaaaaagtgacttttgctaatcgtgttggtttagttggctttattgctcgtgttatagctttaatctcagctttttttccccatggaaaaactctaaatcaagttaatattgctcaagatcgtaatttaactaaacctacagcagaaaatcctgataattgggaatattttggtcgtagtggtagtggtacccgctttgccccttatactgacattactcctgataacgttaaaaacttacagattgcatggacttaccatactggccgaccaaaaaatattggagtcgatgaaaatactccaattcaaattggtagcacactgtactcatgtactccaactaatattattactgcgcttgatggtgatagcggtaaagcactttggaaatatgatccaaaagcaaaaacagctgaacacattacctgtcgtggtgttggttactatgatgcgactcaggataaaacgctttcaaaagcagatttacaaactcctagtattcaagcctgcccacaacgaattttaacatctactgttgacggtcgtttaattgcattgaatgcaaaaactggtgctttatgtcctcaattcggggtaaatggccaagttgacctgttaaatgacatgggtcctactgaaaaaagtaaacgttaccatccaacctctaccccattaatcgcagggcatgttgctatcttaggcggttgggttcgagatattactcatggtgaaccttctggcgtcgttcgtgcttatgatgtacgtactggtaaactagcttgggcttgggatgtaggtaattcagaattatctggacaacctaaaaacggttttactcttgaaaccccaaatatgtggactattccaacctacgacaaagatttaaatctagtatatctgcctactggaaatggtccacctgattactggggcggtgatcgtaatgcagcaaaagaaaaatttggctcagcagtagttgctgtagatgcaacgactggtaagactaaatggtcatatcaaattgttcatcacgacgtctgggactatgatttaccttctcaacctgttctttacaatgtcaccaatgataagggagaacaaattcctgcccttattcaaacaactaaaatgggacaaatttttgtattagatcgacgtacaggccaacctattactaaagttattgaaaagcctgtaccgactacaggtcatgcagaaggagaaaaattatccccaactcagccatattctgtgggtatgccacaaatnnnnnnnnnngccacaaattggtaa

SEQ ID NO: 51361 - DNA, 1404 bp, Acinetobacter baumannii; identical to SEQ ID NO: 45796

SEQ ID NO: 51362 - DNA, 174 bp, Acinetobacter baumannii
atgtctattaaactaaatacaaaaccggctttgatggttttacttctttcaacaagtttggctcatgctgatggagggttaatattcctcgaaaagaatcttaagtctcagcaagaaacaaaagctaaagctgaagaaggtaagaagcctcatttaacttgtaagcataaataa

SEQ ID NO: 51363 - DNA, 741 bp, Acinetobacter baumannii
atgcaacaaaaacaccccggtagaacactcgtcttatggattatcgcagctcatctatttatgggaatggttgcatacgagtggctgcctgtgagttttagaggaagttggatttttattcttcttcttttaatttcaggtgcttttttagaagtcggtttgtctttaattgtaggtttagtggcttttattggagttgccgtatactttttactcgacttaggcgcacaaacacatattgaacgtcagttacttttactattcattattcccctaataccgctctttctaagtgccgtacgccacaatattgaaattaatgtacagaaataccgtgatattcaaagctatgaccgaaattatcgccgcgatattttcccgctcagtgctttaaaatactttcagcgtagtttttttaaattacttgatcaccacaatgtacaagattatgaagtattcgaaattcgaattcttaatcgcagtctgattaaagaaatgttaggcgatgatgtctggaaaacaactcaaaatgaaatgattaaaattttgagccaacatgaacccaacgagattgttttccagtttgcagatgatgatctggaaaatatttacagtattatgattcgccagcagaaaacagaagaagaccctgtattcttaaaaaaattaaaagaaattacgaccttgcgtcttgaggtggaatacaaaattgttcctcttccacccgaggagatgagctaa

SEQ ID NO: 51364 - DNA, 354 bp, Acinetobacter baumannii
atgtttttatgtaaaaatcttttgattgattggcgcattggtgaacaatggtttatgcaacatttaattgatggtgacctcgccgcaaataatggcggttggcaatggtgtgcctcaacaggaacagatgccgtaccttattttcggattttcaacccaattgctcaatcaaagaagtttgatccggagggtgaatatattcgccaatggataaaagaattgactcatttggacaataaaacgattcatgacccctactcaagcaaaaccgatcttggtttaaattatccaaaacccatagtagatttaaaagaaacacgccttaaagcaattgaaactttcaagaatatttag

SEQ ID NO: 51365 - DNA, 1200 bp, Acinetobacter baumannii
atggcgtcaccccaatccccttcatcttcccctcgacattactcactcttcttggcaattttttctctcgcagtaggcggtttctgtattggcactacagaatttgtcgcaatgggtcttattcaggaaattgcacacaatttaaagattacagtacctgaagctgggcattttattagtgcttatgcattaggtgttgttattggtgcccctattattgccattttgggtgccaaagtgcctagaaagaccctattgctttgcctcatgctgttttatggtattgccaatgcatgtacagctttagcacataccccagaaaccgttttagtctctcgttttattgcaggtttacctcatggcgcatattttggtgtcggcgctttagtagcggctgaactagcaggcccttcacgaagagcttcagcagttgcgcaaatgatgatgggactaaccgttgctaccgttattggcgtacccttagcaacatggttaggtcaacattttggctggagagcaggttttgaattttcagcaacgatcgcattctttactttaattgctgtagcttgctttgtaccgaatattccagttcaagctactgccagcataaaaacagaattagcggggcttaaaaatataaatatgtggttaacccttgcagtcggcgcaattggttttgggggcatgttctcggtatatagctatgtctcaccaattctcactgaatacaccaaagttaatatccagattgttcctattgcattagcgctgtggggcatcgggatggtgattggtggtttagctgcgggttggcttgcagataaaaacctcaataaaactattgtaggcgtactcatcagctcagcgatcgcatttgtagtcgcaagctttctaatgagtaatatctatagcgcaattggctctttattcttaattggcctaaccgttatgggtttaggtggggctttacagacacgcctcatggatgttgcaggtgatgcacaaacgctagcagcttcacttaaccactccgcctttaatcttgctaatgcattaggcgcttttttaggtggttgggtactgagccatcagatgggttggattgcaccaatctgggtaggttttgtactgagccttggtggccttattatcttacttattgcatttgctgtagaaaaagcaactcaaaaagcctga

SEQ ID NO: 51366 - DNA, 2151 bp, Acinetobacter baumannii
gtgaataacctgactcaactattcaatcgttttaaaacgaattcaattttaatttattgcctgcaaattttaattgtactcacaggcacaactttaggtttactttggttaggtcataatgagctgatcgttcctgtgactttaggtgcgattgctgctgcacttactgattttgatgatcgcttaagtcttcgtttacgcaacctgctctatgtctgcctactcttttttactgtcagcactattcttggttttttagcaccttataaatttttatttattttatatctttcaatttccagtgcttgtttcattttattgggagctttagggcaacgctacgctaccatttcttttggtacgattttactctcaatttatagtatgtttggtttaggagaatatgcatactggtaccaacagcctacttattttgtctatggtgcgttgtggtacggcctaacttctattttattttttattcttaaaccaacacttcctttacaagataaactttcacaaatttttgaagaaatttcagccttacttcaagctaaagcacggttgttcgacccagataataaagaaaatgttgaacagcttttatttaagttatcactacaaaatacacaagttgcgcaaagccttaaccaaatacgcagctctctgctgactcgccttaaggcatcacgagtcagtaataaaagtatttactggttaaacctatacttttttgcgcgagatatacacgagcaagcaacttctaattatttacactacgagcatatccaacaaaattttagccgtagcgatctcatttttcgttttcagaaaaacctacgcttacaggcacaagcttgccatgatttagcccaatgcattttgcataatcaacaatatcagtcttctcaagaaagccaaattggcctaaaccatttggaaagctctttgaaagactggatacaacagcatccacaaaattttgaagttaaaaatttaaagctaatttttaataatttaaaaggaatgcatgaacaatttgagcagcttcaatatgctcaaccgtttaatgaaacgctaagtcagaacaagcaagaacatctcaatttactagatgatgatattcaaggattttcagaccttgttttaaaaattcggcagcaactgacgccacaatcggccctatttagacatgcagtacgaattgcggttgtatttgccgcaggttatgccatttccctcttaccttttgcccaacatggttactggattttgctcaccagtttatttgtttgccaaattacttactttgcaaccaaaagtcgtttaaagcttagaacgattgggactttactcggcgttttattgggtattcccattttatattttgttcctagtattgaaggtcaactcattcttaccattatttgtggagttagctttttctacttacgccagaaaaaatatgcgctggcaacactgatggcaaccttaatggtattgctcattttcaatttaaaaggtgcaggttacagcattattttacctcgtctaatcgacaccttattaggctgctttattgcttggcttgctgttaattttatatggccggactggaacttccgtaatattccaaacaatattaagaaaagtagccaagccacctttgattacttcaatgtgattgtcgagcaatatcagcatgggaaaaatcaagacattgaatatcgtagaattcgccgtgctgcacataacgcgcaaattgaactgtcgaatatgatttcaagcttaagtgccgagcccaacccaaatccagagctgattcattacgcctttcgttatttggtttatagccacagccagttgagttatgtcgcagcattaggcagccaaagacaaaaaattgatgatcaacaggtattacaacttttactggattgtcagcaaattcttaaacaaagtttatttgaacaagcgtcggttaactttagttttcttgaacagactttaaagcaaattcaaagtttaataactcacgaacatttttcagagaactacacacttgtcttaaaacagatgagtttattattagaaaccttgcctgaactcttaagcttaaaaggcaaacttttagagcatgaaattaaatag

SEQ ID NO: 51367 - DNA, 1179 bp, Acinetobacter baumannii; identical to SEQ ID NO: 46091

SEQ ID NO: 51368 - DNA, 2055 bp, Acinetobacter baumannii; identical to SEQ ID NO: 49415

SEQ ID NO: 51369 - DNA, 402 bp, Acinetobacter baumannii; identical to SEQ ID NO: 48654

SEQ ID NO: 51370 - DNA, 1707 bp, Acinetobacter baumannii; identical to SEQ ID NO: 45824

SEQ ID NO: 51371 - DNA, 393 bp, Acinetobacter baumannii
atgcaaaaccaacagcgttcgcaataccttgacccaaaggacctgtcgttgtttcaattcctggagcataaccatattcagggtgaccaggagtttttgagtgcaattgacggaattgttttaaatcttcaattgaaagatcataacctgttaaatgaagcaaagcatattgcaacattgaaccatggccatttgataaaacaaaacggtcacggtttgcccattgtggattatttgggttgtgatttaaaaactcgcgccagacgacatcagcaatatctgccatccccattggagcacctggatgccctgagtttgcctgttgcacagcatccattgccaatacacgaattgcgtttgcaatacgacgttcgtttaaaggggtcgtcatag

SEQ ID NO: 51372 - DNA, 339 bp, Acinetobacter baumannii
atgagtaaaacagcccagtccaaacttggtgaattatctaaacaattaaccaatcctacgaatattatgaaaaatattcaaactgcacaaagcataaaatctgaaggagcaaaggctttaatgccaatgttaaaaactcaggcgcagggattagtaactgatcaagtgaagagctttttaccaatttcagaagcaggtcaaaaaatagggaacaacattgaacttacatctattcaaaaaatgaatgatttcaataaatcaggctctattgatggcaatagtttggtcaataatacgcttcatcaatatttgcaaagcccttttaaaaagaattcatag

SEQ ID NO: 51373 - DNA, 540 bp, Acinetobacter baumannii
ttgctctgggtcaatgaaaagcatcgtgatcagttctggcagcctttatctggttggtggagtcataaaaaaccatttgatatggcacagcattatgagccagcgaatagtatccgccgatatttatgtgggactcagccggttatttctatgagtctgattgaatgcggagtagatattttcctgcatgccgatatgcaaaaaatccgtgagaaatcgttgaaattaacagatttatttattcaattggtacatcaagaatgttctgaattcggatttgagttaattacgcctttagatcataaccatcgtggtagtcatgttagttatcgtcatgaattcggttatgaaattattcaggcacttattgcacgcggtgtgattggtgattatcgggaacctgcagtcttgagatttggtattacacctttgtatctgggctttgaagatatttggaatgcagtacagcacttaaaagaaaccatgctgaatagtgaatggaaaaacaaacagtatttagttcgtggtgaagtgacctga

SEQ ID NO: 51374 - DNA, 408 bp, Acinetobacter baumannii
atgctgggtgaccgtggttctgaatatgtgattcgcgcactcaataaactaaaacagcatggagtacgcattgctttagatgacttcggaacaggtttctcttctttaacacatataagagactatcctattgattgcttaaaagttgattgtagctttatacaaaagatgcaacatgatccatccatttatgcaattgttcaggcaattggcttacttgctccaaatctctcactcggattaattgcagaaggtattgaaacaccagaacaagaagaattacttcttcaatttggatacaacatagggcaaggttttttatttgaatcagctattgatgctaatcaggtgatctctattcttaaacagggtcaggcttatctagaaagtcactattctatgaattag

SEQ ID NO: 51375 - DNA, 1302 bp, Acinetobacter baumannii
  misc_feature (1280)..(1289): n is a, c, g, or t
ttgtcgaaataccatgaatcttctcaagaaaatgaatggtttattagttttctagatattgaccaagatatacaagagcagcaaagcttacgaaaagatatcgatatacaaaatcaaatgctcgatatcagtgtcgattgtattaaggttttaaatacagatggcactgtatctcatatgaataaatcaggatgccttgcattaggtatacctgtagatgaaaaaaaattcggtatgcgatggttagatcttttacccccccatattcgtaaacgcggaagaattgccttaaaaaaagccttacagggtaaagtggcccgattcgctggcatgagttgcttaccaaatcaagatccagaatattgggataacatgcttaccccaattcaacatacaaacggcgaaattattcagatattgtgtgtttcgcgaaatgtcactcaacagtatcttactgaaaaccgattaagagatattagcgagagagatgaactcacaggtttatttaatagacgttcatttaagctacaactaaaacgcaccctagcttactcaagagaaacccaaaccagtgtagggctacttttaattgatctagatcatttcaagcatattaatgacactataggtcatagtgctggtgaccacttattaaaaatactttctaaacgttttaatcagtgcgtagaccctgaaagatgttcagttgccagattaggtggtgatgagtttgcagttattgttagccatttggaaaatgagaatgatgttcgtgaacttgctgaagtattgcttcaacaactcaatcaacccattacatatgctgggaatgtgctcaacggcggcatgagcatcggctgcgccatttaccctcaagatgcagttgatcaatcgagcttattaagttgtgccgatatggcattacatgacttaaaagcccgtggtcgtggcggcatacgtatgtataacccaagtatgatgcagttaaccgaggcaatcgcctctcaactcaacattgctcgccagcttattcgtcatcataccattcagccctactatcaacccaaagtcgatctaaaaactcatgctgtagtgggctttgaagcattactccgctggcatacgacttcggcccaaagaggtttgccttctcagattgctgaagcttttaaagactacgatttagccagtaaaattggtgaaatcatgcaacaacaagttttgcatgatattgctaaatggataaaattaggttttgtgccgcttcctgtttctctaannnnnnnnnngttgagttcttaa

SEQ ID NO: 51376 - DNA, 1335 bp, Acinetobacter baumannii
atgaatcaacaacaagtggtttccccacctcagttaatttcccaagatcaaatagcacgtcgctttatgacaaaactcgcttggctcatggcaggcgggatgtttattgatggatttgttttaggttatttaggtgcattaatgccctctattacagccgatttgcatttatcaactacatggcaaggcttaattggtgcagcctcactcattggaattttctttggtgctccaattggtggatatttttcagatcgctttggtcgtaaaccactattcatgatcgacctttttatattcttcatatgctcaattggacaattctttgcatctgatccctacacgctttttatagctcgtctattaatgggtgtcgcgattggaattgaatatgcagtcggttggccgatgcttgcagaatttgctccagctcgcctaagaggtaaattattgattttgactgaaacctcttggtttgttggatatcttgtctcgtataccctaagttttattatgattgaaaatcatattgcgagttggaatgtgattttaggaattagtgcaattccctctttaatcgttttattaatgcgtagtggtattccagaatctcctcgctggctcatgagtaaaggacgtaaagaagaagcttctagaattgcacataagtattttactgaagaagacaagaacgatattttaaatcagaagcatgcaaatgttggacaaaagacaagcttctttgatttattcaaaagtaaaaatatcaaaggcaccactttagtttctatatattttattggtacttctgcaccttatttcgcaattggtgtatttattccaatgattttagaaaaattaggtttgcaagacggtattaaaggaggattgttcctcaacacatttgctgtatttggaacacttgcagctgtattgttaattgaaagagtgtcgcgccgtaaaatggcaattcttccaatcctcgtatgtactattgcgttagtcgttgtggctttagctgcaaatcaccccacatggattctgattggttttttagtttttgcatttgctaatgctattactgcagggatgatttcagttatccccggagaagtgttacgcccagaaataagttgttcaggtacaggttttgcagcagcaatgtcccgtataggcgctgctataggtgtgtttttgatgcctatgtttgttgcagcacatggagcagcattagcagtttggatcgctgctggggtgtgcttaatagcaacagtaattacctacctatttatgcctgaaaccaagggtaaatcaatgagtgaaatttttcattaa

SEQ ID NO: 51377 - DNA, 852 bp, Acinetobacter baumannii
atgattgattgggaaaatttacattacttttcagttttttctgaagagaagacactttcagctgctgcaagaaagttaggtgttgaccatgctactgttgcaagaagaattgcccagttagaagataatttaaaactaaaattagtggaccgtagacctcgtacttatattttaacttcagagggggaacgtctggccaaaatcgtgacacgtatgatggaagaaacattttctattgaacgtctggctcaggcaggacaacaggaaattagtggagtagtttcggtaagtctaccgccagctacggctgcacatttggtaatgcctcatcttggtaagttttatcgtcaatatcctgagctacaattgagaatactcggtgatgttcattatgcctccttacagcatcgcgaagcagatatcgcagttcgctttggacgccctaaagatgattatctaattgcgcgtaaagctggtgaagttccttttggcatatatgcagcccaagaatatttggatgctatacaagaagaaaactatgggtggattagcgttgaagttggtggagttcaaggacaaaaacagcaaaagctaaaacaacggttaaattataaagagccagttatggttacgaatcatcctgagcttcaatggcgggctacttgtggagcagttggtttagctgtactacctgattttttaggccagcaaggtcatttagtaaaattacctgatgatgacccaatgagtgctgaaatttggttagtaattcatgaagatctgcggagtagtcctgcagtaagggtagtgatggattttcttttagattgttttgaaccttttcgtgtttaa

SEQ ID NO: 51378 - DNA, 1491 bp, Acinetobacter baumannii; identical to SEQ ID NO: 46679

SEQ ID NO: 51379 - DNA, 1122 bp, Acinetobacter baumannii
  misc_feature (1061)..(1070): n is a, c, g, or t
atgaattttcgtcaaattcaggcaatactacatagttggtttggaattattgttctttgggttatctttttcattttttttacgggctctattgcttattttcgaacggaaattaatgtttgggcacagccagaagcaatcagccatattcaaacagtcccttctgcacaacattctgcgcaaactgcgtttaactatctcaaccaacatgcaccaaatgccaaaagatggcgagtcacagtagccaatgagcggatgcctgtgaacctacttcaatggcaggataaagaggggaaacatcaagagctacaaaaccctaataccggagagctattaggacctgtacggaagactttgggtggagatttctttttcaaactacattacacgctttatcctttgccaagcacgttcggtagcttagttgtagctgttgttgccttaattctattaattagtttaatcacaggtgtgattacgcataagaaaattattaaagagttttttacctttagggcttttaaaggacagcgttctttattagatcttcatcacataacaggagttatcacttttcctttttatttggtgatggcctttactggactgttgattttattttatctagttttaccgtggggattatcggaacaatatggtaaagctggtatacctaagttctataatgaaatgcagtttaccgaggtggcaaaacctcgagaaccttccttaacagaagcgatgcaaccttttaatcaattcatggcacaaatgcctaagcgaacagaatctggagctattttagataaatttgaagttcaaaagcctaatacagccgatggcatgattacatttgactataactataaaaatattattaccttaaatactcctcaatatatttttgcaacaaatacggctgaacgactcaatcagccacgaaatttaagtgcaattgcacaattaggttcatcaagttatgggattcatttaggttactttgcttctatctggatgcgttttattttggcttgtttaggaataataggatgtgtcatgtnnnnnnnnnncattactatggcaaacaaagcgcatcaaagaacaaaagaaatttggatatag

SEQ ID NO: 51380 - DNA, 207 bp, Acinetobacter baumannii
atgctatatattacggctgctgttttattccttattccagttattagtgtcgttctggtgccagaagcctctttattaaatagtctaaagtctgtgcattggtctcttgtcggtgttgatctggcgctcatactgctcgggctattctatttagtagtactacgcttctaccaaaccaaatttattacgttaggagaggccaaatga

SEQ ID NO: 51381 - DNA, 195 bp, Acinetobacter baumannii; identical to SEQ ID NO: 46109

SEQ ID NO: 51382 - DNA, 1443 bp, Acinetobacter baumannii
atgaataaacatttattagcaaaaatcactcttttaggtgctgcacaactatttacgtttcatacggcatttgcagatatacctctgacacctgctcagttcgcaaaagcgaaaacagaaaattttgataaaaaagtgattctgtccaatttaaataaaccacatgctttgttatgggggccagataatcaaatttggttaaccgaacgtgcaactggcaaaattttaagagtaaatcctgaatctggtagcgcgaaaacagtatttcaggttcctgaaattgtgagtgatgctgatgggcaaaatggtttgttaggctttgcttttcatcctgactttaaacataacccttatatctatatttcaggcacttttaaaaatccaaaatctacagataaagagttacctaatcagacgattattcgtagatatacctataacaaaactacagatacatttgaaaagcctattgatttgattgcaggtttaccgtcatcaaaagaccatcagtctggtcgtcttgtcattggtccagaccaaaaaatctactatacgattggtgaccaaggccgtaatcagttagcttatctgttcttaccaaatcaggcacagcatactccgactcagcaagagctcaatagtaaagactaccatacatatatgggtaaagtattacgcttaaatctggacggaagtattcctaaagacaacccaagctttaacggggtagtgagtcatatctacactttagggcatcgtaatccacaaggtttagcttttgctccaaatggaaagcttttacaatctgagcaagggccaaattctgatgatgaaattaaccttgtattaaaaggtggtaactatggctggccaaatgtagctggttataaagatgacagtggttatgcctatgcaaactattcggcagcaaccaataaatcacaaattaaagatttagctcaaaacgggataaaagtagcaacaggtgttcctgtgactaaagagtctgaatggactggtaaaaactttgtgccgcctttgaaaactttatatacggtacaagatacctataactataatgaccctacttgtggtgagatggcatatatttgctggccaacggttgctccgtcatcggcatatgtatatacgggaggcaaaaaagcgattccagggtgggaaaatacattattggtcccatctttaaaacgtggggtgattttccgtattaaattggatccgacatatagcacgactttggatgatgctatcccaatgtttaaaagcaataaccgttatcgtgatgtcatcgctagtccagaaggtaataccttatatgtgctgactgatacagcggggaatgtgcaaaaagatgatggttcagtcactcataatttagagaatcccggttctctcattaaatttacatataacggtaagtaa

SEQ ID NO: 51383 - DNA, 771 bp, Acinetobacter baumannii
atgcgctctaccatcgtggtcacaggtgctgcaagagggataggagcggctatcgccaagcaactactagatcaggggtatcatgttattggtattgactgtcaaaaaaatcctgaacaatgggatatcagtaaaacaatgacgtcagatcaatcttcacaatggcaaggcatctcacaagacattacccatcaacaagaaacacaaactttaatttcagagctgttagaaaaatacgaaattacggggttagtaaatgcagcaggagtattaattatgcgctccatgcttgaagcaaaaacggaagattgggaaacactttttgcggtcaatgtcatggcgcctatcgcgatcagccaacaagttgctaaacatttttgtgcaaaaaggcggggtagcattgtcactattagttcaaatagtgcgcgtatgccacgtatgcaacttggtatgtacgccaccactaaggctgcactaagtcatttttgtcgcaatctggcacttgaaatcgcaccttatcaagtcagactgaatatcgtttcacctggatctactctcactcaaatgcagcaacaactctggacagataatgcacctccacctgcagtaattgatggtgatttaagccagtaccgaacaggaattccattaagaaaactcgcgcaaccagatgatattgccaataccgtgagctttttactttcggaccgagcggcccaaattacaatgcaagaaatagtggtagatggaggagctacacttggggtttaa

SEQ ID NO: 51384 - DNA, 162 bp, Acinetobacter baumannii
gtgtataagagacagcatgaatatcaagagcgtatggcacgtcaaattttaggtgagcgtcaatttaacactgaaattgatagctggttgcgtgaagtacgtgcaaatgcttatgtagaaattaaagatccaagcctcgacaaaaagaacttacaaaaataa

SEQ ID NO: 51385 - DNA, 705 bp, Acinetobacter baumannii
atggcttcaaagttagaaaataaaactgttgaaaaaataggtggctggaccttttggaaaggaacctacaatggctatccaatgattatttctaaaacacgtatggggatgagtaactctgctgccgcaactgctttggcaattgaacggtataaaccgattgccattattaaccagggaacagcaggggggcacgatcctgatctccatgtttacgatatcgttttaggaaaatatgcaaccaatattggcgcttttagaacgcctaaacagccattaggtggaggttcaaactcacttacatgggttgaggcttttgatgtcttaccaacagatgaatctgaccctgaacctattgcaattcgtaaatttgaaggtgaccaagagctattaatggcggcacataaagtacgttatgataaaggtgaagtggttgaaggaacgattggctcggcagatgtgtggaataatgaacttgaccgaattcaatttttccatgagcgttatggtacctcagttgaagaaatggaagcggcttctgttgcacaaattgcaagccagtttaatgttccgtttttaggaattcgaattttatctaataatattaccaataatggagcttatgaccctggtacaggagaagcttgccaagactacgtgcttaacgtagctgaagaatatatgaaatctaaactaccaaaataa

SEQ ID NO: 51386 - DNA, 537 bp, Acinetobacter baumannii
atgaaaaaatttatttttattgcggctagctctctttttaatattgcagcagcacaagcagctgatggtacgatcactattaatggtttagtaactgataatacgtgtacgattgatactggtgataaaaatctcactgtaaatttaccaacagtatcatctcaatctttgaaaaatgcgggcgatgttgctggtcgtacaccttttcaaatcaatttaacgaattgtgcttcagttggtaaagtcgcgacttattttgaaccaggcgcaacagttgattttaatactggtcgactactgaaccaagctacctctggtgcagctgccaatgtcaacatccaattattgggtagcaacaatgcagtaattcctgtaattgcgaaaggtgcttctggtgcacaagataactcacaatgggtaaatgtttctgctggagggaatgccgatcttaattattatgctgaatattatgcaactggagcatctacagcaggtactgtaacgtcacaagtgaaatacacgattatttatcaataa

SEQ ID NO: 51387 - DNA, 564 bp, Acinetobacter baumannii
atgtcatattcagatctctcatttcgcgcgttaagcgtactccataagtctcgatatctttttaataaacatggttttcataatgtaggagtagaccgcattgtgcgagaagcagaggtgccaaaagcttcgttttataactatttccactctaaagaacggcttattgaaatgtgcctacactttcaaaaagacgtcttaaaagaacaagtgcgctcaatcatttacatacaaaaagatttaatcttgcgtgaaaaactcaaaaagattttctttttacatactaatctggatggttattaccacttgctatttagggctatttttgaaattgagaaactctatcccgcagcctatcaagtggttgtacaatatcggcattggttaactactgaagtttataaattgcttttaactgtgaagaaagacactacgaaaagcgatagcgatatgtttttatttacattagatggtgccattattcagctgctagatgaaactaggggtgatacgagagaactgttattcgcttatattttaaagggtatttttcttaaagattaa

SEQ ID NO: 51388 - DNA, 942 bp, Acinetobacter baumannii
atggcgtattttgctgaaatttttcaaattccctttgaagaaagctggggatacgtaaccaatggtggcacagaaggtaatatgtttggctgctatctggcgcgtgagctatttcctgattccacattatattactcaaaagatacgcattattcggtgagaaaaatcgccaaattattgcagatgaaatcttgtgtgatcgaatcattggataatggtgaaatcgactatgatgatttaatccataaaataaaaaccaataaagaaagtcaccccattatttttgcaaatattggtacgaccatgaccggtgcaattgatgatattgaaatgattcaagagcgcttagcgcaaatcggaatcatgcgccgagattattatattcatgccgacgctgccttaagtggcatgattttaccttttgttgatcatcctcaagcgttttcctttgctcatggtatcgactcaatctgtgtgtctggtcataaaatgattggctcaccgattccgtgtggcattgttgtggccaaacgccaaaatgtagagcgtatatcggtagatgttgactatatctctacacgtgatcaaaccattagcggttctcgtaatggtcataccgtcttactgatgtgggcagcaatacgtagccaaaccaatttacaaagacgacagagaattcaacattgtctaaaaatggcccagtacgcggttgatcgctttcaggcagtgggcattcctgcttggcggaatccgaattcaatcactgtggtatttccgtgtccttctgagcacatctggaaaaagcattatctagcaacctctggaaatatggctcatttaattactacggcacatcaccgagatacacgtcagattgatagcttaattgacgacgttatttttgatttacaaggtgcctctaaacgtacagttggtttttag

SEQ ID NO: 51389 - DNA, 522 bp, Acinetobacter baumannii; identical to SEQ ID NO: 46238

SEQ ID NO: 51390 - DNA, 684 bp, Acinetobacter baumannii
gtgttgaaacgaagtattttgatactttttttgactggaaacattatcggtctatcatatgctcaagcagcagaactagagcctgtaaaacttaaaaaaagttgtattaagaagaaccctctagcagaaggccaaaatgaccctgagctattgaatatttttaaacaagtttgtgatagtgataatacaactcaaaaaaatgatttattagctaaagctgctatgcggttttatcaaaccaatcaaccagttaaagcattgaatttagcaagtcaattgcaaagtcaaaatatacgcggttcattaatcacagatgtcttatttttatctggtgtgagcattgcaaataactcattgcaacaaatgcgtaatcaggaaatgcgatatttaacgaatgacataacatatcctcctgcaaagcagttagttgaaaatattcatactgcaatgccggctcctgatccatccagtttcaaaactaacaactcggaaagcagttctactgataatgaaaaaagaaattataaaaaacagtacgcaacgcgtaataaagtgagtgcctctagaacatcaaataaacgagtagtaagtccagcaaaggccaccgcagtcaaacctaaaactgcacctgcagccactgtcaataaatcaaaaagttcgccttttgaccctttaattaaataa

SEQ ID NO: 51391 - DNA, 831 bp, Acinetobacter baumannii; identical to SEQ ID NO: 51264

SEQ ID NO: 51392 - DNA, 345 bp, Acinetobacter baumannii
atgaatgagaatgtagagctaataaattacattgatgtagctgagacagtttacgaacgggtatatgaaaataataaaatttcaaataatttgatcgttaatctaaatcgcattatggctgagataaagaatcaagctgcagaaaaaagactcaaattgaagtacagctcaatagactttgaacattgtttaagtttgcctttagctgatcgcaagataaaagtagatttaagtcttatacctcattttgaagatcgtgaagaaagtattttgtggttaactaactttattggaaaaatttgtgagcccagaaagatgcaaagacagaaaaaaaaacttcattaa

SEQ ID NO: 51393 - DNA, 801 bp, Acinetobacter baumannii
atggattatatagatccacgttttaaattaacgaaagaacaatttattcaaattggtaaagaagcagctgaaatttggcaaaaagaaactgggaaaacctattttatttatgattctcaagcagagcttactattaatttagtattggacaaccaacaagctactcaaaatgaaagaaaaaatagtataaatgagctattaaagcagcaggaagaatggagagagaaaaataaagctattcttttatttaaacaacaaattgatcaggaaacttctcttttaaataaagaaaaagagaatcttaattataaattcgaacaatatcaaaaagatgtatctctttttaatcaaggaaactatgggcaatttactcaaagcagtttgaacaaacgccaagctgagttaagccagctttcgttagaattacaaacaaagttttctcaacatagcaataaaatagaaatgcttaatagacaaattaagcaaataaatcaacaacaaaacctgcttaatcaatctattgagcaatttaatttgagcacgacttctggttcaaaaacttttcataaaggcttgtttagtcaaaaccaaattcagatttatggctttacttcattcgatgatctgcgcctaacacttgctcatgagtttggacattcattaggtttaaaacacaccgatgatcctaaatctttgatgtaccctcttttaagagagcaagatattcataacttcaaattaacaaattcagatttagatctattggctacattatatggttcaaatgacgaaaatcattaa

SEQ ID NO: 51394 - DNA, 387 bp, Acinetobacter baumannii
ttggcgtcttcggcaaattctgacttattccatgatggcaaggtctacttctcatcaaatggtttagttcaggatcgttcaaatctggatgatgttcaggattttactttaggacgtacttcacgccctcaagctgagattatgccttcaattgagcctgcttcaccgacaatcaatttcaaaattgaagtgattaatcaggtgagtggagcgacagttgaagctgaacaactggatgagcaaacagtccggatcattgttacagatgaactggataagcagcttccaagaaaggtaccgaaacttgttagtgatcaaatcggtaatccaaactcaactattagtcggtctttgactgagaatacgacagcaagacggaatcgttaa

SEQ ID NO: 51395 - DNA, 669 bp, Acinetobacter baumannii
gtgaaatacattttgttttcacaacgattaacagtaacgggtcttagtaaattatccggggtgcctcaacctacactcttccgttgggaaagtggacaatttcaagcgcctactattaagacagtagagaagttagcgaaatggtgtggtttaactacagaagaattgctctaccaagatattgaaaaaattttaaaaaataaaagctctgattccaatcttaaacttgataacaatgttgatcttaataataaaatcaacatagaaggagatttagtacctgtgatttcttgggtagcagcgggttcatttacagatgtacaaactgtgttaaaggatacggaagtaatagaatggcttccaccaatgaaaaaggctggtaagaatggttatggccttatagtcactggatactcaatgtatccaaagtttgaacctggtgatcgaatatatgtaaatcctgattatcctgtgtttgatctaaaaaccaatgatcttgtaattgttgcatgtgcaggtgaatcagaggctacttttaaaaagttaattattgaaggaaatgaaaaatatctagaaccgcttaatacaaaatggcctgagcagattattaaattaactgagggttgtaagttggtaggtaaagtagttggtatgcatagggagttttaa

SEQ ID NO: 51396 - DNA, 288 bp, Acinetobacter baumannii
atgagctttaccaatttctcaaccgggtcaacgcattcatttggaggtacttatgttgaactcgttcccaatgaattaattcgttataacgaccaatttgacgacacaaatttacctggcacgatgcaggtcaccattacattaaaaacagtattggtcggcacagaaatacacattacccaagaaggaatacctgaagttattcctgtggaagcatgctatttaggctggcaagagtctttatctttattgaagttgttagtagaagccgacattccagatcaataa

SEQ ID NO: 51397 - DNA, 525 bp, Acinetobacter baumannii
atgatggctggtattgagcattttactgcggtacttgccgaatacatgatgaagcacgaaaagaatttctactattcagatgatgccaaaagccgtgctttatggatgtggcatatgcttgaagaatctgagcataaagatattgcttatgacgtctatcaggttttaaacggtaattatccgttacgggcaacgggctttttaatggctttcattaccattttagggcttattccaacagcaactttatttgtacctctactgcgtaagccaaaagaactgttgaccagaaaattttggaaagatgcacgtcgtggcgtcaacttaatttttagtccaaaagatggcgtatttggtagcaccattggtcagatttttgattacttacgtccagacttccatccaaatgatcatgacacgaccgaatatctggagtactacaaaaagaaattacttaacgagggcggtgcaattgcgccttactttgtgaaggaatttacaccaccagttcgtgcagtttcataa

SEQ ID NO: 51398 - DNA, 345 bp, Acinetobacter baumannii
gtggcttcaaactttaaagtcaattatcaaggtgagggatctatatttattcaaaatatggaagtttatcactacggcgtaggtacgcctgatttaggcttaggagcatatagggcagccacaattgcaaatcaattggttggtgaagagttattcaaacttgatcattctcagtcattccaacaatttggagtgaatgtaccagcgcaagaagaagtttctgttcgcaatattgcagcctcaaaaataaccgagttttcaagacctttaaataaatcagggccaatgcatcattctgctttgggagcgtatgcacgaagtaaattatctgagcatattgaataa

SEQ ID NO: 51399 - DNA, 513 bp, Acinetobacter baumannii
atgctgcaatgggcatgtgatgcagctgaaggatcaaaaaaacacctgttagaactttattgtggtaatggtaatttcacacttccactctctttaaaatttgaaagagtgcttgcaactgaacttgcaaaatcatcagtttatgcggcgcagtggaatatcgaacagaaccaaattgataatattcaagtagctcgcctctcggctgaagagttcactcaagcctatcaaggtgaacgtgaattccgccgtctacaagaagcagatattgatattcaaagctacgacttcgatacagtattcgttgatcctccacgcgcaggaattgacgatgaaactttaaaactattgcagagctttgaacgtattatctacatttcatgcaaccccaacactttatatgaaaatttaaaaacgctcactcaaactcatcgcgttactaagtttgctttatttgatcagttcccttatacgcatcatgtagagtctggtgtcttacttgagaagatttaa

SEQ ID NO: 51400 - DNA, 573 bp, Acinetobacter baumannii
atggtcatgaagattgtcggtatcccgtatgcggatagcattttaaactttattgtaattgtagctgccttatcagccatgaatagcatgctttatatttcaactcgtatgctgtttagcttgtcacgtgcaggtgatgccccaaaagtctttggtcgaattagtagtaatggtgtaccggtaaatgcgctgttgttatctgcggtagggattggtattgctagtattgtttatacgattaatccagcttccgcatttccaattatgattgcgctatccatgtttggtgcgttgttcacgtggggaagtatatttgtgactcatatgttttttagaagacatatggttcagcaaaatatacaactaaaatttaaaattcctgctagtcgatttatctctttgtttgggtttattgcgattttaagcattacagtgactacctggtttaccagtgaatttaagtctactttacaatttggcgtacctttagtgcttgttcttatatttttctattatttgaaacgttctaccgtaaagttaaatctcaactctagtgaagaaacattgaagtga

SEQ ID NO: 51401 - DNA, 573 bp, Acinetobacter baumannii
atgaaagaaacttatcctgataataaatatgcagataagacttggagatcttatactattagacttattcgctggttagaattaacaggtttcttacagccagctacagagccaaatacatggatttataaagatttaggaagtcccaaaacttctgtgatgagtagaagacgtacttctaacttttttgtgccaagaattacacctcagttatttatatcgatatatcctcagattgcaggtaagaatcttcaagaattaataaatgatggtagaactaataaggctttagaaattttaaaaaaatttgaattaatagataatgaatttattttagatattaaagattttgagtctgtggtttatgctaaagctaattcagaatttagtatccaagctatgcttgaaattaaagagctatattctgctgataaactatcaggacaggctttaggtaagttgcttaaagaaaaatatgatttaaaatggactgatgtaactactcaatattcaggcaataaattgaatagttgggctaaatgggttaaatcttatgaagtgaaaaatgaataa

SEQ ID NO: 51402 - DNA, 492 bp, Acinetobacter baumannii; identical to SEQ ID NO: 48539

SEQ ID NO: 51403 - DNA, 246 bp, Acinetobacter baumannii
atgaagcgttcagttttatttatttcatcagttggggttatgacaagccatgtatatgctctggaagcagatcaacaggcagtaaccaaccttccaacaatttcagttaaagctgataaggaaatcagtttaaaacaagaagtggggcaagcatcaagtgcaactaaaggacttatgcaattaaaagatgtccctcaaattgtaaacgttgtactaccaatcaggctcacttcacgcaaagattga

SEQ ID NO: 51404 - DNA, 303 bp, Acinetobacter baumannii
atgcaaggtgccttgcaaaacgttgcaggtttaagctttagtgtaggagatggacaacgtgatcaggtcatgattcgtggtttctctgcaatcactgataactatgtagatggtattcgcgatgacgcattgtattttcgcgatatgtcgaatgtagagcggatcgaagttttaaaagggcctgcttcggtattatatggacgtggttcagcaggtggtttagttaacaagattaataaaaaaccaatggatcaatctttgcgtgaagtgagcctgattggtagtacaacgtttacaatttga

SEQ ID NO: 51405 - DNA, 225 bp, Acinetobacter baumannii
atgaaagagcttaacccaacagagaaacttcaattaaaagaggctcaaagagcttggattcaatacaaagaaaaagattgccaatttcaatcttcacctgttttaaagggctctttatatccatttgttcataatgcatgtttagtagaaaagacagaaaatagaattaaagaactacaagatatgcaagagtgtagatcaggtaacgaacctggttgcttataa

SEQ ID NO: 51406 - DNA, 219 bp, Acinetobacter baumannii
gtgattaaagatgctaatggaaatgttttggcggatggcgatagcgttactgtaattaaagatttaaaaattaaaggttcttcttcagttgttaaagtcggaacaaaagtaaaaagtattcgtttagttccagatgcaagtgatggtcacaatattgactgtaaaattgatggtattggtcagatgaagttaaaatctgaatttgtaaaaaaagcttaa

SEQ ID NO: 51407 - DNA, 2043 bp, Acinetobacter baumannii
atgaccaaccgtgtaaccaaacgcaacggctctacggagcctttttctcaagaaaaaattgagaaagcggtaatttgggccacaaaaaacacaaacgtgccacctcaattagttattgataatgcaattatgcttatctatgacggtattaaaacaagcgacattcaagaagctttaattagcgcagcatctaaactaacttctgcaaccatgacagatgcttcatttgtagcggctcgcttattgctcttagatttatacaaacttgtatgcggcgagcaaggaaaggtcgatggtggtggttttaaatatcctcacattaaggattacattcaggggggtgtttcttgcaaccttctcgaccctgctttattgcaaagctacgacctagatagaattaatgccgcaatcaagccagagcgtgatttgctgtttggttatttaggactagatactctaaaagaccgttactttattcgcaaaaatcgcgatgttaagtacgaaaaagcgactggtaaaacttcaggtgaaattatcgaattgccgcaacatttctggatgcgtgtagcaatgggtgtcgcaattaaagaaaagcctgaaaaccgcacggcgcgcgctcttgaatactatgaaatgtattcaactttgaactatatctcttcaacaccaacgcttttcaatgccggtacattacgccctcagttgtctagctgttacttaaaccaagtatcagacacgatcacagccgaacttggtgacagtcgttatgcttcaatctttggagccattgaagaaacagctttattgtctaagtttgctggtggtatcggcacagattggacacctgtgcgtggtgaaaatgaaatcatcattggtacaaatggtatctctagcggtgttgtgccttacatcaaagttcaaaacaatacagctgtcgcggtaaatcaaggcggtaaacgtaaaggttctgtggcgccttatcttgaatcttggcatcctgatttcatgtccttctgtgaactcaagaaggaagctggtgatgaccgacttcgtgcgcatgatgtattccctgccgcttgggttcctgatttgttaatgaaacgcaaagaagacccggaagcaatgtggtcgttcttctctccgcataaattccctgagcttcatgagttgtatggcgaagaatttgaagcccgttatgaagagcttgaagcgcttggtgaatttgagttccaattgcctgcaattaaagtgtggcgtcatattctttctaacttgtttgaaacgggccacccgtggattacattcaaagacgagagtaaccgccgtaaccctcagtcgcatgtgggggtaattcaccacagtaacttgtgtaccgaaatcacgctaaatacatctaaagaagaaacagctgtttgtaatcttggctcaatcaacctagccgttgtaatgtcgggcgataatccattagaaaaattgcgtacagcagttcgtttggccatccgaaatctcgactcggtgattgacgtaaactactacccatcagaacgcgccaaactctctaaccttcgtcaccgcccaattggtttaggtgtaatgggttattacgagtggctagtaaaacaaggtgtagattttgaaagtgatcaacatcttgaacaagcagacgcattgtttgaggcaatttcttactttgcaattgaagcctcagcagatctagcgcaagagcttgggtcatatccttcatttgaaggttctaagtggtcacaaggcatcttgccaattgacactgctaagaagatggaagatggcaagcctttctttgatcgcccacgtcgtttcgattgggaagccttgcgcgagaaagtcaagaaaggcatgcgcaactcaaacatcatggcaattgcaccaacggcaacgatctcaaacattgccggtacaacccaatgcacagaagtgccattcctgcttcagttctataaaacgaacctctgtacacgacaaatttcacagaacccttatcctatcagggttctgccttcttaa

SEQ ID NO: 51408 - DNA, 1440 bp, Acinetobacter baumannii; identical to SEQ ID NO: 45992

SEQ ID NO: 51409 - DNA, 1656 bp, Acinetobacter baumannii
atggaacttaaacgagttaatcaagatttttatgttgctggccagattactgccaacgatattgtaaaaattgcagaccaaggaataaaaactctgatatgtaaccgtccagatggggaaggtgcagatcaacccaatgtgattgaaattgaagaagcagctcagcgacatggcctaaacgtaatctatcagcctgttatcagtggtaaaattagcgatcaacaagttaccgagtttaagcagctttatcagaatgctcagaagcccgttttagcatattgtcgctctggtatgcgtgcaatcagtttgtgggctttggctgaagttgctccacaagatgcagcactgttagttgagtcgggtaataagcttgggtttaacttaaaaggcttggtgccacgtattttaaaacgtgatcatgaaccagccacaattccttgttatagcgttgtgattgttggcgctggggcagcaggaatttctgtagcgtcgagtcttttatgtcgtgaacctcatttagatattgtcattattgatcccgcagatacacattattatcaaccgggctggaccatggtcggtggtggtattttcaaaccacaagtaaccgcacgctcaatgacaagtgtgataccttcaaaagtaaaatggatgaaagctgcggttgctggattcgaccctgagcataatcaggttattttggaaggatgccaacctattcaatataaagcgttggtcgtctgtcctggtttaaaactcaattggcatggaattgaaggtttagttgaaaccttaggtaaaaatggagtgacgtctaactatcgttatgacttggcgccatatacatgggaactggtgcaacagttaaatagtggaaaggcaatctttacccagccgcctatgccgattaaatgtgccggtgctcctcaaaaagcgatgtacctttcagccgactactggttaaagcaaggcaaacttaaagatatctctatccatttttataacactggtgctgttttatttggtgtgaaggaatatgtacctgcactaatgcaatacgttgaaaaatatggcactgaactgcattttaaccatcaacttgtcaaagtagatgggcctgcaaaaaaagcatggtttaaggtagtgaacgatgaaaatgcagcattggtcgagactgatttcgatatgttgcatgttgttccaccgcaacaagccccggactttattcgtgccagtacactcactgatgaagcaggctgggtgagtgtgaatcctcaaaccttacaacacacacaacatgccaatatttttgctttaggcgatgtgatgaatgcacctaatgccaaaactgctgctgcggcacggacacaagctccgatcgttgctgtgaatgttatagcccagctcaaaggtgagaaaaacttctgcgagtacaacggctatggctcatgtccacttacggtagaacgaggaaaaatcgttctggctgagtttggctacggcggcaaattacttccaagttttccaaaatgggtaattgatgggcaaaaaccttcccgtttggcttggctgcttaaagagcggattttaccgccgatttattggcaaggcatgctcaagggccgcgagtggatggtcaaacctgagcaaggataa

SEQ ID NO: 51410 - DNA, 966 bp, Acinetobacter baumannii
atgagtgggtataataggccaattagagttggtttaattattgatgagttttttggtggtgctaatactgcttttggtggttatgggtttttagcgagaaatcatatagctaaatatattccaaatgcggatatccaaattgatgtgttactaggtaaaggcagtaaaaaactctttgctgaagaatatttagtagatgacgttaaattatatcgacttccgcgtagaaaatggtttgcacgtcgctggcttaggaaaaaaaattatgatatttatttaagtgttgaattaacatttaattatgtattggaaaatgaattagataaaactaaaaaattaattttatggatacaagacccaagacctacctatgagtgggaggaaattaatacagttaaattatttcctgaaactaattattataatcagaaaatatatgatctagtacatgattggtatattaataatcgtgtgaggtttatttcgcagggatattttcttaatcagaaagctatagatttatatcaattagaaaaaagtgttcccatagaatatgtgcctaatccaattgatatcgatttcaattttgatgttaaaacttatgttaaaaagaatataatcatttttttaggtcgtttagaatctgtaaaacggggctggctattttgtgaaattgcaaaaagaatgccacaatatgaattctatgtattaggacagacatttagagaggaaagtaaaaataatgagattatgaaaagatatcaaaatattgataatttacattttgcgggtcatgttgaaggcagtgaaaaagaaaaatttttaaaagatgctaaattacttattaacacctctattcatgaagccttacctatttcatttttagaagcactttcttttggaactttattagtaagtaaccgtaatcctgaagaattaacgaggctttgttgcacaaagatttaa

SEQ ID NO: 51411 - DNA, 444 bp, Acinetobacter baumannii; identical to SEQ ID NO: 49294

SEQ ID NO: 51412 - DNA, 1122 bp, Acinetobacter baumannii
atggctctaccgattattactgctgaccaaactttattggttcaagcaattattgtgtacctatacgctgatccgggtttaggtaaatcatcgatgggctttactgcggaaaaagcaatttcttttgactttgaccgtggtgctcaccgtactggtgaattacgtcgaggtgcggttgtacaggttcaacaatggagtgatgttgcaaaccttacgccgcaggacttagcaccctataaaaccgtagtcattgataccgtgggtgcaatgcttgaatgcattaaaacccacctgttacttacggcaaataaccgtcaaaaagatggttctttaaagttaaaggctcaaggattagcgaaccaaacgttcaagcaatacatcaatactttgatcagtttaggtaaagacgttgttttcattgcacacgcttcagaagatcaaaacggtgatcaaattatttaccgaccagatctaggtggtaaaaaccgtaacgagctttaccgtatcgcagatgtgatgggttatctaacaactgttactacaggtgaaggtaaaaatgcccgcgttattaattttaaaccctcgcctacacatcatgcgaaaaactcaggtgctttaggtggtgaaactggtgaagtatgggtaccagatcttaaagcacatcctactttcttggctgacctgattactcaagctaaagatcacattaacaccttaacgcctgcacaacttgcagcagctaaagcccaagaagagctagaaaactggaaacaaagctgtgaagaagctgagcatgcaggtgaccttaatcaattaactgagtcgcttgataaagaacacatgtattaccagaacatgcgccaagcaatgttaatgagagctaaagcattgaattgcacgtttgataaacaacgtggcacttggattagtccaccagaatttaacggtatctcagatcaacaaagagatgaacttcaaaactttattgctgaacgtggcctcgatgtaaaaacagtttgtgagcacttcggcatagatgccctgatccaaattgaagcggcaaaactaactgcagttaaacaagaaattgaaaccttagcgaaaacggggatgacagcatga

SEQ ID NO: 51413 - DNA, 396 bp, Acinetobacter baumannii; identical to SEQ ID NO: 46595

SEQ ID NO: 51414 - DNA, 714 bp, Acinetobacter baumannii
atggcaacaaaatttctgaaatcattcagcatcgcaactggtatttcgacaactttgcttattgcaagtttctctagccacgcacttgccatgagcccatttcaggcaaattatcagtttacctacaataataaaggtatgggttcagcgacacgtgcattgagtcaacaaggcaataattggacttatcaattcacagcaaaagcaggtggaatcgcttctgcaagtgaaacaagtaaatttagttttgcaaacggtaaaattggttcacaaagctttagtcgtaccagtaaaattttgatccataacaacacaatgagtattaattttaatcctggcaataagactattagcacgaaaaaagacgataaagcgcgctcattcgcttggcaagcaggtgtacttgatgagctgaatgcagaattacagattcgtgaagatttaaaaaatggttcacttaaatcgtcttaccctctagccgatgcaaaagaagttgaaaatcgtcgttttgttaaacaaggcaacgagaaaattaaaacctcttatggcacatttgataccgtgaaagttgttttacaacataagaaacctgagcgcagcacaattttctggctagctccgaaattagactaccttccagtcaaggtaagtcatattgatggcaaaacatcttatggtttgttattaacaagttatacaggtaaaacgaattaa

SEQ ID NO: 51415 - DNA, 729 bp, Acinetobacter baumannii
atgaaaaagcttatttctcagggaattatttattttctagtagccgctacttttgtattgagtcagtttgtctttgcagaagataagttattgtcacccgaacaggctttttcattttcggttgaatcgccacaatcgcataccgcaaagttatcgtggcagattcagccgaattattatttgtatcagcataaatttaccgtacaacagggcaatcagcctttaactttaaatttgcctaaagcggtttctcaatatgatgagaactatggccaaagccaagtttattaccatcaagtcaacttccagattaaaaccaagccttcagagcactacacagtaacttggcaaggctgtgccaaagaccgtatttgttatcctccacaaactattgagtttcaaactgacgcagatggtctggtcggtttgcaaaatcaggctggtgcagcaccaaaacgcttattagatttggcaaatacccaagcatcaaactctacggagcctttagaaaatcagagttcagctactcaagctgaaggagctgctccagagattgcccaagatcaggtttggtcagcaaagttaattgaacactcgctttggtatggtgttttattatttttaggtttaggcatgctgcttgcatttacgccatgctctttaccaatgctgccgattttaacttcattaactctgtacacgataaaaatagataactcattgaaataa

SEQ ID NO: 51416 - DNA, 834 bp, Acinetobacter baumannii; identical to SEQ ID NO: 49718

SEQ ID NO: 51417 - DNA, 1110 bp, Acinetobacter baumannii; identical to SEQ ID NO: 49715

SEQ ID NO: 51418 - DNA, 276 bp, Acinetobacter baumannii; identical to SEQ ID NO: 50126

SEQ ID NO: 51419 - DNA, 144 bp, Acinetobacter baumannii; identical to SEQ ID NO: 50127

SEQ ID NO: 51420 - DNA, 576 bp, Acinetobacter baumannii
atggctaagttatcgctaagtgaagtatctaaaaaatttcatattgataggtcaaccatttatagagctgtacgtaatgggcgtttatcacgctctagtgatggtcaatttgacctttcggaagtgattagatgctttggggagcctgagcaaatatctcaacaaattgaaccatctaaatcagataatgatgaatctacaaaaaaactcattattcatttagaaaatgaagtcaaaaaataccaagaacgtgaagagcgtttaatgcagcaaatcgaccgtatgcagacgcttattgagttaaaaactgttgcacccgccacggcagcgccacaacaagatgctacggcatgcgacaccgatatgccacagcatgcgacaacacaacaagacaatgattataaaaagaataatgaattaaatattgtagaaaatgtggctgtgccacagcaagaaactacagcataccacagccaaacgctacagcatgccacattacaaaatgtggcagtgccacaacctaaaaaacgaggcttatttggccgagtactgaatgcggtattcaatgaagagtaa

SEQ ID NO: 51421 - DNA, 951 bp, Acinetobacter baumannii
atgagagatttagttgtaaaagacaatgccttaatcaacgcaagctataacttagacttagtagaacaacgtttaattttattggctattgttgaagcaagggaaagtgggaaagggattaatgcaaatgatccattagaagttcatgcagatagttatatcaatcaatttggtgtacaccgtaatacagcttatcaagccttaaaagatgcttgtaaggatttattcgcgcgtcaatttagctatcaagagaaaaaagctaatgggaatatccgaaatgttatgagtcgttgggtatctcaaattgcttataacgacaatgaagcaactgtagacttaatatttgcacctgctgttgttcccttcataaccagactggaagaacaatttactaaatatgaattacagcaagttagtagtcttagtagcgcttatgccattcgcttatatgagcttctaattcagtggcgaagcactggtaaaaccccaactatagaactacaagaatttagaaagaagttaggcgttcttgataatgaatatttacggatggctcatttaaaagagcgtgttttagagctttcaattaaacaaataaatgagcatacggatataactgtaaaatatgaacagcataaaagaggacgttctatttcaggattttcttttacctttaaacagaaaaagaaggatagcccatcaatagaaagagatccgaataccttagaccttttttcaaagatgaccgatgctcaacggcatatgtttgcaaacaaactttcagaactccctgaaatgggtcgctattcacaaggaactgaaagctatcctcaatttgctgttcgtattgctgagatgctacaagactctgaaaaaatcaaagaactagccccatacctaaaaaaagtgggatacatgccatcaaataaaaaggacacagtaaatggctaa

SEQ ID NO: 51422 - DNA, 894 bp, Acinetobacter baumannii
atgaccttagagtatcaatttgatcagctctgcaataagttccgtgaaggttcacacgccacacaagcaaataggcgagctatgctgaaactgtttactgaacagcttgccaagaatggttatgatgttaaaaccatgtcgcctaaagatttaaaaggtcggcatgtaaataaattgcttgagcaatggcgtaaagatggtgtgtccactggaacaataaaaaatcggatggtggctgtaaggtggtgggctgaaaaagttggtaatagtggtgctgtcaaagacaatgcaacttataaaatagagaatcgtgtctatgtgaccaatgaaaataaatctatttctttaaaagatttagatttgtctaaaactgatccaaacatagcgcaaagcttacgtttacaagatgctttcgggcttagacgtgaagaaagcatgaagttccaacctgaatatgctttagatggtcagaaaattgaaaatgctaaatatatccgtttaaaagacagttggacgaaaggcggaagacctcgaactattccaataaccaacgaaaaacaacgtcaagaactcaaaaatgcctacgctcaagctgtgaaaaatggcggttcaatgattccgaaagaaaaaagctataagtcccacaaagccaattttgaagcagtcacgcatgcgctaggtgtgggacaaacgcatggtttacgacatggctacgctcagaccagataccgtgaattaatgggtttcgattgccctgctgtaggcggttctcgttcattgtcggctgacgagcaagtaaaagataaagaaatccgtatgttaattagtgaagaattgggacatagtcgaatcaatattacgtccgtgtacttgggttcatggagtaaaaattag

SEQ ID NO: 51423 - DNA, 240 bp, Acinetobacter baumannii
atgggtattgcatcagaaataagatcaagtttgccgttgtgtggtcgttgtattaattgcaagctattgatttggaatgataaagcggaactaaaatctactcaaaatttaattaaatttagaagctcagaagcatctttttattataccgttcgttgttcatggctcaaaagtcctgtatctgaacctcaatttctagatacctgtgaaggtaaacagcagcagaaagggagtgactaa

SEQ ID NO: 51424 - DNA, 1818 bp, Acinetobacter baumannii
atgctacataatttttttatgagctattacggctatttaataaatggattgcaccttaaaccgctgtttgttggttttgcaaatacgctgtttgctttagcaattattgtaatttttacgatgattgttgtcggtataaagaaaatttataaagcacatgatccagtatatgagatcggctataacattgttctgcttgctgtagtcgttttagcgcatacctatctattgagttatatcaccaacttacttccaaataattatgttgttgtaccagaaaaaaattacttcttttcatgggctgtaatcattgggttatatgtttatctgtattttactgggaagaagtcaaaaccccgtgttgaacgaataaaaaaagagtctgccgaaggctatgggacattgttaagcgaattaaagcgtggatttgaaaataaaacgccattaattgcctttacggatcagactttacccaaaaagcaaattaaagagatggaacaaaaatatcttgattggtcgttccatcgtgaaagtctaagggtgacaaatgaagatcggggcattgtgttaggcgcacctggttcaggtaaaacaacgtttttaatctctcaaatcgtggagtggatgaagtcgggtcgtagcttcgttgcaacagacgtaaagccagaaatttgggcgattctcaaagcaaacaatgtctttaaaattttcggttataccgattgggtttttaatccaacggatgtggatagtgaccactacaatattttttcagaagtaaaggattcagcagaactcaatgagattttaaacattatcatcaaagatgatacagccgattcagtggtttttaatgaccttgctagacgtattcttaaggcggttctcatcgaacttggtgataaggcatcactggtgaatgctcaaaattatattaacagtatggatagtaatgatgagctgttaaaggcattaagacagtctgaaaaatccagtgtttcaaatattgctaaagaagtttctcgaacagcccaaaatgatcgcttgcttgcatctgtgatgacggctgtttcaaaagcatttgagtttcttgatgatgatcgtattcgagtaactacatcagacaatacccaagggttctatttaaaagaagtattaatgaagccaaaacaagccgtatttctgcagtttgaccaacagtataagagttcaacagctacattatttggggcgatggtggcgcataccatgcgtattttgcaggcaaatcaaaatcgtgaggcggtattcattgccttagatgaaattattaattgtgcccctatcccaaaattcactgatttgctcaatacgatacgttctgcaaatatgcctacattcctctatctgcaaagtttagagggcttaaatcgcttgtatggagcaaatagcgacaagatgttcatggggtctagcaatttaaaaattgtttttagaattggggacattgagtcggctgaggaatgcagtcgattagtcggtcaaactgaaacgacatatatttctgaaacggcaggtacaagccagacgagcggtacaagttcatcgagtcgggcaagcagttcatcttccaataggtcgcaaaatacaggtacaaccaagtccattaaattggaatctattattgagcctgccgaatttattaagttgccgatctgtacggctgttgtgatgtataacggctcttacggaacattggaaatgccgaaatactatgagtgctacaacatgcccaaacgcactaatttaaaaacaattagggactttaaagtcgcttaa

SEQ ID NO: 51425 - DNA, 534 bp, Acinetobacter baumannii; identical to SEQ ID NO: 50124

SEQ ID NO: 51426 - DNA, 462 bp, Acinetobacter baumannii; identical to SEQ ID NO: 49741

SEQ ID NO: 51427 - DNA, 2412 bp, Acinetobacter baumannii; identical to SEQ ID NO: 46704

SEQ ID NO: 51428 - DNA, 921 bp, Acinetobacter baumannii; identical to SEQ ID NO: 45636

SEQ ID NO: 51429 - DNA, 951 bp, Acinetobacter baumannii; identical to SEQ ID NO: 51421

SEQ ID NO: 51430 - DNA, 576 bp, Acinetobacter baumannii; identical to SEQ ID NO: 51420

SEQ ID NO: 51431 - DNA, 144 bp, Acinetobacter baumannii; identical to SEQ ID NO: 50127

SEQ ID NO: 51432 - DNA, 276 bp, Acinetobacter baumannii; identical to SEQ ID NO: 50126

SEQ ID NO: 51433 - DNA, 399 bp, Acinetobacter baumannii; identical to SEQ ID NO: 49716

SEQ ID NO: 51434 - DNA, 306 bp, Acinetobacter baumannii; identical to SEQ ID NO: 49717

SEQ ID NO: 51435 - DNA, 834 bp, Acinetobacter baumannii; identical to SEQ ID NO: 49718

SEQ ID NO: 51436 - DNA, 438 bp, Acinetobacter baumannii
atgacgtcagagatgtcagaagtcgaaagaccagcatctttaagagcaatcttacaaggttcgatagtacgagcaactaaatcagcaactaaaccttcaagttttgcacgagttacgttgatcactaagtgtttaggaccagtcgcatcagcagtgatgtatggaaggttgatttcagttgcattcgaagaagaaagctcgatttttgctttttcagcagcttctttcaaacgttgtaacgcaagtggatcgtttttcaagtttacgttttgttctttcttgaattcttcaaccaagtattcaattaacgcgttatcgaagtcttcaccaccaaggaaagtatcaccgttagttgataacacttcaatttgttggtcgccatcaaggtccgcgatttcgatgatagatacgtcgaatgtaccaccacctaagtcgtaa

SEQ ID NO: 51437 - DNA, 438 bp, Acinetobacter baumannii
atgttttgtaaagcttcagttttcgctttgattgcttcaacatcattttcttttgttgctgcttcaagttcagaaactgctgtatttaccgctgttttttcatcttcagttactttgtcaccaagatctttaacagctttgtttgagcttgaaattaatgcatcagcttcgttacgagcttttgcaagttcttcaaacttacggtcttcttcagcatttgcttctgcatctttaatcatcgcttcgatttcagcatcagataaacctgagtttgccttaatctggatcgattgctctttaccagtgctcttgtcttttgcagacactttcaagataccgtcagcgttaatatcgaaagatacttcaatttgtggcacaccacgtggagcaggtgggatgtcacctaactggaagttacccaacaatttgttttgttga

SEQ ID NO: 51438 - DNA, 5676 bp, Acinetobacter baumannii
gtgactggtcagattgtgatccatgctgaggctgtagatgcgcaaggtaacgtagatgttgctgatgcagatgtaacagtaacactcgatgtcactccacctgatatcactacaacagtattagcaattgaccctgttaccgcagacaatattcttgatgcgacagaagttggtggaacagtaactttaactggtacattgaccaacgttcctgcagatgcaacaaccacaggtgtagtggtgactataaatggtaatgactacacagcaacagtagatgctatagcgggtacttggacagttaatgttgcgggcaatgaccttgctctagatccagacttaactgttgatgctaaagcgactttcacagatctcgctggaaacagtagtactctacaagatacacaaacttatactcttgcaggttctatcactgcctttgacaacactgatcatgcagttcttagtccgaaaccagcgcttgttggtgatgatgtaagtctaggtagtacttcttatttagtacttacatctgtagcaggcttagaccttcaacttggtggtaattctctaggatttactgtcgatgctggccatgaaggtgatgttactttccaatatagtggcttaatcgacgcagctgtactttctgattacaagttagtagttcagaagttcaatacaacaactaaccaatgggaatctatacatggtgatgctaattcatcattaattagcttgcacttgttaggtattggtacaggaaatgttcctggtgcagtccttgatggtttagatgcgggtcaataccgtgccttcttagcctacgacggactgttaggattgggcgtgttaggcactctttctgccactatggatgattatgatttgtctgtagcaggtggatatgaaattggtaatgctgaaggtaacgtgattactgatccagatccaacaacaggtcaagtcgatcaggtaactgcaaatacttatgtttcatcagtgaatggtcatccgattgatgctgatggagagacatttgcaggtacttacggaacaattactttctatcaagatggtagttatgtgtatgtaccaaatgcagatggttctggtgtaggtcaaactgatgtattcacatatacgttaactgactcagtaactggagcaacaggtcaagctaatcttaatatcgtgtttgattcgattcgtgcagcggataaccttgttgaggttgaactcaatccacaatatcaattggtgggtacagagactgattcagcattctatggcgttctattgaatgttggaaatattgttgacctacaactcctcacagtagatacggttgactttactatcggtgctggtcaggaaggggttgcaacatttaacttcaatagcttgattggtgcatctgctttaggtgactacaatgttgtgttgcaaaaatacaatgatgtgacaggacaatgggaagcagtgaatggtacaggtgatcgttcattactgaacttgaccttgcttggtaatacgccaactgcgcaaataggcgggcttacagagggtgaatatagagcattcttatcattcaatggcttggtaggcggagcagtagctgtaacattaaacggcagtgtagatgtctataacccagcggttattactggttacgatgtcgtagcagctcatggcaacctaatctctgatccaaatacgaatggtgatgttgatatcgctacacctaacagtattatcagtgaagtcaatggtgttgcagtaagtgcatctccaactgagattattggtactcacggtactttactcatctatgcaaatggtgattatacctatacgccaaatgctgatagtgctggattaggtcaggttgatcaatttacttataccttgttagacccagcttctaatataacttcacaagctacgttctatgtacatctagatagtaaagttgtggatatgaattgggatgcagctgatccatcacaacctgctactgtaacgattacagcagtggatgacgctgtaaatgctgcaattgctgctgagcctcatctcatcgaagatgacagagcattgggtagtgcaacttatcttgcattgttatcgttggctggcatcaacctacaagctcctttaccattcgtgaatagtactgtggagttcaatgtaggtgctggtgaaactggaaccgcaacctttaaatacagcagtttaattaatgaaggagcactcggtgattaccaacttgtagtacagaaattcaatactgctacaaatcgttgggaatcaattaccggtagcagtgaagcttctttactgaacttaagtgtattgggtataggtgtgaatgcgacaccgggagtggttgttgaagggcttgacgaaggtcaataccgtgcctttatgacatacaacggcctctatggtaagagtatcctaggtacattgtcaggtacgatggatgtttacgatccaaaccaaattgactttactggtttggcatctgaaggcaatgtcattactggtcttggcgtaggtacaaatgctgatgctgtaactggatacacaattgttgattcagttactgtaaacggtgtgactacgaatgttgatccaaatactggaacaattattcagggtcaatacggtacgcttcaaatattcgcgaatggtgattacatctatacgccgaataatacgaatgccaacctcggtctagtcgatcacttcacttatacgttggctgatcctttgggcggcaatataagtgcaagtctagacttcactattggcaacagtacgccagtgattgccgtagacgaccttgctgtagctgttgttaatccagaatatctgcaaattggtaacgatgttgcggtagatagctacctatatgtggcgttattaagcttaactgacaattttgacttccagttgggtggacaaggtgttgactttactttgaccgatagcaccttaaatgatgtgaccttcaattacagtgcattaatagatgcaagtctgcttgctgattatgtactcgtggttcagaaatttgatactgcaaccaatcaatgggtagctgtaaatggcactggagaagcggacttactcagtctggcagcctttggtggaaattcagtgacattggaaggtctagctgctggtcaatatagagcctatatgacttatgctggtagtggtgttggcgttagcttattaggtacattgtcagttcagaaagatgtatttgatgcgacaaatatcacaggttatagcactcaagttgcagaaggtaatgttattcatgatgtcggcttaaatggacacgcagatactgcttctggttttagcacagtaactagcgttgaatttaacggcacagcatttgctgttaatgcgacaggtgtcacaaccattgtcggtgaccacggtacattgtcaatttatgctaatggtaactacagctatcagccaaatggtgaggctgcaagccttggtcaagttgatcaatttacttacaccttgtcagatggtctaaatacatcgcaagcgaccttgtatctccatattgatagcgatgcagtcgatatgacttggaatacaagtgatccatcacaacctgctgtcatcacagttactcctgtagacgcgattgataacgttgtttctgctggtgtagatatcgttcctcaaggcgagcttggtgtagctgtaggttctgcaacttatctagcattggtgggcattacagaggacttaaatgtttccttgttaggaacaccaagtgttgcatttacaattgatgctggacacgaagctgatgtgacattcgcatatgctccagtgctttcattatcattgtttaatgactataaagttgtattacagcaaaaaggtgctgatggtgcttggcataatattgacggcggctcaagtactggcttactcaatattggtttactaggtaacggtggaattggtgttactgttccagatctaggccaaggtgaataccgtgcatttatggtttacaccggtttaggagtaggtatcctaggtacaatgagtgtagtgaaagatgactttgattacacagttgcgcctaccaatacagcggttgttgcagatggtaatgtattgactgatgacgtaactacgttaactactcaagttaccactgtgacatctgaagtagtgggtgctctaccacaaactgtcggaacagatacagttataaacggtgcatacggtacattggtgatttctacaaatggtcactacacctatacaccaaatacaactgatctgagcgcgattggtaaagtggattcattcacttatacaattcgtgatgtattaacaggggcaacagatacagcgacattacatgttcaggttggttcaccagacgtaacgatcgcatgggatgctgctaacccagcaaatgatggcgtagtacaattaactgctaatcctgatcatgtggttacaactacagacttctcaaatgctgctgatctaccagtagatgtggcgagccctgtggtttctgtaaacctcatcggttctaattcagtagtgtctgatcagtttgtagtaggagctggaactgttgctaatattgatctatcagcggtttatacagcacaacctttagcaagtgtactaccgacagtaagttatgtgatccaaagctggaatggtacagcatgggtgaatacaatttactcaggttctcaaactgctctaggaagtgtggcaactattcaagcgggtagtgttgcattccaagacactgttgagcatttagctgcaggtacctaccgcgtacaatatacgctaacaggtgtttcacttggtgcgacttcactagatacaaatgtttctacaacgacagttcatctagatacttatcgttcagattggatcagcggaaatgtgttggcaggagacaacattggtggagtagcggatacaggcatcttgtctcatgaaggagctaaactccaagtttgggataatgcacaaaatgcttatgttgatgcagttggacaaacaatcaataccggtaacggtgtattgattatgcaatcaaatggtgaatatgagtaccgtccaaatgatgtgactacaaccacacaattggcgtctactgacagtattaactataagattgtgtccgtaactggtggagttgaatctcaatcaaccttaacgattgatttaacacatactgattacaatcttctttacacaagtacttctgcgaatgacacattcacaacaggtacgggttcagatactgtgatttatcaattgttgaatggaactgctgctacagctaacaatggtgcaaatacaggtggtaacggtgtagatacttggactgacttccatgttggtaatgttgctacagacaaacaagctgatctgattgatatcagagccttgttagatggagatcaaacagatgctaatattggacaatatctgaatgtcactacaagtggtggtaacactacaattcagattgaccgtgatggattatcaggactcatcccaggtaataacttcactacattgttagtcttacaaggtgttactacaacagagactgaattacttaacaatggtcaaattctctattaa

SEQ ID NO: 51439 - DNA, 1248 bp, Acinetobacter baumannii
atgttagaacgttttttgaagaagcttcctttttataacaagacctggtttcaatttattttattcgtaattaagcgttttgaagcggatcgttgccgtgaacaagccggctccctcacctatacgactctttttgccgttgtacctatgttaacggtatttttagttattatttcttcaattaaggcattggaacctgccagacaacagttacagcacttaatctacagtaattttttacctaaaagtacgattgcttttgataaagctcttaatgcttttaccgaaaagtccagtaatttaactgtaattggtgtgctattcctctttgtcacaacagttttaatgcttacttcaattgaaaccgtttttaaccgaatatggcgagtaaaagaaacccgtagcggtattgtaggctttatgcgttactggaccattatttcgcttggtccaattattttaggcagtgcatttgttatttcatcaactgttgcttccatgaatttattgagcaataacttcacaggttatcaacttgatggcgcctttttactctggcttatttcttttgttctcacaattttaggtttttttattttatattggactattcccaaccgcacagttcccctatatgcagcagcaattgctgcatgcttaagtgctgcattatttgagacactcaaaaatttatttagctttgttatgtcaaatttcaccagttatgaaatcatatatggtgcgtttgcagcagtacctattttcctattatgggtcttcttatcttggaatattgtattgcttggtgtcgaggtgagttttgctcttaccgcttttcattcaggcaaagagcaaaaaagacatccggttttaatgctactcgacatcttggaattgttctataaaaagcaaaaacttggtgaaagcgtaagtgataaagaagcattagaaattttaggtcgtggtgaggttggtcgttggcctgcttatgttctcttactagaagagcaaaatctggttaaacgtaccgataaagatgaatatgttttggtccgcaatttatctcaagtcgacttttggagcttcttcactgcactgccttatccattacctttacgtcaggatgtatcaaatgttcatgatgatgacgaatggatggaaaaaattggcccagctttagtagagtctaatgattatttagctgcaaagctctctattccactttcaacaattttcgaagagaaataa

SEQ ID NO: 51440 - DNA, 321 bp, Acinetobacter baumannii
ttgattggtggaccacaatggccttctttattagaagtcttacgtaaaggtgggcgctatgcaaatgctggagcaatcgctggacctatttcgcagatcgatctacgtacagtgtatttgaatgatttgactttaatgggctgtacattccaagaagatgaagtgtttaccaacctcatttcatatatcgagaaaaatgaaattcgtccattagtggctaagacttatcccctcaatgaaatcgctaaagctcaagaagagtttctgagcaagaaacatctgggcaagctcgttttgactgttccatcagttgaggtatag

SEQ ID NO: 51441 - DNA, 273 bp, Acinetobacter baumannii
atgaaaaaacttgccaaaatccttcggttctcgatcggagttttaatcgtcctacttgcatacgctgctttaatatttttcattaggtatatatgggacgaagtagtatttagaaatattattctaataatacttagctttggactttattttatatctttgatttatggtgatgatgatgatagtacaatctctttgcttcttctaatttctaccattgcaatggttctctttacaacgtttaatctttttcttcagttaataaactggtga

SEQ ID NO: 51442 - DNA, 777 bp, Acinetobacter baumannii
gtgaattcaaaagttaacattggtaaaacttatagtgttttgaaaagtgagtttatacataccttaaaaagtatcgaccaatctaaaaacatttatgaaatatttcatgactttgttttttgttcagcagcagcattaagaaactcaattggtcatagatatcaaaatttgtttaaccacaatattgaaaatgaatatcttcaacgtatcaatcgttacgacgttagtggacgtttaaaaataaaaaaattgttttatctgttggtggatttatgcgaagcaaagggtgagccatatgatgtgttaggtagcatttacatggaattagaaattgggaatgatcatatcggccaatattttacaccaagtgaggtatcaaatttatgtgctcaagttgtaatgaccgaccttaaaaaacaacttgaggaagagggggtgatttcgatttccgatccagcttgtggagctggctcaactttactttcaactgtaaaactctgtttggaatctaagatacaagtgcaagatcacttgtatattgaggcagcagacattgatagaaacgttgctttaatgtgttatatacaactaagtttgtgggcagtgccttgccgtatttttgttggtgataccctcaagttaaagtatcgtgaatgctggtgtagcttaatgtattacgtaaaagggtgggacataaaattgcatagtcaaaaattaaaggaaattgtacataaagctgaagattatgtgcctaatttcattttaattaatgattga

SEQ ID NO: 51443 - DNA, 510 bp, Acinetobacter baumannii
atgaataaatctaaatttagctatgctgttgacttcaataatgaaattgttggaactttatctgctaaagaatacttcagtattgtaaagaaggcttatacggatttagtttttttaaaaaaacatgtttggccattagtgatgcattttctgaatgcttttagtaaatgccttgaactccttcctgcttttttcatcatgggtattctatgttgctcaattatgattccctttgatgatatccagaaaattgttggtgcgttagaaagcgcatcaaatcatgaacgttatgcttatttagggcaattagcggaaatcacttttcagatactcttttttgttgctgcaattgacactttaagattcttaacaacatctgacgggaataattatgtgagaagttattttggacttgaggctttaaaagtattgaatatttccgaaaacataattgatagatcccaggatactttggctcaaattgttattaggccaaataaaaaaatttaa

SEQ ID NO: 51444 - DNA, 1092 bp, Acinetobacter baumannii
atgaaaaataatgctttatataaagagcttgatagacatgatgatgtgaatgttattcctaatgtattaaaaaatgctataggacaggcacttgcatctgaaggtaagttgttctctgtctcagaaatagatttagatatttatgatttaattatcgtcagtatgagtggcggaaaagatagtattgcttctttgctctatttaatagagaaaggcgtggacatgtcaaaggttgaattgtggcataaccttgttgacggtaagagtgagccgtttatggattggctgtttatggatagctacaacaaacagcttgccaaagcatttaatttaccaatttataatagctggttaatgcatggcttcgagggggagatgctaaaaaataattccataagccatgaatatgagattgaaacaccgagtgggaatatcattattccaagaaaacgagcaaaagctggaacgagattgcggtttcctcaacaatcagcagatctccgtattagatggtgttcttcagctctgaagatcgaggtagggcgtagagctttatcaaaccaggagcgttttaataactctaaagttttatttgttactggagagcgtcgagaagaaagtcctaatcgagcaaaatacttccaattagaaacacatttttgtgataatcgtaatgggaaaaaaggtcgtctaattgatgcatatcgaccagttcttgattttacagaacgtcaagtgtgggaaattttagagcgtcataatgtcgcagcgccagtaccatatcgcttaggatggtcgagatcaagctgtatgacttgtatctataatagcccgaaagtttgggcaaccatcaaacattattttcccaatcgtattgatcgaatttttaaatacgaagaacaatttgcaactacaattagtcgaaaaaaaatcaatgtcataaatataagtgagggtattcagccttttaatatcaatgatttagtagctttggatcaggcaatgagaaaagaatataccttgcctatatttacaaaaaactgggagctacctatgggggcctttaataaagagggatgcggttcagattaa

SEQ ID NO: 51445 - DNA, 699 bp, Acinetobacter baumannii
  misc_feature (661)..(670): n is a, c, g, or t
atgcttaaggtgaaattaatgaaatcatattatcaaattagctttagtggtggacgtacttcagcatatttaacctggtacttgcttaataactatagccacctttataactttatagtcacatttgcaaatacaggcattgagcatgagaaaactttagagtttgtcgataaatgtgataaatattttaatttcaatacagtttggttagaagcagttattcaccctaaaaaaagagtaggtacgacgcataaagttgtcaattttaagacagctaccagggggccagtactttttgaacagatgattgagaaatacggaattcctaataaagtttataagcattgcacccgtgaattaaaaataagaccaatggattcatatattcgtagtattgggatgaaacctaaagatatccctactgcaatcggtatccgggctgatgaatctaaacgttgtgctaaggatgcagaagcaaataactttatttatccattagtcacagaacatccagtggataagcaattcatattagattggtggtcaaagcaagcgtttgatctagagctaaatgaatgggatggaaattgtaatatgtgttttgagaaatcatttccaaaattattgaagcagcttgaatcaaatccgtttgctttagagnnnnnnnnnncgaatggaaaggatccacgggcaaactaa

SEQ ID NO: 51446 - DNA, 291 bp, Acinetobacter baumannii; identical to SEQ ID NO: 46180

SEQ ID NO: 51447 - DNA, 648 bp, Acinetobacter baumannii; identical to SEQ ID NO: 49913

SEQ ID NO: 51448 - DNA, 201 bp, Acinetobacter baumannii
atggaacttattgcacttacccaaactgatttaaatgacagtgaacttatcttaagttgggtcagaaatgggcttaggtattttcatcaacttccttacatagatgctctaaagattaaaacggaaatgattactgagattgaggatggttttactgttgtgcttaatgggcaatattattggttgccaaaaacacaataa

SEQ ID NO: 51449 - DNA, 168 bp, Acinetobacter baumannii
atgaaaattatcggaatacttgctcctttagtaatttcattagctctcgtatttttagtgagtaagcaggttattaaacatgcttgtgaaagcggatctagctatgttggtgaaacaacttgtgaagaaaatggctttaaaaaaagatctttaatttctagtaattga

SEQ ID NO: 51450 - DNA, 279 bp, Acinetobacter baumannii
  misc_feature (214)..(223): n is a, c, g, or t
gtgaatcaagattttaaggtttatttacgtctcatatcctatttaaaaccttattggggcgtggccttattagttcttatcgggttcggtatgaactcagcgacggaggtttctgttgctaagctcattaaatttattattgatgcaattcaaagtgccagtagagcggatctagataggttccctttattaatcattttattggtattcttcnnnnnnnnnnggcctatttatgggagggtactatacggctgtgatctcgcgcagtttggtttttag

SEQ ID NO: 51451 - DNA, 963 bp, Acinetobacter baumannii; identical to SEQ ID NO: 51121

SEQ ID NO: 51452 - DNA, 336 bp, Acinetobacter baumannii
  misc_feature (311)..(320): n is a, c, g, or t
atggctcaaattattgcgattgcaaaccaaaagggtggtgttggtaaaacaacgactgcagtaaatcttgcagcgtcactagctgtattgaaaaaacgtgtgctacttgtcgatatagattcgcaaggtaatgctacgatggggtctggtattcaaaagaatgatctactttattcaattacggatgtgttattgggtgaagtgccaatcgaaacggcaattcaaaaagctgaggttggatataaagttttgggttcaaaccgtgaactttctggtgtcgagcttgccattgccgagcaagaaggtcgtgnnnnnnnnnnagaatgctttgaatga

SEQ ID NO: 51453 - DNA, 798 bp, Acinetobacter baumannii; identical to SEQ ID NO: 49362

SEQ ID NO: 51454 - DNA, 2157 bp, Acinetobacter baumannii; identical to SEQ ID NO: 46110

SEQ ID NO: 51455 - DNA, 444 bp, Acinetobacter baumannii
atgaattaccgacatattattgtacctgtagatggttctgagatttctttggcagcagcacgacaagccgcccatatcgctaaagcttttggtagtaaacttacagcaattagtctagttgcagtggacccgtttagtggtgttgatttctattacatctctcctgttgtaaaagattattttgttgaagcgcgtgctaatgcagaaaaaacacttgcgaaagtaaaagccctatgtgctgaagaaggtgttgatattgaaacacaaattattcaaggtgaaatctcatctgatggcatccttaaagctgtagaagagttgggttcagacctgattgttattggttcacatggtcgtaaaggtttccaaaaacttattttgggtagttttgcgcaagatgttctaaacagcactaaaatccaagttttggtggtaaaagaataa

SEQ ID NO: 51456 - DNA, 345 bp, Acinetobacter baumannii
atgtatgaatatgatcttataaatgaaatgatcagagaaaatagaccttttattaaagggttgcgttacaatctggatagaaaaaaaccgttgtcgagtttagtggctcttgatactttgcctgttcctacggcaatgtatatcattccggcagcacaatctcacacgtataaagaaagtgtagttaatttgattgaagctagtgaatatgaaggttggatatgggaggctgaaatggcgatgcctgatcttccaaaacttggattattaactacagattcagaaattttagaggacaatttaaaaccaaatgagcagttattcgatacaaatcggacaagttaa

SEQ ID NO: 51457 - DNA, 960 bp, Acinetobacter baumannii
ttgggggctaataaccgtgattcgttagctgatctttctaaccaaatgctgtcattagttactaatgatcagttgggagttatgggagaattaatgacggatattactgtaaaattaaaaagaacagacttttccattggtagtgataaatcaaatataccgttgataggggggctgttagcaaaaattggtaattcaaaagacaggcttattactaaatttaagacagtagaatcacaattaaatgataatttattgcaagtagcagaagctcaaaaagggttgcaattaaataatgatagcttgacgaaattatttgagcatacaatttctgtttatactcaactaggttttgctgtcatagctggtcgatataaaaaaaatgagcttattggcttgattgagtcacttaacagtgaaggtacagatctagcaaagcaaagagcaaatgcatattcacaaatcttagagcgtttagataagcgtattacggatctagaattgttgagattaagtgccttacaaacgttgcctcagattacttttttgcagaacaataatattgcgttaattgaaaagttccaaactatatctggcttaactattccagcctggcaaagacaattaatgttggccttgaatattttagatcaaaagaaatactcacaattaggtgaggaaattgataatttcacaaatgaaacacttctagaaagcgcgaaagattttaaagaaacttcaattcatattgcaaaacaaagcaaccgccaagttatagatattgagacacttcagaaggtgcagcttgatacattaactgcttttgaagaagttatggcaatcaacaaaacttcagctcagaagcgaaaagaaacacaattacaggcacaacaattaaatgatcagctcaaaagcctggtcgttgcggatccgcaacaattaaaaatcagtgcagattaa

SEQ ID NO: 51458 - DNA, 495 bp, Acinetobacter baumannii; identical to SEQ ID NO: 20174

SEQ ID NO: 51459 - DNA, 219 bp, Acinetobacter baumannii; identical to SEQ ID NO: 49282

SEQ ID NO: 51460 - DNA, 519 bp, Acinetobacter baumannii
ttgcctgcggatgtattgaaacaagttagggcttgggattttggggctaccgaaaatgagggcgactttacagtaggtgtgcgagaagctctaggcgcagatggttttacttacattgtcgatgtaactagaggacagcttggacctgacaatgtgaataagcgcttagaacaaacagcaaaaatagatgggaaaaaagtttctgtgcgtctaccacaagatcccggtcaagctggtaaatcgcaagctagttcatttgtgaagcttcttgcgggttataacgtgatagccaaaccaatttcaggtgacaagcttacacgtgcacaaccatttgcggcccaagttaacgtgggaaatgtacgaatgctcaaaggtgaatggaataaggattttattgatgagcttcgtcattttcctaatggcacacatgacgaccaagtggatgcagcttcagatgcgtttaatgaattacatgaaggttttgaagccttctttgctgatatgggatttgctcgatga

SEQ ID NO: 51461 - DNA, 228 bp, Acinetobacter baumannii
gtgaagaaaaatcttttaaatatgccacttgatttacaaatgaaaagggctaatgaagctggtctaactttagatcaatggcaacaatctataaatgaaaaattagcaaatatgcatcaatgtgttattaaatctatggttccaactggtaagttttgcttcatcaaattatccgattctgagcgattccaaaggaaaatggactcggctatattcgtaataaagtaa

SEQ ID NO: 51462 - DNA, 285 bp, Acinetobacter baumannii
atgaaaaccaaagaaattatccaaatgccactgaaattgatctcatcaagtaaaaaagatgatgtatacgaaaatattgaagctcttgtattgagcataaagaaagatggctttttactccctatcagcgtgcgaatgaatcccgataaaacaggagaattcattgttaatcttggggaaaaccgatttagggcagcgctagcacttggtttaaatactattcctgtttatattgaggaagctccaaaaatttctattgatttcctgtttacgagtccagaataa

SEQ ID NO: 51463 - DNA, 1044 bp, Acinetobacter baumannii
atgagtagacgctttcattctattataaatcaatttgttactgatcaagaaatggaagtctatagtatagatgaagcttggctcttactaactaattacgagagtttatttgatctaactgaatatgcacatactataaaaaaagaaatctttcgattaattggtttgcccgtctcagttggattgggtagatcaaaaacagaggctaaattaggtaattttctagcaaaaaagatgaaacatttcaatggagtatgcgatttagttaacatggatccactcataaaagaagacatttttcaggatattcccttgaatgaagtgtggggagttggaaggcgaatagcaaagcaattaaataattttgggttttcttcagtttatgacttagctgttgctaatccagtatggataaaaaaacaatttagtgtggtattagcaagaacagtaatggagctgcgaggaatcccatgtattgagattgagcatagtccaccaagtcaaaagcaaataatatcatcaaaatcttttggtcagcgtgtcacagcattggaagacttacaagaagcaatttctcgatatactcaagatgcgtttagaaggcttagaaaagctaatttgctttgtggttgtatcattgtattcgcacactctaatccatttgataataaaagaaagtactactataagagctctacaagtggttttgttattcctactgataatgttttaactttggttgaagctgcggtaaagctaatcgagaaagtgtatacagaagggatagaatataaaaagtgcgggcttatattaaccgggctggaaccaaagtcacttttcacatatgacttattaacagatatggatgatatagcaaaacaagaaaatctcatgttagcgttcgagtcgatcactaataaatttggtaaaaaaaagcttgcagttggtacatgtatgttcccggatcggaaatggaccatgtgccgtaatagcctaagccaaaattatttttcatgggatgggctattaaaaattaacaattaa

SEQ ID NO: 51464 - DNA, 1434 bp, Acinetobacter baumannii
atgcaatcattaaattatcggaataatgatgcatcgcaacatggaagttctgcacctttgaaacgagcaatgagtactcgacatttggtgatgatctcccttggcggtgccataggtacaggtctttttcttgggtctggcgacgtaatctctcaagcaggtccaattggcgcaattatctcttatttcttgggcggtctaattgcctataccgttatgctgtgtctcggtgagctagcggttcatgtccctgaatctggctcttttggtgaatacgcacggcgttatatcggtccaggtacggggtatatgattacttggctgtattggctgacttggactgcaactttggggactgagtttaccgctgcggccttgttggttcaggagtggtttccatctacctcggtatgggcttggactcttttctttggcgccttggttttctttcttaatgtaagttcaactcgcttatttgcagagtctgaattttggctggcgcttgtaaaagtaatcaccattatctgttttattggtttggggctgcttgcaattttcggctttattccttatcaggggcatgaaacagcaccattgttcagtaatttgactgctcatggttggttcccaaatggtcttttcccaatttttgccactatgcttatcgttaactttgcattttctggcacagaattaattggggtggcggctggcgaagctgagaatccagcaaaaacagtccctaaggcaattaatgcggctatttggcgcttattgattttctttgttggtacgattgtagtgattagttcactattgccataccacctagcaggtcttagtgcaaatgatgtgagcagtagcccatttgtgactgtatttaattacattggtattccgtatgcagaggatattatccgtttcgtaattattacggctttactttcagctgctaactcgggtctatttgctgcatcacgtatgatgtggtcgctttcagcaaaaaatcaattacctaaaatttttgcgaaactcacgccgtctggaacacctattattgccattattgtgacaatgtttggagctattccggggttgctttcagaacaatttgcgccagaaacaatttttaaaaatttgttgggtgttgctgcttttacaatggttgtcgtttggattgcaatttgtatttcgcaatttaacttccgtagacagtggtataagtcaggaaaaacagtaaaagatctacgtttcgctgcaccactttttcctcttactccaattgtaggcgggctattctgtatagttacttgtatcagtatggtatttgatccttctatgcaagtgggctttatctgctgcattatttttatcttgctatgctatgtcagctatttcatcttttatcgtaaaaaagatatagctcaaaactaa

SEQ ID NO: 51465 - DNA, 918 bp, Acinetobacter baumannii; identical to SEQ ID NO: 45767

SEQ ID NO: 51466 - DNA, 489 bp, Acinetobacter baumannii
atggaagatatgcaaactatcatagataaaattagtaagtgcctagcattatcaaaaagtgccaatgagcatgaagcagccgttgcacttaagcaagcacagacattgatgcagaagtacaaaataagtgaaaaacagatactaattagtgatattaaagagcgaattattcagacaaaaactcaaagaactaaagatattgaaagacggcttaaagtaatgatcgcaaatgtctttgaatgcggaagttactcaggtttttacactttagaaggtgtgaaatatcaacaacatgttttttatggagttgaaccaaatgtgtctattgcaacatatgcatatactgttttactccctattttgattaaaaataaacaaagttatttagccactttacatggaaatactaaacttaaatctaagagacgtttaggcataagctatcatagagggtggattcttggagttgaaaaaagtgtaggaacttaa

SEQ ID NO: 51467 - DNA, 486 bp, Acinetobacter baumannii
atgagtctgatgattagtcgtgtgaataacaccaaagagaatataatttggcgtttaggatacttattgatagtgttaataacaggatatttagtattttttgtatttaatacgcaaatagatgcattcgtgtcagatcttgaaaataagattttgggtattgacaatgctaataactcaaaatcaattgatagtttactgccctttgaatcgctatttaatttagtggacatttatttcatctcatttgccgtaaaattagtcttcgttcagattgcaatttctatttggtggaaaattggagcttttattggcgtggttgaaaaagtgaatgataaattttcagccaaagttgaagctgggacaaaggaagataaatctgatcaatttactgcaaatgatttattttgggtaataacacttacacctttaggggcgagtttagttgcttggttattcttattgatcttgatgtttattgattag

SEQ ID NO: 51468 - DNA, 336 bp, Acinetobacter baumannii
atgatagttagtgttactcaagattcgcgcgaatttaatattaatatattgaaagcaaaaagaaacaatgaggcaccatttaaatattggttagagaacgtgttaaagcgtggagatattttacctcgtggtaaattctttaaaggcaaaactgctggtaagccaatttgggtgactgatgagttttggatgcacagggaggatgatatttttaccagtaattttattgttcctccggcgagatatggattgagtattttttccgagggtgaagcagaacatttcatgttagttggtacaactaaacgaggtagaaattatgagtctgatgattag

SEQ ID NO: 51469 - DNA, 918 bp, Acinetobacter baumannii
atgagttcaggcgcaaaaattcgattatatgcttgtgaagaagcagttttaggaacaactccagcaaacccgatctggtacacagttcgccgtgtaagtgatggcttatcagaaaacgtatctactgaagaaagcagtgaagtagtggattcacgctatcgacaaggcggggtagttactgaagccgaagtggcagggcagttagagtttgaattatcacttggtacctttgatttgttcttaagtgctttagcattcaataactgggcgacaaacagtttaacaattggcggtgctgttcgaaaatcattaacgttagttaaagtttttgaagatattgggcaggtgtttatttaccgtggagttcaggtcaattctggtgaaattactatccagactacaggaaagatcactggtaactttggtcttgtaggtagctcatttactagacagcaagtcaaccctgttgtaaatccggttgcagcttcaacacgtccactggtcagtatgccaaacgtggaaaacttgcttgtaaacggccagtcaattcagggtaaagcgtgtctacagtctcttaccatttctatcaataacaaccttgaagcaatccgttgtatcggttcgggtaagtacacaccagagttctatattgaaaagatgatggatatcgaagcgaatgcttcatttatgttctcgtcaacttcagcagggtggattgatgccattaaaacacgtgatgtatttacactgacctttgatattaaagatagtaaaggtagtaaatattcgttcaacttcccgcaattggaagtcatggaagccaatcacccggatggtggtggtgatgacatcattactgtagatatcaactttgcccaagttcgtacagcgccaacaattgtacgcgctcttgtgtaa

SEQ ID NO: 51470 - DNA, 486 bp, Acinetobacter baumannii; identical to SEQ ID NO: 50159

SEQ ID NO: 51471 - DNA, 279 bp, Acinetobacter baumannii
atggatagttttacacttactctatatctttcaagttttttattgttgcaatcactgagttttctttttaaggatgactttgaagaatttgatacttctttaattggtttaagtttaatgtgtggaataggaattaaagcttcattagttttttttacaaccacactttctattaataaaatagcaagtatcatatttttaattctatttacaattttttctttaatccatatcctcattaatttttacaattctgttgtaaaaagaaaatacggatag

SEQ ID NO: 51472 - DNA, 234 bp, Acinetobacter baumannii; identical to SEQ ID NO: 49212

SEQ ID NO: 51473 - DNA, 780 bp, Acinetobacter baumannii; identical to SEQ ID NO: 30171

SEQ ID NO: 51474 - DNA, 249 bp, Acinetobacter baumannii
atggaattagattttataactgatatttattgtaatattgataatatgcagcgaattcggtttttaactatttttgagggttactgttttgaattttttttcctaacagataaatcacagtctctttctggcttaggcgtacttaagaaaaataaaaggattcttaaaatgccatatattgatatattttccatccctgaatttcaaaaaagcctttcagaaatgattgagagtcaaaagcagaattaa

SEQ ID NO: 51475 - DNA, 684 bp, Acinetobacter baumannii; identical to SEQ ID NO: 49392

SEQ ID NO: 51476 - DNA, 504 bp, Acinetobacter baumannii
atgattaatttgcttgagctcctttatctaggagatttttattcccttgtgtttatatttttcttgatgttaatgctagctagtttaattttctttgcattaaaaaaacgtccaattttctataattcattcagcttatcattctttcttactttaattgcttggttgagcataaatgcagcaccactaccctttgcattacaggaaaatattaaaactcttttaattcaacaagcaaaagccggtgttgggtctaacggtcttgtaaatcgtattctagtgccatgtatgtatccaaataaaggttatattagagggtttgattatcactatgctttagattcttataaaactgacatgcaaaaacatcttgataaaactgaagcttttaaagttcaacctaagagtgtcttaaacatcgatactagtttagagctgtgtaaatttattgaagaatttaatgtaataaaagttaaagaaatcacagaaaatgaacctagataa

SEQ ID NO: 51477 - DNA, 222 bp, Acinetobacter baumannii
gtggaaaaggcagccattgtagctgatctcgaaaatccacttgatattccagaaggccgctggattgatatccgtctgcatgaagaacctgaaccagagcctgaagagccgttgagtgaaacaccagtggatttccagccgactaacttatctcaggcagttgctgcagccatgaatggcgtggaaccgccagaaatctcagaaacagacgaaacactttaa

SEQ ID NO: 51478 - DNA, 162 bp, Acinetobacter baumannii
atgtctgctgaaactgtgcctgtacctggcaatgaagtgttgcctgcagggtcagttgctgttgcagtcactgtatcgccatccaccaggttacctgggtttggtactgaccagctgccatctgtgcctgctaccactgttgcagtggtgccatcaggataa

SEQ ID NO: 51479 - DNA, 1410 bp, Acinetobacter baumannii
atgtttgataccttaacagaacgactcacgcagagtttaagaaatgttactggctcagggcagctgaccgaagacaatattaaagataccttacgtgaagtacgtatggctcttcttgaagccgatgtcgcgttacctgtaactcgtgaatttatcgcgaaagttaaggaagaggcattgggccaagaagtgatgactcagttatctccaggccaggcatttgtaaaaattgtctatgatgaactcaccaagatgatgggtgaggccaatgaaacactggatttaagtgctaagcctccagttgtggtattacttgctggtttacaaggtgcaggtaaaacaactacagcagccaagctggcacgtttcttaaaagaacgtcaaaagaaaaaagtaatgaccgtttctgccgacgtttatcgtccggcagcgattaaacagttagaaactgtgtcagcagaagttggtgcaggctttattccatcagatccttctgaaaaaccaattgatattgttaaccgtgcaattgaacaggcaaaaatccagtttgctgatgtgttgattgtcgatacagcgggtcgtttgcatgtcgatgaagacatgatggacgaaattaaagaattgcatgcagcagttaagccgactgaaaccttgtttgtggttgatgccatgacaggtcaggatgctgcaaatactgctaaagcatttaacgatgctttagcgcttacaggtgtgattcttactaaaactgatggtgatgcgcgtggtggtgcggcactttctgtgcgtgctattaccggtaagccaattaagttcttaggtatgggcgaaaagcttgatgctttagaaccattccatccggaccgtgttgctcaacgtattttaggtatgggtgacgtactttctttagtcgaagaagttgaacgtaaaatcgacaaagaaaaagccgagaaaatggcgaaaaaattgcaaaaaggtggcagcttcaactttgaagatatgctgatgcaatttgagcaaatgaagaagatgggcggcatgatgggcttcttagacaagttgccaggcatgagcagtgcaggaattcagcaagcaattgagcaggcgaatcctgaaaagcaggtcaagaaaatggaagctattatccagtcaatgaccatcaaggaacgccgtaatccagacctgatgaacccaagccgtaaaaaacgtattgcagctgggtgtggtatggatgtagctgaagtgaataaactcattaagcaacaagcacaaatggctaaaatgatgaagaagtttgcgaatccatctggtatgagcaaaatgatgcgttcattaggcaatatgcaaaaacaatttggcggtggcggcggtatgggaccactgtttggtaataatgaccaaaagaaataa

SEQ ID NO: 51480 - DNA, 942 bp, Acinetobacter baumannii
gtgaaaaactatacagttgctgtaaagattacagaatctaagtctttctttaaaaaagatatttatgaggctgcactttttgataaaccgaatattaatgctactggttccagttatgacgaggtgattaggaaggtatatgagaagacgcttgagtattttgattttctaagtgaccaaggtcttgatattcctgagccgactgaaattaattcaataacatttaaaaaacgtgataaagatgttttttttcatgtcataacaattgatacatcaatctatgcggaaaagactgaaaagattaacgttacaattcccatatctttaacacgaaaaattgatgactttctaaaagataaagtacataactcaaatcttttctcctctagatcagattacataaccaaatcttgccaaagatatttaccctatgcgaattatcttgcctcgctctacaataatgaagatttaataattgctcacagatatcacgaaagtaataccacgagaaattgtcttaatttgctcgactatttgaagctacctaattgtcaagaagtaatcttatttgcgacttatcgtacacctactgatgggtttagtagagatgacgggcctgaaactaatttgcccctcatgggagcaattgcgaaagtccaattaccaggattaaacgagatttatattatttttgatggacttttcctaaccgcgcaaaggaagccgcgctacaatgaagtaaaagctgtgctggatacagctttggaaacagataaaacatcatttattcaattatcagttccatttacttcacagttagatcctgtggaagcagtcaaaatattaagtgaatttcctagacagaaattaactaaggaaactcgacctactttttttaatttattaagtaatctaacagaagaacaatatgtaaatttttaa

SEQ ID NO: 51481 - DNA, 1254 bp, Acinetobacter baumannii
atgacaaatattaccctgaatgttctttcacaaccagatgaaactggcactgatgtgctaactgctttattgcgtaatggtgctcgtcagctcattgcgcaagcagttgaagtagagctgcagcaactgctgcaagctcatgaagaactgcgtttacccgatggccgcaaagctgtggtgcgtaacggctatttgcctgagcgcagcatccaaacgggcattggcgatgttgatatcaaggtgccaaaagtgcgtgatcgtagcggctctggtattcgttttaccagcgcactgctaccgccatacctcaagcgtgcccgcagcgttgaagagttattaccgtggctgtatctcaaaggtatttccactggagactaccaagaagcccttgcagccttgctgggtgagaatgccaaaggtctgtcagctaacaccatttccaggctcaaggaacgctggattgatgagcaccgagagtggcgacagcgcgatttgagtgacaagcgctacgcgtacctttgggttgacggtatttacagcaacgtccgcctagatgaccgtttgtgcttgctggtggtgatgggcgtgacagagcatggtcgcaaggagctgattgccgttgaggaaggctatcgcgagtctgaagccagctggcttgagctgctgaatggcctggttgcgcgtgggcttacgacctgcccaaagctggcaatagctgacggcgccttgggcttctggaaagccctgagtaaggtctatccgcagaccaaacaacaacgctgttgggtgcataaaacggccaatgtgctcaacaaactgcccaaagcagtacagcccaaagtaaaagaagcactgcatgatatctggatggcagagacgcgtgagaaggctcataaagcctttgatatagcgctggaaaggtttactgctaagtacccacgcgcaatggaatgcttagctaaagaccgtgagagcatgttggctttctacgattttccagcagaacattgggtgagtatacgcaccaccaacccaattgaatctgccttcgctacagtacgtttaagaaccagcaaaacccgcaattgcggttcaagaaacacaaccctagcaatggtttataaattgctgcaatcagcgcagaagcgctggaaccgcctgaaaggatttcaactgctaaccctcgtggtcaataacgttaaattccaagacggcgaacaagtaatggagcaatcagacaggaaaaccgcctga

SEQ ID NO: 51482 - DNA, 249 bp, Acinetobacter baumannii
atgaaaatttgtataggtggtgatctcaacggtcaggttgttgagaaagatgtttattcatttaaagctgctgaaatcgatccagaaaaaaagtcagagtatttcattcagagttatattcttggagataagcgagagttatggtcaaatctggtgtacgagcatcaggcggttttcctgtctgattgctccattacttgttcgccgtcttggaatttaacgttattgaccacgagggttagcagttga

SEQ ID NO: 51483 - DNA, 780 bp, Acinetobacter baumannii
atgactttgggtatttgtaagctttgtggtgaagaaaaaaatttaaaacgttctcatgttattggtaaaacagtttttagcaaaatactaagagaaacagaaggtaattacgcaattaacatatcattaagtgagaagaaaattaaaaaaagtaatgatacttgggagagtagacttttatgctcagggtgcgaatctagacttaacaataaatttgaagattactccattcatgtattacggcaagaatacagagatgtaaaatattctaatggtccacatggggtgttttttaagaatgtagaaacatatagagtaattttatactttttttcaattttttggagagctggttactcaagccataaagcatataaaaattctgtaataaatgatggcgttagcaatcacttgataaatgcttttgatggtgaaatcaagcttaattcaaaacacttctcagttagagtgagattgttgaaagatcatacaaatgccttaccaccagaatttttaaaaagacaaatttttagcccttataaccgtctcaaagatgatggttttgtattcagtttggtttatgaagggtatttttttgagttattttttaatgctagtaattttagagagagacaaaaaccaggttttttaaatagtaaaaacgatttcttttttgtcccttatgtagatgtttttgatgttccagaaattacagaggtgcttttccaatgtttcaaaattcataaagagacgccagatgaagaaaaaattaaaatataa

SEQ ID NO: 51484 - DNA, 777 bp, Acinetobacter baumannii
atgagtgaacaagcatcacaaaattatagtttccaagcggaagtagcacagcttttacatttagtgacgcattctctctattcaaaccctgaaattttcttacgtgaacttatctctaatgcatcagatgcttgtgataaattgcgtttcgaaggaattaatcatcctgaatattatgaaaatgatcctaatttacatgtacgaatcagcttaaataaagaagataaaactttaacgatttctgataacggtattggtttaagccaacaagaagccattgataacttgggtaccattgcaaaatcaggtactaaagatttcatgtcaaaattgacgggtgaccagaaagcggatgctcagttaattggtcagtttggtgttggtttctactcaggttttattgttgctgataaaattacagttgaatcacgtcgcgcaggtctagatgcttctgaaggggtgcgttggattagtggtggcacaggtgagtttgaagttcagcaaattgataaagcttcacgcggtactgacattattcttcacttacgtgatgatgcgcttgattatttagagtcttatagtcttataaagttaagcaaatcgttaataaatattctgaccacattagcttgccaattgaaatgcaaaaagaagtttggcaagaagaagaggttgctgaaggtgaggagcctaaaggcggccaaatggtcaaaacagatgagtgggaagcaattaactcggcaagtgcactatggacacgtaacaagagtgaagtga

SEQ ID NO: 51485 - DNA, 699 bp, Acinetobacter baumannii
atgaatcaaaaaattaaagttttattaatagatactattggttggattacttccatttgtatcatatttttctttttcactctttggttatattcctacaatcaaattgataacccattaaaagaagcttggtccctaatggtaagcatactttcagctttagctactattggggcagcaataattgcagctagtttatttaatgattggagagattctcaaacaggcttaaatagatctgaacttgctagaaatacacaaacatctttatataaacttgtaagttatcttgattattatcataagtatgtaatgacacaaaaacatttatggaactcaaaaaacttcccagagattagtaaaaatttaatcgatcaggcagaaaaaatacctaacgaatgtgaagaaagaagaagtatatttcgcaatgaatgcgaagagctctataaacaatttctgatcgatttaaagatttatgaaaagaccttcgactccgatcttaatctagatttagatcgaatccgacattacagaggatgtattggaggaatgctaagagacctatcacaatcaaaatcagcttttgaattaaatgcaatgacaaatcatctaaagaattccgaaaaactatttaataaagaaatacttgatatagtaacttctgaaatgtctcaatatattaatttaaaagtaaaatag

SEQ ID NO: 51486 - DNA, 906 bp, Acinetobacter baumannii
atgaataagaatgtattaatcacaggtgccagtggctttattggaacgcatttaattaggttcctgctacaaaaaaattataacgtgattgctgtgacacggcaggctggaaagaaatctgaccatcctgccttgcagtgggtacaaaagttcgaagatatttcgatccgtcaaattgattatgtggtgaatttggccggtgcaaatattggtgagaaacgctggaccgagtcacgtaaaaaacaactcattaaaagccgtgtaaatacgacccgaaaattgtatgtatggctcaagcaatctcaaatttttccggaagtaattgtgtctggttctgcaattggttattacggaatagatgctcaagaaaaatgggcagaggtgtgcactgaacaaagttcgccacagcctatttttatgtctcagctttgccaagagtgggaactcgcagcgttagcagatcctcagcaaaatactaaaattattcgtttaggcgttgtgtttgggcagggtggcggcatcttgcctaaaatgttgcttcctattcgactcaatttagtcggtcaaattggtcatggccgtcaacctgtggtttgggtacatattgaagacgtattaaacgcaattgagtttatatttcagcatcctcaatcagctcaaattcataatgtggtggcgccagaaaatgtgacccaaaaggtatttgttgaacaagctgccaaagttttgaataagaaaccaatgttgtcggcgcctagtacagtttttcgctgtttgttaggagagcagtcgcaattgatcttaaatgggcaatacgtcaaacccgcagccttacaagcagaaggatttgagtttgcttatcctcaattaaaaatggctttagaaaatatactcgcctcaggctaa

SEQ ID NO: 51487 - DNA, 2256 bp, Acinetobacter baumannii
atgaacaacgttagctataaccgtaattttaaaactgggaatgatcaaagaattaatcaccgttcttttgtattaaatggtgttgcatctgcacaaatagcccttcgattaggctatgcattaggcaccgtatttgttctatgtgcatcaaatacctatgctgctgttattgataattcagcaaaaactctagaacaacaaactgctcaaacaaatgtagcagctttacccgcaattaccgtaaaagctgaacaagatgatacttatgcgggagggcaggtttcgtcgaaaagctcagttggctttttaggtaataaaaccgttatggaaaccccgtttaataccattgcgtatacggatacatatatcgccgataaacaggcaaaagatataacaagtgtgattgcgaaaacagatccatccgtgttcaccaatgcggcaagtggtggctggagtgaaaactattatattcgtggctttgagtcgagcccgagtgatatgtctatgaatggattgtttggtataaccccttattatcgaacttcacctgaaatgtttgaaaaaataaatgtacttaaaggtccttctgcattactcaatggaatgccaccaacaggttccattggtgggacagttgatctcactaccaaacgtgcaacggatgaaccattaacacgtttgactacgacatatatgtctgactctcagtttggtgggcatttagatgttggacgacgatttggttcggacaaggaattcggtgtgcgagcaaatgcggtatatcgggatggctctggaccagtagaaaaacaggatttgaaaactgagttattttcattaggaatggattggcatggtgatcgtgcacgtgtttcgacagatctttacacatccaaagatcgagtggatggcgtaacacgaggcatcaacctcggaaaagatatcgcgattccgaaaccacctaaacctgagactttactcaatccagattggtcttttgtggacattcaagataagggcgccatgatacgcggtgaatatgatctgaccaataacgtgatggggtacgcaacctatggacaaagtaaaactgaatataaatataatggtgcgatgtcagcaactgttttagataacactggaaccttccaaacaagtattggtcaactgacatttaatgttgataaaaagtcggcagatgtagggctgaaaggaaaatttaatacaggagcagtaggacatcaatgggtagtcaatgcgacatattacaaacataatcaagatgattatggggtaagaaatgtggcaggagctgaatggacgactaatctttatgatccaatttgggggaaagctgtcccttttaatgcacccctaatatctaattctgaattgcaattaaatagttacggtttggcggataccctatcttttattgaagatcgcttacagttaactttaggtgtacgttatcaagaggtagaaagtagtaatttatttgtgccgacatcgactttgactaaatataaaaagaatgcaacgacaccaggcgccgcaattctatttaaagcgacagataaagtttcgatttatgcaaactacatcgagggcttaaccaaaggtgatgcagccccccttactgcggcaaactatccaacaatatttgcaccttacaaaacaaagcaaacagaatttggggtgaagtttgatcaaggtacatttgcgcataccttgtcattgtttgaaatcaaaaaaccaagtgcttacactgatttagtaactaatatatatacgtctgggggagagcaacgtaatcgagggattgaatggagtttctttggatcaccaattgaaaatgtacgtttgatgggcggtgcatcttatattgaacctgaagtgactaaaacagccatccaaagcaatgaaggaaatatggccgtaggtgtccctaaaacacaagggaaattaggtgttgaatgggataatgaagttgcacaaggcgttttaactttatctagcaatgcaaccgcagtttcgaaacagtatatcgatcaagaaaatacattgcatattcctggacgtacgctgatagatgtcggtgcacgatataaaacttcaatctcaaatcatcctattacttttaaagcagacatcaataacttgatgaataaagcctattggggaatgcctaaactatcgaatttggctttaggcgcaccaagaacgtatatgctatctgtatcatatgacttttaa

SEQ ID NO: 51488 - DNA, 150 bp, Acinetobacter baumannii; identical to SEQ ID NO: 45823

SEQ ID NO: 51489 - DNA, 843 bp, Acinetobacter baumannii
ttgggtgcttcggttgatcttgaatatctgatttcggaatttaacaaagttaaagatgctagtgaagaatctcttagagacttcttggccaaacacttaaacattgaaatcggcatgaaccttcgtgctaaccggtgggcgggtgcagagtattggaatgctcaagctaaagatatccaaatcgaccaactaattgagctatccgatgtcattactttgggtattgatggcggtggtctcgacgacttacttggcttcgctgctttaggtcgtttaacagaagatcctcgtatctggtggctatggaatcatgcatgggcaaataagattgctttagagcgcagaaaagagaatgtgcctaagtatgaagacttcaagtctgagggttctctaactgttgttgaccgaataggcgatgacattgaccaactcgcagcaattgctaagaaggtttatgacagtggaaagcttaataagatcggactagatccattgggcttaggcggtcttttagatggcttacttgaggcaggaattccagaggaaagcatgtttgctgtgccacaaggctacaaactcatgtcctacatccttactactgagcgcaaattggcagaaggcaatctgtaccatgctggacaacagctaatgacttgggcggcaggtaatgcccgtgtcgtgatggtcggcaatggtatgcgaataaccaagcaagaatcaggtgttgggaagattgacccattgattgccacatttaacgcagttgctttgatgtcaagcaatcctgagcctgccaatcgcgttgatattgacgaatacttagaggatgtcgtgatagcatga

SEQ ID NO: 51490 - DNA, 711 bp, Acinetobacter baumannii
atgaaaaaattgagtgacgaatacttacctgttagaaaagctcaaactgtttatgggagtatttcaggaaattatgcttttagaggtgaaaaaaccatatggtttgaatcgacccttgagcgtgatttcatacttaagcaagaatttaataacaatgtgattgatgttatcggtcaacctgtagttatcccctacatcactgaattgggtaatcaatcaaactacacccctgactttttggtgcagttttcaagctcgaattgtgatgattttgaggatttccctgtacctatgcttattgaaattaagcccaagaaaaagcttgctgaggactgggataagttaaaaccaaaatttagagcagctcatcgttttgctgctgataaaggatggaagttcaaaattatcagtgaaacaagattatatgatcagtattgggaaaatattaatttcttaaaaaaatttagacgctctcatatagatgccgttgatcaacaattattactcgataccctacaaaagttaggtcaatcaacaattaatcaattacctgctcatctttttaaagataaaaccaatgttctaaaagggattcaccaagtttgggcactagtggcaaagcgaatgattgcttgtgacttgtattgccctttaacggctgaaactgtgatatgggttaaccaaaatgatgcgtttgtgaggaatatctaa

SEQ ID NO: 51491 - DNA, 270 bp, Acinetobacter baumannii
atggcaagcacagcagcagagcgtaaagcaaaacaacgccaagaaatgttaaaaaaagggttcacgcgtaaggatctttggttatcaaaagaaagtttagaggtaatagaaaaatttaaatcagagcataaattgagctcaaatgatgaagcaattaatcttttactaaaaacaattgtggtaatagaaaaattcaaatcggagcataaatttaacactatagatgaagtaattaatcttttcttaaaatctcttaatgagtgcaaataa

SEQ ID NO: 51492 - DNA, 357 bp, Acinetobacter baumannii
atgaaaaattcagttagtaatagttatattgttcaagctaacggcgtaaaagttgttaaggcagatgtaaattctatagtaaccacgaataaaagaattcatgtaggtgatgacactcccgctttcgctttttatgtgtgtggtttttgggacagtattgaccaatttgaacgttatggtatgacaccgcatgtaacattgtataaaaccgagtctgaggtgaaggaatactgcaaaggcaaagtggtgtcttatcgcgagtattacgcaaattcggaaaaagaagttgatgatctaattgcaactaatagaatgtcacatgaaaatcacgcacgttcattagctgaattgttctga

SEQ ID NO: 51493 - DNA, 318 bp, Acinetobacter baumannii
atgaatgaagttaaagcatataaattaactgttgagaacgttgaattgtttgaagaaattgagcatgaggtactttttcaaacaactattaaaactaaaaaatcaattttgaattatttgacgcctgtttcaacattggccacattgcttcagagacataacatcatacttccgaaaggtatttttttgggaagcataattgaaatctatgatgaggaagttgagcctcgtgtcattatcggacatgaaggttgtgactttggaaatgttaagacagttcgccagttagagatctactgggaagaagtggcattttaa

SEQ ID NO: 51494 - DNA, 933 bp, Acinetobacter baumannii
atgctagacagagaaatacttctaaaaaaatggttagatgaatatttattagcaaataaatctaatgaaacaatatacacgcttaaaaatagtttaaatctattctttgaatataccaatttagcattagaggaaatcgaagcatcagatattagaacatttatagcttatagagctcaaaatggagtaggagtttctacactaaaaaaaaatatctctgctataagaacatttttccattatttaactaaagaaaaattaattaatttcaatccagcagaagatattaaaattaaaaaaagtagtaaagttttacctaaatttcatgaagtcacagtaataaatgaagtattagattcaaataagaatttagaatttgaacgaccatcaagcacagttatttttaaaagagacttagcactaattgaaatagcatactcatgtggtttaagacttgaagaaatacactcattacaaatagaaaatgtagaggtaaaacgcaaacaagtaagagttacaggaaaaggaaataaaactcgtattatacctttgggttcaaaagctattgaagcgtatctagaatggttgcctttaagagaagaaattatgaataaagataccaatcaaaaacataattatgtttttgtcaccacaactggagctcaactatcaagagtccaaataaataaaagaattaaaaatgcttttaaacttgctggttatccaattcaatccaacccacacatgttacgccattcatttgcaactcatctaataaataattctgtaggtattcgtgaaattcaggaaatgctgggccatagtaatttgaatactactcagatctatacagatctggaccatacttcaatgacaaatgtttatatggatacacatccaagagccgtaaaaaatactgaaggtgagaactaa

SEQ ID NO: 51495 - DNA, 228 bp, Acinetobacter baumannii
atgaatagcaaattttctgttgatcaatcgaacaagatttctcttaaagcagtgcttgaagatcttggtgatcaaatgtttgaagcaaataaatgtcctgatactcatcctgtctatgatcagttgcgtgagcgtttacgtaaagatcgtcaacttctagatgccttagatgctcaagatgagaacgcaaatactgaagaacgttctaggagtttggatataaattaa

SEQ ID NO: 51496 - DNA, 1503 bp, Acinetobacter baumannii
atgacacaaaaaaatgaactagacaccaagtatgcagtgatagttgctggtggtaatggagctggtaaatccactctgatagacaatgtgataattccaaaatttaatagtttaaatcttgatataaattttattaatgctgatgtttggcaattacaacactttggtcattttgataataccaatcctacccatgcacgcgaagctcagaaatgggctgaagctgaacgtcaaaaacatttagatgaaggacgttcttttattgctgaaacagttttttcgcatccttctaaagttgatctcatcaaggaagctaagagtaagggattttacgtagtcctgtatcacatccatttagaaaactcagatatcgcacttgatcgtattaaagatcgagttcgtaaaggtggtcatgatgttgatgaggataaggtaaaagctagatatgagcgtgtactacccttagttgctgaagctactcaatatgcagatttgacttttgtacttgataacagcgtgagagataggcctcatcagcaagtatttaaattagagtacgggaaaattactgcgattgacaacaatgttccggattgggccattaaagcttatgagaagcagctcactgattatcttggattggatcaagcaaccaaaatttcaaatactaatgaagatttaactatgtcaaatactaaagagaaacttggattcgagtataacgctagactgctggctaatgatattcaacctcaacatcgagaaacagttgttgctaattatcgaaagaattttgttgaacatgtagcgaactctgctgcggtagctggtaattcacataagcttgatgatgtagcatctttaataaatggcaccactgtaggtggacacagtgttaaggaccagcgacaagtattaaatttaattgatgcgtcaaatgaactggtaaatatggttcgtaatggaaattttgcattaaataaatctacatatttaaaagtcaatggaattgttgcagatcgtgaatcgattgaagctggtgttctacgtggcgaaggagttgaacaatcatttactccggatgtaggaattagacactttagaacccatcgaccgatgaaaactgaagaagatgctccggcgttaaataaattcatgcaagaagggtttgatcatatcaactcactcaagaacccactagaaaaaggtattgctacattcctttatggaagcctcaaccaattcacatttgaaggtgagaaaagaacagctcaccttatgatgaatggagtattgatgagtgctggtttagatgctattagcataccggctgataaggcaattgacttccgtcaaaaaatggttcgtttctatgaatcaaaaaatgcggatgaagtgatggagtttttagctgacttgcatccggctctcaataatacgaaaaaattagatgcagaaaaggaaaagaaatcagaaaatgactttggccgcagctttcagtaa

SEQ ID NO: 51497 - DNA, 1164 bp, Acinetobacter baumannii
atggccagccttaattctgagttccagatccctttaaaagtggttacaacgcgcttaaatcacatgaaaattaatttgccgcaattggtaaagaaaattgaaaagagagcgattgaaaacttaaaaagacgtaaagataagaaagaacaaattgatctactgataacttgggatgattggatttatgccgcgcttgatgctgatcatgaacgtatacatggaagcgcggatcctcacccacttccaccaacattcaaaaataatatggttagtggtgtatatgaaaaagctttaaaaaatgtcatggggcatttcggagttaaagctactgttccagcatgggcggcaaatataaaggttggtgagcatattccaaaggaattgcttgatcgtctgcctgtgaccactggagagcttgtaactctaggaaattggatgctcacaaaaaatatataccggttcgaagacatagtaattaatgagttaattaagaccggctttaatggggttataccaaaccatattttgaaccttcccgatttgtgtgtatacattcagactgataatgctaagggtcttacattcgaaaatagacaagttgtgggtgttctattctgtgtaactgagctttgtggcgaccgccttttagtttcaacaatgtaccttgatgatggtatgccacgcacaattgcaattatgttgaatgaggaccaagatattgaagcaagcctcacaaattttgtggaccaatttcaacaagactatgatccagaaacaatggcttcagatctgaaagaaagacttaaaatacagaaaaaattaatcaatcttgttttatggtttagtcaatcaaaacctgaagtgactcctttaactccagataccaataagccggtacaatttgttgagattaagaaggaaaagcgtttatttgaagctggcaaatataagacttttaaaattggatctgaaacagctaggaaattaactaaattatacgaagaaattgaagtggccaaagctgaaggaaaagcatctggtagagagccacatttaagaaaatcacattggcacctttactggtatggtaagaaaggtcgttatgaacgttatgattttttattaattcctgtcacaattgttggcggcgtttcaaaagattaa

SEQ ID NO: 51498 - DNA, 582 bp, Acinetobacter baumannii
atggataattcagaatctaaaattttagctgaatacgagaaagcgaagaagtgggataaatacgaaaaagtattttctattcttggagtactttctttgtttatatttatggttatgatcataatttcagcaattactttgagtttaaatgatacttcaccaactaaaatatttaattcttattgttgggctgcaatattatttttggcagttttattcacctcactaagaaatattgctgagcagatttcttttaagaaatctatggaaatcttaatagactcaaaagatgctgaagatgaaaaagatcaattggcagtagtaagaaggcagcatacaattatttgcataactgcattttgtgcattaatagttgcggattttattttattctactttattgcttttaatctcacccttcccctaaatatactgattcataaacccttatttattattatgctggcttgtttaatattttttactattaattatttgatttataaatataagtttaataaattaaacaacgaagcaatggttgcattcggtaagcaccttgataataaaagaaagaaataa

SEQ ID NO: 51499 - DNA, 639 bp, Acinetobacter baumannii
atgagagatcgtttttacatcgcatgctttagagataatgtcggaccaaatgtaagttttcatcgacatcaatttgcaggttatcacactgatattgatcaagcatatgtttgtacattagatgaagcacagcgtcatttcaatcatgctagagagtttgaatgtccaatttctgctgatcatgttgatgcattagctgtatggaaagttgatcaccaaacaattccaaatagcactcaaattatcgatagtgtttttggatatgctgttttcgttcaagggaaatattcaggaaatgatgttttttggttgaatataagttcttttgacatatcaactgattttgaaaaggcttcatatttttctaaagatgaagtaagtcaacttgataagaagtatattgctatcccatttcatttagctgaaaaagcaaaacgtaggacttttgattttaatcaatataatcctcgaatcatgactcaaggagcaggcttaaaacaacctgaacatttaaaaagggccaaaagaagagtcaaaaaccctcaaacacgttttaactgcccaaaatgcggaaaaatcgtatggcaatacaacccctatgactttgatcactgtaatcattgtggacatatggggtga

SEQ ID NO: 51500 - DNA, 369 bp, Acinetobacter baumannii
atgaacactaacttccttcgtggttctagacgttataacaatagtccaaatggtacgaccaacaataaatctttccgggagtttaaggggaaagatgaagagcgtggtttatacaaagttcgcttaggccatactgtttatgcagcaaatcacactttaactcgtgtttatacaattgatgaagctggtgaattaactcctgtcactcaatatacgttggatacaaatgagtggattctacgtaatttacaaaccgaaattaaatatcgtagaggtcatgagttaaatcaaatccttagtaaaacgcacatcccctcaccagatcgtaaagattataaaaaacgtcgcggttttcttggtacacgttag

SEQ ID NO: 51501 - DNA, 363 bp, Acinetobacter baumannii
atgaaacctactctatttacgcctgaaacatgggcggagtttacccaacaactcaaaaattcttgggaaaaagataacgctggtactgattcaccaatttttgttgttcaagaaaaaaagattgtttggggtttagatccggctagtgattctgtagaaatcactaatattgtagatgccgatgatgaatcaacatataaatcaattgatgatttttttgaatctcttaaagctacagataagcatgctttaaatggtttagcaattgaagaggaagatgaacttttcctcgatgtaaagaggagattctcaaaaataatcctgaggctgcaaaggtttttgcatatcacattattggtttag

SEQ ID NO: 51502 - DNA, 804 bp, Acinetobacter baumannii
atgtatagtaaaaacaatgtcttgcttccaagcaaatcagcatattcattagaagaagcatgtaaagaattgaatttatttttcaatcgagatgatatagatattagatatatattagatttagttcatcaagggcatatttggatgcatgcaaaatttagtaagaataattatctttttgccatccctatggaatgggagttagatgaaaattttaataatgaaaatgaaaagagaatagaagaaatacttttttttaatagaatgcttaattatcaaaatatttataataaaatgggggattatgatctatatcttaagttaactttagagacagcattcgatttgcttaataataaaattattataaaaccattaatattagatatttatgatccgtgtgaatatttttacctttgtgataattatcttaaaattgattccggatattatttggaatttaaaaaatatcctaaagggcttaaaagagatgagtattttgatacggttcttataaatcattcagaaaaagaaattattaaaaaaatgtctttttttgagatatatgatgaaatttataatggtacagaatttgccgatctatactacgagtttcctgaggtaatggagattgtagaaatacaaaataggcacgcaactgatagaatagataaatttaagtggaaaaaaggatgggagaagtattactggtacggcgataaacagttagaggattttgaaatggaatataatttagaagatatttctctgtacacgataaaaatagataactcattgaaataa

SEQ ID NO: 51503 - DNA, 228 bp, Acinetobacter baumannii
atgaatatcccacctcgaccatttaagttgtctgtaatcgcctgcgcgatttgttatgccaacctcacctatgcccaagatacacaggtacaagctttgcaaacgattcaagtcaaagcatcaaatgcagagcagtcttctgaacagaccaaggcatataatgttaaaaactcgagtagtgcaaccaagcttaatattgaggcctctgtacacgataaaaatagataa

SEQ ID NO: 51504 - DNA, 1017 bp, Acinetobacter baumannii
atgaaaagaatattattaacaggtttcttatttacggctggccttggtgtatacggtgaagctaatgcttattgtacacttagttctggattcaccacagttgatatatcaatggctgtgggacgtgttgttgttcgaccaagtgacccagttggaaaaatattaagaaaagcaacttttccaattaatccaaatggatccacactccgttgtacttcatatagcgatactattacggctgcattaactcaaaactatcctttaagccctctaggcaacagcatttattctacaaatattccaggaatcggtatccgtttataccgtgaagcagaaaatgcaactaatttttctggctattatccgtatacccgtagcttaacccccggaacaacttacaatcttgctcagggatattttgttgttgaaattgtgaaaactgcagatcagactggttctggcacattggttcctggcttatatagccgttactatgtaaatggtcatatggatcgcccttttttaaccagtacagtttatggtaatgcaattaccattgcttcttcttcatgtgaaattcagggtaatatcaataaagttgtacagctaccaacagttacaaaggcaggttttaaaggtgttggctcaactcaaggcgaccaaacctttgatatgaacattctatgtaatggtggtattaatccaacaggttatgaagagaaaaacctcattagcttaacttacgactttacccaagacggaacaaataatcaggtcctagcaaatactgctccgacatctgaaaaagcaaatggtgtaggtgtacagttactctggaattatcaaaataaaaatcaggttatcaaaaaaggtgacaaattagccttaggtaccttgtcttctaaccagacaattcaatataacgtaccaatgactgcccgctactatcaaacagcaacaaatgtgacggctggtaaagtacgtgcaatggctactgtaactattgaatatgattaa

SEQ ID NO: 51505 - DNA, 747 bp, Acinetobacter baumannii
atgagttatctatttttatcgtgtacagagaattttttgttaggtttggcgtttgcttcatctgttgctgctcctgccgctcaagcagaaattgtaattcatggcacccgtgtaatttatccgtcggatgctagagaagttacgctacaagttagcaataacggttcaaagccagcacttgtccaagcttggattgatgaaggtgatccaaaaagtactccggatcaatcaaaagttccttttatgattgctcctccaatttctcgtgttgaagcgacaaaaagtcagacgctccgtattactgcccttccaaatgcttctcaatttaaccagaagcaagaaactgttttgtggttaaacgttttggatattccaccaagacctacctcaaaaaatgcagatacgacacctgataacttcttacaacttgcaattcgttcccggatcaaattcttctatcgtccggcttcaattaaagaagatgcgaatttagcagcagataagcttcaatgggttaaatctggtcagaatttaacggtaaaaaatccaactcctttccacattacgatgacttctgtttatcaaaaggttggagataaaaaagttgatttattgcctcaagggctaatggttaagcctttttctgaagcttctattcagcttaagaatagcaatcttcaggatatgagttttattaatgtcaacgactatggtggtcgagtcgaacaccaaataaaacttcagtaa

SEQ ID NO: 51506 - DNA, 1341 bp, Acinetobacter baumannii; identical to SEQ ID NO: 46048

SEQ ID NO: 51507 - DNA, 1194 bp, Acinetobacter baumannii
atgagggttggatgctccagtttatgcaacaaagcttgggaattcccaaaagtacctttgggttattttgctccaacttacccgcagattcgcgacattttctttccaactattgaagaggttgctttcgattgggggcttaaaactaaggtttatgaaaccaataaagaggtggatatctattatggtcggcaatatcgaactacaatcatttgccggtctatggagaaaccagcaaccattgtaggttttaaaattggccacgccttgattgatgagcttgatgttatggccaaggtcaaagctcaacaggcttggcgtaagatcatcgctcgtatgcgttataagcaagctggtttgctcaacggtattgatgtggccacaacaccagaaggttttaagtttacatacgagcaatttgttaaagaggcaaataaatcagaggctaagcgtaagctctatggaatgattcaagcttcaacttatgacaatgaagctaatcttccagatgactacatatcatcactttatgagtcttatccgccgcaattaatttcagcttatttaagagggcagtttgtcaatttaaccagtggtgctgtttaccccgactttgatcgagttctaaaccacacggatgaagaaattaagaaaggtgagcctttactcattggtatggattttaacgtgcttaaaatggctgctgtggtttatgtcattagagaagggaagccaagagctttagatgaactggttggcgtgagagatacaccgacgatgtgtcaactgattaatgagcgctttccagatcacgatattactgtgattccagatgcttcaggtcaggcaacatcatcaaagaacttcagtgaatctgatcatgcaatcttaaagaaaaatggattcaaagttgaagttaatggtgtgaatcccggtattaaagatcgtatcactgcagttaatgcacaaattctgaatgctgagggtgaacgacacttaaaagtgaacacaaacaagtgtcctaactttacggctactttagaacagcaagtctatgatgattttggaatgccagataaaagcgctggtttggaccacgttggggacgctggtggatatccaatagctaagagattcccagtcatcattcagaaaatatttaaacggcgcgcaatcgctggtttttctcgttaa

SEQ ID NO: 51508 - DNA, 1020 bp, Acinetobacter baumannii; identical to SEQ ID NO: 46126

SEQ ID NO: 51509 - DNA, 1125 bp, Acinetobacter baumannii
atgtttcagtttatccaacagcaaaccgaattggttgatgttcttcaacaaatggatcaatgttcaacttatgggcttgatacagaatttattaaggttgataccctttggcctaaacttggagtatgtcaagtcaatgtcaacggaaatgtatatttgctagatggagtgtctttagatttaagcgagttttggaaaaaaatctttcttgctcaacaaaatatttttcatgcatgtggtgaagatattgatttaatctatcactatgccgatgaacaaaacctattaaatgtttttgatactcaagttggattatcctttttgggacatggtttacaagtaagttatcaaggtgcattaaagctttgtttagagattgatattgaaaaggatcagactcgatcagactggttagcacgtcctttgtctccgcaacagctatgctatgcggcaaatgatgttttatacctcatgcaattggctaaccatattaaagatcagctcaaacaaaaagggctttatgagtatgttcttgaggattgtagtagtttaaccaaagaaattattagtgaaacaccaaccccattgttatatacagatgtgggcaattatcgtcattcacgtcgtcaattaatgcaattgcaaaatttaagtgagtggcgtgaagaggtggttagagcaacaaaccagccacgtagttttatccttagaaattcgacgatgattgatttagtcgaaaaaaatccacgcaatagtttccaattatctcaagtaaaagatattcgtccgaatgttgttcgtgaatatggaaagattattcttgatcttttaaaagacttacctgttgaagggcactggccagctaaaattgctaaaccttttaaaattacatccaaagaaaccctgaataaaatggatgcattgattgctaaagcgatagaacaaacctctatacctaaagaagttttactacgtaagaaatggttaaatgcaattcatcagcatgtgcttactaaaggtgatgaacaggatcttccagattatttattgggttggcgctatgagcttttaactaagccgcttattcagttatttaaagaagagagagctagtcttttattttag

SEQ ID NO: 51510 - DNA, 882 bp, Acinetobacter baumannii
atgagtaattttgtgcctaattcctttcaagtgcctaatgcatttgttgacgaggttttaaataaaatctctgatgctgcatgcaaaatttatttagttatttgccgtaaaactcgtggctggaataaggagatggattccatctctttaactcaatttgaagagattacagggaagagtagaccgacagttgttaaatgccttaatgaattaattaaagttggtttagtcgtggaacaaccaagcacaattcatggaaatacattcaaattaggtaacgatactagcgttggtttagtgcttaaattccctagtaaaaattttttactacctgaaatttatggccaaactagtaaaaattctttaccactgctagttaaaaattttaactacactagtaaaaattttttaccgctactagtaaaaatttttaacacacaaagtatcactatcaaaaacaactctcaaagtaataaaaaaataaataaaaaaagagagcctgtttctgaaaaacctaaatcagaaaaaccaactgaatttaatccacgtttagttgaactaccagcatgtgtagatccagagctgtggaacaattttgttgatatgcgtatcagcatcaaaaaaccactttctgaaaatgcagtaaagctaatccttaaaaaacttatctcgtttggccctttggctaaccaatcactggaaaactcaattatcggaaattatcagggtgtatttgagcctcgccaaaatcaaattcaggaaaacccacaatctcataacgttcctgaagaaccgggttatttcactcaaatgtacgctgagagcaaccgttcaaacgtgattgacgttacgccagtgtcacaagattttggaggctattaa

SEQ ID NO: 51511 - DNA, 306 bp, Acinetobacter baumannii
atggcacgtagaccaagaagaaatcattcaaatgattttaaagctaaggtagcacttgctgcgattaaagcagaaaaaacacttgctgaattgagtgctgagtttgatgttcatcaaaaccaaattattgactggaaaaatcaattgatctcagcttcctcgcaagctttcgatcaatcaaaagctccaacagaaccacccatcgatctaaaaaaactacatgcaaaaatcggtgagcaggcattagaaattgattttttagaaggtgtgttgaagaaactgggccgcttcaaccacaaaagttaa

SEQ ID NO: 51512 - DNA, 717 bp, Acinetobacter baumannii
atgcgatgtattgatgaattacatatgcaatatccttttgcaggcagtcgtatgatgcgtgatttgttgaatcgtcaaggacatcatataggacgacgtcatacacgtactttaatgaagaaaatgggtattcaggcgttatattgcaaaccaaatttaagccaggctaatcaagctcaccgtaaatatccatatctgctcaaagggttggctattcagcgcagtaatcaagtgtggtctacggatataacgtatatccctatggcaaaaggctttgtttatttatgtgctgtgattgattggcatagccgcaaggtacttgcgcatagggtatcgattagtatggaggtggatttttgtatttcggctttaaatgaagcgattgaaaaatatggtcgacctgaaatatttaatacagaccaaggcagccagtttaccagtgatgcatttattgatgtattgaaatcaaatggcattcaaatcagtatggatggtaaaggtcgatgggtagataatgtgatggttgaacgattatggcggagcgttaaatatgaagaggtgtatctcaaagcttatagcagtgtcacagatgcgaaaaagcaattaagtgcatattttgagttttataatttgaaacgacctcattcgagtctagacaaaatgacaccaaatgagttttactatgatcagctaccccaacaaaacaaggtggcttaa

SEQ ID NO: 51513 - DNA, 1266 bp, Acinetobacter baumannii
atgaagcaaaatcagattaccgcattttcaaccatttttgaagccctgttttcagagcaacaattaaattcacttggtgttcaaactcacatgattgaacgctttcgcctgatcactcccgcaaaactttgcctggcatttgtgtgtgccctgggaagtggaaatgcccgcacaatcgctgatatacatcgttactttaaccacttgcattcgatgtcagtacgccttaaaccattccataatcagttagttaagctcggaactcctgaatttatgcgtcaagtgtttgagcaggcgctggcacttcatttgccagccatgcacaccttttcggacgcctatcgggggcatttcaagcaggtactgttgcaggatggcaccagtttcgctgttcatgacggcctcagcctgcatttccccgggcgattcagtacacactctcctgcggcagtggagcttcacgtgacctatgaccttgaaaaagcccagcctgtccgcgtttctctgagcgaagatactgcatctgaacgcgactatctccccgtagctcaaagtctacgtggttgtttgctcatggccgatgcaggttatttttcaaaagcttacattgaatcgctccaaaacgaagcggccagctttgtgcttcggatgcccgcttcggtgaatccaatggcgacttgcaaccaaacaggactctgtcagccgctacgcagctggctggccgtattgcctaagcatggcgaattggatttggatgtgcagtggccagatggtccggtgtaccgttgtgttttgtttgcttccactgaccataaagacaaaccggtttgtctgtgtacaaatttggaccggcacacattcccagccgcaacagtgggcgaatggtatcgtctgcgctggcagatagaactcttgttcaaagaatggaaatcgttgaatagtttgaataaatttaatacggaatactcaacgatagccgaaacgttgatttggggaagtctgctggcggcaacgctcaagcgttggttaatcaacggagcacagcaaaaatatcggcgagtgttgtccatgttcagcggggccaaaacagccaatcagtggtggcttcccttttgtataaaatgggcttgttcagggataactgaaattgctgcggaattgggtaaggtttttgcgtttctcgcggaacattgccagagggtaaatgtaaagcgagatcaaaaatcaggggcttttaaagtattggaaatcacatatgaatcatga

SEQ ID NO: 51514 - DNA, 927 bp, Acinetobacter baumannii
atgaatgtcattataaaagctgtagttactgcctcgacgctactgatggtatcttttagttcattcgaaacctcagcgcaatccccactgttaaaagagcaaattgaatccatagtcattggaaaaaaagccactgtaggcgttgcagtgtgggggcctgacgatctggaacctttactgattaatccttttgaaaaattcccaatgcaaagtgtatttaaattgcatttagctatgttggtactgcatcaggttgatcagggaaagttggatttaaatcagaccgttatcgtaaacagggctaaggttttacagaatacctgggctccgataatgaaagcgtatcagggagacgagtttagtgttccagtgcagcaactgctgcaatactcggtctcgcacagcgataacgtggcctgtgatttgttatttgaactggttggtggaccagctgctttgcatgactatatccagtctatgggtataaaggagaccgctgtggtcgcaaatgaagcgcagatgcacgccgatgatcaggtgcagtatcaaaactggacctcgatgaaaggtgctgcagagatcctgaaaaagtttgagcaaaaaacacagctgtctgaaacctcgcaggctttgttatggaagtggatggtcgaaaccaccacaggaccagagcggttaaaaggtttgttaccagctggtactgtggtcgcacataaaactggtacttcgggtatcaaagccggaaaaactgcggccactaatgatttaggtatcattctgttgcctgatggacggcccttgctggttgctgtttttgtgaaagactcagccgagtcaagccgaaccaatgaagctatcattgcgcaggttgctcagactgcgtatcaatttgaattgaaaaagctttctgccctaagcccaaattaa

SEQ ID NO: 51515 - DNA, 423 bp, Acinetobacter baumannii
atgcagttattaggttcagtggcttccccttttgttcgtcgtttacgtttagtactggcagggcaaccttatcagtttgtagcgcttaatatttttgagtctgaaggccgttcagtgttggtacaacataatccggcacgcaaagtgcctgtgttagtggatggagagcaggttatttttgattcaggcgtaatttatcgttatttggcttcgaaactgaaattcaaaccattgagctgggatcaggaaaacggtctgacgaccatcaatgcctgcacagactccttggttgaattactgctttgtaagcgctcaggttttgacgtgactgaagataaattgttttttaatcttcagcatgagcgaattcaggcgacgctagaggcacttcatacgtatgaccttaacgacctaacccaatga

SEQ ID NO: 51516 - DNA, 1272 bp, Acinetobacter baumannii
atgaagcaacaacaagatacccgattttcgagcgcttttgaacgatttttttcagcagcagagcttgatgcgcttggcaagcaatcaggctttatgaagcggcggcggcaggtgacgccacagaagttttgcatggcgctggtcagtgcgctgggtgcaggaacaacgaattcgattgccgatgtgcaccggcaatttaaccatatgcactcaacggacataaagcttaaaccctttcataaacagttggttaaaatggctgctcctgaatttatgcgtgaagtgtttgaaaaggcgctggctctgcatctccctgatatgtttgctatcaggaataaatatcaggacatgttcaagcgcattattttacaagatggcaccagtttcgctgtacatgacgacttaatgttctattttccaggacgttttaatgaaaatagtccggcagcggttgagttacatgtcacttatgacgtgtttaaggggcaacctgacggtgttagtctgactgaggacacggcacccgagcgggactatttgccttcacccgcctctttatcaggctgcttatttatggcagatgcaggttatttttcaaaagcttatatacaacagcttcaagaagcctgcgcgtattttattatgcggatgtgtaaccgtgttaatccaatggcggtttgtactaagactcagcagatgaagccgctgaaaacatggttaaaagaattacccaatgcaggtgtattggatttagatgtgcagtggccgaatggcccggtttatcgttgcgttgcatttgcagcattagatcacaaaaaacgtcatgtattggtctgcactaaccttgaccgtgagcagtttcctccagctgttgtgggtgatttttatcgtgttcgctggcaaatagaattattattcaaagagtggaagtcgatgaataatttaaataaattcgatacaggtcatgccacaatcgttgagacattaatttggggtagcttgctggcagcaaccttaaaacgctggctaatcaacgcggcacaaaagaagtataaccgggtgttgtcgctttttaccggagcaaaaactgcccatatgtggtggataccattttgctttgatatagccatgagtcgtggtacggatttagcaaaagccatgaataacgcgctggcatttttagcgcaacattgccaacggcaaaatgttaaacgagaccaaataagtggcgtatataagctgcttaataacacaaataaatcattgggttag

SEQ ID NO: 51517 - DNA, 378 bp, Acinetobacter baumannii
atgcgaataactctagaaatcaaatgtccaacctgcctcagtgacagtataaagaaaaatggcatcaaagtagatgggaaacaaaactatcagtgcaaagactgtaaacgtcagtttattggtgaccatgctctgagctatctaggatgtcattcaggcattactcgaaaaatattacagttgatggtcagaggtagtggtatacgagatatcgctgaagttgagcgaatcagtatcggtaaagttttacgtactttaaccgaatcgacctaccaaattcagcctaaacaaagtcattatgagtctcttgaagttgatgagttttggacttttgtgggaaataaaaataataaacaatggcttatttacgcctcatag

SEQ ID NO: 51518 - DNA, 264 bp, Acinetobacter baumannii
atgagcacaccacaatatcaaacaatgaaagaaagtgaagtttgcaatgccatcggatgggggttaattgttctaggtattatatctggatttatttttatacttgtgtttggtcgaattgaagtagcttcttactatggtaaagaaacggtttggtctggagttatgatagcaacaggaatcggaattatatttaatggattccttgcaggctacttatttcaaaaagtagctagtattcttcgttaccatgagaataaataa

SEQ ID NO: 51519 - DNA, 468 bp, Acinetobacter baumannii
atggacagtaacgattatttttggctcacaagaaaaaaagaaccaagaacaaaacccaaaagccgcccattacccaaagcaactcaaaaatacctagaagctgaagaagaatttacccaggcattagatgtgcttgaaatcaaatatgaaaagaaatttaagtttaaatcaacaaagcattggcgctttgattttcatttaattgaacatcgtattctggtcgaaattgcgggtggtccatggtcaggtggtcgaaaaggtaagctcaaagataaagcttggagtatggatcgatacgatgatgctgaagcaatgggatatacggttgttcggttagaggcagcaccaagttttaaaattaatgaatctggcccgttacagatacaagctcattttgctagtcagtggcttaaaaacttaaagaggcaaatatttaatggatcagatcagaccgtttccaccaactga

SEQ ID NO: 51520 - DNA, 444 bp, Acinetobacter baumannii
atggcctcacgtttaactttatttctcaaaagtacggtggctaaaatggcaatgactttagagcagacaaggcaagctattattgatcgcatgcaaagctttacgggtattgctcaagaacggattcagtatccaaatgcacctgactttactgttccaacaaaaggtgtatggtgccgtttaacgattgcaggtggcccgagttttacctcaggcattgcagataagccatgtacacgccgtaccggtaatatcatgatccaatgctttgaccgattacatactggagagaaggccgtaacggttctaagcgatgcattacttgctcattttgaatatttcacaatcgaacacttagaatgtttgaatggccaatctatttatgcgggtaaagatgctgatttcattcagtataatgtgagcattgggtacaaggtgaattga

SEQ ID NO: 51521 - DNA, 2412 bp, Acinetobacter baumannii; identical to SEQ ID NO: 46112

SEQ ID NO: 51522 - DNA, 633 bp, Acinetobacter baumannii; identical to SEQ ID NO: 48578

SEQ ID NO: 51523 - DNA, 357 bp, Acinetobacter baumannii
gtgagatatgcagtaagaagaaaacaggatatttccgtttccaccacaccgctagaggtggtaattccactggaacaaccagtaaagatctattcggctaaagaattagcagctatgccactttcagttatgaatgccgcaattgaggctcaggaaagattttatcaacttgaagaattaacccatatggggggggcaggctatagcagttcgccgtctcatggagaatgggcacaaactaattcaggtgaaagaaaagtctcgtattcgctacaaaatcaacaacgaatttattcctccaagaattattcgtcagttggaaatgcgcggtcttgtaaaattaggagcagtcactga

SEQ ID NO: 51524 - DNA, 297 bp, Acinetobacter baumannii
atgaacagctttacacagcaaatcaaagtttctcgtcagcaaagtgaaatccaatctttttatgaacctgcattgcgagtacttggacacctatttgaggtgaaaaagcaaaatttacgtaacaaaggttatgacgaaaataatgcggcggtaaccaaagttgaattttcagaggctatggctcgtcaatttcgcataacgcagtggttagcacagcagattgtaaccagcttaaccaaggcgtgtttggttgattcttttggaggctatgttaagccaaagggtggtgaaaagtga

SEQ ID NO: 51525 - DNA, 1107 bp, Acinetobacter baumannii
atggaagcaggactcatcaagcaacaggacttcgaaaaccggaaaacagctatcattcaagctgctcaggaccaacgcaatcagatcgctgccgaatatgctcagaatgctcaggatattgaagataagtatcaccaagatcgattgaatgctcaaattgctcttggtggccaaatgatgggttcactcacatcgatgtttggttcaatgtttggcgagcaatcaaaagcatacaagatcatgtttgctgctgataaagcttatgccattgcagctgcaggtatttctattcagcaaagtattgcaaaggcggctagtgttggttttccagcaaatatcccattaattgcaagtgctattgcacaaggtgcaagcatcattgcaaacatccgggcaattaaagatcaaggctttgctgacggtggttacactggatcaggtgggaaatatcagcctgctggtattgtccataaaggagaggtggtctggtcccaagaagatattaaacgctggggcggtgttggcttagtcgagaaaatgcgtaagagtgcaaaccctgaagcttttctcaataacaatgccttggcagatagtgtcatgcgccgtgcaatgatgagctctagtgcctttatagaaagccaaaagcaggctgacatctttaatcaaccggttcaagatactcagattatctataagggtaatagagacacacctaaattagcttcttctggaaatttagacttattccatgatggcaaggtctacttctcatccaatggtttagttcaggatcgttcaaatctggatgatgttcaggactttactttaggaagtacttcacgccctcaagctgagatgatgccttcaattgagccagcttcaccgacaatcaatttcaaaattgaagtgattaatcaggtgagtggggcgacagttgaagccgaacaactggacgagcaaacagtccggatcattgttaaagatgaactggataagcagcttccaagaacggtacctaagcttgtaagtgatcaaatcgcaaatccaaactcaaccattagtcggtctttgactgagaatacgacagcgagaagaaatcgtacttaa

SEQ ID NO: 51526 - DNA, 759 bp, Acinetobacter baumannii
atgaaaaaaggaatttgtaaactatgcgacctagaaaaagaattgaagcgctctcatgttattgggagagcagtttttaaaaaggctttaaatggtgcaaattacgctttaagacttgataaacagcataaaaaagtgattaaagatcaagatcagtgggccacatatatgctatgtggagattgcgagcatgatttaaatacaaaatatgaaggctattctctagatattttaagaaataaaaagaaatctgtaaaacataaaaaaagagataatcactatgaaattcagggtgttaatcaaaaaaaactaattttatatttaatttctattatatggagaggaattgaatctagtcatgaagtttttaataaattgaaattttttgatgaatcgccagttgcaaaaaattttttaaaagaatgtattaagaatgatcgtgtagttctaacagaatgttacgatgtcagaatttcaaaattagtaagcacgataacttcttttaagaatgaagagttagattttataactgatattcattgtagtattgataataatgaacgaattcgttttttaactatttttgagggatactgttttgaatttttttactatacggattcatctcagtccgtttctagtttaggagttcttaagaaaaataaacgaatacttagaatgccatatattgatgttttttcaattcctgagtttcgaaaaagtctgttagatatgcttgaggcgcaaaatagtaactaa

SEQ ID NO: 51527 - DNA, 354 bp, Acinetobacter baumannii
atgagcaattttgtatttaagcgtggtgacactttcaacttaaatcttcagctagttgatatggatgaagccctgcaatatccaccagatgatgtgcgccgtgcaattgatcttacaggttataccttcacttcacaggttaaagctctggctgatggtgctactgtggccacattaacttgtactgcattaagccaaagcacacagaaagggtggctgaacattaaatctagtgcaagcactgcaacttggcctttagggctgtgtcagatggatattaaagctgtagttagtggcactacacagcacactgaaactttgactttccaagtgattgacggggtaacagcataa

SEQ ID NO: 51528 - DNA, 1356 bp, Acinetobacter baumannii
atggcaaatcttgtttttaaatttagttgggatcaccggccattcccgtataactcggctcagggaaaacggcaattcatgctgccattcgcttcaggcattcctaatctggcaccaaacttttcgcaggtccaaggtactgctgcagtctctcaaggtggtactggggcgacaactgcactagatgctcgaaataatctcggagcagcagaaaaaggggtgaatagtgacattacagagctaaaaggattaaccaaggctattgcaatttctcaaggtggtaccggtgcaacaactccatccgatgctcgaactaacttagggcttggtagtgccgcgactagaaatgttggtactacagctggtaatttgatagaagttggcggttttggaattggtggagtaggccaaacttttgaaagaaaaatgattacgggagtaaacctagattctgtcgttagctatgtattgttatttccttattctgtcagaagctcacccaatcgaaacatgtttggtgagctagtgttttcgaggggtgattcaggctcagcaaatcaacattcgagaactttagtatcaattcagcaagcatatgatcgtgttacagctcggtttattagtattggtgtaacaactcatatttcaggtatggctgtagttaaatatcaaaatgtagactatgttgccattcgaagaacagcaagttcttcaacatcggcatttagatatttttccggtatttccaatattacatctgataattatttagttactgttcatacagatgacgttgttattgtcagtgagatacctgttgtaattgagcagctaagaacatctgcgaatacttctgtggattccaacggtttcataaaagcagcatcaccagtagttaagctatttaacgaccatatcgagctcaataatgatgcagaaaagcagcctattgaatttaagaaagtcgatgtaggcgactatttacttaaaggctctttaggctttgctcaagaaggttggtatatcgaagtacctaaagacgcaaacggcaacacaatcgttgcagtagtgtatgacaccctagaaaatggtgacatctcaattaaaacttacaagcgtaagtttgattttgaacttgctgctgttgtggcagatcacgagaacccaatggacattccagaaggccgctggattgatatccgtctgcatgaagaacctgaaccagaacctgaggttgaagaaactttgagtgaaacaccagtggatttccagcctactaacttatctcaggcagttgctgcagccatgaatggcgtggaaccgccagaaatctcagacacagacgaaacactttaa

SEQ ID NO: 51529 - DNA, 1428 bp, Acinetobacter baumannii
atgagtactgatgcggctcgggataaagccatccggatcgaggcgcaagaagatttatatttcttcacaaggtacatgtttaaggagcgccgtggttataaatggatgcaaaattggcaccacttagaaatctgcgaagctttaatgaaagtttatcgcggagagataaagcggttaattattaacgttccaccacgatattctaaaactgaaattgctgtaattaatttcatggcttggtgttttggtaagaatccagactgtgagtttattcatatcagttactcggcaatgcttgccgcaaataatgccttccaaatacgaactcttgtacaagaagaggcgtatagaaaagtctttcctgagcttacattgcgtgatgatagtaaggctaaagacttctggagaacttctcaaggcggtgtctgctatgcgacaggtacaggcggtacgattactggttttggtgcaggaaaacttcgtaaaggctttggtggctgcattattattgatgacccacataaagcacatgaagcttcatcaaaaactattcgagaaggggtaattgattggtttcagaacacactcgaatcgcgtactaactcgccagatacgccgatcattgtgattatgcagcgacttcatgaagatgatttagctggatggttgctaggtgatagaaaagacggcgttcctgtagctggtggtaacggtgaagtgtgggagcatctatgtctttcagctattcaggaagacggatccgcactgtggccagcaaaacacaatatccaaaaattgaggctaatggagcaagcagcaccatatgtatttgccgggcagtaccgacaaatgccatcaccgccagcaggcggtttttttaagcccgacaatattcaaattgttgatgctttgcctgcggatgtagtgaaacaagttagggcttgggattttggggctaccgaaaatgagggcgactttacagtaggtgtgcgagaagctctaggcgcagatggttttacttacattgtcgatgtaactagaggacagcttggacctgacaatgtgaataagcgcttagaacaaacagcaaaaatagatgggaaaaaagtttctgtgcgtctaccacaagatcccggtcaagctggtaaatcacaagctagttcatttgtgaagcttcttgcgggttatagcgtgatagctaagccaatttcaggtgacaagcttacacgtgcacaaccatttgcggcccaagttaacgtaggaaatgtacgaatgctcaaaggtgaatggaataaggattttattgatgagcttcgtcattttcctaatggcacacatgacgaccaagtggatgcagcttcagatgcgtttaatgaattacatgaaggttttgaagccttctttgctgatatgggatttgctcgatga

SEQ ID NO: 51530 - DNA, 525 bp, Acinetobacter baumannii
atgaaaaaaatattggctactggattattgagtttgggattagttgggtgtgctactacccctcagcaaccatcagaacctgtaaagtttgaaaaggtttatcaaatagatggattaaagcaaggccaaatttatgatggcgcacgtcaatggtttgcaacagcttttcgctcagcaaatgcagtaattcagtacgaagataagactacgggttcaattattggcaaaggtaatatgccataccgttgttctgggtttgctgattgtatgactgttactgctggtgatcgagtagatttcacagtgcgcgtagatacaaaagatgggaaaatgaaagtaagttacgataatcttactcactataaaccagcacaggtaattagcggagttcgctatagtgaaaccaatcgtactattaccgaaaattatccatcagctaaaataattatggatgaattaaataaatcatctgatcaaatggctgaaaagatcaaaactcaacaaaaagttaatgctgattggtaa

SEQ ID NO: 51531 - DNA, 159 bp, Acinetobacter baumannii
atgattgaagcagatggttggtatgaggttagggtttcaggaagtcatcatcactttaaacacccaaccaaaaaggggttagttacaatcccacatcctaaaaaggatttaccaaacggaactgttaaaagcattttgaaacaagcgggtctaaattga

SEQ ID NO: 51532 - DNA, 171 bp, Acinetobacter baumannii
atggaaaaatatgaatatcttgcagagcatgtacttgaaatcatgcaattaagcgatagtgaacggattgagacattattcactgatcggtggattggctataagaaagcccactctattgtaaacaagacatttttatcttttatattcaatggcttattttcctgctaa

SEQ ID NO: 51533 - DNA, 1194 bp, Acinetobacter baumannii
gtgcagattgatcatacacctctagatattgaaatcgtggatgacgagttcagagaagcgattggaaaacctcacttaaccttggcaatcgatgttttcagtcggatgattgttggatattacctatcactagaagcaccaagtacgacttcagtggcgatgtgtatagcatcttgtattttgtcaaaaaaacgtaagttgatcgaactaaatattgatgctgaatggcaggtcgaaggtattatggactcggtgcatacagataatggacccgattttagaaccaatcacatcagtaaagcttgcctaaaatatgggattcattgggaatatagaccaattggtggggcgagatttggcggtcatattgaacgtatgcttggtattgtcaatcttgaaatgcatgtgctggatggtacaactttttcaaatgtgcagcagcgaggaacttatgattccgctaaacaagcctgtatgacattaaaggaacttgaatactatatcgtttattggattactaaagtttatcatcagaagaagcattccgctttaggaacatcacctattgttaaatgggaagaaggtgtttggggaacgaagacgacagcaggaacaggtttgaaagaacgtgtatcagatgaagataccttgtttattgattttctacctgaatttgaagcgaccattcagcgtacaggggtgcagaaagataacttattctattttgcagactgtttaaggcaatgggttaattctattgatccagacgacaataatcgaaagcgcaaaagaaaattcttatttaagcgtgatccgagggatatttcacagatttggttttatgagccattttctaatacctattttaaagtacccactgcaaagcgagagataccaccgattagcttatttgaatatagacaggtacagaactatctcaagaatgggcgtcaggatgttcagaatcaggatgagatttacaaggcgattttacatctacgtgagcagcttaatcaggctcgaagcttgactcgaaagcaacgtcgctcaaaccaaagaaaaaaggaaaatgaaaaagccattactcagctatccgaacagaatcagtctaaaaaggctgtagtttctgaaagccttcagacaagtgatgatttgtggagtactcctttaactgcatttgatgatttaaggtga

SEQ ID NO: 51534 - DNA, 300 bp, Acinetobacter baumannii
atgtacagcagtgctgagaagtacaaagatactgaaccaaacattcatactgtattgcgagataaggatgttcaattcttgatgtggtatgtcccaattcttggcaagttcattaagaatgaaatctatccagctctaacagctattcaaagtagctatgcaggccgtttgagtggcttgacatctgaagcggtttgtcatgctaatgctttaaatcgaaaagcaattggctatggccttactttagagcatgtaggaaataaatcaccgcatgacattgaatggtatttagctcattaa

SEQ ID NO: 51535 - DNA, 471 bp, Acinetobacter baumannii
atgtctcaacatcgtcgaactaaacgtggcatcgcaacaaaaaatggcaatgatgtatcagttgctgtggaagaggcggaaagctactcaccatacccgcctcctgatttggttaaggcatttgaagaaatccaacctggtctagctagtcgtttaatgcagattgttgagaatgaacagactatgagtcatgaagtggctcgccatcaaatggcagaaaataagcgcatcaacactgcaaacattgagaatcaaaaacataactctcaattattccttcttggtttaatatttggagtgttgataggaatagggattctatgtgtagcagtatatgcgctatatgctggttatccttgggttgcaacggctgctttctcaaccttagcagctattttagtaatcctagtgcttcgcaaagtgcctgcttctaatggtgagcagacatctaagccgtctactcaaaaatag

SEQ ID NO: 51536 - DNA, 222 bp, Acinetobacter baumannii
atgaacaaaggtatgaagtactttacagaaggtctgctagcagcttttgtattagcacctcgtgtcccagtacatgctgttgagcctgcaaaaatggaagatccgcgaccaattggtaatgcagcaaaacattgggaagcagtcggtaaaaacatgacaaaagctaccaacagaatcgcatgtgacttgcgcagtaaacaacctgaacttaactcattataa

SEQ ID NO: 51537 - DNA, 1209 bp, Acinetobacter baumannii; identical to SEQ ID NO: 45825

SEQ ID NO: 51538 - DNA, 1059 bp, Acinetobacter baumannii
gtgccgccagctcgtaatctagcggaatttaaagcacaaaaagcctatccgatgattcatttactaaatgcccttgatgtagtgaattgggattcagtaatgatcgataaccagaaaaagctttgcttagtggttatacgtgaatttaagtctgagcgcggtgctgatggatttagtaaaaccgaacaagagcaatatcgtgtacttcgtttagagcaagagggaaatggggaatatatttattccgttcaggtgtacacaaagggtgaaaagggtaactgggttggcggagagaagaagtttccaacagattacaacgggaatttctggacctatataccttttacatttgtaggtgcaattgataattcagaagagattaaaaagccaccattacttcctttggctaatctcaatttagcccattacagagacagtgcggactttcaagagtccgttttttatatggggcaacctcaatattatgcgaagggtgttaattgggagtggtatgaccaagccaagaaacgtggcatctacattggagcgaaagtacttttgcctttacctgaaaatggtggtttaggaattgtacaagccgaccctaatactcttgcccgggaagcgatgaaagataagtgggaaaaaatgaaggagatgggggcgcgtttaattgagaagggctcgggaagtaaaaagaccgctaccgaagcgaatagtgatggcgccgttcagcattcagttctttcgctctgtgtcgttaatatgaatgaagccttgtcagcagcattacgatgggctgctaagtttgtaacgcctaatgtggatgttctaactaaagatgatttgatgttcgaaatcagtcaagaatttaacaaacagggttatttagctgagttagctcgacagttatttgaagcagctctacaaggccgatcttcatttaaatcatggtgggaatacaaccaaacaggtatgttccctaaacaaaaatatgaagaagagcttcagaatgttgaagcagagcaagatgggactttaaatcaaaaggtagagtga

SEQ ID NO: 51539 - DNA, 744 bp, Acinetobacter baumannii
atggcacctttttggatagcattgcaatttttaactattctgcctattgagctaaaaacaataccaacggcgcaacaaaatggtcgagctattctgttttatcctctagttggtctgattattgggggcatactttttcttgttacctgtatttttgttaaattacccgctcttttacttgcggcaatcgtattcgctttatggatctggctaacgggcggattgcatttagatgggctagcagatactgccgatgcgtgggtaggtggttttggagataaactacgtactttacaaatcatgaaggatccaagttgtggtccaattggagtcctcagcatagttatcgtatgtttgctcaaatttgcactgatttatgtattgattgaacagcatcaatctttatttttaatatgcattcctatccttgggcgtgtggtgccatctattttgtttttaactacaccatatgtccgcgaaaaaggcttaggccgttctttgacagaccatttacccaaaactgcttcatggataataactgggttcgttctgttattacctttgtattgggagtggcaagggcttattgctatcattagttttttaatcagtcttgtttatttaagacatgtgtttataaaaaggattggcggtattacaggggataccgtcggtgcagcgattgaaataggtgaaactgtactgatttttacttttgtcgtaagttatttttatttagtttga

SEQ ID NO: 51540 - DNA, 369 bp, Acinetobacter baumannii; identical to SEQ ID NO: 46167

SEQ ID NO: 51541 - DNA, 420 bp, Acinetobacter baumannii
atgctcatcgaaattaagcctaagaaaaagcttgttgaggactgggataagttaaaaccaaaattcagagcagcccatcgttttgctgctgataaaggatggaagttcaaaattatcagtgaaacaagattatatgatcagtattgggaaaatattaatttcttaaaaaaatttagacgctctcatgtaggtgccgttgatcaacaactattactcgataccctacaagagttaggtcaatcaacaattaatcaattacctgcccatatttttaaagataaaaccaatgttttaaaaggaattcaccaagtttgggcattagtggcaaagcgcatgattgcttgtgacttgtattgccctttaacggctgaaacagtgatatgggtgaaccaaaatgatgcatttgcgaggaatatctaa

SEQ ID NO: 51542 - DNA, 420 bp, Acinetobacter baumannii; identical to SEQ ID NO: 50235

SEQ ID NO: 51543 - DNA, 327 bp, Acinetobacter baumannii
atgaccggacaacctattactaacgattcacaagactggcgttggtacttaaatggtgactttatggttgtcaaagtaaccgatgccgaagcttcggtacccggtaaaggttaccgaacccaaaatgatcgatatggatctccattgtctggtgatggtggaggttggggccagcgcggtaccaagtccaccaatgatggaacatggaactggcaataccatggcacaactgaaggccagccggggccgggtggacctgcaattgttggggtggcaccacttacaactcaattgatcaatggagggaaaattctacaaacactttaa

SEQ ID NO: 51544 - DNA, 486 bp, Acinetobacter baumannii; identical to SEQ ID NO: 50159

SEQ ID NO: 51545 - DNA, 258 bp, Acinetobacter baumannii
atggatatcgaagcgaatgcttcattcatgttctcggccacagctgctggttggattgatgcaatcaaaacccgtgatgtgtttacactgaccttcgacatcagagacagcaaaggaagtaaatattcgttcaacttcccgcaattggaagtcatggaagccaatcacccggatggtggtggtgatgacatcattactgtagatatcaactttgcccaagttcgtacagcgccaacaattgtacgtgctcttgtgtaa

SEQ ID NO: 51546 - DNA, 324 bp, Acinetobacter baumannii; identical to SEQ ID NO: 48570

SEQ ID NO: 51547 - DNA, 522 bp, Acinetobacter baumannii; identical to SEQ ID NO: 46238

SEQ ID NO: 51548 - DNA, 420 bp, Acinetobacter baumannii
atgttcggacgcgccgttgatgtggtgtcccgcaatgccgtcaatcccgacttcttaccggacgaggacaagagtacgccgcagctcgatcttttggctcgtgtcgaacgagagctaccggtgcggctcgaccaagagcgcaccgatatggttgtttgccatggtgatccctgcatgccgaacttcatggtggaccctaaaactcttcaatgcacgggtctgatcgaccttgggcggctcggaacagcagatcgctatgccgatttggcactcatgattgctaacgccgaagagaactgggcagcgccagatgaagcagagcgcgccttcgctgtcctattcaatgtattggggatcgaagcccccgaccgcgaacgccttgccttctatctgcgattggaccctctgacttggggttga

SEQ ID NO: 51549 - DNA, 534 bp, Acinetobacter baumannii
atgtactgcatatttgtatctcttttttctgttttatttttatctaatgctccagcaaaaagaatttgtatgattgctttaatttttttattatattcaatttattggtttattgaagataataaaaagaatattcttgtttttagatttgctttggtatttgttgctatagtcccaacgtttatattcccatcagtttttaatatgcttttatatgtaggctgtgtggaaaatcgggttgatagtaaatgggctagatatagtatagtgaaagatattcttaatttaatgaactatattttacagcaagatactcggaataaatattttcatttaattaatagcgatgatgttatttcaatcaacgaacaggtttgggacgactctacaatatatatggaatatgtagggacaggattattttctcgttcaaagtacttcttcattgactctgctttaagtaatattctgattaaagggggatggttcttatatacctgtctcttatacacatctccgagcccacgagactaa

SEQ ID NO: 51550 - DNA, 399 bp, Acinetobacter baumannii
atggcaatgactttagagcagacaaggcaagctattatcgatcgtatgcaagcttttaccggtattacgcaagacagaatccagtatccaaatttaccaggctttaatgtacctaaagatggtgtttggtgctgcttaacgattgcaggtggtcccagttttacttctggcattgcagataagccatgtactcgccgtaccggtaatatcatgattcaatgctttgcacgtcccaattcaggaataattgaaatcacaaaattgagtgatgcattacttgcccattttgaatatttcacaatcgaacacttagaatgtttgaatggtcaatctatttatgcgggtaaagatgctgacttcattcaatacaatgtatcaataagttttttagttaactaa

SEQ ID NO: 51551 - DNA, 198 bp, Acinetobacter baumannii
atggacttaatcgagccatgtgtattagcaggatctcgagtcaatgatgttgtatttgacccattcatgggatccggaacaacagcagctgtagcactaatgcataaccgtaattatttagggtgtgaattgaatcctcaatattacgaattgcagcaagaacgctttgagaaagtattaaaagagagggccgcatga

SEQ ID NO: 51552 - DNA, 138 bp, Acinetobacter baumannii; identical to SEQ ID NO: 50167

SEQ ID NO: 51553 - DNA, 180 bp, Acinetobacter baumannii
gtggtgaccattgatacggttgcaccaaatgcaccggtgcttgatccgatcaatgcaacagacccagtgagcggtcaggcagagcctggttcaaccgtgactgtgacttatcctgatggcacaactgcaacagtggtagcaggcacagatggcagctggtcagtacgcaccggtgcttga

SEQ ID NO: 51554 - DNA, 237 bp, Acinetobacter baumannii
gtgcaaggtgaaaaattaacttaccgtagtattactattgaaaatgaagaacttgaattctcaggtggttttaccgatttacatactcagagctatcaacgtgtattagaaggtaaaggctacggtgttgaggagaaccgcgcggcaattgaaacggtcgaggtgatccgagtttctccaattattgaaaatcctgaaaatccacatccactattagcaaaggtgaaaaaggcatga

SEQ ID NO: 51555 - DNA, 336 bp, Acinetobacter baumannii
atgaaagacctaaatgtacatgaaaatattgacgaaattggtgtcagagctgctcaattatcttcgtttatagttgtattaacaggagcagcaataatctgtataagcgcaactaaaacgaaagctggattaagtgtcgttatgaaagatctgttcccatctaatatatatgtattagttgctttaatggtgatgagctttatcttatgtactttttcattattgaaaaataataaagataagcatgtttcatttattaaagagttctttcggcacattggtatacaaagtggagcaataattatcatatttggtttactttcaagaattttataa

SEQ ID NO: 51556 - DNA, 573 bp, Acinetobacter baumannii
atggaaaatttattattgaattctcctacatctaaagatttcttcaaaatgaattttaaagaattgttgaataattattggctcgcaatattggtgtcaatagtatttttaatattcgcatttaatcagaatttttttatagatgaagtcacatataccttgaaactagcttcaattgctttagctggattaacttttgcaacttttatgataaagattaataaaattgaggatctttcaagaaagctaacggatgatggggttttaactctaataaacatattatctgtttatccagaatatgttgagaatgttaaggcaaaattgagaaagagtaacaagctaatagtacatgatattttaattattagatgggattttaataatcaaatttctgaaattttaaaaatgggtaattttactagcgataaaaataaaacagatgaaatttcaataagtagtatcgaggatttacgaacaacaaagaataaattgagtttgttattagttgaccttgatatttcgattaaagctcaggaggcatttacatggaaacaaagcatccagaagtaa

SEQ ID NO: 51557 - DNA, 1233 bp, Acinetobacter baumannii
atgaaaaatatcaaaacaataaactctataacacattcaatattactgatgggagcagtgatctcttctttgggaatgatcggtataagctcagtttatgcacaagagcaagtcgaccctgcatataagcccggtaaccctatttatgataaatgggatagattttataaaattgaacagtctcaaccgcaagaagcagaaaaaatattagttgagcttagtaaactgacaccaaccgatattaaagtctggaaaagtcttacttatttacagattcggcttgaaaaaagggtagaagctttacaaagcttaaggcaagcaagaaatttagctcctcaagatgacaccttaaaattacaagaagcttatttgctgaatcagcagaaaaaagatcgtgaagcattggttttatttaaagagttaagttcctcttcagaccctgaaattgctgctaaagcatctcaggcagttaaaaatttaagtgggggagaagttaaaccatattttagagatatttattttgcaccgtcttatgagtcacgttatgacgatgtgatttttcctttaaaaatgaggtatggcaaaaacatcgataacgggcgagcccaagtatatggctttcttaatttaaaccgcgatactcaatcacaaggtggggtccgacctgaaattattgatgaaaatgcagccactttaggggtgggggcaaattatcaaccatggacttccattcctgtgcgagcctatgtcgaagttggtggaagttatgacttgattgatagaaatagaaagcgatttcgtgagagtgttgtaggcggtgtaacgggttatcaagaatggtattcacaatcaaactgcgatcattcactttgtttagataattattttactgacttatatggcaatgtcgcgacttattcgagagaggactataacgttattggggacttacgcttacgcacaggtttaaatctctataagggtgagagtgggtctgtgcaggcttatgtgaaattgcatggcttagcggatagcgaagatgaatattacaataatttatttgaatatggcccaggcatttcatggcagccttttaattatcaaccgataaaactacgggttgaacgtctatatggcaattattttaaagacgtaccggttaatacaaaagatcattacaacaatactcgtgtagaacttgttttttataaggatttcctctgtacacgataa

SEQ ID NO: 51558 - DNA, 231 bp, Acinetobacter baumannii
gtgaatgataccaacagtgacgcagcaccgagctacagtgtaacctcagcaaatgttggttatgcatgggtaatgggcgattggaaagtcaatagctttgctcgtgtagataacctctttgataaaaaatatgtaggttcagtgattgtaaatgacggtaatagccgctatttcgaacctgctgatggacgtaactggagtgcaggtttacgtgtaattaaacaattctag

SEQ ID NO: 51559 - DNA, 1233 bp, Acinetobacter baumannii
atgagccaacatctttcactacctaaagataaaatccgtttccttttgttagaaggcgttcaccaaaacgcagtcgatactttaaacgctgcgggttataccaacattgactatcgcaaaactgctcttgaaggcgaagcgcttaaagaagcaattaaagatgctcactttattggtattcgttcgcgtacccaattgactgaagaagttttcgaagctgcaaataaattgatcgcagtaggctgtttctgtatcggaacaaaccaagtagatcttaaagcagcgatggcacgtggtattcctgtatttaacgcaccgtattctaatacgcgttcggttgcagaactcgtacttgctgaaactattcttcttcttcgccgtgttcctgaaaagtcagcggcttgtcatcgtggtggttgggacaaatctgctgtgggttcttttgaaactcgtggcaaaactttaggtattgtgggttacggttccatcggttctcaactttcagttcttgctgaaagtatgggtatgcatgtcatttattatgatgcagtcactaaattaccaatgggtaatgctcgccaagttggttctttagatgaacttttagcaactgctgatgttgtgactttgcatgtaccggatgttccgtctacacgtaacttcttcactaaagaacaatttgcaaaaatgaaagaaggcgcaatcttcttaaatgctgcacgtggtacatgtgtagtaatcgaagatttagctgatgcaatcaaatctggtcaccttgcaggtgcggcagttgacgtattcccgaaagaaccaaaagcaaatggtgaagaattccagtctccacttcgtggtttagacaacgtgatcttgactcctcacgttggtggttcaacaatggaagctcaagcaaatatcggtttagaagtagcagagaaatttgttgcttactctgataagggtatgacactttctgccgtaaacttcccagaaatcgcgttgccattgacagcgggtcaacaccgtttactacacatccacaaaaacgtaccgggtgtattgtctaaaatcaacaacttgtttgctgaacaaggcatcaacatttctggtcagtcacttatgactaaaggcgacatcggttaccttgtaatggacgtagatgcttctgcctctcaagaagctttagatatgttgcatgaagttgagggcacaattcgcgtacgcgtattgttctaa

SEQ ID NO: 51560 - DNA, 231 bp, Acinetobacter baumannii
atgaagttgcaaggttccaatatattgggacaggaacaaatagatttattaaccacacgcggattaaatttcgtatggtttccaaagcaacttgaaacgatatatcgttttcaatatcaaaatggtgcagcctatgagtttcgctatagagcacctattattttaatattatatttatttttaagctttggtatataccaagtcttaccaaccgaacaagttttatcctga

SEQ ID NO: 51561 - DNA, 1086 bp, Acinetobacter baumannii; identical to SEQ ID NO: 45794

SEQ ID NO: 51562 - DNA, 534 bp, Acinetobacter baumannii
gtgatttcgacaaaagctgtaaagcccactctgcaacttgcctacgttaagctcatgatggacgttgttggtcgaggcttagtcatggcgagtcaagtagatagtgaaatacaagaggaagtgtctaaatttcctgttcactttgtactttcaatgaatgtcttcccaaatggaccagcattttttgcacgagtgacagaagataaacaattagaactgctgaaaagagcggaaaaaaagcctgatttaaccattacgtttaagcatgtaactcatgcttttttggttttctcttttcaggaaagtactgctcaagcctttgcaaatgaccgtatgattgctgatggtgatgtatctgcagcaattcgtttagttcgctgcctcaataaaatggagtccctcattttaccgaaattggtggcttcactcgctgttaaagaatacccaactgaacttaccctaaaagaaaaattcaaccaggctgcaaatatttatttaaaagtagctaagtcttacttcaagcggagcgcataa

SEQ ID NO: 51563 - DNA, 369 bp, Acinetobacter baumannii; identical to SEQ ID NO: 46136

SEQ ID NO: 51564 - DNA, 192 bp, Acinetobacter baumannii
atggtacaaagcgttaggcttaacgacaaagagcaagaagaattaagaaagaaagctgttgaattaaacaaggcattaattgctaaaggtcaacaacctattcgagacagtgagttggttcacattttaattgaaagtggattagatcttgtagaaattagtaacagcggtaagttacacatacccaaataa

SEQ ID NO: 51565 - DNA, 666 bp, Acinetobacter baumannii
atgcaaatctcagatagagttgaaagttatatccgtgaagttgttcatctaaatgctacctcttcttatacattattgtcctatattgaaggaccaataaagaatgagttcttttatcaaattgatgacacttaccaaagactttattttgaagaattacggaagcccagtgcattaagatttatcccgggcgcaatggaattactttcaaatgataatattccgtcaaccataaaagaactttttgtgatcgctgcaagacaaagaaagaatttttatttttggaagcggccaattaatgcaataacagactttcttaaatccatagatccgaatcaattgaaagatttatctaaaatcaaatcattgatatcagaacataaccttaaagcgcaaaaaaatagctccataattcagttaaaatctctaaatgacagatttataagcgatttaatacattgctactttgaattgatgaagtataagtctgatactattcgagttattactattttcaaaacaatacagaaagatactgaagtatttcttgatcgagttgagtattttctggaaaacattgaaaaccaagaaattaatgaatattggaataatatccgtataacgttcgatgattttttacaaattaaatatgacttcaaacaataa

SEQ ID NO: 51566 - DNA, 1008 bp, Acinetobacter baumannii
atgatcctgctatttctagcacaaattggattagtaatatcatcaatatttattgtcattctgaatttttatatacaacctaataataattttttggggttaaatgtttgtatagccataatatcagtagcttatatattgtattttatttggaaaaatttttcagaagtattgaaaggatgggatataaaacttgtatatggtgctctatcattgatttttttagttattgtaggcacttcaggaacatttcttcatttgtactcaattagagatcagcaaaagtttacaaaaacaaatgaacaagatgctaagagtaaagaattcggaattattcaaaagcttggtcatgaaaatgatgtatatattaaacttggaaatacaaggacaagttgggctctaacaagattagtagttgtaccagatgcatcaggcgcatcaatgtatttaatgaacggatattgtgcattaaattattctgatgtttcgagccaagatatgaagcaagaaatgataaaaaatatatcaaaagataagcttgcaaaggaaagacttgatattccaaagatggcaataatgatgcatgagtttgcacattgtattgatattaagagagattatttaacattcaatataaatgcagcaaattcagataagacaacaattttaggtacaaacgctatagcaccaaaatttagatcccacgtaaaagatctaatgagttaccaagagcttggtagcgcctctacattgtggaaagaagtttttgcggatctttatatggcgggttatctgtatgtaaatcatcctagcattgcagaccaagctgttaataattggagtaaattaagagcaaaaaatacaaaagacgatgaagggcattcaacaagttgttggttgaatattgctcagacattgccaaaaccaagatcgaataacgaattaataaattgggcagataatattaggtcgaccagtaaatgcaaaagtgatttttataagtcttag

SEQ ID NO: 51567 - DNA, 1419 bp, Acinetobacter baumannii
atgatgaacgctgatattactacccgtattgagaaggatcttattggtcatcgagaaatcaacaatgaccattattacggagttcaaacattacgtgctttagaaaatttcaacttaacaaatagcaaagttggaaatttccctaatttaattaaagcattagctatggttaaactagcttgtgctgaagcaaactataatcttaaaaacttagatcaaactaaatttgaagcgattgaatacagctgtaatcagcttattcgtggtaatttccatgaccagtttccaatcgacatgatgcaaggcggggctggcacttcaaccaatatgaatgcaaatgaagtattggcaaacgttgctttagaatatatgggccattctaaaggtcaatatcaatacttgcatccaaataacgacattaatatgtcgcagtcaacaaatgacgtataccctactgcaattcgtttaggtttattacttagcctagatgagttaaatcttccatttaacaatttgattcttagcttcttgaataaatctcaagagtttgcacacattttaaaaatgggtcgtactcagttacaagacgctgtgcctatgacattaggtcaagagtttggtgcttttgcggtaactctacaaaaagaccttgagcaaattaatacgcttattccaaatgttttagcttatatgaatcttggcggtacagcgattggtacaggaattaccactgaatatagttaccgtgaactcgcgattcaagcacttggaaaaatctctggtaagaaaattaagtctgctcctgatctaatcgaagccacttctgatatgggtgactttgttcttttatctggtttattaaaacgtactgcaactaaactttcaaaaattgccaatgacttgcgtttactttcaagtggtccacgtactggtattaatgaaattaatttagaagcacgccaacctggtagttcgattatgccgggtaaagtaaacccagttattcctgaagcaatgaaccttgcttgcttccagatcattgcaaatgatttggctgtaactttagctgctgaagctggtcaattacagttaaatgcaatggaaccacttattgcattcaaactgtttgaatcgatggacttgcttggtaaagcaatggcaatgttccaaactaagtgtattgatacgattacggcgaaccctgaacactgtaaagctttggttgaaaattcaattggtattgtgactgcacttaacccatacctaggttatgaaactacaactcgtattgctaaaactgcaaacgaaactgggcaaagcgtattggctttagttcaaaatgaaggtttattatcagcacaagtgcttgatgatatcttatcgattaataatatggttaaaccaaaaatgtcggcttaa

SEQ ID NO: 51568 - DNA, 2178 bp, Acinetobacter baumannii
atggaaagacgttcgttaaatcttcacttcatgacatgctctaaaacagcattggcttcatctattgcactcataacatctgtcgtctatgcaaatgaagcggaggtttcgcagctcccaaccattactgtgaacgctacacaaaatagtgatgcactatacacatcaaaaaaagtgagtttatctggttttcaaactggtgatgtaaagaaagtacctgcatctattaccaccattacatctgaacgtatagcagatcaacacgcaaaaacactgaccgatgtgattaaaaatgattcatccttaggcgatggttatgctgcaattggctactatccaaattttgtagcacgtggttttgcgcttgatttaggctcaagctatctcattaatggccataccatacgtggcgaacaaaatgtagctttagaaaataaagaacaagttgaaatcttaaaaggcatttctgcaattcaaagtggaatgtcgacaccaggtggtgtggttaactatgtaaccaaaagacctgccgatattaaaactattacggtcgatgcaaattcagaaggcggctatacactggcaacggatgtaggcggctttgttaatgatagttttggttatcgaatcaatttagcccatgaaagcatccatccaaatgttgatcacgcaaatggtaagcgtgagtttggttcagttgctttagactggaaaattaatgagcgttctaaattattgtttgatattgaagctcagcatcaaagtcaacgttcagtacccggttatcaactgcttgatgggcaagaagtaccaacaaatgtagatcaagaccgtttattgggttatcagtcttggagtaaacctgttgtaaataacagtgtaaatgcaagtttgaaatatcaatatgcatttaacgatcaatggaatggtagcttaagtgcatcacaaagccgtgttgtgattgatgataatagtgctttcccatggggatgttataacgatatttgtgaatattctggtttgggcaatacttttgataaacacggaaattatgacatttatgacttccgcagcccagatgatacacgaattactaaccagttcgctgctgggttaaatggtcatttcaatactggcaacattcagcatcaaatcgctttcgaattacaacgtacatataaaaccttaaaacaccatacaccactgaatgtagcggtaggaacaggcaatatctatgaagatacggtcgactacagtccttcatcggaaagccctggcgatcgttacaaagctctagagagtgatcagactgcacttactgtatctgaccgagttcaatttaatgatcaatggtcaactctactcggtggaaaactgattcaccttgatgagcaagcttataattcagatgggcagcaaagccgtgatacggatttaaacaaattcttgccacaattagcactcatgtatagcccaacttccacgactaatctttatgcttcatatgccaaaggattatcagatggtggtgaagctccgtggttcgctaataatgctctagaagttctatctcctaaaaactctgaacaatatgaagttggtattaagcaacaaattcggaacttcttagtaacagcagctatttttgatttaaagcaagataatcaatatacgactgcaaattctgcaggagaattagaatttatttcacaaggcgaacaacacaatcaaggtattgagttaggtttaacaggtgccttaaccgatacacttgacgtaagttctggcattacctataccaaatctcgtctagttgatattgatactgacagttacaaaggtcatcaaactcaaaatgtaccgaaagtacgtgctacagcccagttatcttataaagtaccgtcagttgaaggattaagattactcagtggtatgcaatacagtagcagtaaatatgcaaataaagagggaactgcaaaagtaggcggatatagtgtctttaatattggtgctgcctataaaacaaattttgctgggcatgacactacttttagattcaatattgataacttatttaataagaaatattggcgtgatgtaggggcatttatgggagatgactatctgttcttaggtaatcctcgcacagctcaattttctacaaattttagcttttaa

SEQ ID NO: 51569 - DNA, 846 bp, Acinetobacter baumannii; identical to SEQ ID NO: 46113

SEQ ID NO: 51570 - DNA, 894 bp, Acinetobacter baumannii
atgaaacgttctgcaacctctctcattgtttcaacagttatgctttgtacggttggtgctacttctcaaattcaggcagcagatacattagctaaaattaaaagtactgggaaaatcgttattggccatcgagaatcgtctgacccgatttcatatgttgttgcaggtaaaccagtaggttatgcagtcgacatttgtaaccagtttgcaaatgatattaaaaaagaattgaaaatgcctggtttaaaagttgaatacaaggcagtaacttcatcaacacgtattcctgagcttttagcgggcaatattgatatggaatgtggtaccaccacaaactctaaacagcgtcagcaacaagtgggtttctcaactaactactatgcaacagaagtacgcatggctgttaaagcaaactctggtattaaaagtttggcagacttaaatggtaaagcagttgttactactcaaggtactacatctgacaagtacattaagatgaatgaaaaaggccaagcaattaatgtacaaaatatttatggtaaagaccatgctgactcttttgccatgatggcatctggacgcgctgctgcatttgtaatggatgataatattttagcaggcttaattgctaagtcttctacacctaaagcatttgcaattgttggtccagtactttcatcagaaccttatggcattatgattgcaaaagatgatccaaaatttaaagcaattgctgaccgtactgtaaataacttatggaaaactggtcaaatggatgctttatataaaaaatggttcttatcgccaattccaccgaaaaatactaatttgaacatgcaacaaagttcatcttataaaaaactcaaagctcacccaacagatgcaggaatctaa

SEQ ID NO: 51571 - DNA, 348 bp, Acinetobacter baumannii; identical to SEQ ID NO: 6026

SEQ ID NO: 51572 - DNA, 1707 bp, Acinetobacter baumannii
atgtcaggattacgttcagaacatatcagtaatcgactgtttttcttcatgttggtcattattttgtccttactgtttatggcggttccgcttattgtcagcagttatcaagaatatttaaaaactaaacaagctttggttgaaattaaaagcttaagatcaattgctgaagttgcaaataaagtctctaaagaacgtgcgcccgcaaataaattaatgtcgagtaacgctgccgactttttaaaaaatcaaaaaaacttaaaagaatatcgcctctctgttgatcgccaacttaatgaaactattcatattttaaaagaagaaggttataccgatttagcaaataccttagatactaaatttagagatgatttaaaacaggcgcgtgctgtagttgactattatgttgcaactcctgaacaagcgagaagctctatacaattcgataatgcaattttggctatgtttggagcttgggatagctgccgagaagttttacaaaatttgatgctacagttaaaaagtaaagatagccaaattaacaattattttactttgattgtggttttgactgatatgcgggatcaagctggtcgtaccgcatctaatgttattgcgcctgtgacctttaaagaaactatacctaatgataatcgggcgcggtctttgcagactcagcagcaagcacgctacttatgggcacttgtagacacactacagtcagagcaagctaaaactccggaatatcatcgcctttactcaagggttaaaactgaatttttagataaaggcgtacctattgtgggtcagcttttagatgaaagccaaaagcaccaagcctatcatttaaatggaacagagctgacagaccaaatcgttgataaatttaccacggttattgatttgcaaaagtttttacttaataaaagcgtcttaattgcatctcaagaaaactatttagcaaaaaagaagtttttccttactttactcatttcaagcatatccttagcagcagcgttacttacactaatttatgcaaagagaagggtgtttgagcctcttattcaggcccgtaccttaattcttgatttatctcatagcacagattacccaatagatgagttgaaacctaaaaaaggcgaatttatttcgttgttcgaagctattgatcgtttacaaagaatgctcaagcagcgagatgcttttgaattccagcttaaaaatattgctaatacagatccattaacgggtgtatccaatcgtttggctttatctgagtatttaaaaattgttgagagttaccctcaacaattttctcaaacttgtttgatgattattgatattgatcgctttaaacacgtgaatgatcaatatggtcatattgtgggtgaccaagtgattcggcgtattgcagatcaattaaaagcaaatgtacgggcttctgatttaattgttcgttatggtggtgatgagtttttaattttgttagaacaagtgcagtttttagatgcacgtctcttggccgaaaaaattcgtattgcgatttctttagaggaaattgatctatctggtacacaagaaaaattgcatgtatcggtcagtattgggtttgcgattggagcgacaagctggatggagttattagagaacgctgatcgttcactcttaagagctaaagctcggggacgaaatgtagtagagggataa

SEQ ID NO: 51573 - DNA, 2094 bp, Acinetobacter baumannii
atgacttcaatgtcgaacactacccaaaagcactttattgttgagcagtttcctttaccgacttgggtcagtgatgaaaaaggcttaattttatactgcaatacggagtgtacaaaatactggcgcgatacttctcctccattgtttcaacaatggctagatttcgtgtaccctgccgatttagaagaagttaaaaacaaatggttagatgcgatacggttccgatcaagaattgaatttaaatgccgtcttttgcataaaacccattattatcgatggtgtaaaatttctattcaattgtcgaaataccatgaatcttctcaagaaaatgaatggtttattagttttctagatattgaccaagatatacaagagcagcaaagcttacgaaaagatatcgatatacaaaatcaaatgctcgatatcagtgtcgattgtattaaggttttaaatacagatggcactgtatctcatatgaataaatcaggatgccttgcattaggtatacctgtagatgaaaaaaaattcggtatgcgatggttagatcttttacccccccatattcgtaaacgcggaagaattgccttaaaaaaagccttacagggtaaagtggcccgattcgctggcatgagttgcttaccaaatcaagatccagaatattgggataacatgcttaccccaattcaacatacaaacggcgaaattattcagatattgtgtgtttcgcgaaatgtcactcaacagtatcttactgaaaaccgattaagagatattagcgagagagatgaactcacaggtttatttaatagacgttcatttaagctacaactaaaacgcaccctagcttactcaagagaaacccaaaccagtgtagggctacttttaattgatctagatcatttcaagcatattaatgacactataggtcatagtgctggtgaccacttattaaaaatactttctaaacgttttaatcagtgcgtagaccctgaaagatgttcagttgccagattaggtggtgatgagtttgcagttattgttagccatttggaaaatgagaatgatgttcgtgaacttgctgaagtattgcttcaacaactcaatcaacccattacatatgctgggaatgtgctcaacggcggcatgagcatcggctgcgccatttaccctcaagatgcagttgatcaatcgagcttattaagttgtgccgatatggcattacatgacttaaaagcccgtggtcgtggcggcatacgtatgtataacccaagtatgatgcagttaaccgaggcaatcgcctctcaactcaacattgctcgccagcttattcgtcatcataccattcagccctactatcaacccaaagtcgatctaaaaactcatgctgtagtgggctttgaagcattactccgctggcatacgacttcggcccaaagaggtttgccttctcagattgctgaagcttttaaagactacgatttagccagtaaaattggtgaaatcatgcaacaacaagttttgcatgatattgctaaatggataaaattaggttttgtgccgcttcctgtttctctaaatgccgcaccagttgagttcttaagagataattatgctgaacgtttattaaaaaagattaatcaacttgaaattcctacccatttaattgagatagaagttactgaacatatgctgggtgaccgtggttctgaatatgtgattcgcgcactcaataaactaaaacagcatggagtacgcattgctttagatgacttcggaacaggtttctcttctttaacacatataagagactatcctattgattgcttaaaagttgattgtagctttatacaaaagatgcaacatgatccatccatttatgcaattgttcaggcaattggcttacttgctccaaatctctcactcggattaattgcagaaggtattgaaacaccagaacaagaagaattacttcttcaatttggatacaacatagggcaaggttttttatttgaatcagctattgatgctaatcaggtgatctctattcttaaacagggtcaggcttatctagaaagtcactattctatgaattag

SEQ ID NO: 51574 - DNA, 153 bp, Acinetobacter baumannii; identical to SEQ ID NO: 51143

SEQ ID NO: 51575 - DNA, 369 bp, Acinetobacter baumannii
atgagtgaagagattatttcggcaattgctacaattaagggtgcacaaattcaagcttattacacattaatagcatcatgtgtaggagcagttggcatagtagttggtattatactttcttggtataccgctttacatttacaaaaagtatctcgtttagcagaaacgagaaaaactgtttatttagagtttgctgaagcatattctaagttaatagctggtttacaattaattcaaatcgaaaagcataaatatcaaagtgagctttttagtagtttttctaatttctcaacttgtacagacaaggttatgtttgtctgtaatacaaaaactaaaaaagaagttgtttgcatttatctcaaagtttag

SEQ ID NO: 51576 - DNA, 1125 bp, Acinetobacter baumannii; identical to SEQ ID NO: 51509

SEQ ID NO: 51577 - DNA, 435 bp, Acinetobacter baumannii; identical to SEQ ID NO: 49446

SEQ ID NO: 51578 - DNA, 522 bp, Acinetobacter baumannii; identical to SEQ ID NO: 46238

SEQ ID NO: 51579 - DNA, 315 bp, Acinetobacter baumannii
atgtatattaacttagtattactttcagattatgagcgatgttcagctctcattgaaaaggaaatcaatgaagatatgtataaaaaggtattgtatctgaaagataattataatctccctttaaaaaaaccaatcgaaaagatcatgaaagaaagagggtatatatcctattttgactatgaatttttattcatagaacatttttataaaagattcaaagatatggaatttgagacgatacaggaatcaaagatcttagaagcaagagaacgtatcggtgaagctaacaatatcactaatgataaaaaggagtaa

SEQ ID NO: 51580 - DNA, 798 bp, Acinetobacter baumannii
atgcagcgacttcatgaagatgatttagctggatggttgctaggtgatagaaaagacggcgttcctgtagctggtggtaacggtgaagtgtgggagcatctatgtctttcagctattcaggaagacggatccgcactgtggccagcaaaacacaatatccaaaaattgaggctaatggagcaagcagcaccatatgtatttgccgggcagtaccgacaaatgccatcaccgccagcaggcggtttttttaagcccgacaatattcaaattgttgatgctttgcctgcggatgtattgaaacaagttagggcttgggattttggggctaccgaaaatgagggcgactttacagtaggtgtgcgagaagctctaggcgcagatggttttacttacattgtcgatgtaactagaggacagcttggacctgacaatgtgaataagcgcttagaacaaacagcaaaaatagatgggaaaaaagtttctgtgcgtctaccacaagatcccggtcaagctggtaaatcgcaagctagttcatttgtgaagcttcttgcgggttataacgtgatagccaaaccaatttcaggtgacaagcttacacgtgcacaaccatttgcggcccaagttaacgtgggaaatgtacgaatgctcaaaggtgaatggaataaggattttattgatgagcttcgtcattttcctaatggcacacatgacgaccaagtggatgcagcttcagatgcgtttaatgaattacatgaaggttttgaagccttctttgctgatatgggatttgctcgatga

SEQ ID NO: 51581 - DNA, 354 bp, Acinetobacter baumannii
  misc_feature (261)..(270): n is a, c, g, or t
ttgtataatgtttttaaaaaaaatgatcaattccctaaatattcaactcttgattctttagctaattctgctggagctcaacttcctataattattattgctacacttgctttaggttctgaagctggttatttaatgatagcaatgcaagtattggcggtgcctattcagttaattggcggggcagtttcgcaagtatatttagctcatgcccctgcggctgtgcaagaaaaaactattgctcaatatactataaatatnnnnnnnnnngttatatttcttataaaaacttctgattccttccaaaagttcttagctaactttccgatcccgaaggaaaccttaataatttga

SEQ ID NO: 51582 - DNA, 552 bp, Acinetobacter baumannii
ttgataatattttcagcaattgtatccgcaataatcgcatattttgatgaggttcaagagctatcaattgggggcaatattgtaaaattaaaagaagcaaaaaaggaattacaagtaacaatagatcaattaaagtcaattaaagtttcaacatatcggatgttacttttgaaaagtttacattcttcaggtggttttggaagtagccatttagtggatagtagagcagaatatttcttttcactcatcaacgaaattaaacaatcggattgttttaatgatctaaagtctgaaattcaagttcaattaacaaggttgttaattgatcaattaaataaattttatcctatatttcatgacaagcaattcaatgatagcgatgaattccctaaacctacggttttttatatcgatttgaaaaatgaaattattgataaagttcatcaaaaccgaacacctgttatatcatttgatcaaaaaaagcaggaaattgtcgcagctattgataactatgcagctttgtatattttattaaaagaagttgaaaaatag

SEQ ID NO: 51583 - DNA, 168 bp, Acinetobacter baumannii
atgaaaaaatttatttttattgcggctagctctctttttaatattgcagcagcacaagcagctgatggtacgatcactattaatggtttagtaactgataatacgtgtacgattgatactggtgataaaaatctcactgtaaattggctttgttgcacaaagatttaa

SEQ ID NO: 51584 - DNA, 174 bp, Acinetobacter baumannii; identical to SEQ ID NO: 49405

SEQ ID NO: 51585 - DNA, 1239 bp, Acinetobacter baumannii
gtggattacgccgaagtcctcctgtcagatcaccgttataaagaccaaaaaattgcttttctctatattgatttagaccgttttaaatcggtaaatgatgcgtttggacaccacattggtgatcaactgcttatacaaatggccaatcggttacattggcaactcaatgaaaaatgtaaattgcttagaattggtggggatgagtttttactcattgctgaaaacactgatactgaagaggcaatgcaacttgctgaaaaagtattacatcttattcaagacagttaccaaatttccggtaaagaaattaatatttcagcaagtctaggtatcgcactattccctgaacatgggcaaaatgttcaagacctgctaatgaatgccgatgctgccatgctgatgtctaaagagcagggccgcaatacttataccgtctttagttattctacccatcaacaagaaacaagaagtcagtcaaaactgatcaatgatttatacaaagcagtcgaagaaaaacaatttgttctctactaccagccaaaatttaataccaatcttgagatttgtggggtagaagcactcattcgctggaaccatccatctttaggtatgctgacaccgcatatgtttattggtggcgcggaaaagacaggtttaattattccaatgggatattgggcgcttgagcaagcttgccaacaaattcaggaatgggaacgtagcaatacgcagttttatccaatcgcagtcaatttatctgccttgcagttcgaaaataaaaagctctttagtactctcgaaggtttgttaaaaaaatatcaaattcagccgcatcacctcattattgaaattaccgaatcaaccgcaatgcggcatatcgacttaagcattcgtgcttgtgagcgactgcgcgatatgggcattcgtgtggcaattgatgactttggaacagggcactcaagcttcttatatttaaaagatttaccagtcgatgaacttaaaattgaccgtggatttattgtcgatttaaaaccgggctcaaaagaagaagtcattttagaaagtattattcatttggcgaaaaagttaggtttaaccgtaacagccgaaggggtggagacacagcaacaagttgagattttaacacgcttgggctgtcagcagttccaaggttatttgttgggtatgcctgtaaatgtagggcaactgattcagtcgcaaggtgctcattttgtttaa

SEQ ID NO: 51586 - DNA, 1191 bp, Acinetobacter baumannii
atggctaaagccaagtttgaacgtaataaaccacacgtaaacgtgggtacaatcggtcacgttgaccatggtaaaacaactttaactgctgcgattgcaacaatttgtgcaaaaacttacggcggtgaagcgaaagattactcacaaatcgactcagcacctgaagaaaaagcacgtggtattacaattaatacatcacacgtagaatacgattctccaactcgtcactacgcacacgttgactgcccaggccacgccgactacgttaaaaacatgatcactggtgctgctcagatggacggcgcgatccttgtatgtgctgcaactgacggtccaatgccacaaactcgtgagcacatccttctttctcgtcaggtaggtgtaccttacatcatcgtattcttaaacaaatgcgaccttgtggatgacgaagaattacttgaattagtagaaatggaagtacgtgaacttctttctacttatgacttcccaggtgatgacactccagtaatccgtggttcagctcttgcagcgcttaacggtgaagctggtccttacggtgaagaatcagttcttgctcttgtagcagcacttgactcttacatcccagagccagagcgtgcaatcgacaaagcattcttgatgccaatcgaagacgtattctcaatttctggtcgtggtacagtagtaacaggccgtgttgaagctggtatcatcaaagttggtgaagaagtagagatcgttggtattaaagatacagttaaaacaactgtaactggcgtagaaatgttccgtaaacttcttgacgaaggccgtgcaggtgagaactgtggtatcttacttcgtggtactaagcgtgaagaagtacaacgtggtcaagtacttgctaaaccaggtacaatcaagccgcacactaaattcgacgcagaagtatacgtactttctaaagaagaaggtggtcgtcacactccattcttaaatggttaccgtccacagttctacttccgtacaactgacgtaactggtgcgatccagttgaaagaaggcgttgaaatggtaatgccaggtgacaacgttgaaatgtcagtagaattaatccacccaatcgcaatggacccaggtctacgttttgcgatccgtgaaggtggtcgtactgtaggtgctggtgttgttgctaaagtaactgcataa

SEQ ID NO: 51587 - DNA, 450 bp, Acinetobacter baumannii
atgggttcatgtgcagctccatcagcaaaaggggatgataagtttatcaccaccgactatttgcaacagtgccgtttaatctggcttaccgttctagcttggaaactatataactacaatcctgttatctctttagaaaaaaatgaacaataccctcctattggttttaaagctgcttttttaatgcaagcgattaatcctaaaacatggatgatggcttttgcagttattagcgtctatacaaaacagggacaagatatcttgataaatgtctcaattttatcctgcatttttttacttatagcatttccttgtctctacctatgggccttagtaggcagactaagtactcggcttctttcaaaaccaaaacatataaatatttttaacaaaataatggctattatattactagcctcagtctggtggcccatgttgcctagattttga

SEQ ID NO: 51588 - DNA, 1149 bp, Acinetobacter baumannii
atgactcgaaaaagcgctattgctgcactcctcctcttaccaagtttttcttatgcagcaactgtcttatcagctccgccagaattaaataataagtcttatgtattaatggattacgagacaggacaaattctcgcttctaaaaatgaaaatgaaaagcttgctcctgcttctatgactaaaatgatgacaagctacatcattgaacaaaaattattaaaaggtgagcttaccgaaaatgaacaggttcgtatgaatgaatctgcttggtgtaaaggcagtagttctgaatcatgtatgtatgttccattaaatggcacagcaactgttttagaaatgcttcgcggtattattatccagtcaggtaatgatgcatcaaaagcaatggctgaacatattgctgggaatgaaggtacttttgctcacatgatgaaccaggaagcaaaacgtatcggaatgaccaatacccagtttattaactcaactggtatgccagctgaaggtcattactcaactgcaaaagatatggctgttttagcacaacatattattaaagacagctcaaaatactacccgatttattctgaaaaagaattcacatttaacggtatcaaacaaggtaaccgtaatgctttactttacactgacccaagtgttgatggcttaaaaacaggccatactgatgaagctggttactgcttaacaacttcaagtaaacgcggtccaatgcgtttaatctcagttattttcggtacaccaagcatgtctgaacgtgctgaccaaactcgtgcattattggcatggggttttgcaaactttgaaactgcaaatgtacaacctgcaaaccaagtgcttgcaaaagctaaagtttggtttggtaaagaaaatgaagttcaggttggtttagctgaaaactttaatgtgactatgcctaaaggcaaagcggacggcattaaaactcagttggttgttcaaccgaacctaagtgcaccacttcaaaaaggtcaagtcgttggtaagcttgttgctagtttagatggtaaagttattgctgaaaaaccattggttgctttaaaacctgttgaagaagctggtttcttcgcacgtttaattgaccatatcaaacaattcttcagcaacttattctaa

SEQ ID NO: 51589 - DNA, 1143 bp, Acinetobacter baumannii; identical to SEQ ID NO: 50755

SEQ ID NO: 51590 - DNA, 2268 bp, Acinetobacter baumannii
atgtctaatattgagcaagatacacgttttattgttaacaataatttgattaacaagggctggatcttggacattcaagatccaaacaaaaatgtcttttttgaatcagatatcttaagaattgttaataatgagtttctcaagaaaagtaaaaaaagacccgattatgttcttttcgattcacaaaataagcggccaatcggtgtaattgaaacgaaatcaggtggaaaaagcttaacaaaagcactggatcaggcaaccgaatatgctgaaatgcttgatgcacctttgatatttgcaatgaataatggtttctgcgaaacacggcatttgtatacccaaaaaccattatttattgatgaaaatgaggttaatgaattaataagagtaaatgaagctaaagagttcatattgcaggaaacaaatggaatttatattacacctaaagaaattttagtctctcgcaaagagttaattaatgttttcaagaagttaaataactcactaagaggtgaaggtttaagagctggtatagaaaggctttcagaatttgcaaacattctttttttaaaattgtatacagagaatgctaatacaggtatttggaattctctcaaaagtctcgataatgatttgctaattaatacaactaataacatactacaagatattgatagacaatatggtgcttctgtttttacaaatttacagctaaccaaccctgttgctgttaaagagatgatcaaagagttggataagttaaaactctcatcaatagataccgatattaaaggagatgcttttgagtatttcttacagcaagctacagcaactaataatgacttaggagaatattttactccacgtcacataactaaaaccattgttaacttagtcaaccctaaatatggtgaaaagatctatgaccctttttgtgggacaggtggttttttaacagaggcatttgatcatataaaagataacactttaattgcaaacaatagtagtgaagaaatcaagcttaaacataatactatttttggaagagaaattacctcaaatgcaaaactcgcaaaaatgaatatgattctgcatggggatgggcatagtggaatttgccagatagacacacttcaaaaccctattgaatctgaatatgatgtggttataaccaacatgccattttctcaaaaaacttcttattctcacttatatgagaataagttagctaaaaacgatggtgatggagtatgtgttctacattgctttaaagcaacaaaaaaaggagggcgaatggcattagtagtacctgaaggctttctttttaaagccgctttagccccagtaaggaagtatttatttgaaaacgcccaactaaaagcagtagtttcacttccaaaagaagtttttctgccatatgcaaaagttaaaaccaatatactctactttaccaactgtcataatggtagaacaaattctgacgttttttactacaatgtgacaaatgatggcctaagtttagattctttccgtagaaaaattgacgaaaatgatttaaaaaatttagattttgctgatttaaataagagcgactttgataaatattataatgaattaggtttcttaaaagttaatccagaattaatcagaagcaatgattatatttataattatgctcactatagtaattcacatataaaatcaaaattcccaactataaaactaaaagaactcctatccttgtctggcaaagtcaaagtgggagaggatacaaatatacctattatgagtatcactatggaacatggcttaattgatcagcatgagaaatttaaaaaacgagtcgcaagttctgatatttctgggtataaaaaggtttttaaaaatgaacttgtaatggggttccctatagatgaaggtgttctaggatttcaaaaatattacgatgctgctgccgtaagcccagcatacaaaatctttagattaaaacgagaagttaatgtagaatatttggatttgattttgagatctaattctctaagaaaaatatacaaaagtaaaatgcaaggcagtgtagagagacgacgcagtattcctgatgaaatgtttttgaatattgagatcccgaatcctcctgaagaggttaaagatcaaatagtaaaacaacataaactaataaaggaaattgagaatagtctcaaggaaaatcaaaaaaaattgcgtctaaagacagaagcattatgggaacttcctcaaaattacaactaa

SEQ ID NO: 51591 - DNA, 303 bp, Acinetobacter baumannii
gtgcttaaagttaaagtagctggagcagccgcggcctctacaccgcttgcagctttagtttcaggtgcaggtgtagcttctttatgctggcaagagcgccacaaccaagcaattaataacccaagaataatgagcgcaataatgggtaaaaaaccacgagatttgcccgtagtctctgttgctgctgcaagtggcggtgctgtcgatgaagttacagaagataaaccagctccaatacctaatggagctaataagcccacggcccatcctggtaaatatgaacggatcgtttcagcatgctga

SEQ ID NO: 51592 - DNA, 339 bp, Acinetobacter baumannii
atgtcacttgagccactcgcaaagttaataatttgtaaattaagtgctttaactagtgcgtttacatctacattgttcgggtcaattgcagttaaggctgtttgtgaagcacttaaactattgcttacagactgttcagctgtttctggcgctgcggcaacaacttcggtatgtggaacaagtgcttttactttagcagttaacgcttctaacgctgcagcatcacctgctttcaatgtaatcttgtcacccacccattctaaagaagcgtctggaataccttttaatgcacccaacacgcctgctaaagcatccttatcggtaaaagcagccgcataa

SEQ ID NO: 51593 - DNA, 2139 bp, Acinetobacter baumannii; identical to SEQ ID NO: 42639

SEQ ID NO: 51594 - DNA, 471 bp, Acinetobacter baumannii; identical to SEQ ID NO: 42638

SEQ ID NO: 51595 - DNA, 375 bp, Acinetobacter baumannii; identical to SEQ ID NO: 42637

SEQ ID NO: 51596 - DNA, 1230 bp, Acinetobacter baumannii; identical to SEQ ID NO: 50188

SEQ ID NO: 51597 - DNA, 453 bp, Acinetobacter baumannii; identical to SEQ ID NO: 42634

SEQ ID NO: 51598 - DNA, 861 bp, Acinetobacter baumannii
atgaaaagtctggcttttattcatcgtaacgatactcgctttgcggtcggtgatttttatccagttctttctgttttttcctaccatgagttaggcaataccctctcacccttcttactactcgaccatttaggtcccggaaaaattgcaccttctatgaaacgtagaggagttaatgatcatcctcatcgtggatttgaaacggtaacacttgtttatgcaggtgaactggagcataaagattcatctggtggaggtggatttataagtgctggcgatgtgcaatggatgaccgcagcctctggtgtgattcatcgggaattgtttagtgaagagtattctcgatctggtggtccctttgaaatgattcaactttgggtcaatttaccagcagcaaataaaatgaattctccacgctatcaaagtttaaagaaagctgaaataccgatggtgaaactggaaaatgaagctggatttgtacgtattattgcagggcagtttaagcatgttatgggccctgcacttactcacactcctattaccgtattagatgtagagctccaggcaggtcaacaagctgccttccctgctcaatccggtgaaacagctttagtttatttacgttcaggtcgggcacaatttcataaagatgaagacgttttagaggaacaaggcctagcagtcatgtcaaaccaaggagagcatttctctattactgccctgcaaaactgcaaattacttattttgacaggacaacccatcgcagaaccgattaatggtcatggtccatttgtaatgaatacttatgatgagatttcacaagcctatgatgatattaaaaatggaagatttgccaagtaa

SEQ ID NO: 51599 - DNA, 561 bp, Acinetobacter baumannii; identical to SEQ ID NO: 50191

SEQ ID NO: 51600 - DNA, 1626 bp, Acinetobacter baumannii; identical to SEQ ID NO: 50192

SEQ ID NO: 51601 - DNA, 957 bp, Acinetobacter baumannii; identical to SEQ ID NO: 50193

SEQ ID NO: 51602 - DNA, 1452 bp, Acinetobacter baumannii; identical to SEQ ID NO: 50194

SEQ ID NO: 51603 - DNA, 975 bp, Acinetobacter baumannii; identical to SEQ ID NO: 50196

SEQ ID NO: 51604 - DNA, 1113 bp, Acinetobacter baumannii; identical to SEQ ID NO: 45783

SEQ ID NO: 51605 - DNA, 981 bp, Acinetobacter baumannii; identical to SEQ ID NO: 50198

SEQ ID NO: 51606 - DNA, 264 bp, Acinetobacter baumannii; identical to SEQ ID NO: 50200

SEQ ID NO: 51607 - DNA, 492 bp, Acinetobacter baumannii; identical to SEQ ID NO: 50201

SEQ ID NO: 51608 - DNA, 477 bp, Acinetobacter baumannii; identical to SEQ ID NO: 50202

SEQ ID NO: 51609 - DNA, 330 bp, Acinetobacter baumannii; identical to SEQ ID NO: 50203

SEQ ID NO: 51610 - DNA, 564 bp, Acinetobacter baumannii
atggtagttgttcatcaaagaatggatggaagcattagagaaggttccatattctttttaggggacagtataactcaatctttaaacgtaaattcagtaaccaatcagggaattaattatgggatcggcggggatacaacttttggtttattgaatcgcataaagtattataattcacttaataaagctgataaaattttagtagctatagggattaatgattttatttttaacagaaccagtaaagaaatcatagaaaattatgaaaaaatatttgaattactacctaaagacaaaaaagtttttataaactcagtgttgccagttacataccaatatacagagaattccgataaaattactattaaacaaattgtagaattgaatcatgaattgaaaaaattttgtagtctaaaaccaaattgtgaattcattaattcttatggattatttgcagattcggcaggatttttaaaaaaatcctatgatactggagatggaatacatcttaatactgagggatataatctcttgattaagatattgaaagttaaaattaattga

SEQ ID NO: 51611 - DNA, 3024 bp, Acinetobacter baumannii
atgaataacaatcgagtggaagtacatgtcagtgcaaaaacttctgagctcaaggaagggatgcaagatgctgaaaaaatagtttcagatgcttccaagaaaattgaaagcactggaaagagtatcgattttaaacttgatctttcaaatctaaagtcagagttaaatggttttgcaacaagcctttcggataaatttaagaccgtaggcaatgatattaagagttcgctgactaatggcctatctttagtcagaggcggtttttttgttggtattggccaagagattgctagaagtgcagcggaagcggttgcagcaattcctgatcttgtatctgcagtgggtaaggcttcaaaagagttagagattcaagcccgattagcaaactcgaatactttagaatttcaagaatgggcatttgctgccaaaaaagtaaacgtggagcaggacaagctatcggacatcatgaaagatgtaaacgataagtttggtgacttcatgcaaactggtggtggtgagatggccgatttctttgagaagatcgcgccaaaagtcggtgtcactgcccaacaatttaaaggcttatctggtccgcaaatcctagaaaagtactaccagactttgcaaaaagccaatgtgtcacaggctgaaatgactttctatatggaagccattgcgaacgatgcaacattattagctccattattggataacaacggtcaaaaattaaaagagtacgctaaacaggctcatgatttaggcgtaatcatgagtgaagatgccatagctgctaccaaagaatttaatacgtcccttgagactgtccaaacaacacttcaaggagtattaacccgtattgcagcacaagcagctccatcccttattgaattagctaatcaatttttaacttttgcggttgattccaaggatgccattgatgattcaattaaatcgattattggcatttttgaaagcttgtttagcattctaagtgagcagttcacaacgattggagcaatttggagtgacttgactggaagcattggagacgatgcaaataaacagattggctttatggatgctatatctgtagtactacgagcattaggtgttgtagttaccggctttcaggtaggcgttcaatctgcttttgcaatcattcgtgccgttgtagtcacggtatgccaagctttaatcattgcttttaatggccttatggctggctttgatatggtacgaagtactattcagtatggtctggatgtattacaggtaaagtttcaaacatttggtagcgttgtaaataacatcctccattttaacttctcaggtgcaaaatcggcatgggagggtggtttatctcagcttggtagtattactgatcgttatacaaaccaaatgaaaggacgaatggctgacctgaaaaactcttggaatgcaggagccactacagcagccaattcacttgtcacggctggtaaaagaattcttgaagttacaactgctggcaatcagaagattaccaactatgtatttaaggatcctactaaaccttttgagccacctaaaccacctaagctaggcctaggtactgcaccaccaaatactaaacttggtattggtactggggagaaggacgaaaaaggcggctctaaatcgtctgcaaaatctaaagcagaacaagaggctaaggaacggcagcgacaagctgaacaggcagctaaagcacttgctgatattcggtataaatatgcatccgaagaaaagaaagtggctctagatcttcaaaaggcgttagatgagattgaaaaatccaagatgactgcagatgaaaaagctgctgcgaaagtcaaagccgaaaaggatgcatccgacaagatcattgctattcgtttaaaagagtttgaggaatacaaaaaagctcgtgaagaacaaatagacaattatcaacagcaagcacagcgcctttatgaaattgaagcggcacggatccaagctgaatttgatgccaagaaaatttcaaatgtccgtaaagttcagttggaaaaacagcttgaagatcaattacgtgaaattaaacggcaaggtcttttagagcgtttagctttggaaaatgagcagaccaacattactggcaaacaaggtaatcaaaaccaaatcacaaacaacatttctgatttagagacagaccagaaagttgctgacactaagtctatgggcttaatcagtgatgcggaaatgaaagactttgaggccaagttcggtggctttacttctcgactttctaacctttgggatcagggtattcagtctcttatgaatggtaccctcacttggagtaacgcaactaaagcagtgcttgctgacatggggcaatttgccttgcaaacagctactaaagagctacaaggctggttaagaatccaagctattaaattggctcgtaaacttggatttgtcggtgctgaaacagccgctgaagcttctggccaagctgctcaaacaggggcaaccattgcaggtgaagcaacacgtaccagtgttactgcagctggtggtttagctcgtttaggcttaaaagctgctgaagctatcaaaggcatcatgatgtctgcatgggaagcaatggccggagcttttaaagcgatggtcgcaattccatatgttggtccaattcttgccgttggtgcaggtgcggctgcttttggtttagtggctggacttgctggaaagattaaatctgctcgtggcggttacgacattcctgccggtgtaaaccctatgacgcaattgcacgaagaagaaatggtattgccgaaacagcatgccaataccattcgtgccctaggtaaatctatggccaatggtggtctgggaggtggtggcgagaacactgcacagcccgttattttcagtcctaccattcaggcttgggattcaaaggatgttcgacgcttcttcaagaagcatggtagtgaattagcagacagtcttaagggctataaccgtaattttggtaaataa

SEQ ID NO: 51612 - DNA, 654 bp, Acinetobacter baumannii
atgtcagacgtattgtttccagaattacccggtcttgaatgggatacatctattactcccatgtttaacaccaaaatcatgacctccattaatggccgggagcttcgagcaagctttcaggcctcacctaaatatgaaatctcgttgtcttacgcattcttgcgcgaaaataaggggagaaaggaattgcagcaacttcaaggattttatttagagcgccgtggggcatttgattcctttctttataagatgcctgatgacaatgagtttagttgcacttttattggtgatggaactgctacaactttccagttatacaaggatatgtacacaagccaattgcctctaggtaatacagaggagcagattgtaggtgaagtagatcccaacatgtggaatcaaacaccagccaaaacaatgtggaacacaaaccaagaaaagcttatgtggaataacgcaactgctcagataacgagtgacggtaaatatgtactttcacagccgatcgaggagggtgtaaaggtaactgtaacgggtactttttactaccgttgtcgttttaaagatgacacacagcaatatgtcaactttatgcataagctttggaaagctgggaaggttgaattaattggttctttggggaataagatatga

SEQ ID NO: 51613 - DNA, 849 bp, Acinetobacter baumannii
atgagacaggcctctccaaaacttatagccttgttagatgctgatcagttcatcatggccgatctttatactattacgaccatacaaggtattgagtatcgctataccaactatgacgttcatttgacggtgcaaggcaaagagtttcgtgctgatggaccaatcataagtcgagaaggaataagcctttccttgggtattgaagttgataatctctctatcaaaatagaaaccaatgaaagtactaaatttggtgacgtacctgtagctcaggcatttcataacggcgttttagatggtgctcgtttcaagcttgaacgtatttttatggatataaatactcctactgatacgagtgccggcacgttagttttatttgaaggtcgcattgttgagccggaactcgatcgttatgaaattaacgctagcgtggtttcagaagtggatgacttaaaacttcagatgccaaggaacttatacacaccaggttgtttaaatacgctgtttgatggtgcttgcgggttatcaagagataatttttcggtaactacttcagtgcaagcaggtagtactactaatcgtattttgtgcaatttaagtcagcctcaaggttggtttacccaaggtgttgtggagttcgtcaatacaggaatcaagcgaacagtcagattgcatgagtcgggtgctctgttattaacgttaccgcttcttgaagtgccgagtgtagggcaaacaattaaagtttatccagggtgtgacaaacgactcgatacatgtgacaaccgatttaacaaccgttctcggttccgtggtgcaccatttgtacctgtacctgaaacgtccgtctaa

SEQ ID NO: 51614 - DNA, 1818 bp, Acinetobacter baumannii
atggcagttcctgataaagacgccctgattgggcctacggtcacagaggcacaatttaaaaccaatcttggtgcaattgtggatttcattaaaccaattgaatctcaaagccctaactatgcaaccactgctttgctgactgcttcaagacccgttaaaaaccaaagttatgcaaaagccctagatacagggaaggtatggtattggaataaaccagcaggatcaccagaaggaaattattgggtagagactgagctaagtgatcttgatcaggcaataacctatacagatgggcaatttaatctagcaataaaaagagcagtttttgaaactttatcacagctatttggactggctaaatcagacgatccaactaaaattggagttttgttggacggtgttggtcggatcttgttgggttatgacctagaaaaagatacaggtatttatgcggggatgcttgagcaagttgttgaaattgtaccggggcttaagctttataacgatggtcgatatttaggtttgttaggtgattctagtaggcagatattgatcggttatgacatgctgaatgatgtgccaattattgctggacttgaagagctcatcgcggggctagagctaccaaatcaaaaacccctcgtgaaggctgttaatcacattctgttttatggtcaatctctatcagttggagcaacagcaaccacgattctaagttcgtcacagccttattttaatgtgacattcgacacgggcccacgcaaggactcagctgcaaattcagtcattccactggttgagcaatttaataatccaagttcagatggctatgataatcgcggagagacctgttgttccggtgctgcaaattatgcaagccgcgcaatgatgcttgaaaatgggattgatcctcatgatcacgtaatttttgcctcaactgctggacatggtggttatcgaatcgatcaacttgaaaaaggtacagcttggtacaatttttttatcgagcatgtgtctgaagcaaaacgtctaaatggtgatgattacaaagttcaagtcgtgtgttgggttcaaggtgagaatgatgcaataactagcactcaaacaccttataacgtttatcgagaaaaattagagaagctgcaagttgatgcaaatgccgacatcaaggccattactggtcagacagatgatgtgaaattcattacatatcaaatgagctatgctgctagaacatgggcggatcaagctcttgttcaactgcatctttgtcagcaatcagataagtttttgatggctacacctgtgtatcacatgccgtatgcaattgacaatattcaccttacaaacgttggttacaagtggatgggggcttattttggccgcgcatataaacagttaattgttgataaccgtaagcctgatttcattaatcctaaagtggctcaactaatcggtgatgaaattcatatcaactttgacgtgccgaaggcccctcttgtacttgatacaacaactttagctttaacaactgatcacggatttaaagttcttgtaaatggatcaaaggccactatctcaaatattacggcgcaagaagataaggtaattttaaagatttccgaacctccaactggcgaagtcaaagtccggtatgcgcttgattatctcggtactggaataaatttaacgggtggagcttctggcaatcttcgtgattcaactacagatcaaatcgagattgctggggttatgaaaccactttatcacgtatgtccacattttgaattaactgcatttgtagacaaaggaatttaa

SEQ ID NO: 51615 - DNA, 771 bp, Acinetobacter baumannii
atgaatcaattatttttccaagcaaagaattttgtgagcaaacgttctctaccaaaactatcaaatgtagaagaccttcttccgaattatgaatttgaatcatatggccattggttgtttggtggggattcatcatcactaattgatgttgtaaatggcaaattgcttgcattacagggtggtgcgacagttcagcctgtttatacagataattcagtaacactctcaattgcaaatggtaatgcgcttatatctgacttgattgattcttcaaatcagagtgtaacgttgtgtacagttgtaaaatgttcgtctacagcattgtcaatcttgttaggtaacttggtcccattcggttcgacagcaagcagtggccttggaggatttgctagtgcaggaaaagcatacctgactctgaaagcaataaccgggacgggtggtgcaggcattggatcactaacaccagctgcatcaatcacacaaaccaataatttctttattgcaattagtgttgataaagcaactaagaaaggaattgtttatgttcagcaggctggaactgagtcaagtaatgaagctacatatgcatctccaagctatgacacggccttaaataaatttgggattggtaatgtcgcatatacaggcgcagcaggatctgcgacatataatgaagcagttatttttgataaggctttaactttggacgagattaaagctgtcgcttcgcgtgctaaggaccgaatgaaaaatcgtggaatcactttttaa

SEQ ID NO: 51616 - DNA, 423 bp, Acinetobacter baumannii
atgaaaaatctcgaagcagttcaagaagccttaacttggctcggtaccccatatcatcatcaagggcgtattaaaggtgtcggtgtggactgcggaacattgatctgtgaagtctacgagaaagtagggctcatggatcacctagatccgcgaccatatccaccagactggcacatgcaccagatgggacaacgctatttagagctcattttaggtgtatgtgatccgattgaagggccaccacaacccggggatatagttttataccactttggcaagtgtatcagtcatggtgcaattgtgattgagtggccacaggtcattcacagttatatccatcagggagtcattatccaagatggaacaaaaggaagtttagcccggcgaattgccgggttttttcgtatgaagaggcttaaataa

SEQ ID NO: 51617 - DNA, 441 bp, Acinetobacter baumannii
atgaacgtaaaagctcctcctttcaactcatttgcatttgtcagcatggctgctcttgcaatctctggtggttctttagttgcttgccaattgcaaccagctttccaaacaaaagaagccccttctctatttacccctaagactcaaccaagtacttacggggttttaaccgcaaaaatcacaggtaaacattctggcgttgccgtaatcaaattagatagtttccgtttaaacgttagctttgattttgaagcccatccagacagttacggcgttccgggttctgaattcactgctgttgaaattactcaactcacagtaaatgaaattactgatgttaatggtaagtcatataacgatttcaccgaatttgaagacatccgaaacatcaatggccttctaaaaggcttcatcgaacgtaacaagttgttggaggcttaa

SEQ ID NO: 51618 - DNA, 2700 bp, Acinetobacter baumannii
atgctggtcaagccttcatttaaaaaaagattgttacttacaacattattatctttatcggcaacacagatttttgcatcgaataacagtgaacaaatcccgattggtaaattacccgagtgggtcgtacccgaatcttatgatttagattttaagattgatcccgcacaaaaaggctataccggtaaaactacgattcatttaaagctggctcaagccacagatcacatctggattcatggtaaatctttaacggttaaagatgtgaatattacatcggcagagggcgtcaaaaccaaggcaaaatatgagcaagcctctgaaatagatggggtgagtaaaattaaatttgccaaaaccttgcccgcaggacagtatcaactcgttctagattttaatgcagcgtatgaccagcagctcgatggtatttataaaatcgagtttgagggtaaaccttatgtgatgacgcaaatggaagcaattagtgcacgccagtcattcccatcatttgatgaaccacgttttaaaacgccgtttaatattcgtttgacgattccaagcaaatattcaggttttgccaatacccaacaaacatctgagcaaatagagaagtcagggtggaaaacactcagttttgcacaaaccaaaccactaccaacatatttacttgcattggctgtcggaccgtggcaattacaaaaagggcctgatattggagcaacttcatggcgtaagcagccgatccagttacgtggtattgcacctgatactaaagctgaaaaaatgcagcaagccttatctgaaacgccagccattttaaaaactttagaagattattttgcctttggttatccatttgacaagctcgacttacttgcagcaccagactttgctgctggggcaatggagaacccggggttaattacttttagagactacttgatgttattagataaggactcgccagttttttttgtacagaattcatttaatgtcaatgcacatgagttggcgcatcaatggttcggtgatgtcgtcacgatgccgtggtgggatgatttgtggctaaatgaatcttttgccacatggatgcaaagtaaaattactcaaaaattacatcccgaatttaatgctgacctagaacgtattacagacaccgcagatgcgatgaaaagtgacagcttagtgagtgtgcgccgtattcgtcaacctattttaagcaatgccgatattcaaacggcttttgatggcatcacgtatcaaaaaggtgcggctgttttaaatatgtttgaaagctatttaggcgaagaaaaattcaaacaaggagtgcgtaattatattaataagcaccaatatggtaatgcgacagctaatgatttaattagcgctttagcagagcagtctggacaaggtgagcgctttactagagcgatgaaaagttttcttgatcaaccaggtgtgcctttaattaacaccgcattacagcaagaaggcaataaagtctttttaaatgtgaagcaaagccgttatttacctgtgggctcaaaaggtgatgcaagaagcctctggggtgtaccgttatgtgtacgttatgaagttccaaatgcaggtagtaaagtgcaatgtgaattggtagaccaagcagaagccaagattgaactcaaaggtgccagccttggcagttggtatattccaaatgcagatgcggcaggatactatcaatttagtttgccacagaaagaatttactcgtctgactgctgctacagaaaagctttctaacactgaacagttggcttatgcctatgcaatttcagctgcatttaaccacggtgatattaatttattggctgtcgtagatgctgcgaagaaatttgccaattcgaatagccgacaaattagtacagcgctgttttcccagttaagtaccattcatcgtcatgtattgaaaacagaagctgaacgtgaacgttttagaaaagtcttagctaatttatatttacctaaattaaatcagttgggttatgtcagcaaaacagacgaatcagctgaagacagtttatggcgtagtgagttggttagatttcttgctctagatattcaagttcctgaagttcgtacccaactgttaaaacagtcagatgctctatttgctcaaaagcagcttaattttgcgcaagtaacacctgaattattgccaaccattttagctgtacgtgtacaagaaaaaggtcaaccagcttttgaccgattgtctggagagttacaacgcgtgactcaaccgacacaacgtcttgcaatacttacagccttgggttcagcaaatcaagaagcaacgcgccaacaagcacgtcagttgattttaaacccgcgtgttaaagttggtgaagttcgtaccgtggtcaactcaatcaatagttatggagatgaacaaggtggcttatggtcttggtttaaagtaaatcatgacgctgtgtttgatcgtttaggtaaatcttcagctgggcgtttccctgcaatgttcagtggggcagcttgtacccaacaacaagcagcacagttaaatgacttttttgcaccacgaactaaagagttggttggggtagaaagaggattgaaacaaaccaaagaacgtattcaactctgcgaatcgctggtagcaaaacaagatgggtcaattgtgcaacagttaaagttgtaa

SEQ ID NO: 51619 - DNA, 225 bp, Acinetobacter baumannii
atgggtaaagattacgactatgtgcgtaatgaaatggacctgcctagattaagagcattaagtgcgtatcagcaaaacaaccctcccgcgcatgttgggatacaacggctttgccgtattttggaagcgttcatgggaatcgaagaaaccccacaagctatcaccgtttcagatgatgaagaagatatgttagaagttttgtcgaatttcccgcagggtggttaa

SEQ ID NO: 51620 - DNA, 315 bp, Acinetobacter baumannii
atgcaatttaagcaagttgaaaaccctcgcggctctacagttgttgttgatggtcagccatttgtttttgctccattgtctcttggtgcagtcgagaaactattgccggcacttcaatcattcaagccagatgatgttggcactgtgattgatgtagcacacaaatctttgaagcgaaattaccccgacattactcgtgatgatgtggcagagatgctattcatggatcagctaacagaagttatggaagctgtaatgtccgtgtctggtcttaaagggaatgatgacagcgctgcaggtggctcgggggaatag

SEQ ID NO: 51621 - DNA, 306 bp, Acinetobacter baumannii
atgaagcgtaaaaagtttaataaaaaacggttttatcgccgtttagaagcacagggattagttaaaggtgggctagtaattggcggtgacttcacgccgccgtggttaatgccctgctgtgaagggtttcctaatttggccaaagcagcgggtaaagctgcggaaaagtttcaagaggtggtggaaagtatcaaaaagatagattttcagcctccaaatattaaacccattaaaacaaaaatttttattgatggtgtcgacttgggtgcaggcaaagatttttcggttacctattcaagaacttaa

SEQ ID NO: 51622 - DNA, 813 bp, Acinetobacter baumannii
atgacaacgataattcagatcctgaaaccacacctccagcaggcgaagaaacgtaagaaaggtcgtaaagcatcaaagccgagagccgtgcacgtaaatcgccgtgtagagctctactacacaaggcaattgctggctatatctaaatactgtcaggaacaaactaaggaattagttattcctactgtaggtcagaatatcggtgatgcttggttttctgacatgatgacggcgtttagggaaaaactcacaaagtatgttgttgagatttcccgcccgttggccacaaaagttgtgactgatacccaaaaggaagtggacaagcaaatagcagagcacaccaaaacaattattggtgtggatctaacgccgttttaccgagctgctgatatacaggatgaggtagatctaaacatcactgcaaacgtcagtttgattaagtctattccccagcaatacgccgataagcttgaagttttaatcacaaatgctttgcagactggacaaacaaatgaagagttggccaaagctattaagcaattaggattatctactgattaccgtgcacgtcttattgctagtgatcagatgggcaagattaacggccaaattaaccaagccagacaactttctatgggtgtcgagacatacacatggcaaacggcgaaagatgagcgtgtaaggccagaccaccagcataaacagggtaaaacctttagatgggattcaccgccagacggtggacatcccggtcagcctatccgatgtcgttgcacagcattgcctaattatgaggatattttaattgactag

SEQ ID NO: 51623 - DNA, 477 bp, Acinetobacter baumannii
atggcggctctaaaaaaagaggtaaaactctttatagttcgctcacttgccgtatttaatacacccacagaaactgctgagctcgtcaaccaagaatacgggataaaagttactaaacagcagtgtgagaaatacgacccgaccaaacgggcaggcgagaacctgagcgaagaattaagaaaagattttgaaaagactcgcgaaatgtttttgggtaagcctgaggcaatccctattgcaaatttagcggtgcgtttacagcgctacgaaagccaatatcaaaagcacagtagaaaccgtgtagcagctttaagcattcttaagcaagctgctgaggacataggcggcaagtacacgaataagactgaaattacaggcgctggtggtggtccattacaaagcgaaaatattacctatgtgactgctaccgatgagcaggtaaggcaggcgatagatgaactcgagaacgaatattga

SEQ ID NO: 51624 - DNA, 777 bp, Acinetobacter baumannii
atgggcatggaatgggatgttatccttagtttgatcttttttgcgtttactgcgggagcaattgatgctgctgttggtggcggcggactcatccagattcccgggatcatgagtactttcccaaacatgcagacagcaacggtgattggtactaataagctttcttcaatctttggtactgcttcggctgcctatacatttgcaaaaagagttaagctgcaatggaaactattatcagttattgccatttgtgccttaattagttctttcgctggcgcggcttgtttgtcgcttattcctcaatcggtattgcgtcctttcgttttcgtgatgttgattgtgattgcgatttatacgctggttaaaaagaacttcgggcaggttcataccgagcaaaaaattactacgaaaatgctcgttttagctggtattggtagtttggcgattggtttttatgacggtatttttgggccaggtactggtagtttctttatttttttctttatccgttttttacaagtcgattttttacatgcttcggcgttgtcaaaaatcggtaattttatgactaacttagctgcgctgagttttttcattccgactgggcacgctattttacatattggtttaatgatggcagcagctaacgtactaggttctattgttggggtgcgtaccgcgcttaaatacggcagtggttttgtgcgtattatctttttaattttggtgagtatcctgatttgccgtttgggatatcaaatgtttgttacaggctaa

SEQ ID NO: 51625 - DNA, 1035 bp, Acinetobacter baumannii
atgcaaaggatgcagaaaaagatatggtggtgtgtgctcggattttttattttgagcctcatcgcatgtgtgtattggctaagcccagactcggaaaatacttcacctcagccaaatcaggatgaagctaaaagtttggtagctacttcgcaatctactttaaattcaccattaaacgaaaatacttatttgagtaaaagtcagcaagatactcaagttaactgccaattaaaaattgatagttcacagcatttagttgtgaatagccaaacccgtgactgctttgaatattttattacgcagtatggcgagagcaatttacaacaagttaaaactcattttgagaaatttatacaagatcaatatttagagccagcccgctcacagattattgatttgtggacgcgttatttaaaataccgtgagcagcttgcacaaattcaaccgcctcaatctaaacaacaagatcaaaattattttcaaaagatcttcagttcaattcaagatataagaaaacgtttcttctctgcctctgaaattgaagggttattttcaacagaagatatttatcagaactacacattagatcgcatgaagattttagaagattcatctttaagcgaaattgaaaaagctaaaaaacttaaagagcgctttgaacaattaccagaagactggcaagaaaacctacaagaactttcaaagcttgatgatttacacacactgaccaaacaaattaaagctcgcaatggttctgcagaggaacttcggcaaatgcgtacagcacttgttggagccgaggcaactcaacgattagaaacattagatatacagcgtaatgcgtggcaacagcgagtgactggctacttaaatcagcgtgatgaagtcctgcatagcaatatgagtgacagcgctaaaaaacaagctattcaacaactacgccaacaacaatttagctcatcgcaagaacagcttcgtcttagaacttttgaaacagtccatgaccaaggaggtgaactaccctttaactactag

SEQ ID NO: 51626 - DNA, 321 bp, Acinetobacter baumannii
atgcgcacagattggaaagtcggtggtaaaacatattttctagatggagaaggaaatggaatggtttcgaccattgaagaaatgaaaaagcctgaagtactaatttttaaacatttaggaatgattaaagacgggaaagaagacttggaaagtgaagaggtgaaaagctggagtggttcgctagaaaaatattttttaagtcaaaatggggatactacaacggtaaaagtagaattagccaccttacctgagtatatcggtatgttaaaaagtggcttcgttcaaggctttgaagctgtaaaacaaatggctgaaaaataa

SEQ ID NO: 51627 - DNA, 3507 bp, Acinetobacter baumannii
ttggctgacgataaaactgcgccaataggtttaacagttgcaattgatacagcgggtaaattcgttacaggtgtgaccgaagcgaatgctgttgtaacaattaaaaatacagtaggaactgtagtcggtacagctactgctgataccgcaggtaaatactcgattacactagataaagtatatttaaatggtgaaagcttaagcgctactgcatcagatcaatctggtaatgctacagcaccaaaaaccattatcgcaccagataccacggcaccatcaagtttaactgcaagtattggtactgcgggtaaagtagttacaggtgtaactgaagccaatgctgttgtgacagttaagaatgctgcaggaattgtagttggtacagctacggctgatgccacaggtaaatattcagttaccctagataaagcttatctaaatggcgaaagtttaagtataacagcgacagataaagcgggtaatgctaccgcaccaaaaataatagttgcaccagacattacagcaccttcaagtctgactgcaacgattgatgccgcaggtaaagcaattaccggtgtgactgaggccaatgcaacagtaacagttaagaacgtggtaggaaccgtagtgggtacaggtacagccgatgtcacaggtaaatattcagttaccctagataaagcttacttgaatggtgaaagcttaaatgtaacggctgtggataaagcgggtaatgctaccgtaccaaaaacaattattgcaccggataccacagcaccatcaaatctgactgcaacgattgatgccgcaggtgaagcaattacaggtgtaactgaagccaatgctgttgtgacagttaagaatgctgcaggaattgtagttggtacaggtacagctgatgccacaggtaaatattcaattacgctagataaagcttatctaaatggcgaaagcttaaatgctattgcagcagataaagtaggtaatactacaacaccaaaaacaattattgcaccggataccacggcaccttcaagtttaattgcaacgattgatgcttcaggtaaagtggttgcaggtgtaacggaagcagatgcaagagtaacagtagaacaagtaactgctgtttataaagaagtaacggttttagaaacccaatttattctaagtgagtcagtacagacaaattatttatcgaagacatattcttttgaagttacaggtacaaatgcacatgtttctttaaatttgagttcctcgactaattcactttctggtagttatagttcaattctttctggagcgagtttaaatacaagactaactggtaatgtttcccaagctggagaaggcaattacagtattgatttagcacaaggttcggtattaccgcctggaacctatactttgacagtaaattattctagttcaatggtccccgttataaacgtaaatgtaacgcaagaagtgccaacaaccattttagaagtagaccattacgaaacaaaagttgtaggtacagctaatgcagatgaggcaggaaattattctattactctagataaagcttacttaaatggtgaaaatttaatcgcaacagcaacagatcaatcgggtaataaaactgaggcaaaagaagttattgttccagatatcacaccaccgattttacatcaaccaactattcaaggtggatggactgaggggcaagtcgtacaaggtacaacagaagcaaacgtcactgtaactattaaaaacgctacaggtgatgtgatcggttcagctatagctgatgcatcagggtattactccgtaattttgaatactgtttatgagaatggtgagttattaaaagtaatagctacagataataaagggaatgaaaatttgcttcaattaaatgcacctgatactacagcacctatactagctaatttatttagttatgatttgagtacagataaaattatttttaatgcgccaagtgatagttactttgttgaacaaaaaattgatggtgcttgggtccacgtaaatattgaggaaaaattcgattggttaaatgtagaatatagggtaactgctacagatcaagctgggaatagttctcaaccactaactactataattaatactgcatcgggaacttacaagccaacagaccctacatttactcaaattattaaaggatctacaggaaatgattatctatatggtggcaatggagatgacacgttaatttctaatggaggttctgatagtttatacggtggatccgggaacgatacactgatttatggtggtaattccccgaatatatatacaggattaattggtgaagcagggaatgacacctatattgtagataaagcattactcggttcattaagttacgttcatatcttagataatacaaatgaacaaaatacactttatttaaaatcagtttcagctgatgaaattattttaaaacaggctagtgcagatagaattattacatttaatgattcaactgccaccatacattttggtgaggggcaattatcctcaattgtatttgacgatggaacagtttggaataaagcacaaattgaagccaatattatcggtagattattaggtacagatggagatgatcatttacaggcagatgctaattattccgtaatttatggtctagatggtaatgatacgatacaaggtggtgtacagaatgattatctatatggtggcaatggagatgacacgttaatttctaatggaggttctgatagtttatacggtggatctgggaacgatacactgatttatggtggtaattccccgaatgtatatacaggattaattggcgaagcagggaatgacacctatattgtagataaagcattattagggtcgttgagttacgttcatatcttagataatacaaatgaacaaaatacactttatttaaaatcagtttcagctgatgaaattattttaaaacaggctagtgcggatagaattattacatttaatgattcaactgccaccattcattttggtgagggactattatcatctattgtatttgatgatgggacgacttgggataaagcgcaaatagaacaacatattgctaaaacagtagtgggtacgtttgataatgatgtagttgagacagctacagccaaccagacatattcatatactttagatacaggtgcagacactttaattttcaaagttcttgatgacattgataatttaggtggtaatagtaatggagagtggacagattttaatctttcagagaatgataaacttgatttgtcacaattgcttataaataacaatggaaaccttcaagaatttataacggtaaaagatacgcaggctggagtagttatgtctgtagatagagatggctctaatcaatccacttatcattcacaagaattaattctacttactgctaagcactatacgttagaggatttaatggcttcaaatgcatttattcattaa

SEQ ID NO: 51628 - DNA, 5676 bp, Acinetobacter baumannii
gtgactggtcagattgtgattcatgctgaggctgtagatgcgcaaggtaacgtagatgttgctgatgcagatgtaacagtaacactcgatgtcactccacctgatatcactacaacagtattagcaattgaccctgttaccgcagacaatattcttgatgcgacagaagctggtggaacagtaactttaactggtacattgaccaacgttcctgcagatgcaacaaccacaggtgtagtggtgactataaatggtaatgactacacagcaacagtagatgctatagcgggtacttggacagttaatgttgcgggcaatgaccttgctctagatccagacttaactgttgatgctaaagcgactttcacagatctcgctggaaacagtagtactctacaagatacacaaacttatactcttgcaggttctatcactgcctttgacaacactgatcatgcagttcttagtccgaaaccagcgcttgttggtgatgatgtaagtctaggtagtacttcttatttagtacttacatctgtagcaggcttagaccttcaacttggtggtaattctctaggatttactgtcgatgctggccatgaaggtgatgttactttccaatatagtggcttaatcgacgcagctgtactttctgattacaagttagtagttcagaagttcaatacaacaactaaccaatgggaatctatacatggtgatgctaattcatcattaattagcttgcacttgttaggtattggtacaggaaatgttcctggtgcagtccttgatggtttagatgcgggtcaataccgtgccttcttagcctacgacggactgttaggattgggcgtgttaggcactctttctgccactatggatgattatgatttgtctgtagcaggtggatatgaaattggtaatgctgaaggtaacgtgattactgatccagatccaacaacaggtcaagtcgatcaggtaactgcaaatacttatgtttcatcagtgaatggtcatccgattgatgctgatggagagacatttgcaggtacttacggaacaattactttctatcaagatggtagttatgtgtatgtaccaaatgcagatggttctggtgtaggtcaaactgatgtattcacatatacgttaactgactcagtaactggagcaacaggtcaagctaatcttaatatcgtgtttgattcgattcgtgcagcggataaccttgttgaggttgaactcaatccacaatatcaattggtgggtacagagactgattcagcattctatggcgttctattgaatgttggaaatattgttgacctacaactcctcacagtagatacggttgactttactatcggtgctggtcaggaaggggttgcaacatttaacttcaatagcttgattggtgcatctgctttaggtgactacaatgttgtgttgcaaaaatacaatgatgtgacaggacaatgggaagcagtgaatggtacaggtgatcgttcattactgaacttgaccttgcttggtaatacgccaactgcgcaaataggcgggcttacagagggtgaatatagagcattcttatcattcaatggcttggtaggcggagcagtagctgtaacattaaacggcagtgtagatgtctataacccagcggttattactggttacgatgtcgtagcagctcatggcaacctaatctctgatccaaatacgaatggtgatgttgatatcgctacacctaacagtattatcagtgaagtcaatggtgttgcagtaagtgcatctccaactgagattattggtactcacggtactttactcatctatgcaaatggtgattatacctatacgccaaatgctgatagtgctggattaggtcaggttgatcaatttacttataccttgttagacccagcttctaatataacttcacaagctacgttctatgtacatctagatagtaaagttgtggatatgaattgggatgcagctgatccatcacaacctgctactgtaacgattacagcagtggatgacgctgtaaatgctgcaattgctgctgagcctcatctcatcgaagatgacagagcattgggtagtgcaacttatcttgcattgttatcgttggctggcatcaacctacaagctcctttaccattcgtgaatagtactgtggagttcaatgtaggtgctggtgaaactggaaccgcaacctttaaatacagcagtttaattaatgaaggagcactcggtgattaccaacttgtagtacagaaattcaatactgctacaaatcgttgggaatcaattaccggtagcagtgaagcttctttactgaacttaagtgtattgggtataggtgtgaatgcgacaccgggagtggttgttgaagggcttgacgaaggtcaataccgtgcctttatgacatacaacggcctctatggtaagagtatcctaggtacattgtcaggtacgatggatgtttacgatccaaaccaaattgactttactggtttggcatctgaaggcaatgtcattactggtcttggcgtaggtacaaatgctgatgctgtaactggatacacaattgttgattcagttactgtaaacggtgtgactacgaatgttgatccaaatactggaacaattattcagggtcaatacggtacgcttcaaatattcgcgaatggtgattacatctatacgccgaataatacgaatgccaacctcggtctagtcgatcacttcacttatacgttggctgatcctttgggcggcaatataagtgcaagtctagacttcactattggcaacagtacgccagtgattgccgtagacgaccttgctgtagctgttgttaatccagaatatctgcaaattggtaacgatgttgcggtagatagctacctatatgtggcgttattaagcttaactgacaattttgacttccagttgggtggacaaggtgttgactttactttgaccgatagcaccttaaatgatgtgaccttcaattacagtgcattaatagatgcaagtctgcttgctgattatgtactcgtggttcagaaatttgatactgcaaccaatcaatgggtagctgtaaatggcactggagaagcggacttactcagtctggcagcctttggtggaaattcagtgacattggaaggtctagctgctggtcaatatagagcctatatgacttatgctggtagtggtgttggcgttagcttattaggtacattgtcagttcagaaagatgtatttgatgcgacaaatatcacaggttatagcactcaagttgcagaaggtaatgttattcatgatgtcggcttaaatggacacgcagatactgcttctggttttagcacagtaactagcgttgaatttaacggcacagcatttgctgttaatgcgacaggtgtcacaaccattgtcggtgaccacggtacattgtcaatttatgctaatggtaactacagctatcagccaaatggtgaggctgcaagccttggtcaagttgatcaatttacttacaccttgtcagatggtctaaatacatcgcaagcgaccttgtatctccatattgatagcgatgcagtcgatatgacttggaatacaagtgatccatcacaacctgctgtcatcacagttactcctgtagacgcgattgataacgttgtttctgctggtgtagatatcgttcctcaaggcgagcttggtgtagctgtaggttctgcaacttatctagcattggtgggcattacagaggacttaaatgtttccttgttaggaacaccaagtgttgcatttacaattgatgctggacacgaagctgatgtgacattcgcatatgctccagtgctttcattatcattgtttaatgactataaagttgtattacagcaaaaaggtgctgatggtgcttggcataatattgacggcggctcaagtactggcttactcaatattggtttactaggtaacggtggaattggtgttactgttccagatctaggccaaggtgaataccgtgcatttatggtttacaccggtttaggagtaggtatcctaggtacaatgagtgtagtgaaagatgactttgattacacagttgcgcctaccaatacagcggttgttgcagatggtaatgtattgactgatgacgtaactacgttaactactcaagttaccactgtgacatctgaagtagtgggtgctctaccacaaactgtcggaacagatacagttataaacggtgcatacggtacattggtgatttctacaaatggtcactacacctatacaccaaatacaactgatctgagcgcgattggtaaagtggattcattcacttatacaattcgtgatgtattaacaggggcaacagatacagcgacattacatgttcaggttggttcaccagacgtaacgatcgcatgggatgctgctaacccagcaaatgatggcgtagtacaattaactgctaatcctgatcatgtggttacaactacagacttctcaaatgctgctgatctaccagtagatgtggcgagccctgtggtttctgtaaacctcatcggttctaattcagtagtgtctgatcagtttgtagtaggagctggaactgttgctaatattgatctatcagcggtttatacagcacaacctttagcaagtgtactaccgacagtaagttatgtgatccaaagctggaatggtacagcatgggtgaatacaatttactcaggttctcaaactgctctaggaagtgtggcaactattcaagcgggtagtgttgcattccaagacactgttgagcatttagctgcaggtacctaccgcgtacaatatacgctaacaggtgtttcacttggtgcgacttcactagatacaaatgtttctacaacgacagttcatctagatacttatcgttcagattggatcagcggaaatgtgttggcaggagacaacattggtggagtagcggatacaggcatcttgtctcatgaaggagctaaactccaagtttgggataatgcacaaaatgcttatgttgatgcagttggacaaacaatcaataccggtaacggtgtattgattatgcaatcaaatggtgaatatgagtaccgtccaaatgatgtgactacaaccacacaattggcgtctactgacagtattaactataagattgtgtccgtaactggtggagttgaatctcaatcaaccttaacgattgatttaacacatactgattacaatcttctttacacaagtacttctgcgaatgacacattcacaacaggtacgggttcagatactgtgatttatcaattgttgaatggaactgctgctacagctaacaatggtgcaaatacaggtggtaacggtgtagatacttggactgacttccatgttggtaatgttgctacagacaaacaagctgatctgattgatatcagagccttgttagatggagatcaaacagatgctaatattggacaatatctgaatgtcactacaagtggtggtaacactacaattcagattgaccgtgatggattatcaggactcatcccaggtaataacttcactacattgttagtcttacaaggtgttactacaacagagactgaattacttaacaatggtcaaattctctattaa

SEQ ID NO: 51629 - DNA, 1089 bp, Acinetobacter baumannii; identical to SEQ ID NO: 46100

SEQ ID NO: 51630 - DNA, 1578 bp, Acinetobacter baumannii; identical to SEQ ID NO: 46099

SEQ ID NO: 51631 - DNA, 621 bp, Acinetobacter baumannii
atgtctgattgcactaaaacgaatgagaaagatcaaaaaattctggatgcagcaacaaagttttttctgatccatggttttagtgggacaacgacagatatgattcaaaaagaagcgggcgtttcaaaagcgaccatgtatggttgttttaaaaataaagaagcgatgtttgctgcggtcattgaacgccaatgtaccaacatgcaaaaacaaattatgtcggtcgagacaaaagccaaaaatttacgttcagccttaaccgaaattgggaaaacttatctgtgctttatcttatcgcattccggtttggctttttttagagtctgtattgcagaggctgtaaggttcccggaattatccgaaaagttctttgaagtgggaccacaacgtctagcaaatattattgcaggttatcttgaaaagtcggttaaacaaggagaaattgaattaacgtcttcttcggaagtcgcagcaaatatttttttatcactgttaagaagtgatgcccacctaaaatgtttgactcatcctgattatttaatctcagctgatgaaattagtacttgggttgaatacgctgttgatttatttttaaaaaatattaattacaaactagattga

SEQ ID NO: 51632 - DNA, 900 bp, Acinetobacter baumannii
atgagttatctatttttatcgtgtacagagaaaattaatgacaacagtaaaattattgctggcttaaaccccgttccttttggcttgggtcgcttttggggaaatacttattatttaggcattgccaatagtgccggttgggaagatgtacacaaccttggggtgaaatatgatttcaatgatggaaccaatgaagcacaactcgccttttatcctaccgatggtggcacctatagaggtaaaagcaaagactcgagtcgatttagtatcaaccctgtcaatgcagatgactctgtaccgcaaggcaccaataccaaagaaaagaactcaattgttgttcgcggtgctcatacctttaaaaatgtcctaggccaagaaaatttctctactcaacttggcgcctccgcatggtattccaccattgaaaataagcgttcagggcaagatggcgatcgccaagtttattcggtttttagcaataccaattacaaccaatggaatttacagcttttggctggttatcaagacattgataatgccgacacccaatataaagatcatctgactttgggcggtttcgattattcatttaactcagcaaccaaaggtcagatttattcagcagaactgagctatttatttcctcagcagtttggcccaattacctctgttcgtccgtacttgaactatagttcttatcgaaaagagcaagatggctttaaaaactccacccgttttattcccggcattgcgtttaactatcaaaaattgacagtacaagcggagttgctgatgggtaaacacgatccatatctaggagacagtgaaggccttgcggctggcggaagcaatgataaatggaataaaaaagcgtttgtaatttttgcttattacttctaa

SEQ ID NO: 51633 - DNA, 597 bp, Acinetobacter baumannii
atgtctactttcttagataaaattaaaaaccgtcgtactatttatgcaattggtaaaaatgttgcattagatcgcacaaaaattgaagaaactattcgtgaagcggttaaacatagcccatcagcgttcaactctcaatcttcacgtgttgttactctttatggtgaatcacatgctaaattttggaatttagttcgtgaagcattacgtaaaattgttcctgcagatgcctttgccggtacaaatgcaaagattgatagcttcgttgctggtgttggtacagtactattttatgaagatcaagctgttgttaaaagcttgcaagagcaatttgaattatatgcagataacttcccagtttggtctgaacattcaagtgcaattgctcagtttgcgacttggactgcgctttcagaacttggtttaggcgcatcgttacagcattataacccgattgttgatgctgatgctgctgaagcatttgatgttccagcaacttggaaattacgtgctcaacttgtatttggttctgttgaagcaccagctggtgaaaaagcatttattagcgatgaagatcgttttaaaacattcaactaa

SEQ ID NO: 51634 - DNA, 918 bp, Acinetobacter baumannii
atgagttcaggcgcaaaaattcgattatatgcttgtgaagaagcagttttaggaacaactccagcaaacccgatctggtacacagttcgccgtgtaagtgatggtttatctgaaaatgtttctactgaagaaagcagtgaagtggttgattcacgttttcgacaaggtggggtagttactgaagcagaagtagcaggtcagttagagtttgaattatcacttggaacatttgatctattcttaagtgctttagccttcaataattgggcgggtaacgctttaagttttggtggtacggtacgtaagtcattaacgctggttaaagttttcgaagatgttggccaagtctttatttatcgtggagtacaggttaattctggtgaaattactatccagaccactggaaaaattactggtaactttggtcttgtaggtagctcgtttactcgtcagcaaactaaccctgtagtgaatccggtggcagcctcaactcgtccgctggtgagtatgccgaacgttgaaaacttgctagttaatggtcagtctattcaaggtaaagcgtgtctacagtctcttaccatttctatcaataacaaccttgaagcaatccgttgtatcggttcgggtaagtacacaccagagttctacattgaaaaaatgatggatatcgaagcaaatgcttcattcatgttttcttcaactgcggcaggttggattgatgccattaaaacccgagatgtgtttacactgaccttcgacatcagagacagcaaaggaagtaaatattcgttcaacttcccgcaattggaagtcatggaagccaatcacccggatggcggtggtgacgacatcattactgtagacatcaactttgcccaagttcgtacagcgccaacaattgtacgtgctcttgtgtaa

SEQ ID NO: 51635 - DNA, 354 bp, Acinetobacter baumannii
atgagcaattttgtatttaagcgtggtgacactttcaacttaaatcttcagctagttgatttggatgaagccctgcaatatccaccagatgatgtacgccgtgcaattgatctaactggttacacctttacttcacaggttaaaggtttagctgatggagcagctgtggctaccttgacttgtgcagcattaagccagagcacacaaaagggttggcttaatgtgaaatctggagcaagcacagcagcatggccacttggtttatgtcagatggatattaaagctgtggtgagtggcactacacagcacactgaaactttgactttccaagtgattgacggggtaacagcataa

SEQ ID NO: 51636 - DNA, 351 bp, Acinetobacter baumannii; identical to SEQ ID NO: 49347

SEQ ID NO: 51637 - DNA, 966 bp, Acinetobacter baumannii; identical to SEQ ID NO: 51057

SEQ ID NO: 51638 - DNA, 2157 bp, Acinetobacter baumannii; identical to SEQ ID NO: 46110

SEQ ID NO: 51639 - DNA, 390 bp, Acinetobacter baumannii
atgagctttattactgtagatgacgcaaattcaattttgggcagcgattttgcaccagacagtgataaagctcgtctggtaaagctggctaatgtatggatgaaaaacagaattggttttataccagatcctattgatccacttcttaaggacgcggcttgtgaaattatcaaaggaattctggccaaagtaatttataacggcaaagaccagcagttgaagcgtaagaaagttaaagctgattctgttgagtcagaaaaggaataccaagacggatctgaagcaatttctagctttgaacagatagcaattgattttattgattcacttgatttgaaagatccaaatgcaagttttaatggctttggcatacctctttacagggcatga

SEQ ID NO: 51640 - DNA, 408 bp, Acinetobacter baumannii
atggttaatcctgattatgttcctgaatggtatatctcgccttttcaacatgtgcagtacacgcttgctcgaaatcaactacacatggatttgttatttgaagatatggataaggccgatcaatttttggatatgggagcggatgcgcaagttagtactttttctgatggcgcatatgcaatcgtccaaattggtgatacggcggataaagaccgaattcaagtttatggattgcttttacatgaagctgttcatgtctggcaaaagattaaaaagctcatgggtgaacgagaaccgagctctgagtttgaagcttattcaattcaggcgatcgctcaggatctttttaagatgtatgaggaaagcgaggttaaaagtcatggggtggaaggggaaaaagccgactag

SEQ ID NO: 51641 - DNA, 216 bp, Acinetobacter baumannii
atgcacagctcagcaaaaatggtggctgaatttgctgagcagcaatctctagacaatttaattctgacacactttagccctagacatcaggataaaactgggcagcaagctattaccgaagaagttcgccagttttataaaggtcatttttatttagcgaatgattttgatgagtttactttaagtgaaacaggacaacttttaaaaatcgagtaa

SEQ ID NO: 51642 - DNA, 1605 bp, Acinetobacter baumannii
atgctgtttaacttcaggaatatcattccggatagttacaagcatgacctgacctttggcgtgatggatgactacgacggactgatctatgaatacacggatccgaccgacgatagtcgtatcaatatctatctaccggataaaggggccaagaaccccaaagaggtgaaatctgtaggtgtgcgtaacaagtggcaagctcatttcaatgcgtaccggctttggaacaagcttcgcttccagcgtaaatccattacctttgatgcggcgcctgagtctgaattgcttgtgctacgtgaccgtattgccgtagcagattatcgcaatggtattcatcaaagcggggaagtggtacagcaagagggtttaatcctcaccttaagccatgatgtagatttcattgcaggcaagagttatgtgatttatttgcaaatgggggatggtaccgtggacctgattcccgttacgccgggttcagccaagaacaaagtagttttaggccgtttaccgaacggggccttaaagcttagtcctgatgattttgtaaatactatctacacggtggttaatgacgataccaaaggctcattgccttatctggtagcgaaaagagaaccggctgaccagttctctaataccattactgcaattaattacgatgagcgctattacctcaacgataaagactttattgatgtaccggttgatgattcaccgatctacattcgatatgaccagcttgatattaatttggcgcgtttgtatcagatgcaaagaggggatttgccaacgactggagaaatcagttttgtagttgaagcaggtgcactagtttcaagttcaagttcttatcgaccggaaaccagatttgtctataaattcgactataactctagtcctgcaaaacgagagtatatcgttccagctgcatcagaattacctgctattgatactggtgagttcccacctgatctggtggtaaatttgactattaaaggtgctgttgttggacgtggtggtgatggaggattgccacatttggcatttggtgcatggtctaccgatccggattacaactttaccaaaacccgtcgtgatggttttcagggagcacccggtctattaaaccggcacagtaaactaaacctgattattgatggtggaactctggctcgaggcggctcaggtggtggagcaacaccaagcggtatttatacaggattatcgtatggagttcagggtattcccggtggagctggagcaccttttggtcgggttatgaccggacaacctattactaacgattcacaagactggcgttggtacttaaatggtgactttatggttgtcaaagtaaccgatgccgaagcttcggtacccggtaaaggttaccgaacccaaaatgaccgttatgggtctccattatcaggtgatggtggaaattggggcgaacgtggcaccaaatccaccaatgatggaacgtggaactggcaataccatggcacaactgaaggtcagccggggccgggtggacctgcaattgttggggtggcaccgctaacaactcaattgattaacggagggaaaatcttacaaaccctttaa

SEQ ID NO: 51643 - DNA, 1113 bp, Acinetobacter baumannii; identical to SEQ ID NO: 46111

SEQ ID NO: 51644 - DNA, 1275 bp, Acinetobacter baumannii
atgtctgaagcaactggcaaaaaagccgtattacattttgatggcaaagaaattgaattaccaatttacagtggcacattaggtcccgatgtaatcgacgttaaagatgtattggcctcaggtcactttacttttgatcctggttttatggcgacagcttcatgcgagtctaaaatcacatttatcgatggtgacaaaggtattttattacaccgcggttacccgattgaccagttagcgactcaagcagactaccttgaaacttgttatttattattaaatggcgagttaccaactgctgaacaaaaagttgagttcgatgcgaaagttcgtgctcatactatggttcatgatcaagttagccgtttcttcaatggtttccgtcgtgatgctcaccctatggcaatcatggttggtgtagtaggcgcattatctgctttctatcacaacaaccttgacattgaagacatcaaccaccgcgaaattactgcgattcgtttgattgctaaaattccaacgcttgctgcttggagctacaaatatactgtaggtcagccattcatctatccacgtaatgacttaaattacgcggaaaacttcttacacatgatgtttgcaactcctgcagaccgtgactacaaagtaaaccctgttcttgctcgtgcaatggatcgtatctttacgcttcatgctgaccacgaacaaaacgcgtctacttctacagttcgacttgctggttctactggtgcgaacccatatgcgtgtatctctgctggtatctctgctctttggggtcctgcacacggtggcgcgaacgaagcagttcttaaaatgcttgatgaaatcggtagcgttgaaaatgttgctgagttcatggaaaaagttaaacgcaaagaagttaaacttatgggcttcggtcaccgcgtttacaaaaacttcgatccacgtgctaaagtgatgaagcaaacttgtgacgaagttcttgaagcattaggtatcaatgatcctcaattagcgcttgctatggaacttgaacgtattgcattgaacgacccgtactttgttgaacgtaaactttaccctaacgtagacttctactctggtatcatccttaaagcgattggtatcccaacagaaatgtttactgttatcttcgctcttgcacgtacagttggctggatcagtcactggttagaaatgcacagcggtccttacaaaattggtcgtcctcgtcagctttacactggtgaagtgcaacgtgacatcaagcgttaa

SEQ ID NO: 51645 - DNA, 816 bp, Acinetobacter baumannii; identical to SEQ ID NO: 49371

SEQ ID NO: 51646 - DNA, 768 bp, Acinetobacter baumannii; identical to SEQ ID NO: 51071

SEQ ID NO: 51647 - DNA, 753 bp, Acinetobacter baumannii; identical to SEQ ID NO: 48565

SEQ ID NO: 51648 - DNA, 834 bp, Acinetobacter baumannii; identical to SEQ ID NO: 46183

SEQ ID NO: 51649 - DNA, 1245 bp, Acinetobacter baumannii; identical to SEQ ID NO: 46209

SEQ ID NO: 51650 - DNA, 162 bp, Acinetobacter baumannii
atgctaaaaattcttcattatcgtgaagcagctcagctatgtgatcatgatcggggttataaagaggcccacctatcgttaagtagttggccacaacccatttctttaggtctggtgccggtattaaacggattgcttcctcctcttcagcttggtcaataa

SEQ ID NO: 51651 - DNA, 759 bp, Acinetobacter baumannii; identical to SEQ ID NO: 50222

SEQ ID NO: 51652 - DNA, 1443 bp, Acinetobacter baumannii; identical to SEQ ID NO: 51382

SEQ ID NO: 51653 - DNA, 1167 bp, Acinetobacter baumannii; identical to SEQ ID NO: 50958

SEQ ID NO: 51654 - DNA, 369 bp, Acinetobacter baumannii; identical to SEQ ID NO: 51077

SEQ ID NO: 51655 - DNA, 264 bp, Acinetobacter baumannii
gtggtttttagtttagttggtattttattagcaacggcgctacctaacttattaaattatcatttggatttttccattattgctatttttgttgccatgattgttcctatgtgtaaggggaagcctgtaatggcaggcattttaatgacttgtgtcagtggttttgtacttaagtattttcatatagaaggagccattctaatttctggtttattggggatgtttattgcggtaatagtcgaaaataaaataggagaaaaataa

SEQ ID NO: 51656 - DNA, 162 bp, Acinetobacter baumannii
atgtctgctgaaactgtgcctgtacctggcaatgaagtgttgcctgcagggtcagttgctgttgcagtcactgtatcgccatccaccaggttacccgggtttggtactgaccagctgccatctgtgcctgctaccactgttgcagttgtgccatcaggataa

SEQ ID NO: 51657 - DNA, 444 bp, Acinetobacter baumannii; identical to SEQ ID NO: 49443

SEQ ID NO: 51658 - DNA, 399 bp, Acinetobacter baumannii
atggcaatgactttagagcaaacaaggcaagctattattgatcgcatgcaaagctttagaggtattactcaagacagaatccagtatccaaatttaccaggctttacggtgcctaaggaaggtttgtggtgtcgcttaacgattgcgggcggtccaagttttatttcaggcattgctgataatccttgtacacgccgtaccggtaatattatggtccaatgctttgctcgtcccaattcaggaataatggaaatcacaaaactgagtgatgctttgcttgcccattttgaatattactcaatcgatcatctagaatgtttgcaaggacaatcaatttttgtcggccaagatgctgatttcattcagtataatgtgaccattgggtataaggtgaattga

SEQ ID NO: 51659 - DNA, 237 bp, Acinetobacter baumannii
gtgggattatatacaattagatatggttatcgtaacaacagtttttttattgcttcaaacacggctgggcagtttattgtgattgatgcattaggagcagatttccaaattggtcatcaaatttcttatgaagggagcaaaataataaacgaaacattaaatgatgaaacggatgcaaaagttcatcttgagagcaacgaaaaagaagcttatgagtatttacggacaatgaaataa

SEQ ID NO: 51660 - DNA, 162 bp, Acinetobacter baumannii; identical to SEQ ID NO: 46251

SEQ ID NO: 51661 - DNA, 1440 bp, Acinetobacter baumannii
atgtcaaaaacaccacagattaaattaccagaacaactttggaataatcaaagcattgatttaacacgtcatagctatcaaggaaaattactgagtaaaagtgagggttttaaattaggtaagactcaacggaaaaaagtaccgcttgaacaactttcaaaactttctgaacggccagaaggaacaactgctttaacgatctatgattggagtaaccaaggacgtttagaaaaactcaaaccgattcgtgcaaaacggatgagcgtttcaccatttacattttatcgtggcatgccttctttgatgctatttgaccaagtgtgggagccactaaattcaggtttatttcaacagatttgtggtgattgtcatttaagtaactttggtggttttgcaagtccagaacgcaacctgttatttggaattaatgattttgatgaaactttagttgccccgtttgagtgggatggaaagcgtttagcaaccagttttgtgattgcagcacgcgatattaatcttgcagataaagtgggtttaaaggcagttaaaataatgctgaatagttatcgtcagcacttattagaaaatgccaaactttcgcccctacaagtttggtatgaaaaaattgatgccgttaccttattagaaaatgctgaatgccgaaaactaagaaagaaaagtgaaaaggatcttgattctgcacagaaaaaaacggtgtactctgtattgccgaagcttacacagcaagaccaagatacaggcttgcgtcattttgtagatgatgcgccgttattatggcacccaaatgcagatgaaccatttagtaaagatgttgacgtattctttaaacaataccgtgactctttgaaatatgatcgccaagtcctttttgatcgttatcaatgtacagatgtggcttttaaagtggttggtattggaagtgttggtacacgatcagccatagcattatttcaggatgcagatcgggagccgttaattttacaaatgaaagaagcgaatccatcaattcttagtccgttatttgtagaaaaagtaaatcacgaaggtgaacgtgtaatacatggacagcaactgatgcaagccgcaagtgatatatttcttgggttttcctcaatatcaactcaacattttcatgtacgtcagttacgtgatatgaaaatctcttttaatcttaaggatatggatgaagagtatttctataagtatgctgaagattgtggcttggctttagcgcatgcccatgcaaaatcgggaaatgcagatgtacttataggatatcttggagagggcgatacgattgtagacgtattacaaacctatgcagaagaatatgcagagcgtaatctaaacgactatcagcaatttatgaatgaaattgctgatagtaagattcagctcgccggagatgatgcgctttaa

SEQ ID NO: 51662 - DNA, 408 bp, Acinetobacter baumannii
atgaatatatcgaacctatgccgaataaccttgctctcagtgatgtctatttatttgaacggttgcgcaactcaaccacgccaatctgtcgacttacaagaatatttaaaaggctttctgggcaaatcatcgaccaccattcaacaagaactaaacttacgcagtcttggctttcaaattgcgcatgttccacaaaaaacatcaaatcaactcatctacacgattttacggccattaagtattcccattcctatggtgagtaatgtagagatgggtggtaatccagttcctatccaatccgggacattagggagcaactcttacgatgttaattttaattgcaaagttatttttcagcttaaaaatgacattgctgaatctattcaatacgaaggtaaagcttgctaa

SEQ ID NO: 51663 - DNA, 1293 bp, Acinetobacter baumannii
atgttatatgtgattccgtttatcatattactcgtggtcgccgttgttttaaaaaagcgcgagaatggccaaaaacaagagaccacctccccaaaaagtataagtaaaaaatcgggcaaaaaagcaggtgccaaatcgagtaaaagctcgcgtgaaaaaagtaaagccaatgtagttgaagaaatcactcctgctcttccacaaagtagtcctgttcctgaggctgttcgtcaaaatattcaacagctcattcaagaaaaacagttttcagcggctgaagctcaagtcaatcaggcactaaaaaaagacaatacccagcacgaattgtatttattacttcttgaagttcatattgctcaaaaagatgaattcgcgattcaacaacttattagccacattcgcagtttggcattaaatgaaatcgcgattaaagcagaagcaagacaaaaagaatatgagtctgcaagacaacctgatgctattgattttcctcaagctcaatcgtatgaagaaccgaaaaatacacctgacacaactgctcagtttgatcagttaacaacaagttcttctgaaacttcttttgatgacttgcagaaagactatacacctgtaaaacaagaaccagcggttgaagttgaacctttagaatttaacttttcattcgaaaaaactgcagctaccgaaaatatcagtcaacccatacaggaaccagaacaatcaacatctcagcaaataccagaagtttcgtcatctcaagaaacaaatgaactagctgatttagagttttcttttgacttaacacctctgcatgaaaatgaaggaaaaacttcagcagtagaagtaaaagtaaatcaagaaaatagccttaatgcattagattttaaccttgacttaaatccttcaatttcagaaaagaaatctgatgaacaagttccatcattagatgaacttacactcgtagaacaagcaccattagaagcgacttctatcgcacctcttgagttttcgctagatgaacctgcactagttacagcaccagaaattgaaactcaaaaccatctagatgtagtaactaaagaggctactcaaactcaaatagaggatccactactagacgcatttccagaattaaaacaagtaaatgaaagtgagctcgacttaaaactggctgagcaatatatcaagtttggtgagaaccaagcagcgcgcaatttactacaggctaatgagcaaaaattcaacacagaacaacaacaacatgcgaaaaacctacttaatcgcatagcttcttag

SEQ ID NO: 51664 - DNA, 1362 bp, Acinetobacter baumannii
atgactgcatataacaaattaaaaattgccattttcaccattatgtcttcgccttgtgtttatgcgattacattagatcctattcaaattcaatctgcacctggggaattactttatgcagaaatgaattttcagcaagcggatccaagtaccccattacaagtcagtttagccactcaagaagatcttaatagtttgggagtcactcaccaacctcctggtaatctgaacttttatacacgccaaaatggccaaggttctggcgttattgtgattacctcatctcgtcctattattgatcctgaactgaatattgtcgtaaaagtcagtgaaggtaatgcaactcgtcttcaacatattaaaaccgttttaaagccatcgcctataaaaaaggtcgctgctaacgaaagtccactttcaccgcaatttatcgtaaatgaaaaagacatcgcgttaaacttaccggaaagtactcgatacacacctgctgagacagcaacacctgtagccgaaactacagctaatgagcgtaatctaaacattagcactggaactgctcctgctttgaataactcggctccagcaactccttttaccgaaaaaccttcgactcaagcgccacagcgaactatagcagcaatgagtactgagccatctgctatagaaaaacagccatctacgcctcttaaaccaagcaatgacaatcaaacaactacagtcaaaaaagcagcccaacctaagcctgctcaacacaaaaatgtattaagtaaaaacactcaaaaaaaacaaaaaataagcacctataaaggtccagcacctaccggtaaatatgttgtacaacggaatgagtctttatggactattgccaatcgtattgcagcacagaccaaacaacctgtgtctaaagtcatgcgagatatccaagctcaaaaccgacatgcttttatccaaggcgatgtaaaccgtttacgtcagggaatttcactaaatttaacagcagcaaatacagccaaagcgcctcatacaaaacctaaatcaactgaagctaacttagcaaaacctacttctggccgagctaaatatcgtttgcaacaagctgaaatgagcattgtggcagagaacagcccaaattctaatcatggaagtgcaaaaaagagcacacaacaaggtcaaaacaatactgagttagcagtaaaagttatgacaactcgagaaaaaaccgttacattacaaaggaatgtaaccaaactaaatcaaactttaagtttaaaagaccaacgtattcaacttctgaatgcgcgtttggcagagttacagcagcaattaaaagcacagcaacaaactcacaagcaaaaacactaa

SEQ ID NO: 51665 - DNA, 177 bp, Acinetobacter baumannii
atgttagcaaccacaacttttgaaaatattgataataaaacaaaagtcacaattacttggcaaccgtggaactctgacgatattggtaactcaacttttgattctgcacgcgatggaatgacgcaaggatttaatggaacattctccaatttagaagcttatttaaaaaccctttaa

SEQ ID NO: 51666 - DNA, 312 bp, Acinetobacter baumannii
atgatagaaaaaattacaccatttagtatttctaaagtatttaatgcacctcgtgatcttgtattcaaggtatatactgatattaatcacttacaaaattggatgagtccaaaaaattttaaaatcattcatacctcaatggattttagagttggtggaacttatcactatggattagaaggacccgatggaacacaaatgtggggtaagcaagtgtttcgtgagattgtacctaatgagcgattaacgtttattcaatctttttcagacaaagacggtaacagcacacgacaccctatgtcaccgacatga

SEQ ID NO: 51667 - DNA, 1986 bp, Acinetobacter baumannii
atgacaactgcttctaaccacccaacacgtcgcgatattttaaaatggtttacggggattccttttcttccattaggtgcgatggctacggcagcaacgttagcaggctgtaatgacagcaataatgattcagatgttgttactccaccaccaacagtaaactttaaaaacgcaacctttacatcaatggcagcgccatctttagctaacccagcggcgatggcaaccacaactgttgcatcaagcctttcaattaattgggaagatggctcaaaaactgactacacattagcgtataagcctttctttaccacaggtgatttggttgcagacggtaaaggtggaaaaattctggcgggtggttatgttgatattaataatcaaccaattattgataagtcaaaaccaggtcaagaacgtcaattcttctctgactgtccggacggaagctctttaattagctttaaacaagcaacaggccgtgactttaccgatgcagacaaacaagctttaggtgttactggcaaccctgtatttcacgtagttcaatttgaatatacgactcgtgaccaaagcttagcgtctatgtatggtttactaccatctccaattgcaattttaactttagaccaagaccctaaaactggtcatttaactcttgttaaataccacaatgtcgatacctctaaagtaaacggtttatggatcacgtgtggtgcaagtttatctccatggggaactcacctgtcgagtgaagaatatgaaccagatgcaaacaatgttgctggaagctatttaccagtatttagcaaaaacttatttggcgacagtacaaaaggtaatccttaccactacggtcacttaccagaagttactgtaaatacggatggtacaggttcaatcaaaaaacattactgtttaggtcgtatctctcacgaacttattcaagttatgccagataaccgcactgcattgatgggtgatgatgcaacaaatggcggtttattcatgtttgttgcagataaagaaaaagacttatctgcgggtacgctctatgttgctaaatggaagcaaacctcaggtgtaggtgctggtgccggtgatatttcgtggattaaccttggtcatgcaacaagtgctgaagtaaagagctgggctgatcaatataagattaccgacctgatggatgtaaaaacgtctgatccaaaagatgcaagctacaccaaaatccgttatagcggtaaagacaactgggtaaaacttgtacctggtaaagaacgtgaagcggctttcttagaaacgcatcgttatgcagccttggttggtgcaagtatgggctttactaagatggaaggcacaactgtaaatatcaaagacaaaattgcttactctgcgatgtcttatgtacagtcttctatggttgataaaactactgatattcaagtacaaggtccaaaagctggtgcaatttacgcacatacgttaaaaggcagccaagttgataacaaaggtcagcttattaacagtgaatgggtatcgactcatatggaaccacctgcagctttagtgggtgaagacctaacaactgctgatgctttaggtaatactgcaaatgcagataaaattgccaacccagataacattaagttctctgaaaatttacgtaccctcttcattggtgaagatagtggtatgcacgtaaataacttcttatgggcatataatgttgataccaaacaattaagccgtatcttatcaacacctgctggtgcagaatctacaggtttgcacgcagttgactctgtaaatggttggacttatatcatgagtaacttccagcaccctggtgactgggaatctccattacacgataaagtaaaagcaactcttgatcctcttgttcgtgcaaactacaaagatcgttttgcagcagcagttggttatattacagctgaccctatagcaccatctgttgtgaagaaataa

SEQ ID NO: 51668 - DNA, 354 bp, Acinetobacter baumannii
atgaatttatcttatttaaaaacaagcttatatacagtaatcaccacagcaattttagtttgctcaactcaaagtcaagccgagcaatattataaatgggtagataaaaacggctcgacacattacaccacgacgccaccacctaagggtgcgaaacatttgaacaaagtttcaacttacggtacccagccttctgtaaagaatccgacatcaaacccagaacaaccagctcagactaaaacagataaagccgtaccagaagcagctaacgccatgcaggaaaaaactgcacctgcagtagcagctccatctgctgcacccgcacctgctccatcagcttcagcaccacgataa

SEQ ID NO: 51669 - DNA, 564 bp, Acinetobacter baumannii
atgccatattcagatctctcatttcgcgcgttaagtgtgcttcatacatctcgttatctttttaatgaccatggttttcacaacgttggtgtagaccgcattgtagaagaagcggaagtgaccaaaaccacgttttataaatattttcagtctaaagagcggcttattgaaatgagtttaaactttcaaaaagatgctttaaaagaaaaagtcttctcaattatttacacacaaaaagatttagtggtgcgtgaaaagttaaaggaaatattctttttacatgtcaatctggaagggcattattatttgccatttagagctatttttgaaattgaaaaaatttaccctacagcctatcaagtggttatacagtaccgtcaatggttaattgatgaagtttataaattgcttttaacagcgaagaacgatgctactaaaaaagatgctcatatgtttttatttgtaattgatggtgccattattcaactgctagatgaaacaaaggctgataatagagaactgttattgcaatatattttaaaaagtatttttcttagtgattaa

SEQ ID NO: 51670 - DNA, 588 bp, Acinetobacter baumannii
atgacggggcaaccaatgtcaaaaagagaaacgattataacaacagcaatgaccctttttaatcagaaaagttatacctcaattggggtagacaaaattattgctgagtccaatgttgcaaaaatgactttctataagtacttctcttctaaagaagttttaattgaagaatgccttcagcgaagaattttggaagtgcaggcttctttactagaaaaggtaaaccgcgcacatgatccgttaaataaacttaaaaatgtttttaactggtatatagactggattaacactgaagatttttatggttgtttatttaaaaaagcgactatagaagttttacaaatgtatccatccattaaaagcctagtgaaccaatatagacaatggatttacgacttagtagtctctatgtttttagagctagaaattgaagatccaacagttctaagcagcctttttctaaatattattgatggacttattattgatggcaccattaataaaccagaaattaatgctgaaagaacatggtcttatataaataaactcattgagcttgaaacaacgcagagctgtgcggctgcgtaa

SEQ ID NO: 51671 - DNA, 2340 bp, Acinetobacter baumannii
atggaccatcatcatgaaaagaaaactataaataacgtactaaaggatcctgtctgcggcatggctgtaacagaagaatctaaatttcatgaacaagttggcaataagactttttacttttgtagtgaaaaatgtcagataaaatttaagcatgatcctactttttacattgctaaagaagatagatctgtttccgaaaatgtctccctaaataagatggatacacactcagatagtgtaaatacctcatcaatttatacttgcccaatgcatccggagatccgacaaaatcatcctggtaactgtccgatttgcggtatgtcactagaaccattacttcccaatctagatgaagccgatgataatcctgaacttaaagatttcaaaagaagattttggtacaccttaccgttaaccctcattatcatatttttggcgatgtttggtcatcagttgaactggtttgagatgaaggtacaaagctggattgaacttgttcttactttacctatcgtcttttgggcaggttggccattttttgttagatgttggcattcaattttaaatcgtagtccgaatatgtggactttaattggaattgggactggagctgcatttatttatagtgtcgttggaaccctagccccacaagttttcccagcgtctttcatctctatggggcgtgttgctgtatattttgaggcaacagccgcaattatttcactgaccttattaggtcaagttcttgagttaaaggcacgttcgcaaacttcgtcagcaataaaatctttacttgggttggcaccgaaaaccgcaagaaaaattaatgaagatggcacagaggaagatatcccactttcccatgtacatgttggagatttactgagagtacgaccaggtgagaaggtccccgttgatggaataattacagaaggttcaagttctattgatgaatcaatgttaacgggagagccagttccagtaacaaaacgtataggtgaccaagtaatcggtgcgacaatgaatatgaacggttcattagtgatacgttcggaaaaggtcggttcttcaacagtactttcacagatagttcaaatggtagcgcaagctcagcgttctaaagcccctatgcaaagaatggcagatcaggtagctggctggtttgtactggtggtgatcggtatatctatccttaccttttttgggtggggaatatttggaccagaaccgagttgggtatacggactaatcaatgctgtcgcagttttaattattgcttgtccgtgtgctttaggattagccacaccaatgtcaatcatggtggcaacgggtcgtggttcatccaatggcgtactcttccgtgatgctgcagcaatagaaaatttacgtaagattgatacattaattattgataaaacagggaccttaacagaaggtcgcccctcatttgataaggtcattgctttatctggatatgaagaaaatgaagttctcagattagctgccagcttggatcaaggtagtgaacatccattagcggatgcaattgtacaggctgcccgtgaaagaaatcttgtactaacaacaccaacatcttttgagtcaggttctggaattggtgttaagggtgagttagatggacaacaattatcattaggcaatacagctttaatggaacaactcggcatatcagttgatacatatatccctcaagctgagcaattaagagcagaaggcgcaagtgttatgcatttggctgttgatgggacgctcgtaggactattggctgtttcagatccaatcaaagtcagtacacctgaagctgtgcatgctctgaagaattctggattaagaattataatggccacaggagatggtttaactactgcaaaatcagttggagctaaattaggtattgatgaagtttacggagaagttaaaccagcagataaactggaactggttaataaattacaaaaagaaggaagaatggttgcaatggcaggtgacggtatcaatgatgccccagctttagctcaagcggatattggtattgcaatggggactggaacagatgtggctatgaatagtgctcaagtcactttagtcaaaggtgatttacgaggtatagagatcgctcgctccctgtcagaggccactattaaaaatatgaagcaaaacctgatgtttgcattcctttataatgcattaggcatccctttagccgcgggtattttatatccatttactggttggctactttctcctatgatcgcagctttagcaatgagcctaagttcagcatcggttattggtaatgctttaaggctacgtagttaa

SEQ ID NO: 51672 - DNA, 654 bp, Acinetobacter baumannii
atggatttactaaatacggttaaaagtcgctacaccacaaaagcgtatgatcctgagaaaaaaattcctcaagaaaaattcaataaattattagaaattttacgcttcacaccttcttcagtgaatattcaaccttggcatttcttggtggctgacaatcttgctgctaaagaacgcattgctaaagccttaacagggcgatatgcctataatgctcctaaagttcttgagtcatcacatacgcttgtattttgtacaagaacagatatttcacccgaatatttaaatcaattacttgagcaagatgatttaagcggtcgatttaaagatgaaaaagcaaaacttggtcaaaaagatacacgtcatggctacgttgagttttatcgcaatgaacaaaaaaatttatttggctggatggaaaaccaaacttttatcgctttaggacaactactttttgcagctggtcttgaaggcatagatgcaaccccaatgggtggcttcgacgaagatgttttaaatgaagaatttggcttaaaagaaaaaggcttacgtagctctgtcattgtctcacttggctatagaagtgaaaatgatttcaatgcgaagttgccaaaatctcgtctgccagatgaagttatttttacacatttataa

SEQ ID NO: 51673 - DNA, 231 bp, Acinetobacter baumannii
atgtttgatttaatgcccaaagatgcaaagagtaagctgcgagaaattagagttgttaaagcctttattattcttatatttgtattgagtcttcttattttatatattgattatcacaatcatgcatatataagttggaaatttatatttattgctagtatgtgtgtgatttacgattctgatttaaataaaaaaattaaagaattaaaagttcaaataaaaagtgactaa

SEQ ID NO: 51674 - DNA, 2607 bp, Acinetobacter baumannii
atgaatattgcggcgcagcctccagttcaggcagatcaaacagtttatttaaaagattatcaaaaacctgcgttcttggttgaatcaattaatcttgatattcaagtctatgacgataaaacaattgttgattcaacattggtcatgaagcgtcaaactgccggagacttggtgctattgggccgtgatcttgagttgcaatctattcagctcaatggccaagatcttactcctgcacaatattcactcgatagtgaacaactggtgatcactgatgcaccagatgaagtcattttacaaactcaagttattattcaccctgaaaccaatactcagcttgaaggtttatataaagctggtgacttatttgtaacgcaaaatgagcctgaaggtttccgcaaaattaccttctatccagaccgtccagacgtactttcagtttttacgacacgtgtagaagcagacaaaaaatatccagtattacttgctaacggtaacttgcttgaaacaggtgaagttggtgaaaaccgccactttgcgatctggcaagacccgactaaaaagccaagctatttgtttgcttgtgtgattggtgatttagctgttcttaaagatcgttataccacttcagaagggcgtgatgtcgctttagaaatctatgcgattgagaaagatattccaaaatgccatatcgcgatggaagcattaaagcattctatgcgttgggatgaagaacactacggtcgtgcttatgatctcgacaactatatgattgtggcggtgagccagttcaacatgggtgcaatggaaaataaaggtttaaatatctttaatacctcatgtgtacttgccgatgaagaatatacaactgacgcagcgattatgcgtgtacagtctgtgattgcccatgaatatttccataactggacagggaaccgtattacttgccgtgattggttccagttgtgcttaaaagagggactaaccgtattccgtgatcaatctttctcggaagatctgcaatctgctgcggttcaacgtattgacgatgtcgctgttcttaaatcgcatcaattcccagaagatgcaggtccattgtcgcaccctccacgcccagaccactttgtcgaaattaataacttctatacagcgactgtttatgaaaaaggtgcggaaattaaccgcatgatgtcgacattactgggtaaagaaaaattccgtcagggaacggatgaatatttccgccgtcatgatggacaagccgtaactgtagaagactgggttgcagcattgtcagcaggttcaggtgtcgatttatctgcattcttaacttggtataaccaaccaggtacaccaaagcttgaagcgaaaggtgaatatgatgcagcagcacaaacttaccgtttaagttttaaacaaagcctaaaagcacatcctaaatatccaaacttaaaagctgttccgattcctgtagcgttggcgctatttaatgctaaaacaggtgagcaatatacacttcatagcgacagcctatttgtaaatggtgttaaagatagcgtgtatttgtttgaccaagatgaagctactattgagtttacaggagtgactgagcaaccagttgcgtcgctattacgtaacttctctgcacctgtaaatctgatattcgattacagtgatgaagaattagcattcttgattcagcatgaaacaaatggttttaaccaatggcaagcaacacaaaccttgcttgaacgtattttgttagaagatcactctgcggatacttatattcaagctattcaaagtacattgcctgatttagttggtcgtgatccacttttagcatctcgtttatttgatgtaccaactgaaggttatttgggtagtcgtattgatcaaaactatgcaccagccgatattcatgtaaaacgtgaagccttgctgaatcgtttagcacaagatttgggttcattctggaaagagacttaccttaccctggacccagacttgcaaaaagaattttctttagcgatgggtgtacgtgcattaaagaacattatgcttatgatgatggcgcgtcagggcgaccaaagtgcatttgaattggcttacgagcaatatcaaagcacaggcaatatgtctgaacgtttaggtgcgctacgtgtattagtttggcaaaatgcgcctcaagcacaagaagcccttgctgatttctataaccgctttaaagatgaagcattgtctttagaccaatggtttatgattcaggcagcaaacccaaatgccacagttgagacaattgagtacttaactcaacatcctgattatgacttaactacgccaaaccgtattcgcgccgtgagtggtggtttgtcaaataaccctgaaaatacgtggggctttggtgtagctcactttattcatcttgcagaatatctggacgagaaaaacccgattttaggttcacgcttattacaggtgttatctcgttggtatacgcttgcagaacctcaacgtactcaagtgcaacaggctttacaagccttgcagcctaaagtgaaatctaaaaatgtttctgaaactttaaatagtatgttgagtatttaa

SEQ ID NO: 51675 - DNA, 258 bp, Acinetobacter baumannii
atggaattaaaagcttatttacatcgattagaaaatattaaagcgattcatgatctagatgcagcaggactcgaccatcatgtgattgccgtgttcttgtctgccgaaggtatttcaatgactgctcaggaggtaactactatcgttaatacttatgacgccttaggtaaagtgaaattaccaagtaaaaaagtgcaggcactgattaatgccaaaaaacttggacaaaatgatgagaccttgccgtgccctgtttaa

SEQ ID NO: 51676 - DNA, 852 bp, Acinetobacter baumannii
atggctgtatatacacaaaagctgcaactggtttgcgattatattcaaagacatctagatgaagacctagatgttgatcgattgagccagatcgcagctttatctaagttccattttcatcgcatttttgccattcatattggtttaaatgtgatgaagtttattcaactttctcgtttaaagcgggcctcatttcaattggcttttgaacctgatctcaagattattgagattgcattacaagcagggtttgatagtccagaggcatttactcgtgcatttaagcgttcatttgatcaaactcctcgagcttttagagataaaccggactgggaatcttggcatcagaagtttgtttttacgattccgaaaagtgagttaaaaatgaatgtaaatattgttgagcgacctgctgaaaagattgcgtatttatcgcatttaggaagccctgataaagtctttgaaacggctgcacgttttattgcttggcgcaaagaaacaggtttgtcaccagtgaccaagtctagaacttatggtattccttttgctgaccctgaacagactccatctgatgagtttcgatttgatattgccggttcaattgaaaaggctgtacctgaaaatagttacggcgtacagacaggtgaaattcctgcggggcgttatgcaaccgtaagacatttaggtagtcatgaccagattaaagatagcgtctattacatctttagaaactggttacctgagcaaccagaagaggcaggtgattatccggttttctttcactatcataactttgtgcatgatgtgaatgaatgtgaccttgtgacagatatctacttacttttaaagtga

SEQ ID NO: 51677 - DNA, 360 bp, Acinetobacter baumannii
atgccgcacgttgtagttgattattcagataacttaactggactaaatgcaaaacaattacttgaagaaattaataccacgttgattgaaacagagttgtttagtccagaagacatcaaaagccgtgcacgtaaagatgaagtttttctgattggcttaggggttgatgaagcttatattcatgtaaaggcgtatattttgtctggaagaactgccgaacaaaaacagcttatgggggagcaattgttggcggcgctcagcaacaaaaaatatctaccacaagagtttaataaagaaattcaattgtgtgttgagcttatcgacatgccaagagacgattattttaagcaagttgtataa

SEQ ID NO: 51678 - DNA, 1713 bp, Acinetobacter baumannii
atgaaacaggaaactgcacttaaactgctcaaagcaggtgaaaatgtttttttaaccggttcggctggtgcagggaaaacctatacactcaatcagtacatccaatatctaaaagcacgtaaagtgcctgtagctattacagcatcgacaggtattgctgcaacgcatatgaacggtatgaccattcatacgtgggcgggcatcggcattaaagatcagttaactgacgacgatctaaaacgtatgaaagagcgtaaatacctcaaggaacaccttgaaaatgcgcaagttctcgtcattgatgaaatctcgatgttacatgcaaagcagctcaatctggtcaatcaggttttaaaatattttaaagaaagtgatgaagcttttggtggcattcaagtgattgtggctggagacttttttcagttgccacctgtaggccgtaatggtgaagctaatcgcgataagttctgttttatgtcagatgcatgggtcgaagctaaattccgcgtatgctatttaacagaacagcaccgtcaagacgatgaaattttaaatcagattttaaatgccatccgtgcgcaaagtattcaagctgaacatttgcaagctttacatcaatcacgtgcacatgacattggtgagacatttactcgtctttatacgcacaatatggatgtcgacaatatcaattatcagcacttaaatgaaattgataatgaaggacatcaatttaatgcagttttagatggtaatgaaaaactattagaaactttaaaatcatcagttcgtgcaccagaagaacttactttgaaaaagcatgccaaagtcatgtttgtaaaaaacaactttgatatgggttatatcaacggaagtttaggtgaagtgatcggttttgaagaagatgacgaaaacgggttattaccaaaagtaaaattaactgacggcacaactttgctggtcgcacctgaaacatggtcaattgaaaatgaagccggaaaagtcattgcaagtttccagcaaattccacttcgtttggcatgggcgattactattcataaaagccaaggtatgactttggaagctgctgaaattaacctgatgcatacctttgaaaaagggcaaggttatgttgcgctctcacgtttgaaatctttaacaggattaaaattattaggatttaatgaacaagctttagagttagatagtcttgctgtaaaagccgatcgccgttttcaggaattatcggctgaagccgaagataattttgctgatgtcgatttaaccgcccagcacaaagcctttatccgtcactgtggtggcaccttaaatgaaaccgagatttctcgtaatgagaagaaactcgcaaaaggtggtaagcaaaattatgctacggcaacgctagacgagacacgtgtcttgtttgaagaaggttacgaaattgaagatattgctcatgaacgtggtctaacacctgcaaccattattaatcacttggctcgactgcataaagagcaaaaactagatatttcggttgctcacccaggtgaagaagtggtcgaagaagtccgtaaaatttataagaagttgaaaaagcgtcaaaatccagatcatttttctgatgatggttcgatcaaactaagaccaattgttgaagcaactagccctcgaatgggatatgatcaagttcgattagctttattatttattgaataa

SEQ ID NO: 51679 - DNA, 1173 bp, Acinetobacter baumannii
atggcttttaaaaatattgcagatcaaacaaacggtttttatattccttgcgtatcactctttggtccaggatgtgccaaagaaattggtacaaaagcacaaaatctcggcgcaaaaaaagcattaattgtgaccgatgaagggctatttaaatttggcgttgcagatcttattgcaagctatttaaccgaagcaggcgtagcgagccatattttcccgggcgcggaacctaacccaaccgatattaatgttcacaatggcgtgaaagcctataacgacaatgggtgtgactttattgtctcgctaggcggtggttcatctcatgactgtgcgaaaggaattggtttggtcactgcaggtggtggtcatattcgtgactacgaaggcatcgataaaagtaaagtaccaatgacaccactgattgcagtgaatacaacagcaggtactgcatctgaaatgactcgcttctgtattattaccaatacagacactcacgtaaaaatggcaattgttgactggcgttgtaccccacttattgcgatcgatgacccgaaactcatgattgcaaaaccagcgggtttaacggctgcaacaggtatggatgcactaactcatgcagttgaagcatatgtttctacggcggcaaacccgattactgatgcgtgtgcagaaaaagccataaccatgattagccaatggctccaacctgctgtcgcaaatggtgaaaacatcgaagcgcgtgatgcaatgagctatgcacaatacttggctggcatggcatttaacaacgcatctttaggttatgttcatgcaatggcgcaccaattaggcggtttttacaacctacctcacggcgtatgtaatgcaatcttgttaccacacgtttgtgaatttaacttaattgcttgcccagatcgttacgcaaaaatcgccgagttaatgggtgtaagaactcacgggttaacagtgatggaagctgcttatgctgcaattgacgccattcgtaaactgtcttcatcaattggtattccatctggtttaacagagctaggtgtgaaaaatgaagaccttgcggtcatggcagataatgctcagaaagatgcatgtatgctgaccaaccctcgtaaagctaatcatgctcaagttgtggagattttcaaagcagctctttaa

SEQ ID NO: 51680 - DNA, 969 bp, Acinetobacter baumannii
atgaatacatcttcagctaatcaaacttatgtcccagatattttaggtgctggctacgaacagctcacacttagttttcctgatgattatgaagggaaagttgtagctacattagtccgtaaaaaagccgctcaatcgactcaaaaagccgtactttatattcatggttttctagattatttttttcaaaccgaaatggctgagcaattcaatgctcatggttacgacttctatgcacttgatttaagaaaatatggccgctcaaagctacctcatcaaattttctataatgtgcttgatttaaatgaatacgacgccgaaattacacaagcattagagattattggtgaagaaaagcatacacaagtcttgcttgcaggccactctactggtggcttaacggcgacgctttatgcagcccatcacccgaatcaccctttgattaaagcgctatgggcgaatagtccgttttacgactttaatttaagtttagtcgaaaaaaaatttggtattccaatgctcagtcgagtaggaaaatatctgccaaaagttaaattcccaagccaattaaacaaatggtacaccgcgagccttcacaaacagctcaagggcgaatgggactttaatctggattggaaacctacctctgcccctacggttcaactcagctttttacatgcgattcatacggcacaaaaagaaatacatcgcggggttaaactgaatattcccgccctgattatgcattctcaccagactaaaaaccctaaaaaatggggagcagatgcgactcaaagcgatgtaattttagacgttaaagacattgaaaaatttggtaaaaaaatcaaaggcgatgtctctgttgtctctattcacaatgggttgcatgatttagtcctttcggcccagccagtacgagaacaagtctatcaacaattgtttcagtggctggatcaaaaaatcacttaa

SEQ ID NO: 51681 - DNA, 1191 bp, Acinetobacter baumannii
atgttcacaaaaaaggatttattgcagcaacggacgttgattgatcaactgcgcacgcaaaatagtctctctcctcaaaacgctgccaaactcggccaaagtattgcaagctcgtgggaacgatcagcttctgctgcgattcctaaagaacgttttgcggctccattagtcgagaaaaaaactgcttcacaaaatgccttagatatggctttaagccaatgtgccgatgacttacgacatattgcagaacagtcttcaatggtgattgctgtcggtgatatcggcagtacgattatctggacggcaccaagtgctcaaatgcaaagtgctgctgaacgtgtacattttgtacaaggtgggcagtggcgtgaagaatttgtaggcacaaatgccttggctttatccttaaaaactcaacaatcaagctgtgttttttcaaatgaacattatatggaatcgattcatgattgggtgtgttatgccgcgccgattatcgatccatactcgaaacaaactcttggtgtcgttgatttatcaactacatggaagaaccataatagtttaggaattctggctgctgaacgttgtgcatccattattcagtctgctttgctagagcagcagcgccagcaattacatatccgtgcattttcaacgccacaagttaaatttaatggcaaaagtttgttattaacaccgcgtcaaattgaaattttaaccatattggcgttatgtccacatggtttaactttagagcatctttatcaggcgctttatggcgaacgtaaagtcagtatgggtacgcttaaagctgaaatgtctcaactacgagatattttgggtggtttacttggttctcgtccatatcgtttacttgtacatgtagaggccgattttttacaagctgaacaagcactcgatgcgggatatgcagcctcggctttgcagctttacacaggtgtatttctggcaaaaactgaaagtccatttttatgtgcatggcgtgactgccttgaatcacgtttaagcgatgcgatttttaaaacccaagaaacggatttattacttaagcatttagctcatttccctgaagcaatcgatgcggtagaacgtcttatggagttagtatcgagcgaacatcccgcgcatcaattgctgatgaaataccttgactcacctaagctcagttaa

SEQ ID NO: 51682 - DNA, 1386 bp, Acinetobacter baumannii
atgagttatcgcaatattgtcgccaatcaacagtatcactttgctgacttgaagaccttgatggcaaaagctacaccgctacgttctggcgatgaattagcaggtgtagcggccagagacgcaaccgaacatgttgcggcacaaatgactttggccgatgtaccacttaaaacctttttgaacgaagttgtggtcgattatgaaactgatgaaattacacgactaattattgatgaacatgatctggctgcttttgcccctatttcacactttacagtaggtgattttcgaaattggttacttggagaagatgcaactgcccaaagcttaaaagctttagcatcaggtttaactccagaaatggtggctgctgtcagcaaaattatgcgcaatcaagatttgatttatgtcgccagcaaatgtgaagtcattacccagtttcgtaacaccattggtttaaaaggtcatctttctacccgtttacaacctaatcaccctaccgatgatgtgctcggtatttcagccagtattttagatggtttgatgtatggcaatggtgacgccgtgattggtattaaccctgccacggataacctgcataatttgtcagagctactaaaactacttgaccatgtcattcaggaatatcaaattccgacgcaatcttgtgtgctcacacatatcagctcaggcattcaacttgctgaaaaaaatgtgccaattgatttaatgtttcaatcaatcgctggtacccaactggcaaacgaaggttttggtatctcgctcgatttattacaagaaggatatgaagccaccctcgcactcaagcgcggaaccattggacacaacgttatgtactttgaaacgggtcaagggagtgccctatctagcaatgcacatcacggcgttgaccagcaaaccttagaaactcgggcctacgcagtggctcgtaaatataacccacttttggtaaatacagtcgtcggctttattggccccgagtacctatttaacggtaaacaaattatacgtgcaggtttagaagatcacttctgcggtaagttgcttggcgtaccaatgggctgcgacatttgttataccaaccatgccgatgccgaccaaaatgatatggatgtgcttcttactctatttggcgccgcaggcattaacttcattatgggaattccgggttcagacgatgtcatgctcaactatcaaaccacttcattccatgatgctctctatttaagacaactcctcggtttaaaacccgctcctgagttctccgcttggcttgaacaacaagggatttttaaacagcaaaactctcaaatttgttgggcagaccacatgcctgaccaattctctcgtctgctcatgaactag

SEQ ID NO: 51683 - DNA, 231 bp, Acinetobacter baumannii; identical to SEQ ID NO: 51673

SEQ ID NO: 51684 - DNA, 444 bp, Acinetobacter baumannii
atgattgtaagacgagcgacctacgaagatctaagtcaacttgctgttctatttgatgaataccgtcaattttatggtgcatcttctaatcttgatgaatcacatcattttttaaaacaacgttttgagaataaagaaagtgtgtttttcatccatattaaggatgaaaaaatcacaggtttcgttttgctttatttaggtttttcttcagttgcttgctctacttactatatcttagatgatgtctatgttacccctatgttccgacgtcagggttcagcaaaacagctcattgatacagctattttatttgcaaaacaagaaaatgctttacgtattagtttagagactcaaacgaataatcatgaatctcaccgcctctatgaaaaaatgggatttattcgagacagtgaatttcagacattccattgctttcttaaataa

SEQ ID NO: 51685 - DNA, 219 bp, Acinetobacter baumannii
atggatattatagatatcaagattaaagatcagttcgacaaaatttatgatgcgaaagcacaattgaagaaaaatttagttgaacatgaaaatgagcctttaaagttaagtcagcgtatcgaacatattattgtggataatgagatcattttgcctacaacagaattattatttgaaagtgagcaaaacgaaaaaatttatcgagtcattgaagaataa

SEQ ID NO: 51686 - DNA, 453 bp, Acinetobacter baumannii
atgctcgcccaatttgatgttaatttagttgtcttattagttctacttatctgcggtttactaagtcaaaatgcagctgtaacgattgccgcaggcatcttaatcgtcattaaaatcacaccgttaaatcaattttttccttatattcaagctcatggtcttaacctaggaattctcattttaaccattggcgtactgactccaattgccagtggtaagcttagcggagagagtattttaaaatcctttataagttttaaatctttgctggctattgctattggtctacttgtggcttggctaggtggacgtggtgtgaaacttatgtcaagccaacctgatgttgtggcaggcttacttattggtacagttgcgggcgttgctttactccgaggcgtccctgttggtcccctgattgctgcaggcttgctgtccttattcattggtaaataa

SEQ ID NO: 51687 - DNA, 921 bp, Acinetobacter baumannii
atgttagaaattcgtcatcttaaaactttggttgctttacgtgaacatggttcacttgttgcggctgctaatgatctgtgtttaacaccgtctgctatttctcaccaattaaaagaattagatcattggtatggtgtagaagtggtgaatcgtcgaagtagacctgttagtttttcaaatgttggacagcgtttactcaaattggctgatgatgtattaccacaaattcagatcacacaaagcgacattacgcgaattgttcatgggcaaacaggcagaattattttttcctcagaatgtcatagctgttttgactggttaatgcctttattaaatcaatatcgacagcagtatccagacgtagacttagactttgcttcgggctttgaagcaaatccacatgagcttttacaaaatggtgagtttgatttacttattacagccgatccgatcgcattaaaaggaatcgagtattttccaatttttgaatatgagtcgcgtttggttttatcaaatactcatcgattggttcgtgctgaacatattacagttcaagacttagctgaagaggttctcattacttatccggtagataagcaccgtttagatattatgtcgaaactatttataccggcaaatattcaaccaaaacagattcgaactacagatttaacgcaaatgttgattcaacttgtagcgagtggtcgaggcattgctgctttaccagattgggtagtcaatgaatacgaacagaagggttgggtgactagccgccgtctagattgtgtttctccagcgggtttaagacgtacattgtatgcaggttatcgaactgaagaaaaagagaagagctactttgaaggtttcttaaagcagttagaaaagttctctttaaaacgtaatgcttattattctggataa

SEQ ID NO: 51688 - DNA, 984 bp, Acinetobacter baumannii
atgcgaattttagcttggaagagattacgtaaattcttctataacaaccttcatgatcatgattacgaaacaatagtgagtaggtgtattaactacttcttggttttcttaattattgggaatgtcattgcggtattgctagaaacagtaaatgatctgtattacagctatcgtatatggtttgactactttgaaaatatttcaattgcaatttttagtgttgaatacctcttacgcctctggagtgtagtagagcgtgatccgacacaagctgcatggaagcagcgtttagcatggatgaaaagcggagaggcactgattgacctcatggcaattttgcctgcgtatctaaatttctttgtacgaatagaccttcgtatgcttagaattttacgattacttcgactattaaaattaactcgctattttatttctttgcaaatattgctatgtgttattaagcgagaaaaaggttcttttcaggcagtgatttttattttaatcattatgattattatgactgcctctggtatttatgtggttgagaataaagcgcaaccagaagcgtttagctctattcctaaagcaatgtggtgggcggtcgttaccttaaccacagttggatacggcgatgtcacacctgtgaccagcttaggaaaactactaggagctttaattacaattttaggggtagggattgctgctttaccggctggtattttagcttccggtttagccaatgaactgaaccaacggaatcagcgccttgaacaagagtttcgtgagttacttcaagtgcgtggtattaacatcatgcatgatgaagttgaaatagaacgtattcgacaaaaagtagggctaccaaaagaacaagcgcataatctaattatccaaattatgcgcgaaaaagtattagaagagaaagaatctgtgagagagaagaaatgctattgtccacactgtggtgaaaagttaacagattag

SEQ ID NO: 51689 - DNA, 1236 bp, Acinetobacter baumannii
gtggaaaaagatacttgtgttgaaattagagatagcaaggttaacgatacaaatattaaatatcgtggactcattcagaaattaacagcaacattatcattgtcctttttgtcacttgggtggggctccacagtgaatgcagcagaacaacaaatcgctttagtaggaacttggacatcgattcctgatgcaccacttgttcaaaaaccggaaaaggccagtgaaggtttatatcaattgcaagttaatgctgacgggactctaactccggttaaagtgttaaaaatgaaaagtccatcttggattgtgaaatctaaagatggtcgttttgcatatacaacaaatgaagaaaatttaggagaagtcactgcactatcggttcaaaacggaaaggtagaggttttgaacacagtgaatagtcatggtggacatccaactcatgcctcaattagtttagatggtaaattcctgtttgtgtcgaattattcggcatttgataaaggtcgtggtggtgtggctgtttttccaattttgccgaatgggcatttgggtgaaatggtacaaaatattgttttttcggaaggttctggtcatgttaaggggcgtcaagagagtggacatgctcattcgacaacttttagtccggatggtaagtatttatatgcaagtgatcttgggaatgacaaagtctatgtctttcgttataacccaaacaaaacgcaaccactcgaagcggataacggtcgagatgtgacgtttaaccatggctctggtccgcgtcatatggtcttttcatcagatggtaagcatgcatatgttaccgccgaaatgcgaagtgaaattgtgacctttaatgtgcaagatggctatttgaagaaaactgctgagctaaagctagttcatgaagacaaaacgcctgaatttaagagtgcaagcggaattattattagtccagatggcaaatatgtgatcgctgctaatcgtggctcagacaacaaactcctcgtatttaaaattcaagaggatggattgctggctcaaccgactgtttataaagctaatggcattgaaccacgtgctttctcattcgatacaactggtaaatatctgtatgtaacaaatgtttttactaataatattagtttgttccgctttgatgccaaaaacggtaccttaaaatcagttggagatgctgcaaaaatatcaacacctactgatattaagttttttaattaa

SEQ ID NO: 51690 - DNA, 597 bp, Acinetobacter baumannii
atgataatttatggtgatgtaggttctggtaactgttataagattaaattattactttccttattaaaaattaatcatacatgggtccatgttgatattttaaacaaagaaactcaaacagatgattttttgtcgttaaatccgaatggaaaaatacctgtattagtgctggatgatggtcgtgttttgagtgaatccaatgctattttaggttatgtggctgaaggaacaaaatttattcctacagatccttttattaaagcaaaaatgtaccaatggatgttctttgagcagtatagccatgaaccatttattgcagttgctcgttttattaataaatatttaggcttaccgccagaaagaatagatgaataccagaacttacaaccaaaagggcataaagcgttatcaattatggataaagctttagtagagtatgattatcttgttggaaatcaattaaccattgctgatattgctttatatgcatacacacatgtcgctgaggaaggcggctttgatttaaatttatacccaaatattcgagcatggtgtcaaagaattcgagaatattcaggttatgtagatatgatttaa

SEQ ID NO: 51691 - DNA, 309 bp, Acinetobacter baumannii
gtggccacaggcgttattatcattcctgtggtgccatatttgcagtctttacatttaaaacgtgacgagctggttcaggctttgggattaacgtttacggtttctaccatttgtcttgcagtctttttacaccataacccgatgtctggagtaacactggactatcgtttgtcttttgctgcattgttggctgcactcattggaatgtggatcggtaaaaaaatccgttatcgacttaatgagcagttatttcgccgtatcttttttatagggttggtgtcgttagggctttatatgattttgcactga

SEQ ID NO: 51692 - DNA, 357 bp, Acinetobacter baumannii
atgcattcgaaaattatgggcttaatagccgttatggggatgatgagttcaatggcatttgcagagcctgcaatccaaccaggggacacactagaaagcttatctaaagcacgcattactacgaacgtaaatacgaaagcggcgatatctacagctcaaacaagcatagcaagcaataccactgctgaagtcaaagttgaagatattgacccaatcattgaagaaaaaactgccgatgtagaaacagtaaaagtagctgtaaaaccagtaactcaagctgctgtagtagctccagttgcatcaagcgaacttattgtaagtgttgacgatattgatgtcgcacatcctacagagtag

SEQ ID NO: 51693 - DNA, 387 bp, Acinetobacter baumannii
ttgaatctttcaaaagatgaaaagcaacgaatcaaccagcagcaactttatagactgcttagaaaacttgtacagcaaggctatttgatcaaaaacattcatttagacaatccaagactttcaacattttttgaaacagaaagtatgtacgcgtttagaaaacaattcgaaagtcataccgcgatacatgattcagaaaaacttaaattaaaaactaaagcattaaaagaaaagcagatgatttacgaaaaccaaatcaaagcttctgaacaagcccttatagattttccagaactaaaaacagaaatattaagaagaaaaaaccaattacttcacgatattgaaaaactgaaagcttacactgactttctaacatcactgatataa

SEQ ID NO: 51694 - DNA, 213 bp, Acinetobacter baumannii
atgtttatgtcagaacttactattcaatttgggcaactagttcgtaaatacagaaaagaaagaaacatgtcacaagagcaattggcattgctctgtaatatggatcggagttatttagggcggattgaaagaggagaggtgaatcctacgttagaaaaaatttatgagttatcagatgcattacagatcaaaacctctgaactaatgccttaa

SEQ ID NO: 51695 - DNA, 570 bp, Acinetobacter baumannii
atgtttgatgaaattattgagcaaaataatttattaagtacctttataagtgattacatcttagaaaatggtaaagaaaaactatgtgaatcacatgatatagattttttaaataggtttaaacttcctgataataaccttttatctaaagcttctttatatgaatatgacccagctaaaaatggtcaaaatattttaaagcatggattagattttggagctgttatcagctacagtggcagtgattatagtagattaattagttatacaaactcagaaattgaagatagatttgtcatcttttcaaaatattatgttaacaataaaaataatatttttttaagcgatgataaaaagaatgaagactttttatgtatcgccacaatcgcaacgaatgtggatattggttttagatttatctcatcaagagcacttcatgttaaagatggtaaaaaattacaacaagaattaagaaatatgattaaagaccataatctagatgcttcagtaatagatagccttcggaatagggcatatgagatattgagagaatattatgagctaaagtag

SEQ ID NO: 51696 - DNA, 1368 bp, Acinetobacter baumannii
atgttaacacctcctcgctttgttgtacttgacgataagaaagaacacttagaacctattattgaaacatttaaacttattggctcctcatgtattggagttcaatataatgagcaagatgcttctcatttacatcaggactattacagaggcgtgagaggtttatttatagatttaaatttatctggtagtagctcaattggatcaagtacccattatgctgaaatcactagaattttagagacagttatttcatgtgataacggtccttttataatgattctatggacggataatccacaagaatgtgatcaattaattgaatatattgaaactcgtttagacccagagaaaaaatattgtaaaccgctacttatcaaaccattatctaaaaatatgtatattgatgctaatagctcaataaaagaaagtaatcgcgaaacgttcaaagaagaaattaaaggttttttttcatctgttccacaaatagcagctctttttgattgggaatcaaaagtattagaagctgtaaatcagacccttattgaactattaaatttagttccaaatgataagagaaattttactgattatccaactgagattgataaagtactcagttgtataactcgagaaacagtagggaaaagtcatgttgcaactgatcccaaaaaagcacttaacttagctatttatccaattctggtagataaaatactaaataacactcctaatcaagacaacatccagctttggaataatgccattactcaagtcaaaacggcttctattttggatgaaaaagcagttggaaagtttaacaaaatgcttcacttagctgttacagggcatgaatcaatgagtccctatgactggggagccgtagtcgaaatacctgctgaaaatttcaatgatgaattttgtttacagcattttggatacaacaaacaacatcttgttagaaataccttctgttttagtaatgcagaaaaccttaaacctattctgatacgtttaggggcatcatgcgattatgcacaaaataaacaaggacctataccatatatttttggattcatagttgaatccgaaaaatatcgtgacagagaaagagatttttcagatcccgacaagaggtttatgagtaaaaaactttcagactgggtatcaccattgtttagctatatagacgaagatccagctttttatatcgttttaaatcttcaattagtgatttctaaagttaaaggccaacttgacgactatcacaatttatatagattgagagaacaactacttaatcaagttattgtaagagcaacaagttttgcttccagaccaggcattaatgaattgtatgtaagataa

SEQ ID NO: 51697 - DNA, 2103 bp, Acinetobacter baumannii
atgactggaaattacattacttcagaagacttagcatttcgtccacgagcacgtctactacaaatgctcggtgatcagctaattggttcttctcgtttagcgatttttgagcttgtaaaaaatgcttatgatgctgatgctgatactgttttaatcaccttagataaaattaatacagagaatgcaaaaatcattgtcgaagataatggtgagggaatgtcagctgatattattaaaaatatttggcttgtccctgctcacgatcataaggaacaacagaaaaaagaaaaaagacgaaccaaagctggtcgcttacctttaggtgagaaaggtttaggtcgattcgcagtacataaattaggaaatgaaattcaactcgtcactagagctaaagattctgatgagtgtgttcttcatattaattggcaagatttaattgataaaccttttttggaagatactcgagtagaagtagttaccagaactccaattatcttcacaggagataatactggcactcaaattacgataagtaacttaagagaacaaaattggtctagaggggatgtaagaaaacttttacgccaaattacttcaatatctacaccttttaatgaaaaacgaagtgacaagtttgaaacattacttgaagttaaaggacatcctgactggaccgaaggtgtttcagatattgataaattaaaggagagagcaccttggcatatctcattttcaatcgtcaaaggcttactatctttaaattataattttattggtgttcctggaattaaagtagaacctcgtcaagaattattagaaaatgaaaaacttttattaccatcgaatttgaaaaaaaataaagttgttgtggagcctgaagacctacatggaattggtgatattagcggtgagttcttcatctatgatcgcgataaactagttatatctaagtttggagagcaacaacttgttgaaagcttcttaaatgagaatggcggtattcgtgtatatcgagacaacattcgagtttataactatggtgaacctggtgatgattggctcggtttagatttgcgaagagtcaatgtacctggcaggcatattagtcgaaatatcattgttggatctttggatctcagtgttgaagatagttttgatttacaagaaaaaactaatcgagaaggttttattgaaaatgagacttatgaaagattccaacaaattgtattaagtgtactatctattgttgagacagagcgtcaaaaagataaagaacgtataagacaaataactgaaataggtaaaaatatagaagagaaaaaaattgaaaagccattaactgaacttagaaaactggcaaagaaacataatttaactgatgaactagaaccattaattgaaaaaactgaaaaaaattataatgaaatgcgtgaagtaatgctcacttcaggttttaataatatgggcttagctattgtttttcatgaagtcgaacatggtgttagatcattatatcgaaccattgagcatagtgaagatattactttaattaaagatcatgcatatgaacttgtgaaaattttagatagtttctccgacttattgagaaagggtgataataagccagcaagtcttaaaaatttaattcgtcgtgccagagatattgcttcgatccgctttagagcccacaaggttcaattcgtttgtccattcctagaagataatattcctgatattgaacaaaaatatatctttaaaatattaattggttgtttaaacaatatctttgataattcaatatattggcttcaagcacgttggcctgaagatactcttggtcaaagaaaaatttatatagatgtacgcagagatttttatggaaaaacagcaattattattgctgataatggtcctggtttccaagatgagcaagaacagttagtaaaacccttctttacgagacgacctaatggtatgggaattggcttgtattatgtaaatcttgcaatggaagtaaataaaggacgactagttattcttgatgatcaggatgatgtgccaagtgagtttgatggtgcagctatggctttagtttttgattga

SEQ ID NO: 51698 - DNA, 1257 bp, Acinetobacter baumannii
atgtctagccctttaaaatttctcgatttatttgctggtgctggaggcttgtctgagggttttatccgcgctggcttcaaaccagtcgctcatgtcgaagcggatgcttcagcttgttttacgcttaaaacacgacaagcatttcattggctaaaaaataataatgcaatagatatctattcaaaatatttaaaaaatgaaataacacgtcaagaactttatgatactgttccttccaacgaaatagattcagtcatcaatgaattcataggatcagatacccttaaaacaatttttaacaaagttaatagccaattaaataactccaagctagatctaattattggtggtccaccttgccaagcttactcactcattggtcgagctcgagggaatgtggatgatgatcctcgtaatcatctatataaatactatgcagaatttctaaaaaaatataaacctaaatattttgttttcgaaaatgtacttggactattaaccgctaaagatccaaatgatgagttttatttcgataaaatgaaaaatttatttatcgaaattggttattcaattgaatataaagtcttatctgcaaatgaatatggtgttcttcagaaccgaaaacgaataattctagtaggtaaacggggacatcgtggtaaaaaatcattttaccctgaaattgaaaaatggactcctgaagcgactgtttgggatctactccaagatcttcctaaaataaatgctggtggaggtaaatcttccccattagaaccgatctctgaaccatcgcaatggctgaaagatgctcagatatcaactgatcttcctttaacttggcatgaggcacgtccacactctgagcaagatttagaaatttataagcatgctgttaatttatggaatactgaaaaaaggcgtcttcattatgacgatttacctgaatacttaaaaagtcataaagggcgtaattcttttgttgatcgttttaaagtagttgctggggatttaaccgcctgccatactgttgttgcacatatctctaaagatggacatcattatatccatcctgatataaatcaaaatcgctcattgacgcctagagaagcagcaagaattcaaagctttcctgatgattactattttgaaaatgtttcaggaaaaccagcacgtacaagtgcctttaggcagattggaaatgcagtacctgttttacttgcacaaaaaattgcagaaaaattattaaaggattggtaa

SEQ ID NO: 51699 - DNA, 1605 bp, Acinetobacter baumannii
atggctaagataagtcacattgctaagaatatgaaaataaaaaagattggctcactatttaaaaaacataactcaggcagttgggcaataaatctagctttggaagatgaaaataaagtacctgagatgactttcacgaatttttccaatgcaaagttattgagaaaaaatagtcacatcaatcccactcaagaatatcctaaaggctacaatttacgctttaaaattagttcaactcaagattggctatcttctgtcaatgatacaaacttaccgaaaggaaagtttgtagagcattatttcttatttaatgcagtccgtgtggatcaattcggtcagccaatgtcggaaaccattaaaattaagctccctcaatttgagctcgctagatctctatttttctacacgccatatttagcaagatcagcaattatagagaatagtttgagtatcgattttgatattgtttcaaatcgagatcattatctcatcaatattttaccagcttgctcataccctatttctcatttcaatgatgcaggcatacgacgcatcttatcttggattcttcttgatcctgatattcgacaatcttttgaaagtatcagtcagttttgtaccaaatatggctatgacgttgaccaataccgtatatggagtttttgttttaatccccctcaactcaatggagtgatctttgatacatatggctattataaagctgaaacttcagagttttttgtcaatgaaatatcaggtttcgaaagaatctcaagccgaatttctaaagaagttgagttctatagcgataaattcattgagtctaaatcaggtgggaaaggtgaaaactcttcaggaactaaaaataacggaaaagaaccgaccatcaaagatgatgaggatggcaatagcgatgatgttcaaatcattgatgttgtaccgacacacttcgacttcctagaagccattgaaacaaggaaaacttctaaaaaaactaggcatagaaatcatggtacaaaagatcaagacttaccatccactaatgcgacatcggaagttagcaccaacgagcctatttctgagggtaccatcccctatgctgaatttaatggtattgaagatgaaactgaagatcttcatttgtatcttgatcgtttctctgcatttcaacaaatgattgatttgttttgcaatgaaaactcagttaaaaattctacctttcaactccataaattacccaacattcaaggtcactccaaacatataaaaactgatggaaatcctagatgtgtcgcagaagttagttttcaatataatggtcaaaatattgtgatcttagaagtagatacttctgacaataagaaacccctttcaactcgtgttttatcacttaaaaatatcagtcaatggaatagtattgatagagttaaagtgcttgagctagtcgtcacgcaatgtttacgatggcctaaaggtatctttactcatatttgctataaaaatagtacgttaaaccaccctcggatgaattcaaaaaatcaggaaatatcagaacaagaattagaaggatggatgaaaagattagaatctttgttaacaaagtaa

SEQ ID NO: 51700 - DNA, 1524 bp, Acinetobacter baumannii
atgttgaattttcctacaccatatcccaatgagttaatttacagcacgatagccagagctggaattcaccatgctattacaagtcctaagcaattacttgaagaagtatttgctaatcgtaaggtcattgccatgattgatttacctagccacttaatacgtcttttacagcatttaccaccatgctatacgcttgaaaatcttgtttataaacatacgctttttccgatccacgctttattttctccagaaaacacacgtttgaaatgccttcaatggatggggaatcaatcaaatggttctgttcatttagcattaggggttgcggcatccaaagttaagcagatatcaacccatcgatattgtggacattgcttagaagaacaatatcgagaatatggagaattcttttggtcaagagtttggtacatccaaggtgcgaattgctgtagcaaacataaagttaaattgtcagaatttttacaaccagcccatttgaatggacggcatcaatttattccagcaaatttcatccttaatctgaagcaacttactaatcctgctcatgaattagatctaatcatgagtaggcgtgttgatgaactgttaaagcttcctccaacaacatcacctacgtttcatcaatggagtcaattttatcaacgtattgcaaaacgatcaggttttaacaaaagttctaaacacattgatcattcaaaaatttattcagctgttgtaaaaaaatgggatctaaaatggttacagcaacatcaccttgatgaactgaaatctgaaacaagttggcttaaagctatctttagaaagcatcgtaagtcattcagttatcttgaacatattatcgtcttagagacgtttttcgctaaagactggacatgggctgccatactgagtgaaatccatcagttaccgtctcatccatctgatacaggtaaaccaattcaaaaaactaagtttaaagacagttctatactcagtacaaagcgaaatgaatgggtgtctttgattcaaaattttggaataatgccgtccagagtcagaaatgctgccttatatgcttggctttatcgaaatgataaaacttggttactcacaaaaaatagaagctttcacgctttgccttcaagcattccccagaaagtagattggcctctgagggattggtacatggtgaggcgattattcaaaatattctatcaatcattagacgatttgagtttacctaggcaatctagaaactggtatctcaagcaactaccgcaacactccaccgtagagaaaaacctatatcagttgcccttaacacataaatttctgagcaccttttcagaagatattagcagttatcaaatccgaagaatcactcgaaccattattcaatttcaaaaaattaatcagtacccagcgagttggcaattattacgacattcaggattaagtgaagaacgattaacaaatgaagcactcaaattcctaaatcaaattaaaagggttaatcatggctaa

SEQ ID NO: 51701 - DNA, 420 bp, Acinetobacter baumannii
atgtcccaaactcctatcattagcctatattttgcttcggttttgacttttgtggccgcgttacttcattttatttgtgtgttttggggagcaaatggttttcggtttttaggggctgggaaaagtattgttcagatggtcgaaaaagggcattggtacccaaattttatggctatagctgtaggttttattctttgtattttctctttctatgctttttgcgcagcaactcgttttatgaatttaccatttgaaaaaatgattatttctctagttgccattccatttattttgcgtggtttggcatttccatggttaaaggctagatttagtggaaatagtgatctattttggtatgtgagttctttcatttgcctcttgttgggttcgttatatgcaataggggcatattctttataa

SEQ ID NO: 51702 - DNA, 1182 bp, Acinetobacter baumannii
atgaatagaaatgaaaagaaagaggtaaatgtagtatttggaaaaaccaattccaatggtgagtcatctccagttcattcgagaattggagatgagattattactcttttattacctgataattttaagaatttaattaatacaaaatcagctggcaattatgtagttaaaaagggcgatactctagaaaagattgcaaaaagaaatggtactagtgtcgagcagcttgccaaggataataatttaaaagataaaaataaaatatctattgggcaacaacttaaagtaaactctgatgtaaaatatatagtaaagcaaggagatactttagaaagtattgcaaaaagaaatggtactactgttgagcagcttgccaaagataataatttaaaaaatattaatagaatagccattggacaagaacttagagtacataaattcctaagacataaaccatctaatagtgctttaaaggatatttttggttctttaggattagataatataaatttagatttaataacattttccaaaaatcatacagctaagcctaaaggcagttctagtaatacaactagtaaaagtaaatcaaatttaatagagttgagaacaccggtaagtgctgaagctgtaaagccaaaaaaacaaactaaacctgttatagaacaaaataaaacgcaatcaaacgggaataataagactgtaaaagtagatgtaacagatggcatggctgttatttatacatttcaagatactgaatatggaccacatgatgcaccaaaggtcggttatacagttttttatgatcacttaggtaataaattatacagttttaaaactggtagtagagtatcaagtaaatctaaaaaaaatgcagatggcccttttagtggtttctatacatatattgctggaggaaagcgaaatagtaagttgggagctgcctatggaactacaaaaattatgaccacagatagccgtgcaagatgggtacatggcgggggaagcggtttaagtgatccatatgctgagaaacaaggttggagagtcactatgggttgcacaagagcacaaaatatagatgttgaaaatttggcaaaaaaaattacagaatttaaaaagcaatatcctaaaataaagatcaaatatattcgagatagtaaaggaacttatcctaaatga

SEQ ID NO: 51703 - DNA, 402 bp, Acinetobacter baumannii
atggcgggtagccaacgcttaaagcgaatggcggattcagtacagcgtgagctgtctgatctaatccgtcaggagttaaaagatccgcgtctgggtggtctagtgaccatctcagccgtgaaagtcagtgcggatatgggatacgctgaagtttacgttactgttatggggcgtgagctaggtgatgagcagagtgaagcagcaaataaagaaactttagatgtattaaataaagcttctggtttcttgcgtcatgaacttagtcgtcgtatcaaaacacgtattacgcctcgcttacgtttccattacgataagacgaatgcatatggtaattatatgtttggtcttattgaaaaagcggtacaagatttaccggaacgtaagtcagatgacgaagagtaa

SEQ ID NO: 51704 - DNA, 1320 bp, Acinetobacter baumannii
gtggaatatggacaatcaacatcccgtttacgtgccatttttaatgtgaccagtggcaacttcctagaacaatatgacttttttctcttcggtctgtatgcaaaagcgataggtgaaacttttttccattctgatagcagctacgccgcgctaatgaaaacttttttggtatttgccgttagttttttaatgcgaccaattggtgcactcgtcttaggtccatatgtcgatcgaattggacgccggaaaggattgatggtcaccttaagtattatggcaattggctcattgttaattgcactaacacctggatatgccactatcggctttgcagccactgtcttaatatttgttggccgtttagcccaaggtttttcagctggcgttgagttaggtggtgtttcggtttacttatctgaaattgcggaaccacataaccgtggttttattaccagttggcaatctgccagccaacaagttgctgtaatttttgctgctacattaggctatttagtcagtctagcctttacaaaagctcaagttgatgcttgggcttggcgtattccattttttgtcggctgtgcaattattccgtttatattctggctacgtaaatccttagccgaaactgaagctttttcatctcgaaaagagcatccaactactagacaaattatgtcaacgcttgcagcgaattggaaaattgtagttgttggaatgtgtatggttgcaacaaccacaaccatgttctatttcattacagtttataccccaacttatggaaaagaagtcctacacttaacaagcacagaaagcttatttgcaacagtgatggtgggagcaagtaattttattttattacctattggtggttatttatcagataaaattggccgaaagccattattaatcaccacaaccattttaatttttgtaagtgcctatcctttattaagttggctaactcaaaacattagtttggcacacatgttactttcactactatggctatctctgctctatagtttctataacggcgcattggttgtttccctaactgaaatgatgccaagctctgtaagaattgctggtttttctgtagcgtatagtcttgccacttctatatttggtgggttaacacctatgattgccacatatcttgtacaagaatctggcagcaaaagtatgcctgctttctggttaatgtttgccgcaatcatcagtttgattgcaacgcttattgtatttcgcaatcgacaaactcttgctacaaaatcctcttcaattgaggatcaatttgtacaaccaacagttcaataa

SEQ ID NO: 51705 - DNA, 516 bp, Acinetobacter baumannii
atgaagatggtcatgaaacaaaaagagcacgttaaggatgctcaaaaaaactcaagcgtagctttcagactttcggcacgttcgagcggtgctcgaatgaaacgtgcctcaggctttacccttattgaagtcatggtcgtgattgttattttaggtgtgttggcggctttaattgtgccgaatgtcatgggccgtagtgaaaaagctaaaatcgatacgactcaaattaccttgaagggtgtagcgggtgctttagatcagtacaagcttgataacgggcatttcccaactatgcaagaaggtggactagatgcacttattaaccaacctgctacagcaaaaaactggatgccaggtggttatgtgaaaggtggttaccctaaagacagttggaaaaatgatattcaatatgtcattcctggaaaagacggccatccttttgacctatattcatttggtgcagatggtaaagaaggtggtgaaggcaacgatgccgatatttactaccagccttaa

SEQ ID NO: 51706 - DNA, 261 bp, Acinetobacter baumannii
atgaaaaactcaaaatctttatctagttttagaaaacttccaaatcgctacacctctatcgttttaccgtttcttttatcgatcattatgacttttgtggtttcaatgattagtacattacgaagtttgggattagaagaattttccctatatgtatggatgtctgcatgggcaatttcttggataatcgcttttccaacattacttttagtcttaccgatcgtccgtaaaatcacgacactattggtacagcctgcttaa

SEQ ID NO: 51707 - DNA, 258 bp, Acinetobacter baumannii
atgtcagaacaacctatttcacctactgtacaactcaatacgcgtggtttacgttgtccggaacctgtcatgatgttacatcaagccattcgtaaatctaagtctggagatgtggttgaggtcttcgcaacagacaattcgacttcgtgggatattcctaaattttgtatgcatttaggtcacgagttgcttttacaagaagaacgcttagatgaaaatggtcataaagaatttcattatctggtgaaaaagggttaa

SEQ ID NO: 51708 - DNA, 528 bp, Acinetobacter baumannii
atgaaaagttctcatctatgcttagggcttgctatttgtgccttatttaattcaatcgcatatgcaaaaacctgtgaaattcctatacaaactatgagtgtcgcaggtttaaaggttgggcaaaatattcgtgagtttcaaaagcttcacccttcagtaaagcaagtggtgttaggaggagatagttaccatttagagtttgccgatggggttgatgcccagatcaaaaaaacaggcgtgacttggattgatcatattgcttacgatctggatagtgaagtgattacttcatttagtttaagttttcttgatggccctatggcaagttatgagacggatttagatctttttaaaagtagaattctcaaaaattttaaggtgccccaaaaaggctgggtgcaaaagaacaataaatatatttatcaatgtgatgattaccgaattgagattcatcaggactatggtgctgcacatacagccattgggccaacagttatggtatttagtaaaaaatcgaagatattctaa

SEQ ID NO: 51709 - DNA, 1251 bp, Acinetobacter baumannii
atgacaacagctcaaattgaattagaagaactatcggtaggcgcggattatgagaaggttgcaaacagatttcgtcccatttttgaaaaaattgcgcaaggtgcaattcaacgggaaaaagagcgaatcttaccttttgaaccgattcagtggttaaaagaagctaagttgggtgctgtacgagtaccccgtaaatatggtggagatggggtttcattacctcaactgttccagcttttagcagagttagcagaagctgattccaatattgtacaagctttacgtggtcattttgcatttgttgaagaccgtttggttgctcataaagagcactcacaagaggtctggtttcagcgttttatacaaggcgatttagtcggaaatgcatggacagaagttggaaacgtacagattggtgatgtcgttacacgtgtcaccaaagacgcttcgggtaacttagtggtaaatggcgaaaagtactattcaaccggtagtatctttgcagactggattgatttatttgcttacgatgaggtaaatgaccgtcatgtgattgctgctatttaccgccatgaaacaggtgtaagtgtgcttgatgattgggatggctttggtcaaaagacaaccggcagtggtactttaaaagtacatcaagttcatttgccagcttcaaacctcattccatttgatcaacgttttaagtatcaaaccgctttttatcaggtggtgcatcttgcaacattaacaggtattgcgcgcgctgcagtcgagacgttcagtcaggaaattcgtgaacgcaaacgtatttttagtcatggtaatggtgacttggttcgtcacgacccacaagttttacaagtggtcggtaaggcctcagctcaagcttatgcaagtgaagcaatcaccttgaaaacggccgaggcattacaaaaggcttatgaaagccattttgccgagtctgaagtgaaagagcatcagtttaatgtagatgccgagcttgagtcggcacaagggcaggtcgtgatttccaatttagtgcttgatttaacaagtcagttatttaatgcattaggtgcatcagcaagtagccaagcgaaacaacttgatcgtttctggcgtaatgcgcgtattgtgtcttcacataatccgcttatttataaagaaaaagtgatcggagattgggaagtaaaccgtacggatttaccttttgtctggcaaattggagcaagcccgcgggcaaagtctgcataa

SEQ ID NO: 51710 - DNA, 693 bp, Acinetobacter baumannii
atgagccgttctattcgtttattaaatcttttacagcaacttcgtgaatcccgttatccagtgactgcacaagtcttggctgagcgtatgggaattagtgttcgtagtatttaccgcgatattgatagtctacgagcccaaggtgtgagaatcgatgcatcagcgggtttaggatttcagcttaaagaagacatagtattgccaccaatgacgctcaatgaaaatgaagttgaagctatttttctggcgttgtattggttgaagagtgtacccgatcaatctttaaaatcggcttctacaacaatcttagctaaattaaattctgtgctgcctgaacatcgccaatatttattacagcaaaccaccttaagagcgtttaacacatggctgcctgtagataaaaatcaggttgaacaagtacgtttagccattcggcagcaagtcaaaattacaatgcattatcatgatgaacaacaacgaagtagcgttcgaaccttgtggccttttgccttgggatactttaatgacaaaattgtgttggccgcatggtgtgaattaagacaggactttcgacattttagaatggatcgtattcaacacttaagtttaacccaagaagtatatccatcatttaagcagcaactcttccagcagtggtgggcacaagaatcgcagactactgacaaaaactga

SEQ ID NO: 51711 - DNA, 312 bp, Acinetobacter baumannii
atgatgaaaattattgcttcacttttcatattggtcggcttagtcgccgttgttctctattttaagccaacaaacggtgcatctgaggtgttcaattctgctttgaacaagtcgaattcatcacaatcagacacttcatctttactttctaaacttaaggagcctgctcaacctaaaaacttatctttaaattcaactcaacccaaacccgtatcagaagatactgttcctttttatgacacaaaaagtgatccttcgattcaaccgattgatccagaaaaagatccagcaaatgaaataaaagcgaaataa

SEQ ID NO: 51712 - DNA, 657 bp, Acinetobacter baumannii
atgatgtatatgtctttgaagtggtctggtcttttaattaaacatttaggtttggcagccatcttatgtatggcgctgagtgcctgtgatgcaaatcatgccgattctaaggatcactcagcgttagcaacgacttctaaacatgataatagtctagttaaaagtacgactgcagttaaaacgttggatgatgcagcagggcgaacttttttacccgatggtgcaccagatcagacatctaaaatatctgaatcagatcaacaatatgcaggtcgctatcatacccgtatttcatgtgaagataattttgccgattgtgaaacaggtgaagcggaatatattttaaacttattacctgatggcactgcgtattggaacgttgttcattttgggcgaatcagtaataaagatggtgcaaaaagtgcagtcatcaatcgattatgtccttcattaaggtggaaagttgattctgctgctcatgagttaaagattcagtgtccaacatcagatgttaacttctactttaatattatttcgaaacagaaattaatcgtaaatttagaaaaactgttctatagcgattatggtaaaaatcgtgaatttttagaacaaaactattttgttcctacaaaagcttatgtacttaataaagaataa

SEQ ID NO: 51713 - DNA, 2343 bp, Acinetobacter baumannii
atgcatttaaaatatctcagtttatgtttatttagtttgggcttgactgcatgtgcacaacacggcgtgcgtccacaagtggcatctgcgaatttagagcaaaaggccattcaaagcgttaatgcgatgtatgaatatccaagttatgactatcgcggaaattttaaaatcacggttgatccatcacaaataaagcaaaatggaaaagctgaaaatagtccaaaacttgacgccgaattacaaaagaaagttgatcaatatttacgtgagcaaaaagttggtttaagtaaagctcagaaacagaccttatatgcagctattgcaaatgaacaaggtgatttggggtcctcagcacgttctgaaaaagtaaacgccgtattaattaatttattaaatgatcttcaatttagctatgatggctcaattcattaccgtcaaaaaatgggttcatttaaccttactgctaaatatgaaaaaccaacgctattggttcaggcaaaattgccaatggtgcttgatctggaaaattataagttttacgtaaattacttcggtttaatgccgtatttagtcaataaagaaaatcaaaataatttggcttatattgatttttcaaaatataaagacttctttaaaaatgtcgatacgaagaagtttattgaatatcttaaagcttctagcgcggtttcttatcgtttggctgacccgcaaaacttacaacgtgtatctttgacagagactgatcgtaaggctggggcagttgacaaaattcgtttgaaaaccaccattgaagagttgcttttagaagttgagctgtatggtcaggtcaatgataaatatcttcaaaaaagtgtattaggttttgataaccaaaagatggctgaaaaagtagcaaaagagcttgccgcttctgaagcgaaaaaaggcgctgttaataaagaagaacaaaaggtttcttctgaagatgcggctgctgtaagtcaggaattgtatagtttaatcaatgcacactttgatggtgctctttcatcaaatgatgcaggtgaagacaatttaagtgcggcagcacaagctccggcagcagcagatgcatcagtttctgaagatcaagatgtcagtgaagaagcagctgcagatggtgtacaggatgcacaaggtgaagaggctgtaacgcttaccgaagatcaatgtattgaattaaagtcactgaaaaaacctgttgctttaggtgatattaattattgccaagtctacggtatagatgtactagaccagagtgctgcaagtgctgaaaaagttcaaaccaagtctcgccgagacgctttaaaacaaacttttgaagcttataaccaaaaacagtttatcaatgatgaagcattcaaagctttatggctaaaacacaaggccgagattgagcaagctttacctaagcaaagaaatccaatcacgattgatgtggctttagatgataaaggtcgtgcagtgaacatgacctatgaggttgcttatacgccagccgagtttaaacatagctttaatattaaagcggacatgcaaattttaaattacggtaaagcaacctcaattgatcaaaagcagcttaaacaggccaagtctgtagctgaagcaagtaaaggttctatgctcgaaaactttattaaaggttttggagaaaagcttggacaaggtgatgttttagagcatccggtaggcacacatagtgatgtacaagatttagatgcaaatctggctgtactggctgataaaacctatgatgcaacgcatgcttatgacaaaacttataaagcagtatttattgccaaattaacagctgaaaaaccgtcatatatcaaatattactctgttcagcagctacaagaaattgcagaggtttatgcttactggttctcggaagaagatacctataaccctcaaggaaaagctttagagcgtattactgctttacagaaaaagcatcatcttgaacaggatgaacagtttgaccatgagttagggcgtgctgtagatcatatggtaatagagactatgcaaggtaaagcagggcgtgaagcttggcagaaactacagaagcaatataaacaaccagcccaactgttctcaaagcagtatcaattagagtttgaaaaacaaaatggtgtttctgctgaagaaaagcatttgttatcagaaacggctgatattttaggaaacgtttatgtggccgcgcgtaaacaacagcttacggaaaaaacaattcagaagttaaaacctgaacataatgaatttattgattatgaaattttccgagatgtttataagcaaatggtcgctgctaaaaaatag

SEQ ID NO: 51714 - DNA, 729 bp, Acinetobacter baumannii
atgaagtcgcatttacgtgttcactattttcaacatattgctggcgaaggttttggaagttgctattcgtttttaaaagcgcatcacgccactattagctctacagaattctttgcacttcccgtagatcggtcacttgaaatagaagctttacctcgtattgaagaagttgacttactactaattatgggtggaaccatgagtgtaaatgacgaggcaaactatccatggcttaaaatagaaaaaagatggttgcgtcgatatttggcagcagggaaaccagcaataggtctttgcttgggtgggcagctaattgcgaatgcattgggtgcagcagtaagtcgtaatcgttatcaagaactaggatggtcgacagttcaaagagttgcaaacttaccacaagaaagttttccgctacctgaagaaatcaatgtgatgcagtggcatagtgaaacatttgaaatacctaaaggagctatacgtttggctgagagcattgcctgtcgtaatcaaatgtatcagattgggaaaaatgtattaggttttcaatttcatccggaaatgacaccagcagctttacagcttttactggaaaatgaagaagagctatctatttttgacggagaatatgttcaatctgcacatgaactgcaatcttcagaagcacagaaatttgaacaaggtaatcaactcttaaataaagcaattgagtttgtaataaatgcatag

SEQ ID NO: 51715 - DNA, 390 bp, Acinetobacter baumannii
ttggtcaaccaattgaattttaaactgaaatatagccgttttgcgattatatttcagttttttattggcttaagtttggtagttctattttatcaactcctaccaatattatggtggttggttacggtcagtttactattcataagttttattttctttttaaagcggccacagctcgctcaaattgctcatttagatcaaaaattatggtcacttagctttcattcagaacaaacaatttctcgggtagagattttaaaaataattgattatcagattttcatagtggtctattttgaagggcataagacattaacttctgttatttggtttgatcaaatgcctctatctcagtggaaacaacttaaaaccttagaaaaattttattaa

SEQ ID NO: 51716 - DNA, 2013 bp, Acinetobacter baumannii
atgcagctcaaaacacagctttttgttctctcattattatcactttctattcagcaagtgatggcagcggatgacacaaatactaaggaagagaaacctgccgaattggcaacaattacggttaaagcagaacccacagcaccagccaataatacgtctttagcagaaggtgcaacgagtattggtaatgccttaaatggtcaggcaggggtttattcagctcaatatacaggaggggcgagccgtcctgtcattcgtggtcaagacggtacacgtgtcaagatcgtacaaaacggtggagatgtaatggatgtttcatctgtatcgccagaccatgccgttacggttgatccaaactctgcccaagatattcaaatattaaatggtgctgaagcattattatatggtgcaggctctgtggggggactggtaaatgttgttgatgaaaaaattccaaccagcatgccagacaagggctatcaaggaaaagctggtgtccgctacaactcaggtagtgatgagctactatattcagggcaagcgacagtcggtttaggggaccatgttgcgctacgtgtcggtggtttaaagcgcgatgcgaatgactatatcttgcctagagatttacaaacagacgagcgtcgtcaggatagcacttttgccgactctaaaaattataatgctggattatcttggattggagaccgtggttttatcggtgcttcatttagccagcgtcatgatcaatatggtattcctgccgataatgagctttttggttcatgtgaacgtgatggcttgcaccttgtgtgtggaactgatgacccatcaaacgatcatgagcatgagcacgaacatgatgcctcatggattaatctcaaagaaaagcgttacgatttaaaaggtgagttaagagacccgtttgcaggttttgctaaagttgcagcgcaagcaagctataccgattatcaacatgaagaaatgcataatactgatgtcggaacaacttttaaaagcaaagggattgatagccgagttacattagaaaataatgcttgggcgggttggacaggacaaattggcgcgcaatatacccaacaaaaactgaatattgttggtgatgagtcgattatggatccaagcaaaacccaacgttatagcgtatttggtttgcaacaaaaacaaatcaataacgtcaatcttgcagtttcttcgcgtattgaccatcaaactatcgacattgagtcagatcaaaagaattacacgggtactggatattcggttgctggtacagcaagctgggaattcattcctcaatacaaattgtccctcacaacatcacaccaagagcgtttgccatttgctcaagagttgtattcggacggtgtgcatatggcgaccaatacttatgagttgggtaatgatgacctgaagaaagagcgctcaaataatgttgagttaggtttgcactttaataatgaccttttgaaatacaacgtaagcgtgttccataaccgttttgataatttcatttatgctaatacattggatgagtttcaaggcttccgtcttattcaatatagtcaagatgcagctaagttctacggtgtcgatgctgacctaagctaccaaatttcacctgtatataatttagggctatttggtgattatgtgcgcggcaaaattgataatgaaaatgcaccacgtattccgggtggacgtttaggtactaaagttaaagcagattttggtgatggatgggatggttctgccgagtactatcatgtgtttaaacaagatgatattgctaattatgaaaccaaaggtcagagctataacatgctgaacttaggcgttggttataacggtaaatatagcaacattggtgattaccgagtgttcttgaatgccaacaacttgcttgatagccgaatttatcaacatgagtctttccttgcaaatgttccacaagtcggacgtaattttactgtcggtgtaaactttagtttctaa

SEQ ID NO: 51717 - DNA, 375 bp, Acinetobacter baumannii
atgaaaaagccaatcgttcttgtactttcaactttaatgttgggtatgtctgctactgcgatggcggattcaaataatcgctgggataactatcacggtaaagactatcgacattatgaaaaacgctacgatcatcgttatgatcgacgcgatgaccatagaccaccggtttggtcaaatgcaaaccgtggccatgaatatgttgtgttcaagcgaggggagcgtattcctgtagaataccgtgataaccgttattttgtttcggactggcgtgcccatcgtttatatgaaccaccacgtggatatcactgggtgaaaacaccgaatcaatatttattagttgattcacatcaccaagtttatcgtgtgcgttaa

SEQ ID NO: 51718 - DNA, 378 bp, Acinetobacter baumannii
atgaaaatgacggctaaaatcgcattattcagtgcagcaattgtaactatgggcagtttggcagcttgtcaatcaaaccctcaaacgcctaattcagaccatcatatgatgaaagatggtccacgtgatggtcatcaccgcatgaaacatcgtgaatttacacctgagcaaaaagcagcgtgggaacagcaccgcgcagaacgtcaagctcgttttgaacagattcaaaaagcatgtgaaggcaaggcaaatggtcaagctgtaaatgtccaagttggagatagaacacttgaagggacttgtaatcttcgtttcgaaccaaagcgtcctcaaccaccaatgaatgctcctgctccagtagcaccacaagcaaaataa

SEQ ID NO: 51719 - DNA, 510 bp, Acinetobacter baumannii
atgccaagtttgtttatggtaatgttgggtggccgtcatgcgcgtgccaatacagaagtccatgacatcgttatggctgtaggggatactttagaagaagtttaccctcaacttaaacaggcttggtttggtgaggctcaagggttacatatcgatgcttgggccaagctttcaggggttagctctcaagggcaaaactatcaaatccagtttaccgatgcagccccatcagcttcagatctaaagttatatttgattaatctgggtggatatacaccccaagcttttggtgagttgcatagttatcatttggttgttgcacctgatgcggtaagtgcaaaacaattaggtaaacagtttatagatcaagagtggcataaaccacacactgaccgtgtagtggatattgatgattgtattcctattgaccatattgcgggtcgttatatacagttagtgcaaggtgagttcaatccaacacgttgggaaaatacttatttacttctttaa

SEQ ID NO: 51720 - DNA, 213 bp, Acinetobacter baumannii
atgggtcttctagatgaagtaggtaaaattgctggtgcaattatcgcggaacaaggcgtcgataaattagatccagatgcaggttttctagaaaaagcagctggtgcttttgctggatatgaagcagcaaaaatcgctgagaaaaaattggaaaatcaggacagtaacgagcaagaatcagagccagaacaggcaagtgacgatgatgcttaa

SEQ ID NO: 51721 - DNA, 354 bp, Acinetobacter baumannii
atgaatcagctttttgtatatggaaccttatgtcctaataaagcaaatgctcatattttagagcagattggtggaagctggacgaaagctagtgtacgaggggtaattcatattttagattggggcccagacaaaggtttaaaagcgttagagttagattcgcaagcagattggatagaaggttatgtgtttagcacagaaaaacttgctgaaaactggcaaatgttagatgactttgaaggctttcaataccaacgtgtaatcgctgatataaaactagagtcgggtgaatatattaaagcctggacatatcaaatgaatgcacaggctaatacttttgaaaacgataattaa

SEQ ID NO: 51722 - DNA, 633 bp, Acinetobacter baumannii
atggtgtctgctcaaaatttattagaacgtttgtatcccggaagaagggctgcgttaaaacgacaaatattgttagatgctttagattgttttttagagcatggcattgaagcgactagcattgaaatgattcgtgccaaatcagaaacgagtgttggagcggtttatcaccattttaaaaataaagagggagtcgtcgcggctttatttttttcagctttagatgatcagacagcattaagagatgaatatttaaaacaggccaaaacattacaagaggtggtatttggtttaattcatagttatgtagactgggtaagtgaacaacccgaatttgcaaaattcttaattactgctcatttcaatattatgcaaggggaagaacagcaacaacttgctcaaaaaaataaaagtagaaacaaaaagatattcagcttgattgcagattttgaagaatttaaagctttccatatgattccacatgaacttttgctgtcactggtcattggttctacagaaagttattgtcgtgcgtggttatcacaacgtgtaaagtctgaccctaaaatctataaagacttgttagccaaagcagcatggagttcattgcaagatttatgtttagaacaataa

SEQ ID NO: 51723 - DNA, 1209 bp, Acinetobacter baumannii
atgaacaaaccgttgtcttcccgttttttattaaaatcattcggtgtagtcaccgtatgcatgagtttagctgcttgtggagataaagcctggtggtcaaaaaatgatgagcccgatttagaaagtcagcaaattaaaaagttaattccagcacgtgtgcatgatcgggagtcatgggctaaagatattgacgatattatgcaggacttaaaaattcctaaaaccaaacaaaatgtttgtagtattgtcgcgattgtagatcaggaatctaactttgttgctaaccctgtagtaccaggtctaggcaaaaaagcagttgacgaagtcagtacccgtttaaatgaaaagtttgaagacaaacttggccagaaagtggggggtactgtcgcaggttattttgaagaagtattgaaaacccaaccctctcctgacaataactatatgagtcagatgcgtaaagtcaaaactgaaaaagatctcgacttactttatcgtcaaatttttgattttatgactcaacattatcatgtcagtgcgttaactggtgcagctaaactggttgggcaagatattggtgaaaaaatgaatccaatcaccacattgggttcaatgcaagttcatattaattatgctaaagcgcataaacgttctagcatgaatattgcagaccttagaaatgatctttatacgcaatatggcggtctatattatggcattcatcgcttgatggtatacccagcagactatgataaggccatttatcgttttgccgattataactcaggtatgtattctagccgtaatgctgcttttcaaagcatgctcgatgcccttactgataatgagctcaccttagatggtgatttactactttacgataaagctggtagtccactcgcagttcagagtcagtcagaaaaagagttaatgaaactatttactgcaaataatgtcttaattacaccaagacaacttcgcgatgatcttaaattagaaaaagagaaaaagtttgagaatacacaaacttatattgccttaactaaactctataaggcaaaaacaggcaaagaacctatctatgctattatgcctcaagtggtaatttctgggcctaaattaagtcgtgactataatactaactggtatgcaacccgcgtaaacggacgatatgaatcatgtatgcaacgagcgaaacgaataagacaataa

SEQ ID NO: 51724 - DNA, 414 bp, Acinetobacter baumannii
atgatcgtggccgttcaagtggccgaggtcgtggtcgcagccgtcgtgatgatgatgacgaagatgatgatcgcggtcgctcaagtggccgaggtcgtggtcgcagccgttatgacgacgacgaagatgatgatcgtggccgttcaagtggccgaggtcgtggtcgcagccgtgatgacgacgatgaagacgatgatcgtggccgttcaggtggccgaggtcgtggccgtagccgttatgatgacgatgacgacgatgatcgccgtggtcgttcagatggccgtggacaaaactctcgtaatcaaaaacgcgatgcttatgggcgctttacgtcttaagcaaccagtttttgagaataaaggaggcattatgcctcctttattttttattatttttaaacttatgaatgagtaa

SEQ ID NO: 51725 - DNA, 183 bp, Acinetobacter baumannii
atgtttttgtttattattgatttgtacattgtgaaagtttatgttattcacattgatcttttaaaggcatttgtaaaaatatattattatgtaggattgagtaataataagtatggccagtatttaaaaagtaaaactatagaatattttataaatattttaattgataaaatctttatttaa

SEQ ID NO: 51726 - DNA, 402 bp, Acinetobacter baumannii
atgcaattacctcaaactcagtcatcgctacaatacattcatatttctgtacctgaaattttacttagcaatatacaaattaaaaatatttggcaagattataaccaagaatggagctatagattagatccacctcatgcaagccatcctttccaaagagatttacatattattaaatcaaaaaacattgagaaagaagatataaaagaaccatttgataatttagtagctaaaaataaaccagaattaaaatctatagtagaagcagaaaccgtaataaaagaaattttatatttatcggattatatatctatagaaaattggttagaggatacaggtaatcgatcaattattgaaagtatgattgataaaaacaaggttaaattattggatattatttaa

SEQ ID NO: 51727 - DNA, 273 bp, Acinetobacter baumannii
atgttaggttttctgaaaattatgttgcccttactattgattgtgtttttattgatgggaatatgggtcagtattttacacttcccatgggaatggatgacttatgtggtgatgggttttgaggtgtttgttgctactttgattttgccctttgaatatcagactggagcgagtagtagccctattggttttattcatataagtgcttattttgcagtgatattaggtattgcacgattagtcgtgtgggcgtgggtaaaatttgttacttga

SEQ ID NO: 51728 - DNA, 1308 bp, Acinetobacter baumannii
atgctagaagtactaaaaaacacaacatatcggcatttgtttttggcccaagtaatagcgctaatcggaacggggttaatcacaatcgccctagctttacaggcgtacgatattgcaaagggggaagcagcccaagttcttggtattgcattggcaattaagatgattgcttatatcggtgtagcgcctatagcatctgcatttgctgagcgattaccaagaaaaaaagtattggttgggctagatgttattcgagcattaacagcattgtgtctaccgtttgtgacacaaatttggcaaatttatattctcatttttattttgcaatctgcttctgctgcatttacaccaacatttcaggcaatgattccagatgttttacctgaagaaaaagactataccaatgcgctatcattatcacgattggcctatgatttagaaaatattattagtccgatgctcgcggcatttttattaactttgatgagttatcacaacttatttttgggaacggtattaggttttatcggttctgctttgtttgtggtaagtgcgaaattaccagttgccaaagtacctgcgtttagaggtgtttatagccgtattaagcagggagctaaaatttattttaatacgcctagacttaaagcattgcttgctctcaatttagcaattgcgtcagcaagcgctgtagtgattgtaaataccgtggtattggttcaatcgacatttaagctaactgaaaatgcgactacttgggcttttggtttatttggatttggttcaatgctttcggctttcattttgcctaagatattggataagttcccagatcgatcagtgatgttgacgggaacaacaattcttgtaattgggctgttaagtggttatttcattacatcttataatggtttgcttgtactttggtttgtgcttggtattggatattctgtttcacaaacacctacaggccgtttgattcgaaaatctgcatcgagtgagagtaggacctctctattcgcagcgcaatttgcgttttcacatgcttgctggttagtgacttatcccttggttggatggctcactactaacataggaacattacaaacttttataccgatggcagtgattgcaacgatttctttattacttgcaatgcgtttgtggccatcacaggatgaggctcttttaccccacagtcatgatgatttacctccagatcatgagcatttgcagcagcatcgaatcaatggagtacacgtccatgaatatattattgatgactatcatgaaaagtggcctaaataa

SEQ ID NO: 51729 - DNA, 639 bp, Acinetobacter baumannii
atgtataacgctgaaattccaaaagatatcgaattaccttcatcaaaaaagttaattaaatcaacagcaattgctgccgtaagtgccgttattgtgctagttacctgtgtcatgcctgcggagtatgcaattgatccgacaggtatgggtaaagtgcttggtttaacgaaaatgggagaaatcaaacaatcactaactgaagagtcagaaaatggtatcaatgctgcacaggcagtgaatagtgttgaacaaatatcagtagaaacttcgactcaaacggcaactgataatgctcaaatgattatgcctgctattaataaagagagcattagtattgagcttaaaccgggccaagcaaccgaagtgaaactgacgatgccacaaagtgcaagtgtcaactttgactggaaagctgttggaggtggtcttaattatgatacccatggtgatccagtgaacgctcctaaagggttctatcatggctatggaaaaggaaagaatgaaacaactcagcagggtgtcttaaaggcagcttttgatggcaagcatggttggttctggcgtaaccgtacggaaaatccagtgactgtaactctacttgtagaagggcagtttagtgaaatgaagaaagtcttttaa

SEQ ID NO: 51730 - DNA, 714 bp, Acinetobacter baumannii
atgcaaattattgcttcacacattgtgaaattaagtgcttacataaagctattacttgctttattcattacattggtaagccctacactttttgctcatggagtagcggaaggtgataagggctatattcaagaaatttatggcattcatgtgattccattcatctatttgggtgcgaagcatatggtcactggatatgaccatttactatttcttgttggcattatcttcttcttataccgaatgaaagatatcggcttgtacgtcagcctatttgcacttgggcattcgattacgatgctggtgggtgtttattacaatatctcgataaacgcctacatcattgatgcaatcattggtttttcgattgtttataaggctctagataacttgggggcttatcagcgttggtttggttttcaaccaaacacgaaaatcgcgactttaatttttggtctgattcatggttttggactcgcagtaaaaattcaggaatatgaagttccgagtgatggactgttggcaaatttaatctcattcaatattggggttgaattaggccagtttatggctctgtgcatcatcttgttattaatgacgttttggagaaagacaccttatttctttaaaacagcttatcaaagcaatgtcttcctcatgttcctcggttttttacttgttggctatcaacttactggcttcattactcaataa

SEQ ID NO: 51731 - DNA, 372 bp, Acinetobacter baumannii
atgacaaatatattgcgagataaacaaaacaaatttgtgatgatgttgctagtctgcatgatcagtctcgctttatgtttgcactttaaagagcatgtaactgaaaatgaatttcagagacacgtttcaattgatgcaattaactctcaccatcatgagataagccaacaacattcacatagtcaccaagataattactatgaacattttgttggctatgacgtacttaaatcggccgctttagctcatctcttaaaagggatttcgattttagattggtcaaaagaatatgtttatctgatggtgagtcgtatttttaaaccgcccaaaaagttaatggattttcaattcattttaaattttggagtttga

SEQ ID NO: 51732 - DNA, 3129 bp, Acinetobacter baumannii
atgtttgaccagattgttaagctctcgattaagaatcgttggcttgtacttatcgtatttttatttgttggtgcattaggggtttataactatttcaagttaccgattgatgcagtccctgatattacgaatgtacaagtccagattaatagtgaagctcaaggactctctccaatggagatggagtctcaagtgacctatcccattgaaactgctttggcaggtattccaaatttagactatacacgctccgtatctcgatatggtctatctcaagtaacggcaattttcaaagaagggacggatatttattttgcccgacaattagtcaatgagaagctacaaggagtgacaccaaatcttcccgttggaattgcaacttctatggggcctgtttctacaggacttggcgaaatcttcatgtataccgttgaaaatgccaagaacaatcctaatccactttcaccaacggaattacgcaccttacaagactgggtgattaaacctcagcttcgaaatgtagagggtgttaatgaaatcaataccattggtggttatctcaaacaatttgtagttcaacctgattatgcttatttacgtagcatagggctggatcagaagacaattttagaggctatctctaagaacagcatgaataaaggctcggggtatattgagaaaaatggtgaacagtatttaattcgttctgattctcaaattaactcgattgagcaagtccagaatatcccgattacgacgagcaatggttatatcctcagattgaaagatgttgccaaaatatctattggtcacgaattacgtacaggtgctgcaactaaagatgggcaagaaattgtactgggtacagcattcatgcttattggtgagaactcacgaaatgttgctcacgctgttgatcaaaagctacaacaggttcaaaaatcattaccagaaggtgtggaagcaaaagctgtctataaccgtacaactttggttgatgcaacgatacagacggtgaaaaagaatcttttagaaggtgcgattctggtaatcgttgttctgtttgtatttcttggtcacttccgtgctgcgctgattaccgctttggtcattcctttatccatgctgatgacaatcacaggtatggtgaaccagaaaattagtgcaaaccttatgagtcttggggcactagatttcgggattattgtagatggtgctgttgtaattgttgaggcctccttagcaaagttggcaattaaacaaaaagagcttgggcgagttttaacaaggcaagaacgctttacgactgtgtttgaggcgactaaagaatcccgcaaagcgattctctatggtcaattgatcattatcttggtgtatctacctgtaatgactctgactggtgttgaaggaaagatgtttacaccaatggctgcaacagtggttatggctttagtggcagcaatgattctttcaattacgtttgtccctgcaatggtggcattggtcactactggtgaaattaaagaagaagagtcaaaaatcgtccatggcatcaaaagattttataacccaattctagattggtctttaaatcacagatatttgctaatcgcttttgtctctattttctttgtttttagtgcaagtctttcgactcgtttaggctcagagtttataccttccttggatgagggagatgtagcactacatgccttgcgtatccctggtacgtcgttgactcaagcaattgaaatgcaatacacgttagaaaaagagattaagaaaattccagaagttcagactatttttgccaaagtggggactgctgaaattgcgactgatcctgttccacctaacgtagcagataactttgtcatgctgaaacctcgtagtcagtggcctaatcctgataaggaaaagtctgcggttgttgctgaaattgaacgcgtatctaaaggcgtatatggaaacaattatgagtttacacagccgattcaaatgcgttttaacgaacttatttcaggtgtccgaacagatgttgccgtaaaaatttatggtgatgatttagagcagttgcttgaatcagcaaacgctgccgctaagattttagagggagtcaaaggtactgctgatcttaaagtcgaacagatgtctggtttacccatggtttctgttgagctgaaaaaagacatgattgccaactatgggcttgatgcagaggatgtacaaaaacaggtttctagcctaatcacaggtgagacagtaggtaaggtgtttgaaggagatcgaaagttcgacattgtggtacgtatggatcaaaactcggtaacagatctagaaaagctgtatcagattcctgtgagcttagctgatggttcgagtgttcttttatcagaattgatcgagttaaaaaacgttcaaggaccaaaccagatttctcgcgaaaatggtaaacggcgtatcgtcattacagcaaatgttcgtggaactgatattggtagttacatttcagaagcacaatctaagctgaatgctgattttaaattaccagatggttattggctgacttggggcggtacgtttgagcaaatggaatctgcttcaaatcgtcttatggttgtagtaccgattgctttaattctgatctttgccatgatctatatggctttaggtaatgttagaaacagtatcttggtattcacaggtgtgccatttgcactaacaggtggtgtgattgctttagcactacgtgatattccattctcaatttctgcggctgtgggtttcattgccttatcgggtgttgctgtgctgaatggtttggttcttgtttcagccattcagcgacttagagttcaaggtgaaagtgtcattgatgcagtgaaacatggtgcaatggaaagactccgtcccgtgttgattacagctttagtcgcttcattaggttttattccgatggccttaaacgtaggcattggctctgaagttcagcgcccaattgcaactgttgttattggtgggattatttcatcaaccttactgactttgattattttgccaaccttatatgtgtggtttaaccaaggtaggtcaagaaaatcaaacgaagctgctaaacaggttgtttag

SEQ ID NO: 51733 - DNA, 1476 bp, Acinetobacter baumannii
atgaataaacaaaccaatacattgattgcaactggtgtcgttgccttacttatcgtcttatgtgcaattgcttggtataaatcgggcaataaaacacaagcgagcgcacatggtgaggtcgccgaagaaaaagtagctgtggctggagatgagaaagggcctcacggtggtcgtttatatcgagatggagatttctctgctgaggtcaagatatttgaggaaggagtggaaccacacctccgtgtttatgggtatttgaaagataaactacttaaacctgaagacttaacagcaaatatctacatcaaacgtttggatgccgagcaaaatattcaatttcaacctgagagtgattacttaattgggaatgaaattgtttacgagccacattcctttttaatgatgataaacgttgattatcaagggaaaaagcatacttggaaatgggatacgaaggaaggccgtgtcaccatgttggacagtagtattaagagcagtggattagagcttttaaaagttgaatcaaagatgtttgaaaatgctttggagttaaaaggcgaactgaagtttcctgataattttgaaagctttattacgcctaaagccagtgggacattgatcaaaacttaccgtaatctaggtgataaggtgagtcagggagacttacttgctgtagttcaaagccaagatgtaattcgtttgaatgccgatcgtaaagttgctttggacagcctacagtttgctcgtcaaaaaatggaacaggaacgagcgctatggcaaaagcgtgtatcacctgaaattgattatatttcagcaaaacgagactttgacgcagcacaaactcgtgcaaatgagttgaataacttaatcaactcttatggtggttctagtaatggtactgttgaagttcgtgctgcaatgtctggaacaatattagaagtccttggtgctgttggatcaaatgtaagttcttcaacacctatttttaaaatcgcaaatacttctcaacttttagcagttgttaatgttcccgctgacaggctaaatgctataaatcctaacaataaggttaaagttaaacctcaaagccctgtggatacagaagaagctttaggacgaattaaatatatcagtgatgtcattgatccaaagacacgtacagcacaggtctttattgaagtaccaaaccagtttaagtggcgctcaggacagttaatcacggcccaaatttttgaaaatcaaagtttgaagccgatggttgtgcgtgaagatgctctacagagcttccgtgattgggatgttgtattcattcgtgttggcaatgattttgaagctaggcctctggagcttggtgaaaagtacaatgggtatgtggaagttaaatctggattacgcgtaggacaggtttatgccgctggaaattcatatcttttaaaagcagagctagggaaatctggcgctactcatgaccactaa

SEQ ID NO: 51734 - DNA, 1200 bp, Acinetobacter baumannii
atgtctaaaaaatatcagatatttcttacctgtggatttgtagcaacagcagcaaatgtattcgcagaaacgaattatgcagaactacaaaagcaggtaatcgcaaatgatgctgtactcaatagcttacagcagtccgagcaagcttatgaaatcaatcaaaagtttgctggcagattaattaatccgactttcaatatggagttggataatctcggtaattcaaaattgaaagatttggatggcccaacaaccttgctggggctatcacaagagatccccctcagtaataaactttccttgagaaaacagattgcgagttttcaaggtgatcgtaatcagttcgaaatagcaaagcgtcaggctgaactcaaagcagatttaagaatctgtatggcgaactggtatgtagctactcagcgtgctgaaatttattcttctgagagtaaattgaatgccagacaagctaacgttctttccgaacgtcttaagtacgggcgagtaattccttccgatgctcaactaagcatagcactttcatctgagtcgaaattgcgccatcaaaatgaagtgaagaagattcagttccagaaaaatctatgttctaagttcacttccaacctgcccagtagtgcattggaggttccgctaagctttaatttcacagacaaaataagtttgtctgagcaagaagcaactttaagttcaaagctgaaaaaagctcagtttgagttggctcgtaaagaagcaataccagatattactttgggagtaggggttagaaactaccaagaaaccaatgacaaagtctttcaggtttcgacatcaatacccctcaatatttttagtcgaaataaaggcaatattgcgatcgctcaagcagagcatacgaaagcagaaacacagtcggtgcttgtgaatcgtaattctaaaattgaattggaaaacaaggctattgaggtttccaacttgattgatgcgattaagcaatatgatcaaacggttttgcccgcaacaaatgagagtctccgaattgctgaaatgggataccaagcagggaaaaactctttacttgaattcaataatattaagcaaatttggttagacaaacatcttgctcgattcgatatgtggttggctttgcaaactgaaattgcagatgtcgaacgtaactacattactcatttagatcaagaataa

SEQ ID NO: 51735 - DNA, 462 bp, Acinetobacter baumannii
atgactatgcgttcaagtaggttttctaagcttatactcgcatttgtcctgtttttgtttaccataacaattacgggagttcatgcgtgggcgcctgttctacttgaaaatattgaacatcagcatgagttgagtatcattgtagaggatgatgcttctagtcattggtctttacagcactcagatgattctctaaaaagttctgctgatcatgatgcagaagcacatacgtggaagaattttgatgagccgatctatcatcattcagtaaagccaatttcttctgatagtgatttcagcatagatccaatctttattcttagtttcgcacttccactagttttattctttttccagctttttgaaaagcccgtttatcgagtctttttaaagcggcgatcccctctagtatttagtaattcttatactttctctaaagatttaatcgtcctacgtaattga

SEQ ID NO: 51736 - DNA, 897 bp, Acinetobacter baumannii
atgatcaaaggtttagcgattacaccgccaatactcggcagaattagtatcggtaaagtggtcgaaaagaatggtaaacgtctgcctgaaaaagatgatcaatttacgattactagccaaattcagaataaggatggctgggtgaaacacccactggatgagcagctaagagccaaggcacaaaaccagaaactcagaaccattcctgtccggatgatttttaatgatcctgaactcaacttgcgagctgagtacactctattcgaccgacaaactggtcggcccatctgtactggtaatggtgaaacctgtcagcgacttggacaaaacggggttgaacagcatccatgtccatcacctgatttatgccccttggcccaaggtggacactgcaagccttatgggcggctttacgtcaatctagatgagtcggatgagttgggtacattcatttttaggactacaggtttcaatagcattcgtaccttagctgcacggcttcgttattaccatgcggcttcaggtgatttactttcatgtttgccattgcaactgaccttacgaggaaaaagcacaacgcaaagttaccgtaccccaatttattacgtggacttaaccttacgtgatggaatcaatctacaagaagccattacttcagccaaacagatcgatggacaaagcaagacagcagggttttatcaggaggctttagatcatgtggcaaggctaggttatggtaatgccagatttgaggtaggaggtgaggagggactggatattgttgaggagttttatatcaatgaaccaaaaccagagcagggtcagcagcttagtgatttaactcatgttcaagacattcagaaagggttgcagcattctgtgcaggctctcaattga

SEQ ID NO: 51737 - DNA, 1044 bp, Acinetobacter baumannii
atgaataccgcaattttaaatccatctatgcaacaggcaagtaccccatttattgccccaaaattattcacagccaaacgcttggtcaatacaaagaatatgactcaagcagaatggcttgaagtcagacgccaaggtattggcagtagtgactgtgccgcagcctgtggacttaatccctatatgtcgatgctagaactgtggatgatcaagacaggtcgagttaaacaatccattgaagatgaaagcacaggtcatgcccctttatattggggtaaacaacttgaacctttggtcgctgaatactacagcatgcataccaacaacaaagttcgtcgtatcaatgccgtactacaacatcctgatgaggataagcattttatgctggctaacttagattactcggtggtaggtagtgaggaagtacagattttagaatgcaaaaccgcaggggaatatggagcaaagttatggcgagatggtgtgcctttatacgtattgtgtcaggtgcaacatcaactcgctgtaacaggcaaaaaggcagcgcatatttgtgtgctgatctgtggtcatgaaactcgtatctataaagtggcacgcagtgaatcagtcattcaacatattgtgaatgcagagcgatacttttgggagtgtgtggaaaatgacacgccaccttcagtcgatgccagtgaatcggcagctaaagccattcagcaactctatcctcaacatattccactcagtgtcgaagatctcagtcaaaatgaacaagccaatcagttgtttgctcaactgattcaagaaaagcatcatattgaaaaacaccaaaacagctttgatgaaactaagcatcaaattcagatgttaatgaaagatgctgaacgagcaacttttgccaatggttcagtgacgtggaaacgatctaaagactccattgctttagataataaggctgtattgaaaatgcatcctgaactaatcaatgagtttccacaaaacaaggtggggacacgacgttttcaaatctatagcaatgatgactga

SEQ ID NO: 51738 - DNA, 1044 bp, Acinetobacter baumannii
atggcacatcaacttgaacaaatggcgtatgtcggagaaaccccttggcacggactagggaatcaactgacacaaaaccaaccgattgaagtctgggcacagcaggcaggtatggattggcggattgaatcttctaatgtcagttatatggcgcagaatgaccgtgggcaaagcatcatcatgccttatgaagaacaacgagttttatatcgctctgatacccatgctccactgtcagtcgtcagtcaacgctttcaggaagtgcaaccgagagagattttagaattctatcgtgacctcaccgagcaatcaggttttgaacttgaaaccgcaggtgtactcaaaggtggcaagaaattctgggcactagcacgtacagggcaaacatccatgttgaagggcaaagatgtcagtaatggctatatgctcttggcaacagcatgtgacggaacccttgccaccaccgcacaatttacctcgatccgagtagtgtgcaacaatactttagcgattgccttaaaaggacagaacagcagtgcaggtgtggtcaaagttccacacagtactaaatttgatgctgataaggtcaaacagcaactcggtatttcagtacgtgcatgggatgaacacatgtatgaaatgaagcaactgacacaacgtaaagtgagtcagatggaagcatccgcttactttgatgccgtgttcaataacagcacaatgaacaacgtggtggatcaggaggacaacatcatccagttctaccgtgatgtagccttacaagcccaagccaatggcaaggacaaagctgaaccaaatgccaaatcgatgagtcgagctatggaaatgtttaatggtcaaggacgaggtgcggagctaagttcagccaaaggaacagcctatggattactgtgttcaatcacagaatttatagaccacgaacgtcgtgccatgagtaccgatcaccggcttgattcagcttggtttggtgctggcgcatcgatcaaacaacgaggattggaacaggcacttaacatgcttgcatag

SEQ ID NO: 51739 - DNA, 2148 bp, Acinetobacter baumannii
atgaattttaaattacttaaagtacgactagatagaattaaaactcaaaaacatacacttactccagaagatatgttgatgttagttactcaagaaaaagctgatcttaattcggggtttttctctcgcttatttagtgtgactattccacaaaaatgggaattttctatcaattcatctgaggaaattggcgttgctttagaattggttgaattgattgaaacagtatttatccctcactatcaggggcatgcaaaaaattatgcttggttagagcaatgtattttattcaaactcaagcatcaagcgtcgatgaatatttctgaattagtcagtcggtatttatcgaagattgaaaaaagtgaacatttacagattagtcgagagatcttaaaaattttatttgagcgtgagcctagcaatgctgtcattaaagcacaggcgatagtgtacaaacgtagtcaaatctatactagcgctatagaaaagtttgagtactattttgagcattgttcttatcaagaaacattatattttgattatcttgaatgtttaataatgcggaagaatgttatctataatcaggaaaaaggagagtttggtgatttgcaatatgctgtatatttactttgctctatagacgatgcgaaagatagagcattacaagggaatctactcaatcgtgctataacagcccttttaccagaagacgttattgcaactcgtcctgaagatacgaatttcttagctgacatgggacgtgggctaaatagttttagtaagggagttggtacattttttggagggcgtgattcgcagattccatatagtgaaggaattattgcgagtgcaccaaaacttttgaaaaataaaaaaattgttgagtgtcttaaccaaaatcaaaaagcacaaaaagagctagaaaaaatattatctgatcaagggctaaaggtgggtgtgggcttaacggcatccgcatattctttaggattaatttgggattatgcacatattgatccatctgtattagatgcattgagctttgcatcaaaaggaaatcctgaaaacttaaatactttacaagacatttcagcgaatacactagatagtgcaggagcagtgactcgtttaactggttatgttgctgaacaacaggttgcactgaatttacaacaacaaggacatacagttgaatttcccgatagcgcaaaccaagctggttatgatttgattgttgatggcacaccgatgcaagttaagtgctcaatggatgctgattatgtattaagtcattttgataagtatccagatattccagtgattgtgaacagtgaacttgcagagcagctaggtaatcatccgatggtgttagtggataccactttaagctatgaagctgttcaggaaactactggtgtaggactagagcaagtttcagattttgcggatgtaggagatatgctaccaatcccactattaacgattggtttagcggcatatcgtaattatggtgattttaattcaggtaaagtggatggcgagcaatacttaaaaaatgttggcaaagaaactgctgcaattgctggaggtgcaatgacagggtcaatgctactcggcgcattagcaggtcttgctacaggtggtgttggagtcattgttgcgagtggtattggtgcatatatgggaggggttgctggttctacaggtgcaaatagtatgaatcgagaagccttgtgtaatcagagagatatcgtagtgaaattactcattgaattcgcagcgtggttcaatgaaaatttattggttcatcgaacaaatgtgctattcaaacagctacaaagttttgaaactcatatgttgaataatgctgatcgtattattacttttagtactttattgatctatcaacatgaagcttatatgcgtgcctatcatctgaaccaatggatattacataagttgcaaaaaggtaatgaaatggaaaaggttcaagctggttgggtggctattgatgagtcaagtaattttatatcagttgatctacagccaaaaattaatgaaattaatcgtcaattagagatttatagggaacttgccaaacctgattcagcacagcctaatcgtactcatcagcttaaacctgcttga

SEQ ID NO: 51740 - DNA, 255 bp, Acinetobacter baumannii
atgaaaattcaaacttcactcattgttgtctcagttgcacttctagcatcaggctgtgccagcaaaaccgaacgccagtttatcagtggttgtaaaacaggcggcattaatgacagcacttgttcatgcatctacgacaaacttgaaaagaaatatggtgagggtggactgaaagaaaatatctacaccttacaacaaactgaatccttccagatggatatggtcaatgtgtcctatcagtgtatgaaggagtag

SEQ ID NO: 51741 - DNA, 141 bp, Acinetobacter baumannii
atgagaacacttgcaggcattatctgcgtcatcgctgtgatttgtgtactgggtctacccttcattagcttcatgatcgtgatgggaatttttattgcattggcaaaatttgcaactgggggggaagtaaatgaattctaa

SEQ ID NO: 51742 - DNA, 228 bp, Acinetobacter baumannii
atgaattctaatcttaaagctggactgatcagcacttatctggtcattggattcttttttgccatctatcaacatttctgggggcagtataactataagccatttacctacaatttagggcaaggcttagtgtggcctgcggtgatgtttcctgtaatcggtaaaattgttggtggaattttgattctactattcgtctggtttgttgttattcgtcctaaattataa

SEQ ID NO: 51743 - DNA, 654 bp, Acinetobacter baumannii
atgaaatcattattttccaccattgccttgtgttccctgttaatggcatgtagccagaacaatctaccaccaaaaactgatacttcaggtgagcctaccaataatgctgctcagcatactcaatcaatctatgctccttataccgaggaagcagttaaagctaaactcaatgaaatgcagatgattattgacaatggtcatgtctatttacctgctgaggtcaaggaagcggagtcttatatcagtggatggaataagtatcctgatgtgctgaaagccatgatggaaactgaccttaatccaaacaacactcaggaagctgctgacattccgcttgagaatgaatctgcacaagttagcgatctaaatgttaaggctcgcattagtgctagagaatctcaatctgcttttaatgtacaaggggcaattgaatatattcttgaaattcaatcgaccagcaatcagccttttgttctacaaggcatgaaaattaatcgtggtcgttgtggttattacaccgctgactttcatagcaagatgcctgtgcaaatgagctatagctctacagtatcgtacttattgaaatgccgtggtgatcaggtgcttgaagctgaattaatcaccgatcaaggaaatgtaagtttgtctttttga

SEQ ID NO: 51744 - DNA, 951 bp, Acinetobacter baumannii
atgtaccagaataatccattagaaagtgaatcatccattcttatctcaatcgaagattttatggttagtacatgccatgagcaatttgttgatgatcatgaagaattcaagcgagagctgttggatgctgtgtgtgcttttaaggtgatttacagagaagattttacttattccagaatcattaatgttttcaaaagagtgattaatctcgtagattacattatggataaattggactcccatctttatgaagatattttacgatttgaactaaaccacatcttccatattcaaggcataattcaacatgagatgaaaaatacaatacgagaacaattcgattttcagcgtcaagaacaacgtaatcgctttaaactggaatgctacctaaataaactgcttacacactatgctagattacagtttgttcgagtagatatctctattcttaaagaatatcaaatccattggggtattcaagactttaagtatgcattggatattctatgtaatcgtatgtcaaataaagatacctgttttaagcacttacaaggttatgtatgggcattagagcagggtgtagaaaaaggctatcactgccatttattactcatctatgatgggaatagtcgtatagaggattcaggtttagcaaaactggtggctgagtattggaagcacatcaccaatcaacagggtactcactacaactgtaataccaaagacaacaaggaaaaatttgataaaaatggattgcttggggttggaatgattcatcgtgatcaaccaatacaagttacaaatgcgattcgtgcagcgatgtacttggtcaatcctgaaaaagaagatcagcgcttacgggctaaaacctctccacagatgcggacttttggtacaggtcagtttgaagtaaaatggcgcagagatattgaacaaaatgagtcattatga

SEQ ID NO: 51745 - DNA, 1728 bp, Acinetobacter baumannii
atggatgaaatgacagaagagcataagcagctcatttttaattttaatgagttatcaccacatagattaagttcctacgctagactggtgctgattaaatttattagtctctttggtacacaaaaaaccaacgattcattgttggaattgtctgaaaagataggtgtgcaacataaaaaattaaaactggtattggaggagttatcaggctttgagatattggagttttcatatccagaaacaggtcggcgggcaagagttagaacaatacagctgaatttagattatttaaatctgctattgagtaaagttaatcaacatgaaacatcccatcataggtatgtccgccttaagagagcgattaagcagtttgaccttttaatgcttattttaatcaaattatctcaagtcagagtgaccactaaaaagtttgatttactacccgaacaaaaactggattttagggtattgttgacattatcaaacttgactcgctcatgtgatgcttatggggtgatacgtaatataggtacaacacaactggttgctaaaacagggttaaataagcaagcaatatttgattcgatctactttttgaaaaagataggtctgcttcgggtacatgtgcatgggacgatcaataacaaatttataaaaaatataacgccaacctacgtgttgaatttatctcataccttttggggtaatcatgctcggtatggtcggttttatatattggaagcgagtgaaagacatcattttgaaataaaaatgattgctgatatttttacggtaatttctgagcaggtgcagccgttggattctgacaactcacgcgatctcaatcaccttacgacattggttcttaaggggcttgattcagataaaatcaacattatttctggaacaatgattgagcgtatccagtcttcatcacaagttcaggagacgatttctagtttcattaaagaatgtctaattcattatttgcaattacaacaatgccatcaggaacaaggagatttgacagtatttgcaaaagtgttcaaacaagcattaatcaataaaaagaagcaacatatcaagttgaatgatttggattcaaatttgacaatgatgcaatgctattttgaatcatggtgttgcagactgcttgatcagcggggtttacgtcagcatatcttacaaggttcactgttatatggtgtagatattttaaatcggactacaattgaaaaagatatttatccttttgtctttcaagaaaaataccgtttggaattgattacaaatcctgacttaatcagaaacagcgatccagatgcggacatccaaatacagattcagaagctagagaaacaggagcaacggttcatcctagaattcttattattttgtttgaatttgattgccaaaaatcagattttaccatttttaaaaagtacgcgaagactcagtcatgtagcaggcaagttttttcaaattataccaaaagtcgagtcgcagaaaatgtatagttgtatctatgtgcccgattcaacactcactaaagatgagttttttctgatcgatatccctcatccaattcgtgggaaagaggaggaatattcgaacgaagactatttgctgaaattcattgaacctagtgttgatgacatgaaaaaatatggattgctggatcagttttatacaggaggaactgaattgctgaataaaaaagtagcgtaa

SEQ ID NO: 51746 - DNA, 417 bp, Acinetobacter baumannii
atggaggcattgactgaaaagctcaaacttaaaactgaggcagagtgtctagaattcctgatgaatacgtatgaggcaaagcaaacgctccctccaccctataagcaaaaattaaatgaaaaagacatgattattgaggaattgaaccaacgcatcaaagcccttgataaaatgctttatattaaacagcttcaggtacgcaaacaggatgaagtcatccagaagtatctcattaatgaattaatcaacagtaaaattaccattaatgaattaaccaatagcccccttcaggacgccagtgaaattcagaaattaaaactccagtttttaaaggaaatacagaaaaatattcagctagagcaaatcaggcacctatccgttgatcaaattgcttctgatacttttggtaatgaataa

SEQ ID NO: 51747 - DNA, 921 bp, Acinetobacter baumannii
atgtctattataaaatttgaagacttaaatgaattggaacaggagttcattgattgtctgtttacttattatgaatccagttttttacaaaatgaggcatgtggaaatataaaaacagctgatgagccagaaaaaagaatcatcgttgctgagttaagcgatatacagcgaaaggtgctgaacgagcgactacacctcaatgatttaattctgaaagaaataaatgaatttcatcaactgattttaggtgagaatactgtcatttcacctatgcagatagtagtactattggaacagctaaatgcattaaaagacgagtttgatacgctttcaaatacaattcaaaaaaaacgttatagtgtcattttacaggcttatcaggctctggatgaaaatatttgcacccaacgcaatttaaagattttgaaacgaatgagaggtattcgggcagtcaaagttcgtaatgataagaatgtatacccacggcatcaaattctgtatcgggttttaagggatgaagctcataaaaatggtcggtgggagaatttatcacaggcggtaaaatcaattttgccaatacttagacttgaatatcaaaaaaataatctggtctggattcagaatgaaatagattctaagctggcattgattgaagaattggaaaagggacgactcattaattcccataataaacagaatgaaaattatcatggaaaggtttatcagaatcgtaaatatcagaacaggatcgacaaacttcagttagaaataaacgaattaatcattgctcagaagtcaactgaccctgctttgctgctggggaaaaaaataccctataacaccatttataatgatgaaagtattcttcaccacttaagggattgtactgaactgttacaggatattcttattcaaaagtga

SEQ ID NO: 51748 - DNA, 267 bp, Acinetobacter baumannii
atgatagaacagcattatcgtgtcaaagacttagtcaactaccctgaacgccctgccaaggactatgtagatcgtggtggtcgcagacgaaagctatcttataagcctgcaaccaaagggatattgaatattgcagaatccaccttctggaaaatgattcgtcggggtgattttcctgaacctacctatttaacagcaagtatgcccacatgggctgaaagccagattattgaatggcttgaactcaaagagcttaaagcagcataa

SEQ ID NO: 51749 - DNA, 1215 bp, Acinetobacter baumannii
atggcgactcgtggaatcaataagcttagtgctttacaagttaaaaaagctaaacctgatcctgacaagatgtataagctgtctgatgggggaaacctgtacctgcgtattgatcagagtggtagcaagtactggatattcaattacacacgtccatttttagccaaacgtaatgatttatctttaggtacttatcctgaagtttcactggatgatgctcgcactattcgtgatgaatataagaagctcattaagcagggcatcgatccagcaatggagcggattgaaaccaagtcccagaaacagaaagaagcagaaaatacctttcgtattgttgctgaagcatggctatataaacgtgagctagagcaaaaacaggatgaagagacgatccgtcgtttaaagcacgatgtctatccctatattggtgatttaacctttccacagcttaccttggaaattcttgagattaaggtctttaagcgcattattgaacgtggtgcattgtcagttgccaaacgcctaaaatcggacttgaaccagatatttaagtcagcacgtaaaaagaagctgattcaatacaatcctattgaggatattgaactgcccaaaccacagggtgggaactttgcagccgtgacagaggagcaggaactagctccaatgctcaataaaatttggaactactccaaactttatccacgttgttcacatatcacacaagtggcgttaaaaatctccgtgttgacctttcagcgacctggggagatacgcaagctgaaaaaggagtatttctattgtgaagaaagatgctttaaatttacagctagtaaaaccaagcagcttcatattgtaccattgtcagatcaggcctttgacttaattgattcaattattgatctgcacccatacagtgaatacattttcgtgggtcgggatggtaaaacttttatttctgataatacgattaactcagcgttaaaacgcttgggctatgctgggaagcaaacggcacatggattacgtgcaaccgcacgaaccatgttggatgaaatattagaacaacgtgtagactttattgagcatcaattggcacataaagtaaaagataataatggtacagcctacaatcgaaccaaatttttaaacaatcgtcgggagatgatgcaggagtgggcgaattacctagaatcattgctggatcagcaacagtaa

SEQ ID NO: 51750 - DNA, 363 bp, Acinetobacter baumannii
atgcctaatgaaaatgatcccatgataagaatattaatatttatatcctctctactctttatatcctctgcaaatgctgaagatatttttaacggcactatcttatttaaaaataaatattggcattttatacgctgttctatcactcaagatgactatttaattgaagcttctcaagatgtgattactcaattaaaagcattacagcagaaagagaaaaaatattgggtaagcttattagcaaatgtcaaagtacagcagaatggaaatttaatattggaagttgagaaaatagatgaagttcatttagggtcatcatgtcatttattagatgcacttgaaagctttgaaaatcgagagtaa

SEQ ID NO: 51751 - DNA, 747 bp, Acinetobacter baumannii
atgcagaattataaatggcagagtctagccatattattactaggtttaacagtgcaatcgagttttgcagagcaggctatttcagctcaaccttttataaatgtgaaagtctcatcacaagatatacattcgatttgtcagcagttaagtcataaatgtagcgatgaagctaagctatggaaagtaaaaaacacacaagatcagatttattatttaatagatgaaactccacaacttgctgaagttaaaaagcaaaataatcaatatacagtgctgaatcagtggaattttaaaaattatgaacatagtaataaagagccacattctgatgatttaggccctaatggactcaaaatctttccagcactatatccactcaataaaaatgagcatgcaatagcagtgctaaacacatggtttactggttattctggaggagggcgttttgaggaaaacgctgattttattgagcttaagtctaaagggcagtatcaagttgccttaaaagatattaatttttcttcaagtaaaatgattcgagcatgtttttcagaacaagagtataagaagtcaccgcattgccatgatgaaacatggatgacattaaatattaggtttaaagatatcggtcaatcttactatttatggcagttaaattataaaaattattcttgggatgcttttaaaagtaaaaaaacaataacagttgagcaatcaagagaagacgttattccttttaaaaaatag

SEQ ID NO: 51752 - DNA, 1893 bp, Acinetobacter baumannii
atgcctaaatcaaaaaaacctcgtaaaaaatttcgaactaaaaaaaatcaaaaaaagtttactcaaggtgatatacacattcgagagtactatcaagttgctttcaacttttttataagaaaatatttagaaaatattaaaatagaggtgttagaacttcgttacaaattacgatccgagttttatcaagaacacactattatcccaaaatctggagatgatgctttcaattttttaaaacaatatttgtttcatttagaagctattctgaaggaaattattagctcacattccccaagtttttggattcacttatatcgtcgagttggagttgatgtacttcatttaatagtaaaagataatgagtcagtaagtcccatgactatcaatattgttagaaatttcatggaaatagcatttttaaaatttggagatttagataaagttgacctgtgtttaacgaaagacttacactataatgagatacttgatggcttattttatgaatcgcataaagatattggtctttcagatcaaaaaatagaagagtattggaatcaatacactaaaaaaagtgaaattatcttaaaagactataaaaaaattgatcacaaaaatatatatttcttagaagggattgcttatgaatattggaaaacaacagctaatatgcgatctatcgcaaaaggtggagaattaagcacatgtgaaaattttttttggagagagagccgtaccgatgatttgaataagcttatatcttcatatgatagaagaatatctattaattttaaatatttaccaacagctaaaggtttaataacttacgatgaaatagagtcaaacaataatctcttttatacggtatataatgataatttcgtacgattttcgcagatatgtagtgataaaaaattttctaacgtaataactaatttttatccacaatatgtaaatatagacaattttgttgattcacataaagttttagaaaagccttttgaaaaaaagaagaagtattcgattaaattttgcttaagttttttcaaagcattatcagatgttttcattgaacataggggactagataaatcgacaaattctcaagatctagataaaaatataaaattattttctatattacaaagatcttatactattcttcctttaaataaagatgccttattcactgaattaaaaacaaaaattttacattttggtttctcctcaactgaaattgacgaagtactacctaaaatattagatgaatatatactagataaagaacagcaaagtattatgtctatttggtcatttggacctcgccccttaataatagaaaatacttttggatccttaattgatgttgcaggtttttcaactattttaagaaatttattttttggtgttagagaaaatcaaactgaaagaggtgttgaattagaaaggattgctcgaaattttgtagagaaaaatggatacactttattaaaagatcgaattttaaaaaataattttcaacaagaacgtgaagctgatttagttattagagttaataatagcattattttatgtgattgccgaagtatagagagcccagtcgatttatttttaggaaaaccctcaactcaaattgctagaaattctttgatacaagataagtttgaacagattgaaagcttaaaaaaatttattattgaacatccaataggtaaaaattatgattactcttatgctgataaaattttttcaatagcaatattgcctgatcctgaatggataccaagccttaataaagattattggattaatttagatcaagacctaccaaaaataatgtcaattcaagagctttttaattttcttgataaactcaccctatcttccgcctaa

SEQ ID NO: 51753 - DNA, 1305 bp, Acinetobacter baumannii
atggatctattccttaatcgtaaatcgtttgttgttaaaagtttagctattacagtaacagctttaatgatgagtggggcaaatgcggcgacctctgaaaaagaggaaattcaaaaacttcgtcaagaagttgaagcattaaaagcattagttaaagaacagcgccaagtacagcagcaacagcaacaagtacagcaacaacagcaagtgcagttagctgaagttaaagcacagcctcaacctgttgctgcaccagcttctccattagcaggttttaaatctaaagctggtgctgatgtaaacctttatggtttcgttcgtggtgatgctaactatattatcgaaggtgcggatgatgactttaatgctgtagataaagttggtggtaaaactgctcaaacacaagataaattacgtgctacagctaaaaccacacgtcttggtttagattttaatacgcctgtgggcgatgctaaagtaggcggtaaaatcgaagttgacttcggtggaacaaacgatgcattccgtattcgtcatgcttatgtaacgtataatgactggttatttggtcaaacgacgtctaacttcttatcaactcatgcaccagaaatgatcgacttctcgacaaacattggtggcggtacaaaacgtgttcctcaagtacgttatagctataaattagcacctgcaactcaattgtttgtttctgctgaaaaagctgatagttcatcatcagctacaggtgatagccttaaatatcgtctacctgcattaactgctaaaatcactcaaggttatgcagagggtaaaggttctgcatcagctcgtgttttagtagaaaactacaaatcacagcttgctgacgataataaaactggctggggcattgctgcaggtacagacttcaaagtttcagatcctttaaaagtatttgctgatgtttcatatgtggtaggcgataatacttatttatatggtagtaatgctgcgtatgctgtagctgctaataaagatattgagcaaaataaatttgttgctgtacaagtaggtggtacttataaaatcttacctaacttgcgttcaactttagcgtacggtgcacagtttgcagatgatggtacaaattttgccagcttaaatgcatctgctaacgaaaaagttcaacaagcatggattaactttatctattcgcctgttaaaccaattgatttaggtcttgaatatatcaatggtaaacgtgaaacgtttgctggccagtcttataaagataaccgtattggtttaatggctaagtatagcttctaa

SEQ ID NO: 51754 - DNA, 621 bp, Acinetobacter baumannii
atgtctggtttttatcgaaccaatttgggaagagttgcgcttcaacaacgtaatattacgttaaatgcaaaacaaagacgtttacttctattaatagaccatgaagattttcaaagtctcgataccgagtttaaaaagcggatcgccccaccagaactgatacaacagctcattgacttaaaactaattgcaccttctagtgaaaattattcagagttacctgaacaaatatctccccaagagtcatctataacaactaaagaaatacatcaaaaaaatgttgatgagaataaaagtaatgatttagttggagaaattcaggttcctcaatcaacgtctgcgccttcaaatattgaaaataaccaaccaagcattccagttcaacagctctcttttgaagaaatacaacagttgatgaagcaaagcttaagccaatactgtggccttatggcaaagccacttattcaaaaaatagagcaaataaaaacacttcaagaacttaaaatgtgccaaatgcaatggattaccagtttgcaggaatcacgtattcctcctcatgagctagcacatacgctccattctattaattattcaattcagcttattcagcaacgcatctaa

SEQ ID NO: 51755 - DNA, 537 bp, Acinetobacter baumannii
atggccttaaatattcccgaatctttggcaaatctcgaagcgaacagtggagttttcgcagtttggatggtactaaagcattatggggtacaaattgatgttgccgagttgattaaagtttgccgatatgagcaagacggtacctatacgattgctttagctgttgctttaaaaaaatttcgttttgatgtgtcctttcactcagatcatgatcccaatattagccccagcgaacgcatgagctataaagaagcaaaggtactaaaaattccaataggatctgctttgagctatcaagatattcaagctactattcataatggaaaaatgatgattgtgtactacgacactttagatggcgtaggtaatcagtcactggtttattctatagatcaaaatgaaatttgcttttttgatagttttgagccgatgtcggcaacagtttttgagaaccagcgtaatgtagaaggaatttgccgtcaggctattataattggtgaacgcaatttaaatatttattcgactacattaaattag

SEQ ID NO: 51756 - DNA, 957 bp, Acinetobacter baumannii
atgaaaaaaataggcatagttgctgttagtgcaattaccttatgctgggccatgtatgaggtatcatctgataataccaatacagcattacgtaatgaatctaaccaaaaagtcgcatctaaaagaatttcatcaactacaaagaatgaaaaattggcatctcaaccccttttgactcaaatgaattcccctaattcttctaccccaatctgccaatatcattttgatgcaactcaagaagattatgacctatggaataatgaacatcctgattattttcctatgaaaatatttccaataataagtgggcaaaaatttagccttaaagtagatcctatactagaaaatgaatatggcaatatagattatatagcgagaagtaaagcaggtctcaactcgactaatgatattggcgatttctctatacctaataagggcattattgcctttgaaatggaactaaaaattccaactgtagccgttggtaactcttcttatatctctaatattgattttactggtgtaacaaataatggatataccgttagatcaaactacgggtttcatacagggacttatgacccagattttggcgagaatcctccaactttaaattactctttagcatatcgagttagtgataatagcggacctgatcatccttacttcaaaagtcaaaatatgacaaataatatgaatggataccaacgcttgggtatatatattaatcagaacacgaagcaagtaggctttattttaaatggagttgatcaggggtatcaatctaatttgccagctccgcttgcgaatatacgtttttctattatgaatggtatagcaatatattctgaacaattatttggacaagagttgtcgagtgaactaattacagaccgtaatgctctacagtttagctatcctcaaggtaccactgatatgtgtggtaatgccatttaa

SEQ ID NO: 51757 - DNA, 1962 bp, Acinetobacter baumannii
atgacgttaacaaaaaaggcgctggtggtcgccctctcaacactgcttccatttgcagtccaagcaaataccgatattgaccaacaggacacaaatgaacctgttcaaaaacttaaaactattgtggtttcggctgctttaaaagaacaagatgtagataaagcacctgcatcgattagtgtaatcacaagtgaagatattgaacgtagcgcggcactcagccttgccgatgttttacaaaaacaagctggggtttataactataacagtggtcaagataaaatcgttatacggggaatgctgaatacctcagggaactacaccttaattcttttaaacggtaaacgcatgtcatctaatggcgccatgtggcgaggcaatgactttgactggagtgcgattcctttaaatagtattgagcgtgttgaggtgattcgtgggccaatgtcatctctctatggtgcagatgcgatgggcggtgtcattaacatcattacaaaaaaagcagaagatggacaattacacggttctatttttggtcaatataaccgagcagaccgtggtgatggtaaaaaccagtaccgttacgggtttaacctatacggtggtttaaccgataatttaagtttcactctggcaggtgatgcttatagccgcgatgcatggtatagaaagggccagccagatccagatggtgcatattttgtagaaaaagacaccaaaaacgtaaatggtactttaagctggaatattaatgaccagcaaaccttagatatagatttgggctataacaacgataaacgcccgctaactcaagatgcagctacctccattcaagaatcagaaatgaaacgtaccaatgtggggattgctcaccgtggtaaatgggcttggggtaaaacagaagcttatatcggtaaagaaaccgccaaaatttatgactatgacagtgaatacgatgcgcctcaaagccgtcactataaacaagaaaatttaattggccgtgcttttgccaactttgactggctcatgaataatacgaccagtggttttgattataaagatcagaaaattacagatgtcgtaagttatatcggcactggaaagaatcagcaaaagagctacggtatatttgttcaaaacgatacccatattaatgacgcacttaccttaacattaggtggtcgttacgacgattttgatgactttgatggtaaaaccacaggtaaagcctatttagcatatcaactcgctgaaggagtcatacttaaaggtggcgtgggacaagcttataaagttccagctcctgctcagttagacattaactactcgatgatttcatgtggtggtagctgtcatattcgaggtaatccaaatttagcacccgaagaaagtacaaactatgaagcatctttaattgtgacccgtccaaactggaatgctggcgttacagttttccaaaacgatgtgaagaacttgattgaagcaattaccttgagtgatggtgacccgcgtttagtaggtgattttagaaaaatctggaccaatgtgagccgcgcagaactcaaaggtgttgagcttacaggtggatatgatttcactgacaatttaggtgttaaggcaaacgcaacttatctcgacgcaaaaaataaaaccacaggtaaagacttaaccgaacgtccagaatggcttgccaatggctctatttcctgggcaccagttcaagactttcgtataaatgcaggtgtgagttatgtaggcaaacaaatgtactctgcaactaaagagttgccagcttataccacctatgacgtgacatttacttctcctattacgccacgtttaacactggactacggtgtaaaaaacctgaccgatgttgatttggaggataaaaacaaaacctttaataccaaactttatggccgcaattacttcttaaaagcgacttatagtttctaa

SEQ ID NO: 51758 - DNA, 132 bp, Acinetobacter baumannii
atgacttttattgttcaagataaaactaattattatttatataatgataatcattattgtttgtttggtttaaaaaagttaatattacaatttggtgtgcctaaaaacctattgaaaacaagcttaaagtag

SEQ ID NO: 51759 - DNA, 3135 bp, Acinetobacter baumannii
atgctctctcgattttttatttatcaccctatttttgtatctgtcattgccatcactattcttatttttggttttttttctactcgtgcaatgccggttgagcgttatccaaacctagctcctccaagtgtcacagtgattgctaattaccgaggtgcgtctgctgaaactgttgaagaaagcgtaactcagattttagaacaacaaattaaagggctagataacttactttatttcacatcaaatagtgaatcttcaggaacggccagtattgatattcattttaaaattggtacagatatcgataaggcacaattacaagtacaaaatcgcattaacagtgcattaaaccgtctacctgaacaggtccaacgacaaggggtaaatatttggaaaaccacaggtgatatgctgttaattgtgggtctatacgatgaaacaggaaaagccagcaatatcgaattatcggactatatggtcaatcactttgaacaaccactctcacaattgcaaggaattggtgaagtggatgtgtttggttcaagttatgcgatgcgtatttggctaaatccaaatcaacttagaaattatcaacttatgccgagtgatattgaacaggcacttgaagattacaatactcaaattgctgctggctcaattggtgccatgccttctgcttctgatcagaatatttatgccaaagttactgctggttctcgattaaaaacagtcgatgattttaaatcggttgtcgttaaagctaatgtagatggcagtctggtttatttaaaagatgtggcgagagttgaattaggcgccgaaaactatgaaagtatcaatacgctaaacggctacccttccgctggtttaggtatttcactcagtcctgatgcgaacgcgattgaaacctctggtctaattaaagcaaaaattgaacagctcaagcagcatctacctactggatataaaattgtttatccacgtgacaatacaccgtttattgaagagtccattaaacaagtcatcattactctgcttgaagctgtggtgttggtcgtcattgtcatgtatctctttttacaaaattggcgcgctacacttattccaaccattactgtacctattgtgatttgcggtacctttgttgtgttgtatttgactggtatgagtattaacactcttaccctgtttgcactggttttagcgattggattattagttgatgacacgattgtagtggttgaaaatgttgaacggcttatgcatgaacaacatttaagtgttcgggatgcatgcttagcatcgatgcaggaaattactggtgcattgattggtattaccttggtactaacagccgtatttatcccgatggctttttttagtggttcaacgggtatgatttaccgccagttttcaatcaccctagcggctgcgatgttgttatctttattggtagccatgtttattacgccagctttgtgtgctgtcttactaaaaaaacaaactcaaaaacctaaatggggacaaaaacttgagactttgcttgaaaaagttaaagttggttttagttttttagcaacaagtttaatcaaatttaaagcactttcatgtcttgtagtgttagctttagttgctgttttaattgtgatttatcgtagtttgccgacgagctttattccaaatgaagatcaaggtttgttggctgtgccttatagtttgcataacagtgcttctatgagccaaacacaagaagtaggtaaactggtcaataactatttctttgaacatgaagctaaaaatattaataccgtcctagtagttaatgggcaaaacttttcaggaagcggtccaaatttaggcatggcctttgtttccttaaagcattggaatgaacgtaaaggtgaagctaatactgcaagtgctattcgtgaacgtgcgcaaaattacttgcaaaaaaacttaccagctaaagttatggtgggtatgcctgcaagtgtttctggtttgggccaatctgatgctctagaactttggctcagagatgtaaatggtcaaggacgcaatgaactcattaaacaatataaagctttagaaaaagaatctcgcaattatcctgcttttgaaaatttaagcccgcttgtaagtgagaataaggctgaggttttcattcagctcgatcagaataaagccaaaatattagggattgatcaacaagcgattcgctcaaccctatcaactgcttggggtggaaactatgtgggtgattttgttgaaagaggcaaaattaaacgaattattatgcaaggtgatgctgagtttcgttctaaacctgaagatttagcttattggcacgtccgtaataatacaggtggaatgctttctcttgcgcattttggtcgaagcgaatggattggcggcccagaaaccttaacgcgatttatggggcttgctgccatacaacttgaagcaaatgtcagttctggctttagttcaggtcaggcgatgcaacagttaagtgatatggtgagcaaacagtctggtgtagatgtcgcatggagtggcctctctttacaagagcagcaatcgagccaacaagccttatttttatacattatctctattttatttattttcttatgtttagccgctttatatgaaagctggaaagtacctcttattattttactaggacttccactaggaattactggaactattgtatttgctcaaatttttaacttaccaaacgatgtgtatttccaaatcgcgttactaacgggtattggtttgtcttgtaaaaacgcgattttaattgtggagttcgcaactaaagccataaaacaaggtaaaggctatgttactgctgcgtgtgaggctttagctttacgcttacgtccaattttaatgacgtctttagcttttggtgcaggtgttattccccttgtcgttgctacaggtgctggtgccgtgagtcgccatgaaattggtatgagtgtatttggtagtgtagttataggaactttactggtacctgtatttacggtctttttctttgttttggtacatagtttaccggttttaaaatggtcgcttggccgtgtatttagatatagaaaagaccattcatctttataa

SEQ ID NO: 51760 - DNA, 1665 bp, Acinetobacter baumannii
atgacaacaataaagtatttagagggcgctgtgccatatccagaagaatttgccatggcttaccgtaaaaaaggctattggattgggcaaaatctgagtgattttttacgggaaagtgctcaaaagtatgcgaaaaatattgcaatttatgatggtgataaagctgttagctatgaaaaatttgacaacttagttgactgttgtgcaagccatttatatcaatatggcttacgcgcgggtgataaagccgtcgtacaaatgccaaaccactatcagttctatgttctatttttcgccctgattcgattaggtgctttacctatcatgtcattgcctgcccatcgatatgctgaactcagtagcttttttaaacaaacacaagcaaaagcttatttctgttctgattttggtgcacaaaaatttgactaccgagagcttgccggaaagcttcagcaaacagcagcttgcttagagtatgtatttgtacttggagatgctggcaattttgtagctatcgaaaatctattaaaagaaacagaaattctagcggaagcaatctcgccaactacagcagatcaagtggcttttttacagctttcggggggtagcacaggtgttccaaaactgattccacgtactcatgatgattatctatacagtgtgcgtgaaagtgccaaaatttgcgaactcaatcagacttcacgtttattgatggttttacctgcggcacataacttttcaatgagctcggctggttctttaggcattttttatgctggtggcgcggtggttttaggtatagatccaagccctgaaactgcatttccacttattaaaaaacacggtgtgacagatgcttgtttagttcctgcattggttcgaccgtggatggacaaagcagccaaagatcaagatccaatattatcgactctacgttgtttacaagtcggaggcgcgcgtttacccgatgctgttgccttacgtttaattgatgagtttaaggttagtttgcaacaggtctttggaatggctgaagggctggtgaactacacccgttttggtatgtcaaaagaacaaattattcatactcaaggtttaaaaatctcgccagatgatgaaattttggtattggatgatcatgaccaaccggtagacgctggagaggtagggcatttactcactcgtggtccttatactattcgcggctattaccaagcaccagagcacaacgctcgttcttttacaccagatggtttttatcgtacaggcgacttagttcgtattcgtgaagatggctgcattgttgtagaagggcgttcaaaagaacaaatcaatcgtgctggtgaaaaaattgcgactgaagaagtggagcaagctctattaactcatccacaaattcgccttgcagcactggttgctatgcctgatgagatgatgggtgaaaaaagctgtgcctttattgcatggcaatcacaaaccgatgatccaagcccaattcgccttgctatgtcagttcgtcaacatcttaaagaatatgggcttgctacctacaaaattcccgatcgtgtcgaatttatcgagcagtttccatatacagcctttggaaaaatcgacaaaaaaagattacgtcaacaacttgaaactaaaaccaatgttcttgcttaa

SEQ ID NO: 51761 - DNA, 1224 bp, Acinetobacter baumannii
atgtcggtacagcatccgtattttatccaacgagaaaattttactgaaagcagaattacactcgcaaaagaagttttaaattgcactgataacgctggttttatatttacgactcctgaatacatcatatcgagtcatcaaaaacttaaagatattgaggttacaaaagacactcagctaaaagagtggctaaacgaagcccgtctacaattacaacaagcaattgcagatggttatagcgatgccaaggttatgggtgggttgccatttagttcatcggcagatgtcaatttaatgctaatgcaagatgccaaggtttaccagaaagctttattttcacaaactgatattaatcttgatgacttaatcttaaagcaggccgattatttaccttcaggtgaacactatcaacagcaggttgaatatttagtacaacaaatgcgggcacaaaagctagataaagcagtacttgctcgtattttacaacttgaatttgaagaaaatcttccagtctcagatgtattttataacttggccaagcataatcctgaaggatataactatgcagtcgcaagacaccctcaaagcgaaggttggtttgttggtgcaagtcctgaactattaattgcaaagcaaaataataaaatctggagtaaacctgttgcgggcacattagcgcgcgatgatgacccaattgttgaccaaaataatgcaagagctttactggcttcacaaaaagatcaacatgagcatgctcttgtcatcgaaatgattgccgatgaacttacacctttctgcaagcaactacatgtgcccaaacaaccttcacttattcgcaccaaacgtctttggcacttggcctcacacattacgggcgagcttaagcaagccgatactcatgtttttgacttaattgaacgtctacatccaacacctgcaatttgtggtgagccaagctccgtagcaaaaaatttgattcagcaacttgaaccatttaatcgtgaactattcgccggaaccatgggttggaccgacgccgaaggtaatggtgaatggtctgtgaccgtgcgctgtgctcgtatttatcaaaatattgcccgtttatttgccggtgcaggaattgtggaagcctcacgtccacaagctgaacatgctgaaactgctgcaaagttccgtactgtacttgatggcctgcacatttcaccagaccaattaccacgataa

SEQ ID NO: 51762 - DNA, 1200 bp, Acinetobacter baumannii
atgaagccattttctcatcctttacatcccctatttcaacaactcaatgttgggagtgaagtctggtggaatatcattaaaaaagtaggtagcccactcgttaacctacaaaaaaataaagcgctatgtacctttgtttggcgtagtgctgagtctaaagaaagtattggtgtttacatcgatatctattcacagagcccttctatctatgaaaagtggaatcgttttagccatatagctggaacggatgtgtacttttttgaaatagaacttcctctagactggtctgggagttacgttctagttgtcacgaaagatgaagctccaaactcaacctgtactactactcgacgtcagtggtggcaaacacaactaaaggaaaacgctcaaattgatcctttaagccaccaagcagtttataaaggacatttagcgcgttatatcaatcagattcaactcagaaacacaaaatctttaatagacgattgccgaattactaagacatttaaatggtcaagtcgcttatgccaacaagattacttggttgatatttttattagcggtgaattagcagaagaaaatctgccattaattattttgcttgatggccaaatctggagtcgagagctttctcttcttcctgaaattcaacatttaactgtttcatataagattcgaccagcagtttatgtttttgttcatagtttaaatagccaacaacgtcagcgagattacggatgtcatgatctgttttgtcaggcacttttaaatgagttaattgaacaacttattcaaaaatacacctttatttcacatcaaaacatcacattgtgtgggcaaagcctaggcgggttatgtgcactttatagcgctctgctttatccagatatttttcagcggctaattttgcaatccggatcttattggtggtcggatttttcaaaaagtgctttagccaaagaacacataggtaaccttttagaattcgttaaaaaatccccaaatgctttatctcaaaaagcacagatttatatcagtgcaggcatctatgaaaccgatatgcaagaagatgcacttcaactttaccaacaattgcaagcatttaatgatgtgagtttccactgttttgcaggaggccatgatcctgtgaactggcgcccagacttacttaaagcattgcaagtttttctttcactataa

SEQ ID NO: 51763 - DNA, 216 bp, Acinetobacter baumannii
atgagtaacttacaggaaaattatatcaatccatttgataacgaaagtttgtcttttcaagttctaaaaaatcagcaaggtgaatttagtttatggcctgcgcagcatcccgttccgtctggatgggatgtgcagtatggtcctgacacacggtcttcatgcattgcttatgtagaaaagcattggttaaccattaatccttttcagcaagcgtaa

SEQ ID NO: 51764 - DNA, 7152 bp, Acinetobacter baumannii
atgaatcaagcattacataatgagtttacccaagatatttctggtccaacacgttttgagctggcttctacacaattggggatatttctagccgatcatttaagttctattaacgatctatataccattgcacactgtcttgaactgcctaaatcagttgatctttcattatttaaacaagccattcaaatcggtttaaatgaggctgatacggttattgcttcatattcatctgacccgtcaaaaccttttattgagcttaatcatcaggtccaaatacaaatagaggagtttgatttttgtcatttaacacctaaaaaagctcagcaacgcttatgggattggatgccaaccgatcggttatacgcaaaatcactcaaagaaaccgataatcacttatatcgtcaggtgttatttattactcataataaagtgtattggtatcagcgttatcaccacatcatgctggatggttttagtatgattaacctgacaaaacgtattgttgatttgtaccagcaattgcaagcaggaaaagctcttaacccttcgccttttattgatgttcaacaggttattcaagaacgtcaagcttatgaaaatagtcatcaatttaagcaagatcaaaatttctggaagacatattgccaagatttaccaagtcctgtcactttaagtactcatcatttagcatcaaaaactactgcacaatttgttaaacatcatcttcgtttttcttcaggaattttagccctgatacaacagcttgcttcaaatctcaaagtcggtttgaatgacatgatgatgtcattgtcattacaatatatttacaaaatgaccgataaagcagaattggttgttggtattccatttatgcgccgtttaggttcaaaagcaattcgctccactttaccagcggtaaatgtcttaccggtaaagttcagtgtgagtgaaaaagacagttgggcgagcttagcgctgcatgtgcaggctcaattgcaacagatacgtccacatcaaaaatatgatgctgaacaaattttaagagatttaaatagtatcgacattcatgaacgaatgtatggccctattttaaactataaagcttttgaccaagatctggtgttggatggtgaaaaagtaaaaacacaccacatttctacaggtccaattgatgattttgagttttcttttattgttcaagatcaagaactcattatagaactgcgtgcagatgcagagcgctatacacaagatgagctctttatgcatgggcaacgtttaactctattgcttgaacaagcgctgattcgaccagaacaacaatggaatagttttaatattacaccacagcaggaacttgctgccctgactcaaagtggtattggtccgcgtgttagtcatcctgaacaatataataatgttctagatattttttatgaacaagttaaaaagtatcccgaacgtacggcaatcgtgagtggcgaacgtccaaatcttgagcatcttagttttgctgagcttgcagtacgcgtgaatcaattgactcgttttttacaagaaaatggcgctaaaaagcaaaaggttattgctggggctattcctcgttcgattgactcagttgtggtgatgttatctgtactaaactctggtgcgagtttcttgcctctagatttagattatccaatcgatcgtatgcaaatgatgtgtgaagatgccaacccattatttgtattaactactcaagaacttgcacaaaagctaccgcaaaatattccgcagttatatcttgatcatgaagatgttcaaatacaaatccgaaagcaagatgcgagtgatattcctgccgaaaatcgtaaatttaatttccaagacgtcgcttatgtaatttttacctcgggaagtacgggccgtcctaaaggtgtaatgaatacacatggttctttacttaaccttattttgtcacataaaccaactatttattggcctgtattagaagctgtaaatcagcgtttccgtaaccgtccactacgtgcagcgcatacacactctttctcgtttgactcatcttggttgcaagttttctggatgttatggggccaagagctacatatttttgatgaaaacatgcgtcgtgatgcatttggtttagtgcaagagattcagcaacgacaaatcgatacacttgatttaccgccatctttttgtgcgcaaatgatgacgaatggcttatttgctgaaaaccagcatcagccaacacttattttaattggtggtgaagctgcaccattagctttatggcaacaacttaatgaccagcctgaactttttgctcataacttatatggcccaacggaatatacagttgatactttccgagcagaattaaaacagacagctcgtcctgttattggtaaccctattggtaatacacaagcctatgtactcgatcgtcatttacaacgatgcccgactggcgttattggtgagctttatatttctggttttgggattgccaacggttatttaggtcgcgcggacttaagtgctgcccgctttgtagcaaatccatttgaacatggacagcgtatgtaccgtacaggtgatttagttcgctggaatagcgtgggtaaacttgaatttatggggcgctgtgatgaccagattaaaattcgtggttatcgtgtggagattggtgaagttgaaaatgcgctttcgattttagccaatgttgaaagtgctgtcgtaattgcagaaccgattaataatagtcatcgtttactcggttattgtgtagtcaaaaatgttgaacttgatgaaaaaaccagtgaacaattaagtcagcaatatttaagtcagttacgtcaaaacttacctgaatatatggtgccttctgccctaacggttatgtccgaatttccacgaaatgtaagtggcaaagtcgataaaaaagcactgccaaagcctcaaattcgtacccatagccgaatggccgaaacgtctgaacaacaacttttatgtcaaattactgcatctgttcttaagcttgacgcaattggaattgatgacgacttctttatgacaggtggcgatagtatttctgcgattatgctttgtactcaattacgccaacgtggttacggcttaagaccaagtgatgtattccaatttaaaacagtcgccgctatagcacagcaactcacccgactagatgagcaacaagcagccatttcaaaaccgttattttcagctgaactagaacaaaaggttcaagaaaaatatggtaaaaacagcaccattttacctttgcttcctttgcaaaaaggcatgctgttcttgtctcaagttgaaaaacaattgaattataatgcctttactcgtcttagcttaaatggagacattgatccggtacgtttgcaacaagcattaattactgtattaaaacgtcatcctcaactaggtggacattttgatagtgaattagctgaagaacctgtttttatttattcattacaccctactcaagcttggccagttcagttttgttcagtcactcccgatctgcttgagcaaagcattcaagaagtcttacagcagccgattcaccttgaccaaccttatggcctgattcgggcaactttaattcaacatgctcctgaacagtcagaactattgattatggtgcatcatctgttaacagatggctggtcaactccactatttttacaagattttattaaggcctatcagcaagttaaccagccattacctgcacttgaacatagttatgaaaaggtaattaaagccttatctgcacgtgaccatgaaatatcaaaagtgatatggaaacgtgatttaactgatttgcaaccacttattttatttaatcaaccacagaaagctgtacaggaaacttcatatcgtttaagtgctgagttgggtgcaaaacttcagcacaaattacgccagcaaggcatcacgcttaatgtcttcatgcaaatgatttgggcaataaccttaaatatttatgctcatcgtgaagatattgtatttggtacacctgtttctgggcgttcagcacctattaatggtttagaacagcaaatcggattgtttttaaatacaattccagtgcgtgtgaagctcaacatgcagcaatcactttgggaacaattacctcatttacagcaattgcatgttgaacatttagaacatgatggtttaggcctacacggtattcaacaattaatagctcaaggcaatctttttgatagtttgctagttgtagaaaactaccccgatagccaatatttacagcaaaaacttggtaatgctgcaatttcaaagctcacaaatcgcggttatagtcactatccacttgcgttattggtcatcccggatcatcaaattgagctgttgctcgaacagcgtggtgtaattgatcagcctgagcatttccttgagcgaatggttcaattaattgaaatcgcattaaatgaaccggagacttgtctaggtcactatcgcttacaacttgctggggagcgtgatttaatccagaaagttaatcaaactcaacatgaagttcctccaacaaccttacagcaattactcagagaacaagctcgaaatactcccgacaaaacagcgttatgtgatgaacatcatcagcttagttttagtgacgtacgttttcaagtttgtgctttagctcagcaattgcaaaaaatgggcgtgcaggctggagacatagttgccgttgccctgccaagatcaatcaaactcagtattgctattttagcggtgattgaagcaggtgcagcttatttacctattgatttacaacatccgtctgagcgcatcaaatttatgttgcaggatgccaaatctaaacttgtgattggtgaacaaaaagatctagctgctattgcccatccatcaatagctacctttgcttttaatgaattgtttgatgaaacaaaggttgatttaagtagttataaaacgacagttattaccccacaacatccggcatatttaatctatacatcgggtacaacaggccaaccaaaaggtgtcatgatttctcaccaagccattgtgaaccgtattttatggatgcaatcagaatatccactgtcagccaacgatacgattttgcaaaaaacgccatgcacttttgatgtctctgtatgggaatttttctggtcgtacttagtaggtgcacgattggttatggcacctgtagatgcacaccgtgatccattggcattattaagccttattcaaaaatatcagataacgacattacattttgtaccttcaatgctggctgtttttgaaaatgctgccactgaaattttgtcatctgctcagctccaaagtttgccaatccgccgagtattctgtagtggtgaggcattaccaacggctttagcaaaatcatttaccgagcactttagctgtgagctgcataacttatatggcccaacagaagctgcggtagatgtgagttatatggacgcaacactgggattacacccagaagaaagtagcgttgcaattggctatccagtctggaatacccagctttatatcttggatcaatacttacgccctgttcctgttggagtggatggtgagctttatttagcaggtcatcaattggctatgggttatttacatcgagcagacttaacagcaacacgttttgtggcaaacccatttgcagcaggtcaacgcatgtaccgcactggtgatattgcgcgttggcatgcagacggcagtattcaatatgtgggccgtgctgacgaccagttaaagatacgtgggcaacgtatcgaactgggtgaaattgaacagcaattatccttaatcagcagccttgatgtagttgtacatcctatttcttctgaacaaaataaagctgatgttcagttggttgcttacttgcaaacaacagcacctgtggatattgagcagttaaagaaacaattagcgaaacagcttccagcttatatggtgcctacatactatgtgctagttgagaaattcccattaagtcataatgggaagctagatcgtaaagcactgccgcaaccaaaaattaatccttcaaatgcagaaaaacagtacgccaccactgcttttgaacacgaactgacacgtattttccagcaagttttaaatacggatcaaactattggtgtgaatgaagatttctttgcccttggtggacattctattttagtaatgaagcttgcaattgaaatccgaaaggtatttaagcggaccattccaataggtcagttgatgagtcatgtcacaattcaacgtttggcggctttacttcttacacaagaacgtttggcagaagtcgaacaaactggcatgcaacccattttaccgattcgttctggctctgcgcatccattgttctgtttttacccaggttctggttcagcatggcaatatacggtattgaaccgttatctacatcctgatttaccaattattgggttgcagtcacctcgcccagatggcttattggcaaatagtacagatatggatgagctggttgaaaaacaacttgagattattcgcaagcaacaaccaacaggcccttatactttattaggttattcacttggcggtacagtggcttatgcagttgcagcgaagctcactgaacaaggtgaaaaagttgattttcttggtttattagacacttaccctgccgaaattcatcaatggttagatctatctgtagaggaaatgaatgctgaagctgaacaagaacagctccaattcttcaatgatattttagccgatgcagatacggcattaagtgaagaaacacggcgtttacaagaggatatttttgcgaactaccgtgatgccgtacgtttattaaaaccttataaaatgccgcattttgacggtgatctacacttagtagtcgctgaaaaagatttgcttccgtatatacaaccagaacaacaatggtcacctttggttaaaaaactcaatatttttcgtttaagcgaagcagaccataccactgtgttgtcacccgaacaacttcaaatacttggaccaatgttaaacagcatgatttgtcaggcacgcggtttagaggagcgtatgccatga

SEQ ID NO: 51765 - DNA, 1251 bp, Acinetobacter baumannii
atgagctttaaatctatattgaccgattttagtcttttaaaacgtaatgctcatttccgacatgtatttattgcccgcaccttgtcattgttaaccattggcatgttggtcgtagctattccaaaacaagtctatgacatcactggtagctcacttaacgttgctgtcgccatggcttttgaaggcattgccatgtttattggcttattacttggtggtttgctgtcagatcgcaaagatcggaaatggctgattctattggctcgtggtgtgtgtggtttaggctttgcaggcctcgccattaacgccatgtttgagcatccatcgctgtatgccatttattttttatcggcatgggatggtttcttcggtgcactgggtgtaactgcaatgatggcgattatgcctgtgattgtagggcgtgaaaatatcgtacaagctcgtgcgattagtatggtatccgtacgtcttgcaaccgtgatttcaccagcaatcggcggtattttaattgctgctagtggtgtcgcaactgtgtattgggtctcaacggttggtactttacttactgtatttttattgatgggattgcctgcacttaaaccgcaacatacatcaaatgatgaaagtcctcttcgacaattagctcaagggttcaagtttgtttttaaaaataaagtggtcggtagcaccattttaattggaacattgcttagttttagcagtgctattcgaattatttttccacaaatggcagatgaaattttccacggcggtgcatttgaactcggacttatgtattcagcttttcctttaggttcaaccttgggtgccttactcagtggatggacaacacgtttactcagacccggtttagtcatgctctatacctgcttaggtgtttttggttgtatgattatgattgggctctctccttggttactggtgaccttgcccattttatgtttgttcggatatttgatgtcgattgcgaacttgcttaaatacagcattgtgcaaggacatacacctgatgaatatttaggacgcattaatgctatctggcttgcacaagatgctttaggtgattcaattgctacaacaactttaggccttttaactcggtttttaccaatatcaggaagtattctcttctttgggatagtaagttttgcggtaggatttatgttcttattccattctcaagatatgcgtgaaaccggatttcaagatcctaaactacaagaaaattaa

SEQ ID NO: 51766 - DNA, 732 bp, Acinetobacter baumannii
gtgagtcattatctatatattcctgaacaactcagcaaatcaatttatgaaatttcgagctctatttttctcacatcggggctattctgttataagttagatttatcaaaaacacagcatttgcatatagatcaacagttagagcatcccctaaaaattgctcaagcgcgtgtcgagcgtaaaaatgagtacttatgtggtagggtcttagcacaggctgttttaaatcatcatttcggtttgaatcagccaataacttctatgcatgaacatttgcccatttggccatctcatgttttgggtagtattagtcattcacaaaataagttaattgttgggctatcaaataacgcgctttatttgggaattgatatcgagcactgggtaacttcagaatttgcaaaagaaagtgcacaccttattttaacgccatctgagcgtgatttatggagcggtaaggcggctaagttttttgattttgcccgatacgtaagcttaattttctctgtaaaagaaagcctatataaagcagtttattccacagcaaagcaatatattgatttcttagaagcatctattgttgatattaattttgacaatcaaacattaacgttagcttttacattagaaactcaacagcgttatcaacttttagaacaatatcaagggggatgggttgtagaacaagactgtattatgacttgggtttatcaagcaagctattgtgtttaa

SEQ ID NO: 51767 - DNA, 291 bp, Acinetobacter baumannii
atgaaagctaaaattcagtctcctatccagccagactggtggagtaaaacttttgctggcggggttttaggactaagtctttccatcgcgattggcaatttagtagttctattaggtcgtccttatgttgccatggatttattggtgcaattgggaatgtggagtgtgccgtgggtttggatgcctattatgtttgccagttatttttttacgaccggacaaaaagcactgatctatttatccattgcgattgccctagcgtatagctgtattttcgtattgcggggttaa

SEQ ID NO: 51768 - DNA, 1599 bp, Acinetobacter baumannii
atgaaagtacgttcagacattatgaaattagcaaaaagcatgcatacttgggtgggtgtatgtgcagggattttgctttttatctgtttcttcgctggtgggcttagcatgtttcagcaccacattagtaagtgggctacgccaacgcagcaagttttacctaaagtttcacccaaccaatataatgagcttattcaaaaagttcaggctacctatcctgctgcacaaaagaacttcacactaaatttatcgtctaatgaatttcactacgcgcctattacgtggagtgaacatggagatggctttaatgctgctcagtctacgtggatggcaagcttagacaataaaggtcagttaatcgttgctcaggaaaacttatctaaagcaggctggctaatcgaacagttgcatgaaacagcaggcatacccggcatggcaggtcatcacggattaggactttacgtgatgggcgtggtttctatttcatattttcttgctttactttcaggagtgattattcttttaccaactttggtaaaggattactttgtcatccgtcctggtaaaaataaaaagcgtttttggttagatgcgcataacgtgattggaattacgagcttaccttttcacatcattattagcattagcgttattgtctttgcttttcatgactttttttacgatgcgattggtcagctggcactcaaaggacagccagtttttcagcgttctccccctgcgcttattcaacctaaacaaacacaaatagatgtgcagcaaatattagctcaaacaaaaaaagtagcacctgaatattcagttgactatatccagttcagtaacctcgataaacctgaaaaagccaatgcacgtatagccttgtatagccccgatcagatgttacgcggcgcaaatcaagactttatgcgcatgaacccctatgcagttgagcactttaatcataaaggtattaatactcagactgatggaggtaataagttaatcaacgccatgtttagcctacattttggaagttttgggggtacgggcgtacgttggatttattttgtgttaggtgtcggtggcgctttcttgttttacacagggaacattctttgggttgaaactcgtgcacgtaaacaaaagcgtgctgaagattctgttcctgttcaacgtaaagatgtggtgttcctcgcgaacttaactataggtgcatgtttagggtgtgttctagctgtcgtaggcacaatgttagctagtcgttggcttttcgctacactcaacattgaaagtataaatcacctcttcatgtatggttattatgcgattttcctactgactctgatttatacctttgtgattggctacgcaaaagctttaccacaactgctcttaaccttggtttttgtgttatttgcgattccacttacatctcttttagcctacttcattccccaaagtggcttatgggtccatggcggagaaatcttagtagttgatttcttagctgtcatttttgcgttagctttctggcgtttttatcaacaagcccaagatcgccgaaaatctgctccaacgggcagtttatgggctagctaa

SEQ ID NO: 51769 - DNA, 519 bp, Acinetobacter baumannii
atgccaacgattttaaaaacagcaggttttagtacccaacagtttagtttaattgctgcgattttcccttttggcggtgtaattggcgcaaccattatgggatggtacatggataaactaaacccaactacagtgattaaatattcatatttcatcgctttcagcctatttattgttgctggtctagtgagctcaaatattttcttattaggccttactatcttcttaattggtgcattactggctggtgcacagtcttcattactgccacttgcagctatgttctacccagcggtatgccgcgcggttggtgtttcatggatgcatggtattggtcgtattggtgcaattttaggtgcattctttggctcactcattttcacctttaacttaagtttaagcggtattttctttattctcgctttaccaactttcatctcatttattgcacttagcctgaaagtgatttatgaaaaatctaaacacaaacaagtgttaaaacttgaagaaagtctataa

SEQ ID NO: 51770 - DNA, 693 bp, Acinetobacter baumannii
atgtataaaactttaactacttttatattagtaacttgcctcggtttaagcggttgtgcaactacaatgttgtccaatacccttcctagcgaaacaaccgaagttaagacaaatattttaaaaactgatcagattattgcactcgggcaagccgttaaagatgaccaaaaacaaggtattgtctttgttggtcaagactataattacttaatgactgatggtagttctgaatttttaaagattattaaaactatacctgctaatgacagaacacttaatatcccttcccctcttatactcactatggaagatgcaaatcatttcaatggtgtaatccaagttcgctataacacccaattaggaaatctcaacgaaaaacaaaaagatatgttaaaaaaattggggtttagagaaaattttaatgcagtacttgagcaacaaaaaaatcagtacccatatattaatatttttttcaaaggccaactgtatgaagctaaaaatccaaaagatatacagcaaaaattagaaaaaccatatgccgttgaactacaagaaaaaattgaaacaacaacgaagcacccgtttaaaagcgctactcgcaaagtactctatccattagcgatgacttttgatgtggtaactatttatccgttattaatttggtctgatttaagaggcgattttaataaataa

SEQ ID NO: 51771 - DNA, 1722 bp, Acinetobacter baumannii
atgagtactcaaaaagtatctgatattatcattgaggtgctggaacaagcaggtgttcaacgttgctacggtattgtgggtgacaccttaaaccatgtcactgactccatgtctaagagtaaaattgaatggattcatgtgcgccacgaagaggttggtggttttgcagcaggtacagatgctttactcagtggtcacttgacggcatgtgcaggatcgtgcgggccaggaagcttacacttcattaatggtttgtatgaatcgcatcgtaatcgtgcgccagtcattttgattgcaagccagatttctaccgagatggcaggatttgtcgactttccacaatatgtcgattttaaatcggtttatgcaaaaaattcggttttttgtgaagagattacccaaccttcacaagccagacatattatgagcatggcgtgtcaggctgcgctgaccaaacgtggtgtcgcggtggttattgttcctgccaatatcagtgcagcgtcggctgaggcgggtctaccctttgtaccgcaccaaacagatcccgatattttgccgaataagtccgaactcaaccagattgttcagttgatttcacagcatcaaagaattggaatttatgcgggtgctgggtgtgaggatgcgcatgaccaactcgtggcttttgcagagaagttaaaagctcctgtagcacatacttcacgtgctaaggattttgtcgaatacgacaatccatacaatatgggcatgacgggtatttttggtaataaagcgggttatcacaccctcatggattgcgatttgctgatcttgctaggtaccgatttcgcatgggcacagtattatccaagccatgccaaaatcttgcaaattgatattgatccgacccatttggggcgtcgccatccgattacattaggtgccgtgggtaaaatttcatctacactcgatgcattattgccactgcttgaaacacgtcatgagcgtgattttctagatcattgtcttgcgttgaaacatgagagcgatgaaatacgtcgtaaagaagagcgggtaggtaaagatgggctgattcatccacaatatctggtgtctttactcaaccgttatgcagatcaagatgcaattttcttcggagatggtggctcaccgatggtatgggtattaagacatattgacgtaaatggaaaacgtcgaacctttaccagtttgttacatggcactatggccaatgctatgccgcaggcacttggagcccaaaaagcattcccgaaccgccagatcattgcattatgtggagatggtggcttagccatgttactgggagatctgctcaccacaattcaagaaaaactgccaatcaagattgtggtatttaataatagttcgctcaattttgtagagcttgaacaaaaagtggaaggtttgcttgaccattatactgacctgctcaatcctgatttcggtcagcttgctcgcgtaattggtttacatggacaaacgataacgcatggtaatgggttagaacaggcggtggaaagttttttaaaacatgatggtcctgctttactcgatgtgcataccaatccgatggagctggtaatgccaccagatcctaacctgaatcaggtttcttcaacctctctctatgcgattaaagcgttaatgtcgggtcgggtagatgatgttaaaaatttgttagtcaataattttattaaataa

SEQ ID NO: 51772 - DNA, 252 bp, Acinetobacter baumannii
atgctcgtaccggtcgtgaacattggtcttgccgtttatttattttgtgcaaaaggaactgaaggccctaatgattatggaccaaagcgtccaacgccaagctgggaacgtgttttaggctggatttatattgcgcttattccacttgcagtcatttttgctattgttgccacaatcatggctcctacctatgaaggctatgttgaaaaaagcgaaagcgttatcattgggtccccatctcagtctaaataa

SEQ ID NO: 51773 - DNA, 165 bp, Acinetobacter baumannii
atggactccgtttatatttttatccaaatttgtggagctaaccatgtcataagcgattggtcgttttcaatgaaagatacgcaattaacccaattcaatagtgaaagttcctcacaaggccaacaaactgttaccgaacaagaaatagagttacaaaaaatatga

SEQ ID NO: 51774 - DNA, 420 bp, Acinetobacter baumannii
atgatccattcaaagattattggtattggcgtaattgctggactgtgcagtatggcagccttagctgaacctgcggtccaacccggtgagactttagaaagtttatctaaagtaaaagtgactacaaccgtcaatggccaacctggctctattagtgatttagttaaaagtggtcaagtacaacctgtttctgctgccccaacaggtgctgctcctacaggtgctcctattccagccgatgtaccgccggcccctcccgcagatgtaccaccagcacctcctgcgggcggtgaaatggctgctccagcaccacaagacccaaatacaccgccaccaccggctaacccgaaccagtcagcagacccaatggcaaaagatggtgcattgccagcagatgcacctatgccacaagctcaataa

SEQ ID NO: 51775 - DNA, 2151 bp, Acinetobacter baumannii
atgagaattatttacattatctttactattatgaccatcccacctcgaccatttaaactttctgtaatcgcctgcgcgatttgttatgcaaatctcacgtatgctcaagatgcagatatacaagctttgcagacgattcaagttaaagctacaagtacagagcagtcttctgaacaaaccaaaacctataatgttaagaactctagcagtgcaactaagcttaacattgaggctaaagaaacgcctcaaactattaatgtcgttactcgtcaacaaattgaagattttgggcttactagcacccgagatgttctaaacaatacacccggagtcacagtaaccaatcaggaaactgagcgaactacttatatggctcgtggttttgaaatttcaaatattttaactgacggcgtaggttttcccctctcaggttataactataacaatactaatcctgatacttatttttatgatcgtgtagaagtcgttaaaggtgctgattctttaacgaatgcatttggtgacccaagtgcaaccatcaataatattcgaaaacgcccaacccaagaatttcaagcaagcggaggtataagttacgggtcttgggatactcagcgttatgaggctgacgtatctggctcaattctaccaagtggaaaagtccgtggtcgtgttatgggctatgagcaaactggtgactcataccttgaccgatattcttcagaaaaaaatggtttcgctggtattgttgaagctgatttaacagatacaacattacttaccgtaggttatagccaagaaaaaaataaaccgaatgcaaacaactggggtgctctacccttgcttgatgccaacggcaaacaaatttcttatgatcgctcctataacccaaaccctgactgggcgcattgggataatgaaacacagaatgcttttgttgaattaaaacagaaaattaatgatcaatggtcagctaagctgacttataactatcttgataacaagcataacagtcgcctcctttactattatggttatccaaaagctgatggttcaggagtgtctttgacaccatggggtggccaagagcatcaagaacaacatgctgtagattttaaccttgagggaacttataagctctttaaccaagagcatgaagcaacgttaggttataactatgtacgtagtcgtcaacacgataaacaatctacgggaacaattaacgatagtaatgttatcaattcgaccactacaaactgggcaagttggacacctcaatctataacgtggtcagatttctctgaagcagcgaactatacgcaaaatatagattcaatttatgcagctacacgtttacatctcaatgaagatttaaaactcttgcttggcgcaaactatgtgaaagccgagagtaaaggcgaaagctatggttcgcctatggaatatagtgaaagtaaagtttcaccgtatgcgggcttaacttataacttcacacctgaatatacaggttatatgagctatacctcaattttccgtccacaaactggtattgatcaagataccaatcaagctttaaaaccaattgaaggtaaaagctatgaaatgggggtaaaaagctcatggctagatgaccgtttaactggaacgctttcagtattcaaaaccgaacaaaacaattacccactacgtaactcggacggaaatccacttaatcgaaaagtaccaaccagcgatttagagtcacaaggtgtcgaagtcgggttatctggtcaaatcactgataacatcaatcttgcttttggctatgctcaatttagtattaaagatattaaaaatggtggcgaagcgagaacgtataatccaaaccaaacccttaatttgctgactacctatacaccatcagttttacctaagctgaaagttggcgcagggctacaatggcaagatgccgtgaagctatacgactcgacagcaaacagcaccatcaagcaagatgcttatgccttagtaaatttaatggcgagctatgaagtgaatgatcacattacgctccaagccaatggaaataatattttcgatagaaatatttgtatagtttccctaatggtcaaggcttttatggaccctcagccaactatacggttgctgtaa

SEQ ID NO: 51776 - DNA, 300 bp, Acinetobacter baumannii
atgtccaaaacattaaatctccctatgtcatatcgtataaaagttttctatcgatttttagtcgttttcggtatgggttatgcctgtatggcttatttaagtcttgggcttactggtatctttcatttgactctagataaacctgaagccatttatttggcagcatttatctctattttgttttatgtattttttgtgatggtaggtttttgcattcaatcattatggaaagtgactgggctatcaatcgtgctatttacccttttctttattgtgacacggatggtgagttatgcataa

SEQ ID NO: 51777 - DNA, 492 bp, Acinetobacter baumannii
atggtgctgagtttccgtcaacatttgctgaagtggcgcacgcttttaagtgctatcactttgctgtgtttactatggcacatttttttgcctactcttgtgcaaattggcatcgtacctgaattgtatactatgcctagtcactgccaaccagttgtattagagcattcagcctaccaacaaaattttaatatggagcagcatcacctttcacatgctcatcaccatatggaatctattcagaataaatttcataccaagcatgctcaagaggttttcgcgttagctactcaaatcatgaagcattgcccgttatgtacgcatgggctagatgcagcaattttaattccactcattgctttgatttttgttttaattttacgttggtttagccgtgtacgatgtctgtgtcatacgtggaccatacaactagaacttccccttactttctatattttaccgattaaacacgccccaccaactgctctataa

SEQ ID NO: 51778 - DNA, 2121 bp, Acinetobacter baumannii
atgtcatccctcaaatttcgcttatctgttttaagcgcagcatgcttatctgcttcatctacctcactagtttttgctgaagacttaacaccagcaaacaatgacacaaaaatcttagcaactattgtggtcacggcaagtcgcgaaggtgaaatactgaataaaactccagctgcaattagccaaattaatagtgagcaaatagaaaataaacatgccacttttattggacaacttgtgaaccagacaccaggggttttaatgaatgatcttggtaatgaacagcacatgatgtctatacgccagcccatgactactgctgctgtttatcaatatctagaagatggcctttcaattcgacctgtaggtgtgtttaaccataatgccctgtatgagatgaatatggcgggtgtagacaatattgaaattttacgtggaccagcaagtagtgtttatggaagtaatgcaattggcggaaccctcaactttttaaccaaggcgccgagtgccacaccaacagcagatattggtctgagcgcaagtagtgaaggttatcgccgtgttgacgtgggagcttctgatacctttgatactcgtactggcgcccatgggttaagagtttctgcctatgccagtgatcgtggtgatagctggcaagatcatgccgaagcagataaacaaagcattacagtacgtcatgactggcaaatttctgattcaactaaactgaaaaatatatttacctataaccacttatatgcagatatgacaggtagcttaaatactgaagattatagccaacggcctggctatagctatcagacatttacttaccgggaagtagatgcaacacgtatatcctcccaactaagtcatgactggaatgatcaacagcaaagtcaaatcactttatattatcgggataatacaaccgagcaaaatccaagctataacataaaaactgacaagaaagatggagttgcaacaggaacttacagcgggcaaaccacttataatagttttcagtcctatggagtcaacctacaacactcagcaactttaggccaattcaagttagtcgtgggtagtatggctgagcactcaccgactcagggcagaactaatgatattgaagtttttcgagatcctgttacacgtatttatacgagttttaaacagcgaaagcttttacgtgattttgatgtcgacgttgataatgaagcgatctatgctcaagtgaattggcaagctttgcctaacttaaacttagtcggcggcacacgttatgattggattcgttatgactatcagaataatctaactccttctaatgttactggcgctccagatgaaacaagaaattttcataaggctagtccaaaattaggagcaatttggaatattactcctcaaatcgacttctatacaaactggtcacaaggctttgttccaccagaggtcagtagcctttacggcgcaaatttagttactccgaatttaactgaagcaacttttaccaatattgatgcaggtgtccgttttcaaacattcaatgaccgattggatggtgaaattacgctttatcgtttaaatggcgaagatgaagtaattagttatactaaacccgataatacccgtgaaccacgtaatgcaggtaaaactcttcatgaaggtattgaagtcggtggaacttggcaaatttccgatcagtttgaccaaaaattgaaaatttcaggtagctgggctcgtcatcgttatgaacaattccagccgtcagctactattggctacagtggaaatgatatgccgagcgcaccaaaaacttttggtacgcttgaatatcaaagtaagccaatccccgaattattactctcagcagaaggtgtatatgtaggttcatattggattaatgacgccaatactcaaaaatatgatggtcatacggtactcaacctgcgcgcaaactatcgtaaaaaggcctatgaaatatatggtcagattttaaatgtggcagatacacattatgctgaaagcacttcttttagtaataatgaagtgagctatacaccggcagctccacgtacatatttaataggtctacgctatcattttggtaattaa

SEQ ID NO: 51779 - DNA, 741 bp, Acinetobacter baumannii
atgacacctttttggattgcattgcaatttttaactgttctacctattgagttaaagactataccaacggcgcaacaaaatggtcgggctattttgttttatccactggttgggatgattattggtggcatactttttcttgttgcctgtcttttagccaaattacccgttgttttacttgccgcaattatacttactttatggatttggctgactgggggattgcatctagatggactggccgacacagctgacgcttgggtaggtggctttggggataaacaacgtactctacaaatcatgaaagatccgagctgcggcccaattggagtgctgagcttagttatcatttgtttgctcaagtttgctttggtctttgtattgattgaacaacatcaaacgctattcttagtatttgttcctgcacttggacgtgtggtgccatctattttgtttttaactacaccatatgttcgcgaaaaaggcttaggtcgttctttgacagaccatttgcctaaaactgtttcatggatagtagctgtattaattttactgttacctttgtattgggaatggcaagggctgatagcggtaattggttttctaataagcctgatttatttaagatatctgtttataaaacgaattgatggcattacgggagataccgtgggcgctacgattgaaattagtgaaaccgttctgctttttacttttgtcttaagttgtttttatttatag

SEQ ID NO: 51780 - DNA, 408 bp, Acinetobacter baumannii
atgaataaagaaacttttagaatcataaatccctctactttatataacccaacaccaaatgcttatagccatattgctgtagtccaaaattttaaaaatattattcatattgcaggacaaggcggtgaagattcgaaaggggaattaagcccaaattttgaagaacaagccactcaagtttttaataacattcaaaatgcattaacagcagcagaagcaaaaatctcagatattgctgttttaagggttttaattgttgaccactcagatgaaaaacaccaaattttaattaaaatcatgcaaaatctatggaaaaatcatccttttccagcctgtacgctcattcctgtaccacgccttgcattagagcgcatgctcattgaagttgaagcaacagcatacacctaa

SEQ ID NO: 51781 - DNA, 504 bp, Acinetobacter baumannii
ttgaagtcattaaataattcagatattcgtatagcatcatttaacgatgcattatctattgcagaagtacatgtgcaaggttggaaagaaacctatgccggtatggttaagcaagaaatattagatgagcttaacgtactagataaagaacagttatggaaagagataagcagaagtcctgatcataagttatttatctatactgaaaatggggtagtgaaaggctttcttgatggttatttaaacccagaaagcaatattgctgaaattcttgctttttatcttttaaaagaagttcaaaaacaaggtataggtcgtgaattattccaaaagttctatcaatgcgctttaaatcaaggttatgcttttattcgtttagaagtctttaataaaaatccgagccgtttcttctatgaaaaaatgggagcacagttaattaatgaagccgaactaccagagttcggcctcggaataacagagttactttatcaatggaaactttaa

SEQ ID NO: 51782 - DNA, 264 bp, Acinetobacter baumannii
atgttattcaaaaaattcgctgttgctgctgctgttgccgctactttagctttcgttggttgttctaagaaagaagaagctccagctgctgctgctgcttctgaagctgtagctgctgcttctgaagctactgctgctgcttctgaagctgctgttgctgttgacgctgctgcttctgaaactgctgctgctgcttctgacgttgctgcttctgcttctgacgctgctgcttctgctgacgctgctgcttctgctgcacactaa

SEQ ID NO: 51783 - DNA, 840 bp, Acinetobacter baumannii
atgagaaaacttgtttctatcatcattttgctgagcatcgcttggttggctaagctcagttacgatatgtggcaaatttctcgtattgttcctgagcttcagcagagcttactgcaatcggagcagcagtatgccaatttaaatgatcaattggtggcattaaaaagacaaacacagactcagtcgagtagtgacgttcaaacagcacctttaacaaatcatgaaatcattcatactggtattacgccaacggtagtcattaaacaaaaattagatttaattcagtttgcgatagatcaacaacagtttatttatgcggtagatcatttaactcagctacaacaatccttaccacaatatgaaattgccccggcattacaacacagtttaaatcaggcgattgaacaggataaacaggcaatacagcaatacgtaattgctcaaaatcagcgtcatcaattgattgatgatttactgcaaactattgataagaatattcaacaagcattagctcaacctaaacttgaaatggatcaatccgaggcagtgtcttggtggaaaaaatggttccgtattgaaaaagtagaaacgccgtctattaatttaatgaatcgaagtgttgtatttaaagaagtgcaattaagactcttaattgctgagcaggcactaaatcaaggaaagatggcagagtatcaaaatgagctgcaatcagtaatgcaaaaactaaatgaactgccagacgccaccagtcaacaattgaaaaaccgtattgctaaagtggctcacttatctatcgtgcctgtgcctaaattatcaactcttggtctattaggctcataa

SEQ ID NO: 51784 - DNA, 252 bp, Acinetobacter baumannii
atgtttgattaccttattgttgctgtattggtgttgtggagtgccattgttgtctttaaaaaggtatttcctcaaacgtccgcttcagtatttcttgcattatcaatccagtgtcaacgcttgggttggcagcgtttggcatcatggttgaagcctaaacaggctgccggttgtggtggcaattgtggctgttctactgatgatgcacctacccaaaagtccgctccggtacaaacggtgaagtggcgttaa

SEQ ID NO: 51785 - DNA, 1857 bp, Acinetobacter baumannii
atgagtaatgcgctacgtattgcccttgtgggaaacccgaactgcggtaaaacttcgctgtttaaccatttaactggaacaagacaaaaagttgctaactatgcgggtgtaactgtagagcgtaaagtcggtaactttcaattaccttcaggccgtgcagttcgtgtactagatttaccgggtacctatagtctgcaggcaactagcccagatgaagaaattacccgtgatgtctgccaaggcaaaattgccgaagaagggcagcaagatgcttttttatgtattgtcgatgcgacgaacttaaaactgcatttgggtttggtgcttgaaattattgaattagggcgtccaattctggttgtattgaacatgatggatgaagcgcgtcgtcgcggtattcaaatcaatacacagaaactctctgagcgtttaggtgttcctgttgttgaaacggttgccgtacgtaattcaggtattgaaaatttattgcatgcgcttgatcaagaaaaatataccgtacctcatactgaactgagtggtttaagtggtggacatcatcagaaaatcgaaacgatttttaaagatgtggttaattttgttgatcatgatgataagcgtactgactttctagatcgaattttcttacatcctgtattgggtttactcagcttggcagtaatgatgtttattgtctttcaggcagtatttgcttgggctgaaccttttaaagctgcaattgaagatggggtaatcccatggttaggtgagtggttaaatggagccatccatcagccggtgctacgcagtttagtcgtagacggtgttctggctggagcgggcacagtattggctttcttgcctcaaattttgattctcttcttctttattttagtactcgaagaatcaggttatttaccgcgtgcagcgttcttgctcgataaattaatgtttaaagccggcttgagtggtcgttctttcattccattattatcaagttttgcctgtgcgattcctggcattatggcaacccgaagtattagtgattcacgtgaccgttttaccacgattatggttgcacccctcatgacatgttcggcacgtttgcctgtctatgccttgttaattggtgcatttattccaagtcaaactgttttaggcatctttaacttacaaggtttggtgctgtttggtttatacatggcaggtattttaagtgcactttgtgttgcctttgtgatgaagtttttgcgtaaagacaaatcacagcatgccttgttaatggaattaccaagttatcgttttcctgatccaaaaagtatcgctattgggttgatggaacgcgcaaagattttcttacgtcgtgttggtgggattattgttgcattgaccattattctttggttcttgtgtactttccctcaaccacccgaaggcgcaacgctaccagcaattgattatagttttgcgggtatggcagggcactttattcagcctttattcgcaccgcttggctttaactggcaaatcgtggtggctctcattcctgcaatggctgctcgtgaggttgtggttgccgcattaggtacggtatatgcgttatctggtgctgatgataatgctgttgcacaggggcttgctcatttgattagtgcaaacggcacgggttggtcattggctacagggctatctttattggtctggtttatttatgcaccacattgtttagcaaccttggcaacggtacgccgtgagacaggttcatggaaacatgtggcagtcatgacggcttatctatttggtttggcttatctcatgtcatttttaacctaccaaattgcatcacgcatttggggttaa

SEQ ID NO: 51786 - DNA, 297 bp, Acinetobacter baumannii
atgatcaatttagtgcgaaatgctttacgacataatgcacccgactcaccgaatgtcatgatcaacattcattcacaaacaaataaaatttatattgatgtgatcgattacggtgaaggtgtttcaaaacgtgatatatctcaattatttaaaccattttttagtaccgaaattaatggaactggtttaggattatacttgtctcatagtttttgtgaggcaaaccatgcaaagctcacctatgtagagcaaaaacaaggggcatgcttcagaatagaatgcccaataatatattga

SEQ ID NO: 51787 - DNA, 834 bp, Acinetobacter baumannii
atgtcgcacgaagctcaaattagtaggacatctccaacagcctttttgttcttggttgatcaatcaggttctatgatggataagatgtcatctggaaagactaaagcagaatttgtttcagatgttcttaataaaactctaatggacttaattacgagatgttctaaatcagaaggtattcgagattactttgatattggtgttttaggatatgggcatcaaggcgtaagtaatggatttagtggtactttaggcaatcaagtaatgaaccctatctcattactagaacaaaacccgcttagaatcgaagatcgtaaacgtaaaatggacgatggcgcaggtggaatactagaagttgcagttaaatttccaatgtggtttgagccaacagcaaatggtggaacacctatgcgagcagcgttaacaaaagctgctgaagaattggcaaattggtgtgatgcccatcctgatagttatccaccaacaatcttacatgttacggatggtgagtcgaatgatggtgatccagaggaaatcgctaatcatcttgcccagataggtacaaatgatggatctgtattgatctataatttacatgtaagtgcattaagtaattcccctatcattttaccttctagtgagcatgttttgcccgatgcatattctaaaatgttatttagaatgtctagcgagttaccagttcatcttgtcggttatgcacaagataaaggctttaaggtgagtggagaatcacggggctttatttttaatgcagaagcttctgatattgttgatttctttgacattggtacgagagcttctcaattacgctaa

SEQ ID NO: 51788 - DNA, 729 bp, Acinetobacter baumannii
atgaaaataatttttcaaggaactcacccaaaagaaattggacaagaaaaagcaaatgaggattcttttgctttttctgaagatttaaccaagttcattctatgtgatggggctagcgaatcatataattctcaattgtgggccaaaattatttgtaactctttcattaatgatgatgatattgatgaaaactggttaaatgatgcagtgaaaaagtatgtctcagagcatgactttaatactatgagttggtctcaattatctgcttaccaacgtggtagtttttctacgtttactagcattagcgttgattcaataaataaaaaaattattacgagattgtttggcgatagttttatatttttctttaaaaaaattaaaggtaactatgaatattttccaacctttaatattccagattttcatttaaacccaactctactgtctacaaaaattgagttaaataaaggtattgatttaaacaaggtaaatagtaaacattatttagagataccaattttaaaaaatgatgaacctataattgcaatctgcgcaacagatgctctagctgattggttttgtagagctatgtcaattattaatcacaataaattggttaatatatttttgactataaatgataggaaattcaataaattggttaatttcagtcgtaacagaggaagtttaaaagtggatgatactactttggttattctagagatatga

SEQ ID NO: 51789 - DNA, 1719 bp, Acinetobacter baumannii
atgagctatccatcttttgaaaaatataatgaggcatttcagctccatagcaaattattaaatgacccagaattagcaaaaggtattgtcaaaaagacagggcttggtgttcctttagctattagtggtggatttgctttaacttatacaattgagtgcatttcaaaaaaatatgccgtaaggtgttttcataaagagtctaaatctctagaactacgttatcttgaaatttctaaaaaaatcaaaaatctctcttctgcttttttcctagattttgaatttcagcctaaaggtattgtagtagatggtcatgcgtatcctattattaaaatggcatgggctgtcggaactacacttggtgaattttttgaagataattatgataatcaagaatatatagtcaatttatctgatgccttaataaagctatcagaatatttagagagtaattcaattgctcatggtgatatacaaactggtaatttaatgatctcaaatgcaggatcttcaatccaattaatcgattacgatggaatgtatatcgattctttagcacagttgggtagttctgaattaggtcatatcaatttccaacatccttatagagccaaaataaatccttataataataagatagatagattctccttgatattattatggttagcatgcaaagcattggaaacggattctaaaatttgggataaaacacagtcagatatggattctgtgatatttcgttcgacagattttactaatccaaactcatctcaaacatttgcattgctaagttcatatccaagtttaaaggaacatactaaaaattttgcagcaatatgcagcactaataaattagaaaatataccaagtttaagtgatttcattaaaggattaaatattcctagcttaagcaatatcaatattgtttctaagaatgttagtcgtgctgtagttgttaatgaatatattagtccctaccctattatctcagctttggattacaatgcttgtttaaagcagactggtaatcaggttgaagttatcggtaaagttgtaagtataaagagtagtcgtgctaggaatggtaagccttatatcttcataaactttggagactggcgagggaatatattcaaaattacaatttggagtgaggggttagctatcattgctaacaagccagatagctcttggattggaaaatggttaagtattaaaggtttaatggaatcaccttatcgaaatgaaaaatttaaatgctcttccatatctattactgtatcaaaaaaaggtcaattgtttacaataaatgaggttgaagcaaaaaaacgattagccgctaaacaacaatctgtttctgtaagtaatttctcacaaaaagtatccaaccaagatattttagctaaaatagctggacaaaagccttctacgaaaaacagtcaaccaataggctctattccaccaaatactactaactcatctaaccaagctattttaaataaaattcatgctacaactagcaatactggcaacttgtcaaatcagagacaaaatatttcaccacctaaagctcaacagagtaccgccaaccacaatatgttaggaaatcaaaaaaacattccaaaaaatagaacgagaaatcctattaacatagatcaggtaattaaatggactgtcgcaattataattatcttagcaattctaaaaacttgtagttaa

SEQ ID NO: 51790 - DNA, 1035 bp, Acinetobacter baumannii
atgcaacagaaacttcaactcccttttccatttattaattatgaacgagaccactttccttataattttgaaaaactgaaactaggcacatcctatatcgtttggtggtatgggggtattttaagagaacaatctcataaatctatacgggttttctatcaggtcattcttcgtgaagttaaaaagactgaaaatgaacttatttttggagagtacataactgaaaacttaccaatcgatccatatctcacttattttaatctgaatcatatattccagataagtgaaactcatactgctacaattaatagttcgattacttccacagttttttctctaataacttcttttaatgaatcgaattggtgcattattgatgttaatgaacaaaaacttataaatccagatattcaatcttttcttgaagcatatccccttccccctgatgttagggataacagtaagctcttacaactaacactaaaaaacaatcagaaattatttctaaataatatagattttcttgcccaaagttataagcaagttgaatgtcttatgctctatccttatgagtcaccacatccttcagttgatacaataaaaaatttattgattaaatccagaaaaatacctacatctgataagaattggcaagtttttacagaatttgaatcagattgtgtcttcttaggacatttgaaatatgatccttacactcaaaaagtaataaaaaaattaacaaatcaaagaattaaagcatggttaaatacaaaatcaggtgaagcatcttctgttttttatccttctattcaaccttggtatacagataatgaagtcgagataaaagtaaaaggattcttatgtaatggaaatatcattggactaaatattctccatatttcagacccaaaagggtcgactattgagtggtatggtactacacgaaagattggcaaagcttctacctcaatagcccgtatagtacatggagaactattactaaataaacagctaaccctgcctttcgatgattag

SEQ ID NO: 51791 - DNA, 570 bp, Acinetobacter baumannii
atgaatctactaaaagtttgtactttattgccttgtagccttgttattgctgcttgctccgttaactcatcaagtacgcctcctacactgagctcttctacaccacaagttcaaaaatcatctatagaaataaactgccaagatttaaaaaaccctgcctatcaaaaagctattcttagtacaatcaatcaaattcgccagcaatcacgccaatgtggtccgcagtatttttccgcaaccacgccgctgagttggaataataatttatataaaggtgcactttctcatagtgaagatatggcgacacataactttcttgggcatgttggctcgactggcctcgatctaaagtcacgattaaaactttacaatacgcttagtaacgccaacggtgagaatgtcgcgagtgggcagaaaactttaaataaggtaatgtctaaatggctatcgagtcccctacactgtagcaatttaatgaatccaaaattcacaacttacgcaattgcttgtgcttctgaccaaacaggtaaacaaaagagctattggactcaacaatttggtacacgttaa

SEQ ID NO: 51792 - DNA, 363 bp, Acinetobacter baumannii
atgcaatcaggttctattacaccaattttaagaatttttgatgttgatttagctcgatcattttaccttgagtttttaggctttcagctcgattggcaacaccagtttaaagacaactttccactgtatatacagatttccaaagatgattgcatcattcatttatctgaacattttggagatgcaagtccgcacagcgcaatccgtatttattgggaatatatttatgagttacatagtgaactcagtcaaaaagattataaattttctaaacctcaggttgaaaaaacagattgggaaacgctagaactcagtattaccgatcctttttccaaccgaattatattttgggcagatgcttaa

SEQ ID NO: 51793 - DNA, 576 bp, Acinetobacter baumannii
atgtatacatttgattatctcgtttttataggtcgttttcagccatttcacttggcacatatgcaaacgatcgaaatcgcgttacaacaaagccgttatgtgattttggcattaggttccgcccaaatggaacgtaatattaaaaatccgtttctcgcgattgaacgagagcaaatgattttatctaatttttcattagatgaccaaaagcgtattcgttttgtgcatgttgtcgatgtttataatgatgagaagtgggtaaaacaagtcaaatcactggtaaatggcgtgatagagccgaactcaaaagttggtttaattggccactttaaagatgagtcatcttattatttaagattatttccagaatgggtaatggtggagctggatagtttaaaagactctatttcagcaacaccaatgcgtgaggcgtattatcgtggtgaaatccaaacggaattttttcctgttggaactattcaatttttagatgaatttaaaaaaacacgtacttaccaacaacttcaacaacgttttgagcaagatgaccgctctaacttagatgaaattgagtaa

SEQ ID NO: 51794 - DNA, 669 bp, Acinetobacter baumannii
atgataagtcgacatgtagatagagggctttatccatcatcttttatgtattcagatcagtgggtcaaatgtcctaaatgttctcatctgagtatcttgaaatatgacagtcctttgtcactagtaaatgcgccttatcacggaactttttcttttagttgtctaaattgttgttatcaaattaaagctgaagatagttcaatatcgagtcgtcacaatggccatttttacgccacaacttatcagcgttgtcacagttgtggggggtcatggctcaaagcaaatcaaaagctgaataattccggagcatatcctccgtatattcaagctaaatgtcatttatgccaaaatttttcaaaatttgaaaaatataatgtagattttgttttagaccaaaaatttggttatacaaattatggacttgaactttatttgaaaacttcaagtaggcatggagatatatacgtttataaccctacacatttaaaagaattaaaaatgtttgttgaagctaatctaagagaacgaacgaaacagactggtaatagcagttacttttcgcgtctacctgcatggataaaatccacacgaaatcgaaaggaaattttaaaagccattttgcgtttagaacaaatggcatctactattcaaccattaacaaataagtga

SEQ ID NO: 51795 - DNA, 1401 bp, Acinetobacter baumannii
atgaacaaaaatcaaaagcctccgtttaaacaaaatgcaattgcattgggcttcacacttggagttcatgcaattgctattgtcggcttgctttttttaggcttgagtaaaccacctgaacagccaaaaaagctgacgactattttagttaagccagaagatttaccaccgcctttagcaaaagaagttgagcaacaaaccacagcagaaaatcaggctgaagaagttttaagtccgattgtggatgaaaatgttcctcaaaatattccagcagtaccagtgccacctcctccaccaacagcacaacatctggttgcccaaaagcaaaaagctgagcaagcaaaattagctgaggaaaaacgtaaagctgaagaagcggctaaagcgaagcaagctgcggaacaacaacgtttagaggaagctcaaaaacagcaggctgaagctaagcgtcaagctgaagcgaaagctgcaaaagttgaagctgaacaaaagcgtaaagctgaaactgaagcaaaaactaaacatgaacaaagtgaagctcgcaaagctgctgaggaagccaaacgtaaagctgaggctgacgcaaaactaaaacgtgaagcagaaaatgcaaaacttcaggcacagcaagaagcaaaacgtaaggctgaagctgaggcaaaagctaaacatgaagcccgaaaagctgcggaagatgctaaacgtaaagcagctgaagaggcgaaagttaaacagcagaaagtagctgaggaagccaagcgtaaagctgaagctgatgcgaaagcccaaaagcagaaagcggctgaagaggctaagcataaagctgaagctgatgcgaaggcccaaaagcagaaagcggctgaagaggctaagcgtaaagctgaggctgatgcaaaagccaaacagcaaaaagcggctgaagaggctaagcataaagctgaagctgacgcgaaggctaaaaagcagaaagcggctgaagaggctaagcgtaaagctgaagctgatgcgaaagcgaaacagcaaaaagcggctgaagaggctaagcgtaaagctgaggctgaggcagaagaaaaagctgcatctgccaaaaaagcacaggaagaagctgcacagaaaaagggtgaagccaaaaaaattgcatcttcagcgaagcgtgattttgaacagaaaattcgaaatgcttgggatatcccagcaggaacatcgggtcagaaagcaactgcgcgtgtcactctcagcgatagtggagctgtattatcagttattgttagctctagcaacccagatgttaaagcgagtgttgaagctgcgattcgttctgctgcaccttacccaatgccatccgatcctgatgctcgacgtgaagcaaggtcattcagttcaacatttactgcaaaataa

SEQ ID NO: 51796 - DNA, 387 bp, Acinetobacter baumannii
ttggtcacaccagctacatgtaagcgtctatttggtgaccgtcccgatggaaaagaatggcaaccaggttgtctaaaaataaaacaaagtactgatacgccagtttctaaaggtagtgtaaccatagaccaaaatggaaacgtggtttatacgccaaatggaaactggcatggtgcagacatttttagtattcaagtcgttacgagtgtatcaagatttaatgatggaaccgatttccaatatgtctcgattccagcaaccgtagtccaagaacctgtatctggtattgaagataagtctgttagtactggtggtgggggaagtgttggtggtggattaattttaggattattcggattaattgcattgcgccgtttcaagtcataa

SEQ ID NO: 51797 - DNA, 336 bp, Acinetobacter baumannii
atgagcaatctaactattaagttactcataggctgcatcacttactgcattttaaatgtagtaagtgcctgtgagcctgcatctttagattggaagctttttcaagaaaaatatgatgtaaatcatgatggtttgtacagcttaaaagagtttcaacaggtacaagatttctatccttatcgttggcctacggataagcgttttcagggagagaataagcaaacagaactatttcattatttagataaaaataagaatggttatttaacaaatgaggaattggggaatatacacgttttacttagtaacccttgtgaagggcggccatggacataa

SEQ ID NO: 51798 - DNA, 189 bp, Acinetobacter baumannii
atgaaaaaattaatagtgagcatttctgtagcttttcttatcttaacgacaggatgtgagatgagaacaatgagcaagcaacagtcagccaatgagcggactatgagcatagttggtactcctgttcatgaaaaagattacaaaatttctgatttacaagccaacaatcatgagcaatctaactattaa

SEQ ID NO: 51799 - DNA, 228 bp, Acinetobacter baumannii
atgcatgatttttcaaaaccacctcatgtgacgagtcctgaagagactgcaaaaaaaagaagattgccagtttatattttaattattgtagggctttttcttcttgcgcttattgtttatatggttgctgaacataaccaatcaccaaaacaagaagcggcttttcaacatgagactacaccacatgtcatgatgggtaattctgatttgaaaacttacaaaggatag

SEQ ID NO: 51800 - DNA, 456 bp, Acinetobacter baumannii
atgaatcaacggggaaaagccaaacgcagcaaattcaagctgagtccaagtgaatacatcagtatatttaccgttattgtcttagtcattgttgcgtgtgtgagttttatggtattgcactatcgtcaggaggctcaacaacgtgcatcacatgaaaaagtgcaattattaatacagcaacagaagaagattatcgaagcacagcgcgcagctttgggtaaattgccggatattcaacttactgaaaaaacgaaaaaggctttagcatttacacctgaaagaccaacagaacgggtaaatgatgaaacatcagtttttcagtgtgatgggcgtgagtattgttcgcaaatgcattctttagaagaagcacgttggtttgtaagaaattgtcccaacactaaaatggatggtgatcatgacggtgagctgtgtgaaaatgactcacgatggcattag

SEQ ID NO: 51801 - DNA, 318 bp, Acinetobacter baumannii
atgtttaagaaaaaagattcctttagcaaaaagctaaagttgaccgctaaagaaaaaaacacgctaaaccgtcgcatgagtcaaatagaagtagttctgctttattgggttcaagttgaaaggaaatgtgtaattctttatagatattttatttatttgggagcgcttatactcccaaataaacaaaccaagcaaaaactttataaaattgctttaggattgattaaacaatttgctgtttatattttcctaccaagcatttgtaaaatttttaccgatatattggtaacggcttattcaaataactttatgttgtaa

SEQ ID NO: 51802 - DNA, 129 bp, Acinetobacter baumannii
atgtatcatttgaccgaaaattataaattaggactcatggttttagtcttttcatttatctttttttatctgccaatgatgtacgcttttttagcaattcgtaaacaacgacgtaatcaaaataagtaa

SEQ ID NO: 51803 - DNA, 237 bp, Acinetobacter baumannii
atgccgctatggtgtttaagttacgatttaaaaaataagactcgctcacattattctaaaatatatcaatcacttagaaaatatgattgcgagagattacaacaatcgatttggttacttcgcacaacgaaatcggttgatgaaattacaaatgattttaggcattgtgttgatcagagtgaccgtcttgcggtttttccaatcgaccaaaatttgttaaacgttttaaaggagtaa

SEQ ID NO: 51804 - DNA, 396 bp, Acinetobacter baumannii
atgactgaaacgaatcaaagccgtttgttgactgtaggtgaagttgcaaaacgcagtggtgttgcagtttcaacgcttcatttttacgagtctaaaggtttaattaaaagtataagaaccaatggtaatcaacgtcgttttactttagtggtgttgcgttacattgcgatcattaaaattgcccaaaaagttgggattccattagatgaaattaaacaagctttaagtaagtatccgatggggtctaaattaactgcacagcaatggaaagagttatctcttgattggcggaaaagtttggatgatcgtattcaaaaacttacgcgacttagagatgaaatggattggtgtataggttgtgggtgcttgtcatggctttgttgcacaaagatttaa

SEQ ID NO: 51805 - DNA, 1029 bp, Acinetobacter baumannii
atgactgagcagaaaaactcatcaaaaaccacagcacttgctcaagcacttttgcttgagcaggtggaatttttcaaaaaacaattatcgatagaaaactcacctatttatttccagcagttcattcaactgtttatgcaacatgctgacgaaattaaactttatgaagttgtagatttagaacaattgcaagccgttgtgaaacgctatgcttttgaaatgcagctgggtgcaggcttacttgagtttattggggaaattgcacagcgtatttatttatctgccatgaaatctccaattcagctacaagacttggtatccgatcaccagtttgaaatgtggctttccaagtttttggaaatggagcatattcctcaatatctgaatgagtttttaagaaccagcccttctgttcaacaactttgccaatatattgctacttcaaccttagaacaaaaattaccaaaacttttaactgccactaaagtgaatgactaccattttgaatggcaacataaacttaaaaaattctcgtttttacagcaacaacgtctcgagcataaacttgaaacttggattgctagttttattcatgaacaacttacagaattaagtcttttgtcggcggaagatttagaaagcttggtgcgtcatatctgggaagatattagacataaaaaaatgtatgagtttatgaaacagctcactcctctcgatgtggaagagttctttgtcttaatttatgaatactggaaagaattacgtcaatcgcaatttatgcaagatcttattttgtatggcgtcgaagttttttatgatttttataaagaccaaagtctatttgaagtgttaagtgagattggtttaaccgaaaccgatttacaaactgaagctttacgtttttatccaaaggttatggatgcctttaatgagcacggtattttggaaccgttgcttcaagcgctcctagctcctttttatcaaagctcaaaaacactcgatatgattgaaaaacattttagtgagtaa

SEQ ID NO: 51806 - DNA, 1071 bp, Acinetobacter baumannii
atgaaaaacttgttaacagttctttgtataacatggagtactttgagctatgctaatttagaatctgcgaatcttattccattaaatgatacagaactttctaaagtcgaagcgcaggctttattttcatttacctataccgatccaaaacaaacagatgcttctatggcccaacaaaatattggtttttataaattaggtttagaagctaatcttgaattaaacgccaatattaataagttgcagttgggttgcggtggggtaaatggtttagctggatgtgatattgatattgataatttaagtttaagtggtttaagtgatacgaatgatggccgagcttcttcttctgctgttttcagtaatccatttattgaatttgcgattaaaaatccagacagtgcagcattaagagaaattaaaggttttcgtttaagtgcagaaaaagtgatgggattattgacccttgggcttgaaaactcggaaacaccaaatggaattaatagtttaagtggttatttaaaaattaaagatacaactggcttagcatatactgcagctagaaatatgtcttatcaagatacaggtaagacaatagatggtactgttaatgcatgtcttttagtatgcttgcctctaggatttaactcatctgattataatttacaattacaacagactactgcgcttatagtaatcaatggacaagtcatatctggttcaagaatgaataatgtcatgctcaatggtattgcaaatattgatcaacttaacttttctggagatttgaaagcatcgatcaatgcggcattagggctactaaatttacaaaaaaatgtaacgggtagtattacagggttaagagcagctcttacggttgatcaaaatttaggatttattcataaaattgagttaaataatccattctctctttctttacaagcacaaaaaatattctggccaggtgcagatgctgcagctgagaggggaggtggatggcttttgatgatgaaattgatattggaaacgttacgccaagtaaacaaattgaaattaccaatgatgttttaa

SEQ ID NO: 51807 - DNA, 561 bp, Acinetobacter baumannii
atgaaaaagtatttctcccttatgcttgcagtagccactgtattattttttgcaggtttggttgcgaaaaatgaatggcacctgcatcaaagtaaaagtatttttattaagcttaagccggttgatcctcgctctattttacagggggactatatggcgctggcatatgaattaaatttacaatctctcaaagcgctttcgggaagtgaaagtgaggctttagatcaagtgatttttaatcatgcttctgttccagcaaaagttattttagattcacaaaatcgagtagttcgtaccattttagatactcacaattcatttgctgggcagcgtttaattttaaaaaatcctgaaaatcgtttacaggctttatatccagcttctcgaagcttcttatttgccgaaggtctagctcaatgctatgagaaagcaaagtatgctgaatttaaggtaaatacaaaaggagaggcgattttatttgatttacgtggagaagagctacagcctttaaactgtaagcaacagcacagttggtggagggggactgctagaagtttataa

SEQ ID NO: 51808 - DNA, 1782 bp, Acinetobacter baumannii
atgcagataagagactattatccatttaggaatactttatttattcagcatctccatattttcagttatgtatttatggcgctcagtattctttatttaattgctgctaattggttgatgcttcctgatagcattcaactcattattccacctgttatattgcttatcacagcttgggtgagcataaacgataccttaagcgagggaatacggcagactttacatggtacttgcggcttaatgatcggtttgagtttggctgtaattgggcaagtttatcaaactggtgcagacagttatttacttttcttgatttggactttgcttttattgccgtggctatatcgaccaaatattggaatctttgctttaatttgtattacaagccagctcgccctatttttattttttagacagactttctgggcagaaaagtttccttatctttatcttttggctctaaatttattaagtcttgtacagttctggctctgtcaaaagaaatatacagccttacgttttgtttttattgcttggtttgctgttatttcaataacagggatgattcaattcttatcaagtgaaaatttaccctatctgatctcggcgttcttactaggaattattgctttttattatttcttcaaaaagaatgatcagctatgtgctagtttaatggctgctattcttggcgtgatagctacaatatggcttgttgatggtattaatcatctatttaaagattctaatgaattcattttcttattgattgcgggcattatttttatttggtttgcactcattagttatttcttaataagaatttttcgccaaagccgtttttatatcattcctttagcaattggtgcttggcttgctggcttagcacttgcagtatttactttagtgttttgggaaactatttccttagttattggaatcatctttgttgctgtagctataactttactaacaaaatcgcaaagctatttcattcggcaatttgcatattgtttatttgtgagtggacagactgcttttttatttcatcttggttctgaaacaaatcaaattttatgggtattgattgcccagatttttattctatgcgtcagttattttcttaagcctcattggttctttgttttaattcaaatgctcgcaacttatggcatagcatttatctacatactgcaactagaccattcattatggtcagtacatcctactcaaacttatttcaatttaactttacttaactatttgatttttaacttgatgctactgatagggagtaaagcggttatatcgtatgagcggagtatttttttatgtgtgcttagtgtcatttttgtgagctcattctttgacaattttatggggcttgcgttgattgattctgctgatcagccattatggtttatctatatttttccaagtctatggttattgtgctttagccttttctatttatataggcagcttcaagctataactttcgttgcttttttaatttttgggatattacttattgctctcggctattttgatatattcattctatttgttattttgacttgggctttaaaaaatcaagatcgcattgttcatggtgttacgctcatagtatttacctttgtgctttggcaactttattacagtttacaattaagttttttagctaaaagtgcatcaatcttggtgtcaggaattatattgttggctttatatggattgcttctgaaggaagctaaaagcaattttattgagggggaaaagtaa

SEQ ID NO: 51809 - DNA, 750 bp, Acinetobacter baumannii
gtgagtctgaataaaaatttagttgccgagcgttttgctaaagcaggtcaaagctattcagagcatgcggttgttcaaaaacaaatttgtcaaaatttaacaagcttactcaagcagttttgcccaagtaagatacgacgtgtttttgaaattggttgtggttctggcaatttaactcgtctgcttgttgaagcttttcaaattgaagatttaattttgaatgatctgtactcagaggtgcaggagcacttcaatcacgaagagcatttaaaatggttaattggagatgttgaaaccttagaacttcctcagcagctcgatatgattgtttcaggttctgccttgcaatggatgcaggatttgccgctcttgcttaagcgttgtaatgatgttttaactgacagtggttggctatgcttttcaacatttggccctaagaacctaattgaaattaaagagctaaccggacagggcttaagttattggaatcttgaaagttggaacagtgccttaactcaggctggttttgaagttctgtatctatctgagtcagaaactcagctttatttcgattcgcctaaagctgtattacaacatttaaaagcgactggtgtaacagcgacagcgcagcaccgttggaccaagcaaactttacagcagttttatcaagattatgatcggtataagcacgccgagggatatgccctaacatatcacccaatttattgtattgcccggagaatgaagtaa

SEQ ID NO: 51810 - DNA, 735 bp, Acinetobacter baumannii
atgaagttacaaaataaaattttattgattacagggtggggagtaggtatagaacctctgcaatcgttaaaattgggtttgaataaatttggctatgacacacaactgattaatatttttaatgttttagatagtagctttcaagcacagcttgatttagtggctgaagttgatgtggtaataggctggtccttaggtgggcagttagcaactcaactggttgatattttttacaagcaaacagggcaaacaaaaatattaattacgctcgcgtcgaatccttgttttgttgctcatgataattggcaaactgcaatgcctgctgatgtatttagtcaatttaaagggtcttttttacagaacccacaagccactttaaagcgtttttattatttgattacacttggctcatctcaagcgaaacaagattggatgagcgtacaaaacattgcaaatccacccgcacaggaaatactggtagacggtttaaaaatgctagaacagttaaacttggtagataacttgaaaaattatccaggtctacagcttcacctgtttgctgaacaagataatgtcattccttgcaaaattatcgataattttaaggatttcgctacagaaaacatgacttataagttgctaaaagacgctacgcacgcttttccttacttgcaggctgaaagaacaattgaagaaatctgccaatttttaacaattcatcagcaaagttcataa

SEQ ID NO: 51811 - DNA, 981 bp, Acinetobacter baumannii
atgaacacaaaaccatttttatcctgcgttgttccagcctataacgaagcagaaaatttaaaaacttttattcctgctttagcaaatagtctaaaacagcaaaatcttagctttgaaattattgtggtcgatgatggaagtaaggacgatactattccaattttgcaaacaatgattgatgactatccattagttgtgcttgaactttcacgcaactttggtaaagaagcagctttaagtgctggtttagatcatgtgacaggcgaagttactttactaattgatgcggattttcaacacccatttgaagcaattccaaccatgatcaacctttggaaaaatggttatgacatggtgtatggcattcgtaatcgctccactgaatcttggcttaaacgtgttttaactcaaggttactatcgtatattaaacttaagctcaccgatagatattccagaaagtgctggagactttcgtctattagacgcaaaagttgttgaagcaattaaacaattgccagaaaaaaatcgctatatgaaaggcctatatgcttgggttggttttaaaagtataggcgttaatttttctgaacaggaacgtcaacacggccgttctagttttaacgtaaaatctctatttaacttggctatgtcaggtttaactggtttttcagatttacctttacgcatctgtatctatttaggtgcaattctggctttaggtgctatgggctacggcgtatggatcatcattaaaacgttgatagaaggaatttctgtcccaggttgggcaacacttgcagcaggtatgactttacttggcggtatacagttgttattcctaggtattgttggtgaatatattagtcgtatttacgctgaagtaaaaaatagaccaaaatatattgttgcatccgaacattctcgtattaaacaagaaaaatctatcacaaagccggaaaatactttctctagtttctaa

SEQ ID NO: 51812 - DNA, 960 bp, Acinetobacter baumannii
atgaaatcattaaaatcacttgcgatattattactgctgagtgccagtacagttatacatgcagaacaaaagccaaccgtgcatcaggttgatggttattttttacaaccaataggaaaccttaaagtaacggcattgtttgatggggaactgggactgcctcgtagtgatttactgggtatttctgctgaaaaagccaatcgactgtttgcagaaaactttgttcctgtagacgagcataatcagattgtcacggatttctctgcctatcttgtgcaaacgcctacgcaaaatattttgattgatgcagggactgcaaaatgttttggcccaactttaggtcatgtacgtgaaaacttgaagaaagcaggcgtacagcctgaacaaatagatacgattttaattacacatgcccatcccgatcacttatgcggtattacacttgatggcaaaatggcttatccaaatgcgaaagtttatctagctaaagaagatgtagatttttggacatcgcctgttaatgaagcaaaagccactgatttttttaaaccaatatttaaaatgacgcgtgatgcattacagccataccaaaaggcagggcagttagttgcgtttaccaaatcctcttttaacgtaccgaatgttcaactcatcgtgactcatggtcatacggaaggtcattcttcatacttagtagatggaaaaaacggacaaaagttcttaggtctaggtgatgttgtgcactacggtgcggtacagtttccttatcctgaagcaagctataagcccgatactgactcgaaactagccatagctgtccgtaaagatatctttgagcaagcctataaaaaccattggtggataggggcagcacatatcgcttttcctggcattggacacattggtaaaagctcaacaggataccaatggataccggctcaatatcgccctgtaaattga

SEQ ID NO: 51813 - DNA, 843 bp, Acinetobacter baumannii
atgaatattaactattctgcttccattgaggcccatcaattgcaccaatcattggtgagattggcacgggcagatatggcacgagattatttatgtattcgatctaaaaatcagcatgggctagccaatattaaagttaaccagttgcacatgggatttattttatatgggcaacaacaattaaatcttcaaaaaaaacaattcaattttaatgccggtgatctatacattataaaaccagatacggttatcgatgcagttaatttgcctgaccctataacgggtgaatatctcactattcttgtgcctatgtgtgatgaagtcattcaagccgcacaaatgatttgggcgaagccagttgtagacagaaccgacgcaatattaaagttttcaattgatgatttcgctacctctttaaccgagtggcaaaccgctttatttagtcatgatgtggtgaaagcgcgtttatgtattaccgctatactagtacagttatgtcaacagcacttctcagatgtgctaattgtaccgccacctaaattgacaaaaatcattcacgattgggtaatagagaatccgcagcatcattggcagtctagtgagtttgaaatgcgtttaggtttgagcagtgcaacacttcgtcgcaaacttagccatgaagatacaaccttaagagaaacgattacgcatgcacgtcttacatatgcgcttgagttgttgtattcgaaaaagttacctatgaaaacgattgcagcaaaatctggataccagtctgttgctatttttcgtgatcgctttgtagagcgttatgggatagatccagctgttctagctgcggaataa

SEQ ID NO: 51814 - DNA, 603 bp, Acinetobacter baumannii
atgaatttaattttcttacccggtgcgtcaggcagtactgcattttggcatcctttaattgaaaaattacctcagcaataccgtacaaaaattattggttaccccagtttcggtgatacaccagaatctcttgagatcaaaaactttgaagacctaacaaattatgtggtcgatcaaattaatgaagaatctatcattgttgcccaatctatgggtgggatttttgccgttgccgcagcgctacaaaaacctcatttggtgaaagggttggtcttaattgcaacttctggtggaatcaaccttaaacgatttaatgtgcaagactggcgtgaagcatactggcaaacatttttaaaatatccagattggtttgttaccactaatgctaactatgaagagtttttagcggatataaatgttgaaactttattaatctggggtgataaagatcgggtaagtccagtttcggtgggccaatatttaaatcaaaagtttgaaaagtcgactttatatgttgtgaaagatggggaccatcaattagcagaaaaacatgccgatgaagtagcagtcaaaatagaaagctatttaagaaacctaatgtaa

SEQ ID NO: 51815 - DNA, 924 bp, Acinetobacter baumannii
atgcaaaatagaattagaggagcaatttatggtttgctgattggtgatgccgtcggtgtaccatatgaatttcattcagctttgcagcttccaccttactcacatattgatatgattccacctcaagattttaagcgaacttatccagatgttccaattggaacgtggtcagatgatggagctcaggctctatgcttattagcgtcactattgcattgtcagaaactcgatagtatcgattttgctaaccgtattcgcaattggtaccgttatggttatatggcagttgattatcaagtgtttgatattggagtgcaaactgctcaggcgttacaacgttatgaagctggggtatctgtagaagaaatggctaatacagatgaacattcgaatggtaatggagcgttgatgcgaacattacctttggcattatggcatagaggatctgatcaacaattagttgaattagcctatcagcagtctcatttgacccatgctcatcttcgatcaaaaatttgctgtgctttatattgcttatgggcaaaatatttattgaaagggcaatcagttaatgaggcttgggaatctagtatttccatactgatgcaactttataaaaatagtgttaatgaacaacaagaacttaatcatattatcgattcaacacatgagaaagaaatatcgggcagtggttacgtagtggattgtttacattcagctcgtttcgctctgcaacaaaataattatgaagatgtcattaaaacagctattgccttaggacaagatactgatacaactgcttgtgttgcaggaggattagcaggaattatgtttggatatgaagggattccacaaatatgggtacaacagttaagagggaaagaggtactagaacctctattaacacaattagaagaagcatga

SEQ ID NO: 51816 - DNA, 225 bp, Acinetobacter baumannii
atgcttcgtgtcatttgcctcatcagtttattgagcagcagtattttgcttacagcttgcggtcagtcaggagcattacagctaccttctgatccaaattatgaccaccgtgcaaaatacttgctctatcgtaataaagaatcaaaacaagttgtgcaaaaggatgaaaaggctgaacagccagtcgagtcatcatcagctccaacccaaacaacttcaccttaa

SEQ ID NO: 51817 - DNA, 1419 bp, Acinetobacter baumannii
atgtctaatcttcagcatcatgatcatgctggcgacttacagcgtaagctgaccaatcgccatttacaattgatcgctattggaggggccattggaacaggcctgtttatggggtcgggcaaaactatttcattggcggggccatcaattttatttatctatttaattattggcaccatgattttctttcttatgcgtgctttgggagaggttttactttcaaacctaaattataagtcgtttgtcgatatggcttatgacctgattgggccttgggctggcttttatgtcgggtggacctactgggtaagttgggtgctcgttggaatggcagatttaactgcggtgacgagctatttgagcttttggctccccaatggagttagttttagcccaatagaacaggcaatgattagtgcaggctgtgttctctttctattgattttaaacttattgacggttcgtttatttggcgaagtcgaattttggtttgcgattattaaaattgttgccattattgctttagttcttgccggcatctatatggtagtgaccaagttccaatcaccatctggctctgttgcggctatttctaatatttggaatcatggcggtatgtttcctcatggggtaaatggtttccttgccggcttccagattgcgatctttgcttttattggggtagaactggtcggaaccacagctgctgaaactaaagaccctcataaacatttgcctaaagcaattaacgcaattccgattcgcgtcattttattctatgtattggcattaatggtggtgatgtctgtaacgccttgggatcaggtaaaagcagaccgtagtccattcgttgaactattcttaatggcaggtattccaactgctgcaattattatgaatctagtggtgttgtcatcggtaatgtcatcgatgaatagcggtattttttcaactagccgaatgatgtatggcttatcgcgtgatggtcaagcacctgaaacattaggtcagttgactaaaagtgcagttccagcaaatggtttaattttttcctgtgcctgtattatgggtggtgctttattacaatattttgtgcccaatacgattgaagcatttaccttggcaacaacgttatgcaccattttatttttaacggtatggattttgattttggtgtgttatatccgctaccgtaagttatctcctgaactgcatgaaaaatcgaattttaaaatgccgggtggggtagcgatgagttatgtcgttattgttttcttcttatttacgattgcgattttaagccttgaagcagacacagctaagtcgcttatggtcagtccaatttggttcctcgttcttgcaattggttactttggtttttataagtcaaaaataaaacgtaattttgcccaagaataa

SEQ ID NO: 51818 - DNA, 3114 bp, Acinetobacter baumannii
atgttgtcgagtttttttattgcacggcctatttttgcttgggttctttctatttgtattatggccttaggtaccatttctattttgatcttacccattgaacaatatccagatattgcaccaccgggtgtaaacgtcactgcaaattatcccggggcatctgccaaaactgttgaagatagtgtaacccagattttggaacagcaaattaagggcattgatgggttactttatttttcatcgagtagcagctcggctggtcaggcacgtataagcttaagttttaatcaaaaaacaaacccggataccgctcaagttcaggtccaaaatgcagtcaatcaggcgcttagccgactaccgcaagaagtgcagcagcaaggtataaccgtgacaaagtcacaaggcgatagtttattggtttttgcactttacgatgaaagtaatacaagaacttctgtcgatatatccgactacatggtgagcacacttcaagacccactaagtcgcgtcgatggcgtaggtgaaatcacagtatttggtgctcaatatgcaatgcgcatatggctcgatccacataaactaaatagctatggccttatgccttcagatgtcagaactgcaattgaagctcaaaatgcacaaattacagcaggtgagttgggggcattaccaactcgtgacggacaggctttaaatgcaaccgtaacagcattatcccgtctacagaccgtaaatcaatttgaaaatattattttacggactcaaacaaacggagctgtagttttacttaaagatgtagctcgtgtagagcgcggtgcagaaaattatcaaacctctacacgtttgaatggaaagccagcttcgggtatgtctattcaacttgcttcgggtgccaatgctttagaaacagctgaaagagtaaaagctgaggtcacgcgtttaaccggttctatgccatcagggttaaaagttgcatatccacgtgacagtactccatttgttgaagcatctgtaaaaggagtgattaaaactttagctgaggcaattgttctagtcattattgtcatgttcttatttttacagagctggcgcgccactttaattccggctattgcggttccggtcgtattgttaggaacgtttggtgtactcagtatattgggttatagcattaatacgctgactttatttgcgatggttttggcaattggtttgcttgtagatgatgcaattgtcgttgtagaaaatgtagagcgggttatgcatgagcaacatcttgatgcccggcaagctaccctaatttcaatgaaagaaatatcgggtgcgttggtcggtattgcgatggtacttgctgcggtatttttacctatggctttttttggtggttctgtcggcattatttatcgccaattttcggtaacactcgtatcggctatggtgctttcagccattgttgctttaaccctttcacctgcgttatgtgcaaccttacttaaacctgcaaatgaaaaacaaaagcagagaaaattctttacttggttcaatcgtaaagtcgaacaagggcagtcaagctatcgtataaagctgctcgctgttttaggtaagcccaaaatatttatgatcatattcttaggtattacagctttgttaggctggcaatatacgcgtatgaatactgggtttttaccacaagaagaccaaggctcagttatggtccagtttagtacgccagtaggcacaacactcgctgaaacagaacgggtgggtaacttgatagcagattatttcctgacgaaagaaaaggataatctcaatgtgattttcatggtgatgggtagaaataacgcgggcagtgggcaaaatgtgggaatggcatttgctggactcaaacattgggatgatcgagaagggagtgaaaacacagcagaagcagtgattgctcgggcaaactcatattttaaatcactgcgtaacgcacgtgttcaggtactttcaccagccgcagtgagggggcttggacaatcaagtggtttcgagctttggttacaagatgctgaaaataaaggacgtgatgctttactggcggcacaaaataatgtgttaaaagcagcaagtgctgattctggcttagcagcagtccgtctaaatagtttagaagataaagctcagttacaagtcgatatcgatcaaagaaaagccagtgcacttggtttggctcaaacagatatcagtaatacgctatcttcggcatggggtggatcttatattaatgatttcatcgatcagggacgtgttaagcgagtttatatgcaaggagacgcgatttatcgttccttacctcaagatattgggcaatggtatgttcgcggtgctacaggtcagatgacaccattttctagtttctcttctgtaaaatggcaaatgggaccacaaatgctgcaacgctttaatggtctttcagctgtacaaatacaaggttctgcggcaactggtgaaagttctggtggggctatggataagatgcaggagttagttgatcaacaacaaggctttaaccttcagtggagcgggttgtcttatcaagagaagttagctggcggtcaaaccatttggttatatttagcatccattatctttatctttttatgtttggcagcactttatgaaagttggtccattcctgtttctgtcatgctagtgattcctttaggtctgattggagctgtggtggctgcaagtctggctggttttgtgaatgatatttactttcaggtagctatgcttactaccattggactttctgccaaaaatgctattttgattgttgagttcgcggcagccaagttagaggcaggtcaagcattaatggaagcgattattgaaggagcaggtcagcgattacgtcccattattatgacatctctggcatttgttgcgggcgttcttcccttggctgtatctacaggagcaggagctgttagccgtaaagaaattggtatagccgtaacgggcggtatgatttcaggaaccttgctttctattttctttgtgcctttattctttcttttagttcgccgtttaaccaataagctaaacgaaaaaaagatgtcataa

SEQ ID NO: 51819 - DNA, 1125 bp, Acinetobacter baumannii
atgccaaaagttcgttttctttgtcgtaataccttgtatttattgcctttgattgtttttttaaatggatgtgattctgataagcctattgttaaaaataatcaaaaggtcggcattatcactataaaaaaagagactattgaatcttcttaccagttagctgggagaacagtggcctctgaaatttctcaggtgcggccacaagtaaatggagtagttgtcgagcaattatttaaagaaggctctcaggtaagtaagggacagcctctttataaaattgattcatcactctatcgcgatagcgttgatgaggctgcgggtaaccttgcacttgctaaagcgacagtgaattcaactcgtctgcaagctgagcgttataaggaattaattaaggtaaatggcattagtcagcaagaacttgataatgcgttaagtgcctatgaacaggcaaaagccaccgttgctgtaaatgaagcagtattaaaaacagcgcgaactaatttgcgttatacacaagttactgcgcctatttcagggcggatagggcgctcttcgattacacgcggagctttagtgacttctgcacaaacagatcctttagcaaccattcaaaaacttgacccgatgtatgtcgatttaactcagtcgagtgatgaatatatggcgctacgtaaacagctcactgaaaatggaataaaaccaactgaactttcagtacgtttacagctcgaaaatggcaccacttattcgcaacaaggaacttttaagttcagtgatattgcagtagatgaagcaactggaagtatcacgttgcgtgcagcattttcaaatccaaatcatggtttattgccgggaatgtatgtacgtgcagagcttagaacgggtacgcgatctaacagcattttaattccccaaggagcactttttagagatgcagatggaaacgcgcttgtatgggtggttggaaaagataataaagctgaacaacgaaaaattacgctaggaaatgcaattgataaccgttggttagtgaaatcgggcttgaacgaaggagatcaagtcattgttgatggcctgcaaggtttaagtgccggtatggcgattgaacctactccaatgacctga

SEQ ID NO: 51820 - DNA, 618 bp, Acinetobacter baumannii
atgttaaaaaaatctccaggacgtccctctcgaatccgcccgaccattgtggcagcagcacgtgaactctttcttgaacatggtttagaagttcgtttagaggcaatcgccacgaaagcaggcaccaatagacaaactttatacaaccatttcccaacgaagactgcactgctaatcgaagtttttgatcatttaaaaacagaaatggaagccccttttattgagcaacatgaggtcaacaataagcgactggatcagcgattgttggacattgggcaagccgtgcaaaatcatttttataatattgatgtaattcgcctgcaacgattactgattattgctttagttgaaatgaaagaaattcttcctaaaattcagacccgtactcaaggtaatattaaaaggtctttaagtcatattcttgaaaccgcgcacaatgctggcgtgattcaagttgaacatcccgacgaagcagctaaagcctttttgggcgcagtgatgggatatgcctatccggcaacgcttctaggaggcgcagtgccaacaccagaagaattaaaaaaacttaatgaagaaacttgtactatgtttttaaaagcatggcagtataaagaataa

SEQ ID NO: 51821 - DNA, 756 bp, Acinetobacter baumannii
atgaaaacgacttcatcacatgatttagaacgtaaaattgcatttgtacaaggtggttcacgtggtataggtgcggctattgtcactaaattggctgaacacggagcaacagtagcctttacttatgcaaactcagatcaggcagctaaccgtttggtagatgatcttaaagcgaatggcttaaaagtgatgggaattaaagctgatagtcgttcaccagaacaggttattcacgccatccataaagttgcagatgagttcggtcgaattgatatcttagtgaataatgttggtatttttgtgatgaacaaaatacaagatgtgacattagaagaaatagaaaagatcatggccgtaaatattaaaagcgtgattgtagcctgccatgaggttgttaaatatatgcctgattatgggcgtattattaatataggaagtatcaatgctgaacgtgtgcctacagctggattaactttatatgctatgactaaatctgcggtgaatggcttaaccaaaggtatggcgcgagatttgggtgaacgatttattaccgtaaataatattcaaccgggacctgtcgatactgatatgaatccggcagaaggcgaaatggcaaattcacttttagaccttatggcgattaaacgttatggtaatagaaatgaaattgcagatttagttttatggctctgtagcgagcatgcgggatatatcactggttcaaatattaatattgatggcggttatggtatttag

SEQ ID NO: 51822 - DNA, 1008 bp, Acinetobacter baumannii
atgaaaaataaacttccattcttgtctttattttttgcttgtctcactgcgtcatcagttagttatgcaaataatgtctatggcgagcatttagaaggatttaaatatccttacccactccagtattttaatttctcatcccaacagcaaaatttaaaaatgggatatatggatgttcaacccaagaagccgaatggacaaacagtagtggtttttcatggcaaaaacttttgtgctgcaacttgggaagaaaccattaattttctaatacaaaatggttatcgggtgattgctcccgatcagatcggtttttgtacttctagtaaacccgatcattatcaatatagtttccaacagcttgcacaaaacactcatgctttactcgaaaaactgggtgttaaacaaccgattttattaggacattcaacaggtggcatgctcgcaacgcgatatgctcttatgtatccccaacaaacaaaactcctcgcaatggttaatccaattggactagaagattggaaagcaaaaggggttccgtatcgtactattgatcaatggtatcagcgtgaactgaaggtgagtgctgagtcaattaaagcctatgaattaaaaacttattatcaaggcgtatggaagccagaatatgacaaatgggttgatatgctggctggactaaatgcgggcaaaggacacgaaaaggtcgcatggaattcagctcttatttacgacatgatttttacacaacccgtctattatgagttttctcaacttaaagtacctaccgtgctttatatcggtacgggtgatacgactgcaattggtagcgatatagccccacctgacgttaaacaaaaaattggtcaatacagcgttttgggtaaagaaaccgcaaaaatgattccaaatgctgaattaattgagtttgaaggcatggggcattcgccacaaatgcaaaatcctaaaatgtttcatgatgctttgatcggaactttaaagaaatacgactaa

SEQ ID NO: 51823 - DNA, 735 bp, Acinetobacter baumannii
atgaaagatcataaagtcattgcgattgatttgccgggtctgggtcaatctggtcccatacttaatgatgattattcagcagaaaatacctcaaaaattttaattggtgcgattaagaaaattgctgggaaggggccgatttattatgtcagccacgatttaggtaatacggcttcttatccactcgttgccaataatcaaggctatatcaaaaaagcggtatttatggactcgccaattccggatcgtgcgatgtttgaatatccgggatataccgcagatggtccgggtctaggttggcactttggttattttagttttggtgatattgctgagaagcaaattgcgaatgatccaaatttatttttctcgtactttattaaaacgtatgcaggtaaaaaagaaatttttacacctgaactgcttgctgagttgattgagccgtattcgactcgagataaattaaaagcagcttttggatattaccgttcgcatgccgactcaattcgtcaaaatgaagcactgctcgctaatggtaaaaagttaacaataccttctatggcgcttactggccaaaaaggcgtaaatgatgttttggtgaaagagatgcgagcaagatttgtcgctgatcctgcccaatacactgccattattttgccagatacaggacactggatggtggaagaaaatgctgaaggtgttgaaaaaagtttatcgaactttttatttaaataa

SEQ ID NO: 51824 - DNA, 315 bp, Acinetobacter baumannii
atgaaaaagttttttaaagttatgactttatccgcagctatggggatgtttgggttaaatcaagcaaatgcagaatatgacccaaacttaaagtcgattgatacgccaccagccgtttcacaacaaatgtttaataaggtgaaatctaatggactagggcaatatgcttatgcaaagggcctatctagtaagtttatcgagtctgaaggcgtaaaactccattatgttgaaggtggatctaaaggcacgccgatcgtatttattcatggttttggttcgacatggaaaatgtgggaacctgtcatgctttcttaa

SEQ ID NO: 51825 - DNA, 1098 bp, Acinetobacter baumannii
atgaatcacaaattatttaatccagtgattgtgggcgatgttgaactaagcaatcgtattgttatggcaccgatgaccagatcaagagcagcacaacctaatgatgtgccgaccgagcttaatgcactttattacggtcaacgtgcaagtgctggtttgattatcaccgaaggcacacaagtttctgatgtgggtaaaggttattcttttacgcccggtatttattcagaagaacaaatcaaaggttgggctttagcgactcaagctgtacatgaaaaaggcggaaaaattgctgctcagttatggcatgttgggcgtatgtcgcactcttcactgcatagcaaccacgaacaacccattgcaccatctgctattcaggccaaagcttcagtatttattgccaatgaaaaaggtgaaggggcaatggtgcctgccgaaatgccaagagcaatggattttgatgatattcaaaacgttaaacaggaatttattcaagctgctcgcaacgctgtacaagcaggttttgatttagtcgaaattcatgccgcgaatggttatttatttgaccagttcttatctacagatgcgaaccagcgtactgataactatggtggatctgttgaaaatcgtgcacgtttcttattggaaactgtcgacgcattgattgatgcgattggtgccggccgagtaggtgtgcgtttatcaccttggggaacgattaatggcatgacagaccaacaacccgaagaaattaccctttatttagctgaacaattacaaagaagaaatattgcctatatccatttggctgaatgggacatgcttccacatggtgatacttatccagtaggtttcagagaaaaacttcgttcattgttcacaaatacattaattgtttgtggaaattattcactcgaaagagccgaatctattcttgataaaggcttagcagatgcagtggcatttggacgtccttttatttccaacccagatttagttgagcgtttacagtcaggtcatgctttagcgcaagccaaatctgaatatttctatggtggcgatgcaacgggttataccgactatcctactgctcaataa

SEQ ID NO: 51826 - DNA, 603 bp, Acinetobacter baumannii
atgaataaaaccgcaggtcgtggccgccctcgtaatttcgatcgagatgctgcattagacaaagcgatgaatctattttggcgaaatggttatgaagcgacgtcgattaatgacctgacaaaagcaatggaaatcaacccgccaagtctttacgcttcttttggaaacaaagaaaaattgtttattgaagctgttgattattatgttaaaaattttggtaattatcgaattgaggcactcaaagagtctttaactgctcaagaaggcattaaaaatttgttaatcagaacgattgatcaattttatagtaagcctgataaaacaggctgtttagttgtctctgctgcattatcaggttcatctgaaagtaaaaatgtacaagacatcttgagtaatgaacgcagaaaaaccgttgctcttattagagcgagacttgaacaaggtcaaaaagatggtgatgtggctgaaagcttaaacttagatgttttagcagattattttggcatgattctatttggtattacggttcaagcaaaagataatgtgcctattgaaaatctatacgacagtgtagaaatggctttaaaaaccttaaacaattaa

SEQ ID NO: 51827 - DNA, 555 bp, Acinetobacter baumannii
atgccaaatttaattctcccaacacgtgcttttgaggttgtaaaaaaagggatcgacttatttcactacggtggctttcatatggtcggcgtcgacaaaattgtgaaagaaaccgaagtgaataaaatgacgttttataattattttcactctaaagaacgcttcattgatatctgtttaattgtgcaaaaagaacggctccaagaccaagtggttgcaatagtggagtacgaccatgacacaagcacaatcgataaactcaaaaaactttatatattacataccgacttagaagggccgtactacttattatttaaggccatttttgaaactaaaaacagttatccaaacgcttaccaaactgcggtcagatacagaacatggcttagcaatgaaatttatagtcagcttaaattactaaaaaacgatgcagcttttaatgatgccaaaatattgctatatatgattgaaggcgcaattattcagcttttaagctcagaacagatcgatcaaaaagagaggttatttaattactttctaaatgctttggcttag

SEQ ID NO: 51828 - DNA, 462 bp, Acinetobacter baumannii
atgcattcatacaaattaaaatttattttattactaatgtcttctctatttattacttcattcagccatgctggggaatatcaggataaattagttgagtgtttaaaaagttcagttaccgaacaagaccgtaaggatatggtgcaatggatgttttttggttttgctacgaaacaagatttagcaaactacacaaaaatatcaagcgcagatttagaacgtgtagatcgcagggttgcgaatatttttgataaaatcatgacgcaaagttgtacgcaagcagttactgcagttgtagaaaatgaaggaaccaatgcgctagcacattcatttgagtatttcggacgttatgcaacggaatcaatgatgaatgatccaaaagtcgcacaacgcttacaaaactttaccaagtatcaggataaagaaaaatataaaaaggcttttccactgccttcccaataa

SEQ ID NO: 51829 - DNA, 309 bp, Acinetobacter baumannii
atgaaaaaactgaaatatcagtatcaacaatctgtaaaaaaaccacgctcaaatggcttattttgggaatactttcctaatatgaaaagtgttcattataaaaagttcagtacgcagcaagagaaaagcttttattcaattcattgtattgaatataaagattatcctcttaagcttcgtgtagcccgtggccctggtttagctgatgcatgggatgatcttccaacatatgtcacaaaagttgctaaaagttggaagcataattctaagagagcgcatcaatactacaaagaacatgaacaaaaatag

SEQ ID NO: 51830 - DNA, 345 bp, Acinetobacter baumannii
atgtttagatctggaaaaactgacttggaaaagttaattttattagttaatctcgggattttacattctttaaaaaataattatatagatataaatgaagctgagtattttttgtatacaccatatatgcttaaacttttgaaagaaaatagctactctattgacttaattaatataattcatagagggactgagctagaagatttagataggtttaatatagattttaaaggtgaagtcgaaaaaatctttaaggaatgtgaggatatgattaagaatttacctgaaaccagttttgaatctgaaaaatggtatgatcaaaatctatttgataagtatgattga

SEQ ID NO: 51831 - DNA, 363 bp, Acinetobacter baumannii
atgctaaaaagaaaaaaacaaaatatgttgattcatcacaatcaaattttatcgacattgcatcgtattacggggtttattgtaatttcagagcttatctatgcgatttacaatatatttgtgcatacgctcaaatactttattggtagtcttttagggcttattgcagcaatcgctacacagttcttatgcgctagaagtgttaagactggaactacaagcagccgtatcggttcaattgtgatatctatcttaatgcttaatatgttccctataggaactgtaattgctgttgtgatgctatttttctctttatttaaatgggaaaaagattcaacgtttcaattacccataaaaaattaa

SEQ ID NO: 51832 - DNA, 588 bp, Acinetobacter baumannii
atgtttgcgatgattggcatatttttaatagccataatgatattagcgattttaagtgttttaaagaaaggggaaagcaaaaatagaaatgtaaaacgtaccccaatcaagggaaaacctatcattactatgaatgaacaacccacttttatgaaattaaaggaagctttgcctgaacatattattttagcgcaagttgctttcagcgcttttatgacagcgcaaggatacgcgacgcgtaatttatttaatcgaaaagttgctgattttgttgtgttggataaagcatttaatatagttgctattgttgagttagatgattctagccataaggggaaggaaaagtttgatgcggagcgagatgctttaattcacgaagcaggctttaaagtcatacgttataaacgaacaccagaactagtacaaatacatcgtgattttaatattacatcaagttcattagctcaagttttaatagaaccagatttaacaaaaacaaagttagttgctgatgcaataattattgagaaagatgatccaagtatacaacccactcaacatattgatgaagtaaagttgaagtcttaa

SEQ ID NO: 51833 - DNA, 684 bp, Acinetobacter baumannii
atgcaaattcgattatttcatttacaaaattcacgctctcaacgcattatttggtttttagaagaattagggctcaactatgatctcatcactaaatatcattcggacgaagacaaaaataataactcaccgcatcaactatcaaaatttccaactctcgaaattattgaacaagagcaaacttcaattttggctgaaacctcagcaattctagattatttctctcatttacacccacaactgagccagaacaatttactaagccaacaacttcaaaacttttattattggaagaattattgtgaggcgacatttattccagatctggtactcaagcaaatctttcaccaaattgcagaacgcacgccttttctggtccgtttcgttcctaagcttttaaaatatggatttgatcaaggctatctcaatcaatcattacaaagacacatgagcatgattgataaacatttagaacgtcacttatggtttgctggagatcagtttactactgctgatattttgatgtggtttccattattggcttgctcaccaaattacagccagtttaaacatatacagcgttatctgacccagatagaaaacagacctgcctttaaaaatgctctaattaaaggtcaatggtctgcttctacttttcaaacttactgggctattgcttggtga

SEQ ID NO: 51834 - DNA, 387 bp, Acinetobacter baumannii
atgactgaacagcttggaaaacttgggcctcatgaagggcaagaactagaattattattgtctggtcataaatcgattgctttattttatgacttattacctactgaatttgtgaagcaccttgagcaaggtactttaactatactcagtaaagatattgagacgtctttatctgtacctttttcaattatgctgatctataaagatgcctctttagcagatttgaatgaactcgtgttatgtattgaaaaatcaataaaggaaactcaacttgaagatcgcttagcactagaccgtagaatcggacaacttttaggttattcagcgcaagacatagagttttatattcaacacgtttcaaacttttatgcacgttctcgttcttga

SEQ ID NO: 51835 - DNA, 321 bp, Acinetobacter baumannii
atgaaatttaaaatattattactcagttttattgccacaggttgttatgctaacgataatataaatgatcctgatatttgtaatatcgtaaaaaaagtcgcttataacgtaatggaagcaaggcaaaaaaaagtacctgcacaagatttacaacaaattgctgatggccttacagaagaaaaagcaaagcagctttatcaagacttaatcaactcagcttatgctgctaaagtattcaaaacaagcttctttaaacgtaaagccatcgaagattttcagacagggtggtatcaagaatgcttacatcgaaatgagcaataa

SEQ ID NO: 51836 - DNA, 783 bp, Acinetobacter baumannii
atgaaaaatacagttaaagcgttatttattgctgttctttctggcctagcaatggttagttatgcacaagaagaagcagtatctcaaaaaaatgtcacatttcctaaagtatcagatagctatcttaagcaagtaaaacgttatgagtatgatgacgttgcgcgcttagatttagggctaaataaagaccagattcgagctctactcggcaatccacaatttagtgaaggactttttgcagtaaaagtctggaactatgtactagatatacgtgtaccaaatagtaatcaataccaacgttgccagttacgcattgattttaataaaaaatatttggctgaacgtttatcttggaaaggtgaagcatgtgaagggttgatggcttggggcgaaaataatcagcctcctgcaagtagtactgcggttaatggacgtacagcgagcgttttatttgcttttgatcgatctgatgctagtgcaatacagcaaggtttaaacaatatagacaacgttgtcgatcagattaagcaaatcccatcaacaacacctattattgtttctggattcgcagatccattaggtaaatttagttataaccaagagttatcatctaaacgagcgaatacagttgccaaattacttgtaaaacaagggatagacccaaaccgtattcaaatacaagcgaatagccagactgatttatatcagcaatgttcaggtggtcataattctcaagttattcaatgtttagccccgaatagacgtgttaatataagttggtaa

SEQ ID NO: 51837 - DNA, 1389 bp, Acinetobacter baumannii
atgaataagatatacaaagttgtatggaatgcttctgttggtacatggactgttgtatcagaattggctaaaagtaaaacgagaactggttctgtttcatcatcttctgaaataactagttcacaaaatgagatcatttctagagaaaagaaatttagacctaaggcccttgtattatctatcatctcctgtttagccgcttcacatgtgtgggctgactacacaaatttgtatggttcaattattgatacaagtccaaccatcagtaatggtattgccataggtgcaaacaccggtactccggctactgcaaatgattctaacggattagccgttggttcaagagcaaatgccagcgcagcagattcaactgcattaggaaattatgtaaatgcgacaggggtaaactcaacagtagttgggggacaagcaagtgctgctggcgcgcaatcaattgcacttcaaaataacagtgatgcagatcttgttgcagaaggcttggcaacgggatcatcttttacagcagttgatagtgcttctagttacagtgtcgcaattggtgcgatgagccaagttgttggttcaacagcagcaatggcgataggaaaaaatgctcaagttaatagtggggcaaataatgctactgcaattggtaatacagcgacggtagatacaaacgccgttgatggtgttgctataggtactaatagcttaacctcagcagcaaatagtgtatcccttgggcctagatcaaccgcaagtgtaacgaattcagtggctttaggcgcgggttctacaactacggtacaaagtggtaattcatatataacgaatgttgcagcatctacaaccaatggtgttgtttcggtgggctcagcaacaaatactcgacgtattcaaaacgtagccgatggtgctgccgattcagatgcggttacggttgctcagttaaaggatgtaaataatcgtgctgtaggcaatacgaccgcattgggtggtggtgcagcatataatcctgcaacagatgtatatacggccccaagttatacgatcactaaaacagatggaacaacttatactcctgttaatacagtgtcaggggccttaactaatctaaataatgaagttgtaaaacctattactttcgctggtaatacaggaacttcagcaaataatttaggtacaacacttaatatcactggagcaggctcaactgctggaacctattctggaaataacttaaaaacggctgtgactggtaacacagttaatattcagatggcggatgctcctgttttttctggtactgtcacagcgggcaacttaacgactggcggctcattaaatgttactggcgcaagtaaggtggtgaaaatgctgtcggtgtga

SEQ ID NO: 51838 - DNA, 2928 bp, Acinetobacter baumannii
gtgaacacagcaataattaaacaatggtttaatgactatattgaatttggtgatggaaaggggtggcgtaaagattatgaaaataccttcaataaggtacaggaaataaaacaaaagctgaataatggttataagttaagtgcccaaaatgattttgattttttaagtgaacttttgaaaaatgatgcaaatggggttgcatctaaaggacaatcaaatctcgcaaacgaagtatttgataagatcattcaggatgtggaatttcttaatgttgtagaaaaacttattcaacaacctaacgaagagacatataaagcgttgaatagttatggtggtcaattactcactcagttgggtagtactcagcgacctttattattcaatcgagcatgtgcttcatgtactttagatgtttcaacaattgttgatcgtaataaatttcatcaattcgttgagtatgtaacaactcaacaaatcatagattttcctcaagaaatcagagagaaaaattggtatgtaaagaatgtatatttagttcagaaaattagagagatattaaaggtagaacttgaatcaggtcaaacagatatattttggttaaatatgtttttgtgggacatatatgctgagaaagtagcgacaaattttaattcaaaaaatgcagtcgattatctgaatgagagatatccaaatacatatacaagcacgaaacatatagcagcgtttaaaacatctcaaggtcgagagttagcattagatcctaaagcaaaaacgcctgtaattttctgtgatgcagaaccaccgatagaacttaaattaccaattaaaaaagcctatttagaagccgatactcgaaatcatcatttgtccacacatgccaaatcattgatgctgggtaataaaacgtattctattattgtgggtacacttgatgatttagaaaagctttgtgattggtatgaacaaagtgatgagcagaccacagcgcttgagaaaaaggtacagcaatttttaacgctttggccaattgaaggtttaaagaatttatctatacaagattatcatcaagcccaaaataaagactgtttcattgctcagattgacagttttgatccaacacaaggtaatcctacctttgccaactattttgatatctgggagccaatcagcttaggaaaggatgataaatatcataatgagaagccatattcatggcataaacgactagggaatgatgcagggttagcatttgaaaccctcaaacaggaaatacttgatattgtagatgctgttcagcgccgtgacttaaacgcaattgatcaaattcagttttctaaaggtctcaaatggatgattgcattcttatatcaagattttaatgatccttgcattatcccgattgtaagtaaggtcaattctaaacgtattggttatgaccacttatatccaaaattaccactaccagagtttttaccaattttattggaagatcggggcgaaaaagcatttttcccatatgtggaaaaactttttgcgagggtcagaaaagcctatttggataacaaacaaaataaacagcaaattgaagaattaatggaagaagtcatggctcaacaacctttaaaccgtattttatttggtgctgcaggtacgggtaaaacatacaatactattaaccatgctttagcaattttagaagacaaagatttaacagaaattgaaaaactagaaaggcaactaggtggtagaacaagcctaaaagacttgtttgataaatataaaaatgaagggcgcattaaatttgtcacattccaccaaagttttagctatgaagattttatagaagggattcgagcggaaaccgatggctcggggcagttacgctatgaagtaaaaccaggtgtatttaaggaggtttgtgaggatgcacaaacagaaatagatgcgaaccaaaataatgtcttagcaccgattgaagcgagtataaatagtgcgattgataagctcattactcaggctaaaactgaggaaaagaagttttatactaaacgtggtgcagaaattaaagtatcaagtaattcagcagggacgttatttgctcttacatcttcgggtagtaatattccattatcttttaggcatattcgtaattacttgaaaacacaaaatgaaataattgtggatcaaaagagctatgaatgggcaattgcaaagtctctacgttcagaagttcaatattcagatactaatgaaaaaataaaaccttatgttctcatcatcgatgaaatcaaccgaagcaatattgcacgtatctttggtgaactcattactttaattgaagactctaaacgtcaaggtgctgaggaagaactatcagtaacattgccatactcaaaagaagagttttctgtaccaagtaatgtctacatcattggcacaatgaattcatctgatagatctttaacaggtttagacattgctttgcgccgtcgttttacctttattgaaatgccaccaaagccagagttattagatgatttagaagtagaaggtctaaatattggtgagctattaaaggtaataaaccaccgtgtcgaagtgttattggatcgagatcattgtattggtcatgccaactttatgagtttgaagaaacaacaaactcgagagcatttagtcgcgatatttaaacagaaaattattcctcaattacaagaatacttcttcgatgactgggcaaagattaatttagtattcttcaataatggtatggttgttgaggataaaaacattaatacggcaggattatttccaccgaatacagaacaggatatgcattattctgaacaaaagaaaatttggaaaatcaatgatgaagcatttaaatctatagatgcatttatttctatactcggttcaaaggtctaa

SEQ ID NO: 51839 - DNA, 1284 bp, Acinetobacter baumannii
atgtctgattttactgtccgagaatatgccttcctaagcgttgcttacgaaggttgtccaaagtctagcttggcacatgcttatattcctgaaaaagcgtttgagcatttatgcgagctttcgtcatccttttctaagcacggcgcgaaagtatttgaacttgcagggcgaagaaagctgaagctagatcaatatgtcggtgtgattgaaacgccgtgtggtacacgtatagaaatattaccgaagcatgtggagctcaatgggacaagtgatcaagagattattttagaagaacgcaaactcttgcaaaaaatgctgggtgtatctttgcatttaccttatagagaagcagggagtgctaatttaaatcgttttaaacagcctttacatgaatggattattacccagttcctcgctgcattcgagcgtttggttcaacgtggtctacgttttgactataatcgtgtccaagaggaacaaaagtttttacgtgggcaattgcagtatgtgaaatacatgcgtcagtctcctgcgaagaagcatatcttcccaattgaacatgatgtatatgaagtcaatcgacctgagaataggttgattcgtacagccttggagatcatctgtaaaaagactaaagatgcaagtaactggaaattagctcaagaattgcgcttgatgacgagtgaaataccacgaagccaaaagattcagcaggatttgagacaatggcaaaccgggcggttgctagcactatacgctgagatcaaaccttggacggagctgattttaggtgagtacatgcctgtatctacacaaggtgaatggcggggtatgagtttgttatttcctatggaaaagctgtttgagcattttgtggcttatcatttgcgcctcggattgcctgaatatcagatcaaaacacagcatgcgacggaacatatttgtgagcatgaaaccagtaagatatttaagttaaagcctgatatttttattgatcgctctcaagccaatgcgaaaagcattgttatggataccaagtggaagctgatagatcaaaatgatcgtagtggacggtatggtttaaaagataacgatattcaacagatgtttgcgtacagccactattatttgaaacatgaaagtgaagtgatattggtttatccataccgagcagaaaagttcacacgacctttggatgattttgactttaggcatacagaaggtgcaaaacttcgagtggtgccatttaacttagatgaaccacaaaatttcaaaattatttaa

SEQ ID NO: 51840 - DNA, 672 bp, Acinetobacter baumannii
atgtgccaagcacagtctttaggggctttgctgtgccctttttttcttctagaaagggcacaggcttttttatctcatttatatacaacaaaaatttatttttataacggtaaaactatgccaaattttattctcccaacacgtgctttagaagttgtaaaaaaaggaataaatctgttccatcacggtgggtttcacatggtcggtgtcgacaaaattgtgaaagaaaccgaagtgaataaaatgacgttttataattattttcactctaaagaacgcttcatcgaaatctgtttaatcgtacaaaaagaacgcctccaaggccaagtggttgcactggtcgagtatgaccatgacacaagcacaatcgataaactcaagaagttgtatgttctacataccgacttagaaggcccgtactacttattatttaaggctatttttgaaactaaaaatagttatccaaaagcttataaaaccgcggtgagatacagaacatggctgaccaatgaaatttatagtcagcttagattacttaaaaccgatgcttcttttaccgatgccaaactctttttatatatgattgagggcgccattattcagcttttaagttcagataagacaactcaaaaagagaagatgcttgagtattttctgcgaggactgatttaa

SEQ ID NO: 51841 - DNA, 150 bp, Acinetobacter baumannii
atgattattcatcttcaacacatcatttacacgataatagttctagtcatcatcatagctctaattattcaaatgattgttcatcgtcttcagactcagggagttgcgatgggggtggaggaagcgattaaaaaaagccctttcatataa

SEQ ID NO: 51842 - DNA, 1884 bp, Acinetobacter baumannii
atgaaatcagttgttttaatttttgcctccttggcagttaatattgcgtattcagcagaaataaatccatctattcaaaactactggtcagttgcagaacaaaaaaaattagaccaagacattacatggcaacggctcatgtatgccaataaaaaccagaagagtgaagtgagttattcgggttattttattgcagcaaatggaaaaaataatttaaaagaagagttaaaagccgatatcgcggcattgtttacacctgcgccagataatcagtcaattcgttgtaaatttccggcacgtagtcagtggcttataaagcaattaggcattcaagaaaatgaattgccgcaagtaaaatgtcctgagtttgaaaactggattggccaaattaagccttataaagcgaccttaatttacgcgacagattttatggggaacccaagctcaatgtttggacataccttattgcgcttagaccctaaagatcaaaagcagttaaacctcgtttcttacgctgtaaattatgcggccactgtcgcaggcaatgataactggtcatatgcttggaaaggcttaacagggcagtatccgggtgaatactcacttatgccttattatcgtaaggtaaaagagtatggtgattttgaaagccgtgatttatgggaatatgagttaaatctatctcctgaagaaacacgttttttggtgagccatatttgggaaatgcaacatgtgagctttccttattactttgtaagtgacaactgtgcctatcggttactgggcttagtcgatttagttaaacctgagtctcatctacaagagaagtttaattatgcttccattccaatggaaaccattaaagcgatgcaacaacaaggactcaccaaagctcctgtttatcgacccgctttagaaactcaattattggcccaagctcatcaacatggtgcgtctttagcaaaagttgctcatcaagtagcaatgaagccaattcaacagtctacagaaatacttaaatcatttagcccatcagatcaggccaaaatccttgagatggcttacgatgatttatatctacaatttattggtcgcaaagttgaagaaagctttgcccagccacagcttagacagcttttagcactacgaagtcagattgatttagataaacagcgccaagaaccgaaacgaccttctaccgagccaacacaagggcataatgcacgtaatgtttcactaaaattgggcgaagtgcaaggtgacaagtttatcgagataggtcatagacaggcttatcatgacttaatagatcctcaaggcggataccgtgccggtactcaattattatttttaaatggtaatgcgcagtggcgtaacgatcatctaaaacttgagcatcttgatctgttagaggtgaactcctataacccgattcaaccatttaaaacaccgctgacttggggatttaacttaggttggcgtcaggaagcggttcatgacggtgtttatagtgatgaaaagcagcatggcgtcgcgagttttaatgctcaggttggttacagtcttgcagattatgagcgcaaacatatttgctatgggcaggtacaaacttacgtccaagcgggttcaaatttagataaaggttggcgtgtaggagtaggaccgacattagggtgtatgaatcagtggtttgaaaagtttaactcagtggtgcaagtggagttgccatattgggaagataaaaaccaatggaacttacgtttaaatacacagtggcaatatgccattaatagcaataatgctattcggcttaattgggattatgaaaaacagaatcatctggactggatgaaatcaagtcttggatatgtttggttcttttaa

SEQ ID NO: 51843 - DNA, 576 bp, Acinetobacter baumannii
gtgaatattgaaatatttaaagaaagtaataataatcaatattctaaagatatacaacttaaagttcgaaattataatttaacaaattatgaaccaggtttttccttttatggcttagttcctgcttcgtcgatctcgtggggagataatgaaaagatactatctattaatatacagaacttgaatttatttgataaagaacgaaataaatttagagtgttagatttggaatataatattcctaggaatacttctaatattttaattaataaagaaatatatcctatattgcgccaaaattatggtttcgcttatgtcgtcaatgatcagaaaaaatattctattagtttaatagggcaaacaggagcttatccattggaagtaattcaagaattcaatggtcatatttcaattgaaactacgaaagaaaatgaaaaaatagtttgtggagatcgctataaatcttgttcaggtttatctatggataatgataaaaaaacttttagatttaataatgttaaattaggtgaagatgttttcaatggaatgatttatattccaggaattattgattaa

SEQ ID NO: 51844 - DNA, 168 bp, Acinetobacter baumannii
atgatgaaaaaatttctagtttgtgcagcagcaattttcacactatcactatcggcttgtgcagtttatacccctgctggcagtgtagtagttgatccggattcgccttatcacaatcatccaggagatttttgtccaccaggtcaggccaagaaaggtcgttgttaa

SEQ ID NO: 51845 - DNA, 435 bp, Acinetobacter baumannii
atgaaaaaaactatctttcttggattagcgcttgtttcgttaacggcttgttcagcagtacagcataaagaattaactccaccaaaaattggttcaccaaatccggcaagtcaatattgtgttgaacaaggcggaaaattagaaattagaaatgaaacaaatggtcaggttggatattgtcatctgccaaatggtcaagtggtcgaagagtggaaattattccgtgataaccaagctaactgcgtagcagaagaagctcaaaaattagtggggttatctggcttaactgatgaccaaattaagcaaaaaacgaagtcagaaattgtacgtaaagtagctcctggtcagccaatgacgatggattaccgttcaaaccgagtaactgttaccattgatccagcaactaaaaaaattaccaacgcgaactgcggttaa

SEQ ID NO: 51846 - DNA, 879 bp, Acinetobacter baumannii
atgttatctcgtcgaaaacttccatccttaaatgctttgcgtgcttttgaaacagcgggcaggaagttaagttttcgcgctgctgctgaagaattaggtgttacgcaaggtgctattgcccaacaagttcgtgcattagaagatcatttaaacgttactttatttcaacggcttccacgaggactctctttgactcctgaaggagcaaaatatctggtcaatatcactcgtgcttttgatattcttactgattcgacagaattacttttagatcagcctgatagcgttactataagtgtcacaccaactgttgctgccaaacttttaattcctcggttaggcgatttacatactctattacctgacattaacctacatacattagctactgaagcagtatctgactttgatcgggatcaggttgatattgctatcaggctaaccacaaaatcatttccagagaatttagaaacacaattattgtttcgtcaggaactcgtagctgtcgcaagtccttattttgtcaaagatttaacgttgccattaaaacgtgaacagttattatcaatgccacttctgcacgatgcacacgatcaatggccaaaatttctaaatacattcgccaagttgtcagggcctatatttaatcaaaccactctggcgttggacgctgctgtgtcagggcaaggaatagctttagcatgtcgagcatttgtagaagcagatattaagtcaggaaaactagtacaagttatttccgaaactaaaattgttgagccaagttattttcttgtcagaaaaaaagttccacatccgaatgacaaagtagatcaaatttggaaatggtgtattgaatatttaggtacagagcaagattaa

SEQ ID NO: 51847 - DNA, 702 bp, Acinetobacter baumannii
atgtctgagaaagtcgctattattacggctgcgggaagtggtatgggcgcagcgattgcaaaaaaattagcagcagatggatttaatattgcgattctttcttcatcaggaaaaggtgaagctctcgcaaaccaattgaatggtctaggtattaccggatcaaatcaatcaatagacgatgttcaacgccttattgatgaaacgctttctcgctggggacgaatagatgttttggttaacagtgcaggacatggtccccgcaaggaaattttagaattaacagaccaagattggcatgatggtatagacacttactttcttaatgctgtacgacctatacgtttagttattcctgtaatgcaaaaacaaaagcaaggtgtaattatcaatatttctagtgcatggacatttgagcctagctcactatttccaacttcggcagttgctcgttctggattggcagcatttaccaaaatttgtgcagatacatatgcgattgataatatccgtattaataatgttttacctggatggattgatactcagccagaaatagatgaacgcactaacaatgttccaatgaagcgatatggttcaaaagaagagatagcagatacagttgctttccttgcatcttatagtgctgcttatattacagggcagaatattcgagtagatggtggcttaactcgctcggtataa

SEQ ID NO: 51848 - DNA, 441 bp, Acinetobacter baumannii
atggaaagaaatgaataccaagaagaaaaacacacaaagttcatttattcgagtaaaagacgcattcagcgaagggttctacaattagagaaacttacggccgaggccattcataactatattcacctcaactacaaggatgaatggtttgaaagcaacttttcaattttaagttgttggaaattctctaaaaaagactttgataacactgacaaattttggtgtgatgccatttattttgaagacttccatataaaaaaggaacgagtatttacttttaatggacacgcatggattggcttagcaagcaatgttggatcagaatggaaagttccagtgtcaggaaaattttgtatcagttcgaatgggaaaaccttaaaaagctataccttaactttttacaatgaaagtcaggaattagttttatcaaaacggaactaa

SEQ ID NO: 51849 - DNA, 456 bp, Acinetobacter baumannii
atggaaattggtacgaaagaattttcttttactattcttaatatcaatcctcaaaagaatcttttacctcttacaatcaatattaatggactttcatttggtacattagattcaccaacatacatgcctagctttattggagatttaaaggcattagtgcaagggcccttccataaaaactataatttaactattgaaaactttttagaaaatctctgcgtaaaccaagagttgattgaacattacagattaaccttagaggaaacttttgacgatttttcaaaaattggggttcggaatcaagaatccatttttttcttatttaagttacataaaaatccattttttatatatccaaacttaactgaagaaattatatacgctgaacatgtaccgattaattcagttgaatcggctctaagtgaattaataaaatatgtagcgacactcccctaa

SEQ ID NO: 51850 - DNA, 399 bp, Acinetobacter baumannii
atgatgacgctgcaacacttacgcaagtatgcttggtttgtgttcctaatgattttggtcattgggtggagtggcgtgtctgttgctcagatgcctatgcagcatgatcttcatacaatgccatgccatagtaaacaaatgacacatcacactatgcatgttcaagctgatgatcaggcgatatgtcatcaatctatggttaaagtttctcatcaacatggtgaacattgccaagactgtaacccagtgcattgtcaaatggtgaatctggcttcacagcaagctgtaccagatattgaaacatcatttattcctagtacatctcaatttagtagtatttatcaggcacagcatttagctggatactggcaagaaatcttacgtccaccaaaagcttaa

SEQ ID NO: 51851 - DNA, 279 bp, Acinetobacter baumannii
atggttgggctgacttttgcaggtgtttctccaggtcctgcaaaattgaatctatttaatttattggcaaataaggtagatagtacaagcatagattttgataataatactccttggtataatcaatatgcggcagctcaggctagctataataagcttgataaagtaacccctactgaagatgataaagctttagccaaacgccaattgggtacggtcacaattaaactagctgatcagtctattccagcatgtaaagcgatcaaaattaaatcttaa

SEQ ID NO: 51852 - DNA, 480 bp, Acinetobacter baumannii
atggggatgaggggaattactccgcaagaagggttcaccttagtggaactcatcgtaacaattgcagtcatggctattattgcaatgatggctgcgccgtctatgtcaaatttattaaaaagtaaacgtttagatactaatcaaagagatttaattagcactctatctgaggcgaaaagtcaggctgtgcttggtcgtcagaatgtttcagttaatttgaattcagcggcttctaatacggccactttattaaattggcaacctacttctaacaacaccctaacgctaaaaaatatagctgctgataatacccaaagttctttagctatcactactttaacatttaacgcaaatggagttgtgagtaatattactcaggatgcacttatatctatttgtaattcaagaataaataaaaagaaaaattttatacttacaaaacttggagctttggtttttaaagctgaggagacatgctaa

SEQ ID NO: 51853 - DNA, 555 bp, Acinetobacter baumannii
atgcatttaaacaatctgaaagctcaagcaggtgttggtttaatagaagttttagtcgctttaatactacttgcaataggagtgcttggttatgtagcacttcagattagggcaatggatgcatcttcagaagcattaactaaatctcaggcgatgatagtcatgagggggttagctgaaaatattcgcacaaatagtgttcaagctggtcaatatccagcatttgtgcgtagttatagtaatttttcatcaactacagtggctccgacttcctgctttaatacgccgtgtacgccttcacagcttgctcaatttgacgcatatcaaacagcaaaaaatgcagatcagctgggtatcaaaattacaatgacaaattgtccaggcgttacttcaactatgactttacaaaggcaatgtttattcgctttttggggaaaaactttaccagtaacgagtacaagtgggagtacatcaactgtagatgtatcaaattgcatcactagtagtggaatttatgtctctaattctaagtgtttaatgatggagacatattga

SEQ ID NO: 51854 - DNA, 999 bp, Acinetobacter baumannii
atgaatcgatcatttttagaaaagcagcaaggatttaccttaattgaacttatggttgctttggctttaggtttaattcttgttgcagctgctactcaattgtttataggtggaattttatcaagtcgtctacaaaaagcgaatgctgaaatacaagatagtggtatttttggtctggattatattatacgtgacatacgacttgtaaattatggaaatattataaatcctcagttaaatgatactactccttggggagggatagtgttaacgggttctactgctaccaataataacaatgtaaattttgtgcctaatacggggactaacgcctatatcgcagatgctttattaagccgtggtgcaggcgatacagtaagtaccttaaataaccagtggaaaggcctttcaaatatacagaacagttcaaatgcaactatacagagtgatcagcttactattcaatttattgctccttctaatatgacaaattgtgaaggtgcaaatgttttggcgggtgatcttgttgtagagcgctattttttacgtctcgataataatgggagttcacaacaagattatgccctagcatgtgatgcaaatacaccttctaccacacctacagctcaaccaacatcagttgatgggtttggagatgcgggtcaaattatattgccacgtattgatcattttcatgttctattaggcgcgaaaaatgcagctggtaattttgcttattacactattcctcaatatcgagtggctgcacaagctgcaagagatgcgacccctacacaattagctccacgtatcttatccatacaaatttctgtattagcgcgttctaccaataatgctcaaaacaaagcagtcgatcctaatcaaacttttgtaatgttagatcaaacagtacatgcctcagatacaagttcacgattcttgcgacgcgtttatagcacaacaattgctttacgtaatgcaatgggggaaaaactatga

SEQ ID NO: 51855 - DNA, 816 bp, Acinetobacter baumannii
atgacccatttgagaagcaaatatatagtccaacatcatcaaaaaggtgcgacgcttattgttgtgcttattattttgttaattgttattgctgtgggggttttagccattagggtggctattgtttctttgaaagttgcaacaaatagccaaattggccaattaaattttcaatcttctgatactcctatacagctcatcacccagatggatccaacgacgcttacaaatattagtaatgtgttaggagcagcacttaaagaaaatgagagtcatcctggatcggaatataatttttgctataagccagtttcgaccactgtaagttttgcccaaacccgagatgcgagtctactgcgagcaggaactgctaacaatgccgtggtagaggatggaggagtggctggcttttgtgacctgaccactgattatggaagtaatcgtcaagctgtcgttacacaaattgctgtaagcattccaacagatgccgttaatgatgttccaggttcaaatttaccacgcggaacaaatgcgtctgaaggtactgctttaccaaagagtatgctttctacacaacgcattcgagtgatttcaacttcttttttacctgcttatgcttctacctcaatgcaaactttgcaagcagattgtttgagtacaaatagtgccaagatcagcgataactttgatagctcattaagtaataaacaaacgttagctgattgtttggcaaatcataacgtaccttttagtactcagattcaagaatttaactataccaataaacttactgaaactatggcgccaggttcataa

SEQ ID NO: 51856 - DNA, 1689 bp, Acinetobacter baumannii
atggggaatatcatgaaactacatttcaaaccaaataaattatggtatgccatctattcaacttcgatgacatttacatggcttatgtcaagttctgtagtgcaggcaagtgatttacaaatttatgcctcacctacagcaggtaaaaaaacaattgttatgatgctagatacttctggatcaatggggcgtacgatccagtccggttatagtatttatgatgattacggtattacaagttgttcaactacttatgtaaactcaacaactactcctagttatcgtcggtattattgcggggtttcctcaaataccactaatagcaaagtaactaatttagcaaccggatgtgagaaacaggcagataatagttatcgttgttatgaccggttaacgcgcctaaaagatggtatgttttcttttttagaaaataataacccgatatttaataatgtaagtgttggattggggcatttctctacatacagtagtggtactactggtgatggcagtagcggcgaaattttggttccagcagcaaatttgggcgttgtaggatctgcacaaagagttgcattaaaaaatgctgtagctggattagaagcaagtggaggaacgcctactgctaatgcttatgctgaggcagcagcttacttaatgggaacacgaacattaagctcgactacagcaaatgtggcaatgtattttaaatattatccagttttaactcagacgtcacaaaccgtttactatgcctgtggtaataattcagctagtggttcaacagataatacaaagtgtacatatacgccgaccacaattccaagccagtctaatttatctaactatagtagtaatactacaagctctttttatgagccgcctaccgtaacaattcatgattatggtgttcgctcatttattacggttggtatcgcttctggtgatcgaagtacaccactagatgtttatccaattattggccgggaaggtatgtctcctagtacggcgcttagtggtcgacctgtaaataatgtttatggaattattgatagagactttatcaaaaagaatttaatgtcgttaagtgatagtcagcttgaaactaaggatcttattcgctcaaatctgcggaaaaacccacaaatattaagagcaggcgaaacgagcgtagggcaagttttctttccaagtacgggtataggtcaagcaggttggtaccgatcactttctagtacgagcaatggtactgaaaaagctgataatagcttccgtattaaagggggaatgaaagcctttgaagaaccaatagcaattacaggtaatttaatcgttcctgtctatgatcctcaaggaacgggtattgttgcgtcggacccttgtttaccacgtgtagtaggtgaaacagatcgacaaacttattgtctaccatttggagtgtgtctgaatactgatggatcgattaatcataataaggaagataatagtggttttggaacagatggaacaaagaacctaaatgtaattggttcaggggttcgcaatattacgtttgtgcctagtgaagataatccatctccgcaaaacagttgtggaaaattaaagctatctggtaatgagcaaggaacagggcagtggcaatgcacaagctatttgatccctgcacgctggtatgagcggtatcgctaa

SEQ ID NO: 51857 - DNA, 483 bp, Acinetobacter baumannii
atgagtaaatactataatttgaagttcaatcggggttttactctgattgaacttatggtcactcttcttactttagctattcttgttgctattgctgttccttcttatcaaagttatgcccgtagagctaccgcatctgccgctaagagtgagattttaaaattagctgagcgattggagcagcataagtctagaaattttacctataggggatttaccacaacctctgtaacgttaactcgtggggggtatacgattcagatcactgatgatacgactgctggtaatttattaacgagttctgctgctaatgggcagacatgggtgattagagcgactactacagattccagaaatcttaattttattgctaaaaactcaggtttacgttgccagagcttaacagctactgctgttgataatgattgtggtggaacaactacatgtaacacatgtgaagcaaatagtgagagttggcagtga

SEQ ID NO: 51858 - DNA, 789 bp, Acinetobacter baumannii
atgcaactgacttatgcgggacaagttttcttggtggtcgttgcagttttgatgatttggtcatttgtactcaccaagttttgggtcaagcgtttagctaaaaatcgtaaaagtagtaaatttgaatttgcttatttatttgccgtggtttttagtattagtgctttatttttcccatttacttattgggtttctcaggcagtctacggcttagcaaccaaaccaacttacgatgcaattgtagtgagttatacttctgaatgggtagatactgaacgcacagactcaaatgggcgtaaatataaaactaaaacactcatgcatactgctcaggttcaatttaaagataatcaaaatagaactctaacttttgataattcagttcgctctgttgatatgcctgtagttggtgaacatattactgttgtttatgaatctggtgatcacacagcgcaagaaaagagctggcgaacaattctattgtttgcagccgctttatttatgctatttattttaggttatgtgttgctcatgattattgcctacagtctaaagcgcgacatggaaccctacaaaacatttgctagcatgttaatttttaaagtcacgcttccacttggaacaatggcgatgttttcgatgttgtcttattctatttttgcctatttctttttaggtaatccaagggatttacctctatgggccattgtgctttgtagttttcttgctcttagtcttttaccgttgatttatcatattctgacaggttggaaagcgtacaagaaataa

SEQ ID NO: 51859 - DNA, 945 bp, Acinetobacter baumannii
atgaataatattcaaacgacagcgttgaaccgtacaacgttgatgtttcctttagctttagtgctatttgaatttgcggtttatattggtaatgacctgattcagccagctatgttggcaattactgaagattttggtgtgagtgcaacgtgggcaccgtcttcaatgtcattttatttattaggtggtgcatctgttgcatggttacttgggcctttatcagaccgattggggcgtaagaaagttcttttaactggtgtattattttttgccttgtgttgttttttaattttattaacaagacaaatcgaacactttctgacattacgttttctacaaggtattgggctaagtgtaatttcagcagtcggatatgcggcaattcaagaaaattttgccgaacgtgatgcaattaaagtcatggcactcatggcaaacatctcattgcttgcgcccttgctaggacctgtacttggagctttcttaattgattatgtatcttggcactggggttttgtggcaattgctttacttgcactgctgagttgggttggcttaaagaaacaaatgccgagtcagaaggtaagtgtgaccaaacagccttttagctatctttttgatgactttaaaaaagtatttagcaatcggcaattccttggtttaacgctagccttaccgcttgtcggtatgccgcttatgctttggattgcattatcgcccattattttggtcgatgagctcaagctaacgagtgtgcaatatggattagctcaattcccagtatttttaggtttaattgtaggtaacatcgttttaattaaaattattgaccgtttggctttaggtaaaacagtcctaattggtttaccgattatgctcactggtacagtcattttaatattaggtgttgtctggcaaacctatttaattccttgtttactgtaa

SEQ ID NO: 51860 - DNA, 318 bp, Acinetobacter baumannii
gtgtgttcagcggacgcttactgtttacttacgggaatgacacttatttgctttggtgaaggaattagtttctcagtattgtatcgctttgcactgatgtcatctgaagtgtcgaaaggaactgtagctgctgctgtttcaatgctattaatgacgagcttttttgcaatgattgagcttgtacgttatctctatactcaatttcacttatgggctttcgtgctatctgcttttgcatttatcgcactgtggtttactcaaccacgcttggccttaaaagaggaaatgcaggaaagagttgcacaaaatttacattaa

SEQ ID NO: 51861 - DNA, 903 bp, Acinetobacter baumannii
atgaatcaattctcttctttgtcatttgaatataaatctaaagctctactttgtatttatagtttaggtatgttggttttaatccctcatacacagcttttctctacgcccttaaagcatcaacgctccacgagacgctccctacatccgtcgagcctattcataaaaagcaaaagtcattctgtaactttttcaaattcaccatgtgaagtagaaaataataatgattcagatgcagcactcattcaggacctgatggccgtgtttggaaatgatacgctgtggaaccgtgcaacccagcacaaacaaccttataaaaccttgggtaagaaaaagaagaaagcttcaacaccccatatttcgatcagcaacccaattactgcaagctgggatacgatttcaacatggatgcctttcgaaaataatcttgatttaggctcaaattcagaaagtgatgtttatgtacaatttcttgccaagaaaaaatggaatttaagacataacattagcatagataccgaacaagtctttcgctatggctcaaccagccgaaactatactgaaaccacgctaaacttaacacaaaagatgcaagacaacaccctgttcgctaacaaatttaatgtgaataagagtgaaaatgaagaattcaactggggcaattggacttttcaacaatttgagtttgtaaaagataatagcctgacttacggcatttatagtggcggtgtatataccaaaaatgacatgcgggtaaatagttggggaccttatatttcatggcgccaacccgtatggcgagattggatttttatgcaaaatgatcttaatttttttaatcatattgatgatgacccaaaacatcagcttagtgttcaaatgaatttagaagctaatttttaa

SEQ ID NO: 51862 - DNA, 759 bp, Acinetobacter baumannii
atgcgccgaattttgattgcgattgcaggtttggtggtaattgcaggtattgtctttttttcctatcaacatattaaacagcaacaagctaaagacagtagccaaatgttcgatgtggtgatgaatgaaaaaatgagtgaactttatgaacaggctcaagattggtctaaacctgtacaactcgatattcatgataaacggctcgcagggcactataagcaagtctcagaatttcttttaagttattgggttcaaaatgtaaatgcgcgtaatgaatacttaagagaactaaaggctgcaaaatgggatacttttttaaatgttgaccgtttggatattgataaaaaacaaaaatatgctgaaacagaaaagatgttggctgacgttcgaaaagcttcagataaataccaatctgaatatgaaaaaattcataaaatctttctcgctaaaatacaggaattatctgttgatgcagataccagacaacttcttgaaatgaaattgggaactcagcaaaaggctgatcaataccatacgatttttatgattgagctgcaaattttagatgacgcagagcaaatgtttaaacttctaaaaaactattcgtggcaaaagaaagaccatatgattctttttcatgaaaatgctcaagttaaaaaatttaacgagctttaccaacatgtcttaaagcttaatgcaaaaattgaaagtattaagaaaaagaacgtggctgctttagaaaatgagttagaagaataa

SEQ ID NO: 51863 - DNA, 285 bp, Acinetobacter baumannii
atgaaaacttataaatctattttaacttttagtttagttctaggtagcttgggcatttcgggttgcaatttacacactcagcaggagtttgaaaaaatttgcttgtcaggtgggcatagcgaggccagttgtgactgtatttaccagcaacttgaaaaagcttattccccgaaaatgatgcaacgcctagaacatgtcagtttgcaaagtcctgttctcccacgggactttgcccctacttttttgagcaccatacagcgatgtgacaaaagtagtctgggctaa

SEQ ID NO: 51864 - DNA, 426 bp, Acinetobacter baumannii
gtgaatattcgtttagctcaatcaaaggataccgaattcatatgtcacttactgaaacaaatgggatattcacagccattaagattgattgaggagcaattccaaagattaagtaaagattctaacgcaattacattggtcgcagccgacgatttaaatgtatatggagttttatcactttattttattccgcaaattgccttaaaaggggactttgccaaaatatgttatttgtgtgttgacgagaatatgcgtagtaaaggagtggggcatttgcttgtacaagaagcagaacggttggcaaggcaacgtggttgtgaccggatggaactgcactcaggattgcaaaggcctttagcgcatcaattttacctaagagaaggttatgtcgaggcgccaaagtactttcgtaaagctttaaattaa

SEQ ID NO: 51865 - DNA, 444 bp, Acinetobacter baumannii
gtggatagcgaagcaatctatcaggcgttgtttgaaaggttaagcacaagggtagaaggattgattacggtaagtcgccgtttacgtcactttaaccatgtaacaccagaacagcgcccagccatgtttattacacaaggcaatcagcaagaagtcccggtacatggtttagattcaaaagttgaacttgctgctgaggtttatctctatatccatgaggctgatagagcaaagcccccatcatcacagatgaatattttcatcgatcgtgtacgtgaagctattaaaccagaccatcctgattttagtgagtatcaaaccttaggaggtttggttgagcactgctggatcgagggcaccgtagaagtatatgaagcagtagaaaacatgctggatgatcaggcgattgccattatccctattcggatccttacaaccaattaa

SEQ ID NO: 51866 - DNA, 192 bp, Acinetobacter baumannii
atgccttttaaatatcaggcaccagaaggttataaaccaaccaaactcgttattgccgggcaaaacctagatatcaaaaacggcgttttagaatctgataatgacattatccatattttaaagcccttaggttttgagcgttatgttgaagtggttgagccaaagaaatctgcagcatctgctaaagagtaa

SEQ ID NO: 51867 - DNA, 384 bp, Acinetobacter baumannii
atggacgtacaaacgtttcgccagaaattctcgactgatacggctttagttaatttgcctgatgcaaagattcaggatgcattagaagaagcagatctggtcgtatctcaaattgagtttggcgcattaaaggagcgtgctgtaggtctgtatgcagcccatatccttaaagtaggtgcctcaagcggcaatggtgctgcttttggtaccgcctcaagcatgacaattgcgggccaaagtgtgagttattcacgttcatcgaaagaagctttctatgatctcagcatgtatggccagcgctatcttgcgttaaaaaattccattccaattgatgatgaaggcacaaaccctaaccgtttgggtgtgggtgcctttgttgtatag

SEQ ID NO: 51868 - DNA, 378 bp, Acinetobacter baumannii
atgccaaaaattacttatagcggctctcaggccgctttttcttttgatggaattcaggtcggtcagggccaaacagtacaagttagtgcttcggatctcacacgtatatctaaaggtaaggcatttaaatcactcgttgaaaaaggtgaacttgaagttcaggaaatcccaaatgatgagccaaaagcagcagggaaaactggtggtcgtggtggcaaaggtggcaaacaaaacgatgcagcaggtgagcaacaaaaggccactgatgaagatgctttggccgccgtgaaggctgaattaacagagcttgaagtaacgttcagtgatgatgaaacacttgagcagctacaagctaagttagctcaggctaaggaataa

SEQ ID NO: 51869 - DNA, 486 bp, Acinetobacter baumannii
atgtcagcaatatttagtgattgtcaaaagcatagatttagacttgaaaggcaattagaagggaataaagttgttgtggcagtttttggagtaaatccttcaacggctgacagcgtgaataatgattctactgtaaaaaaatggattgtctttgccaataagttagaagctcgcaaattaatagttgggaatatgtttagctatatatctccttatgttaaggacttagcgacttgtggagaagtgacaaatattgaaaatgaaaagcatcttgaggatattatccgtgacgcagatgttctaattgcatgttggggagcaagatcaaaagtgcgtgccgcattgcgaccctattttgatcaattgatggttaaattaaaaaattcaaataaacccgtatattgttttggttataccaaatacggtgatcccagacatgttggtagaattccttattcaacgctattgcagttaattcaaaaataa

SEQ ID NO: 51870 - DNA, 813 bp, Acinetobacter baumannii
atgacaacgataattcagatcctgaaaccacacctccagcaggcgaagaaacgtaaaaaaggtcgtaaagcttctaagccgagggccgtgcacgtaaatcgccgtgtagagctttattacacacgacaactactggctatttcaaaatactgtcaggaacaaacaaaagaattggttattcctacagtcggccagaatatcggtgatgcttggttctcaggcatgatgacggcgtttagggaaaagctcacaaagtatgttgttgagatttcacgaccgttggccacaaaggttgtgactgatactcaaaaggaagtggacaagcaaattgcagaacacactaaaacaattattggtgtagatcttacgccgttctatcgagctgctgatattcaggatgaggtagatctaaacattacggcaaatgtcagtttgattaagtctattccgcagcaatacgccgataagcttgaggtattaattaccaacgctttgcagactggacaaacaaatgaagagttggccaaagctattaagcaattagggttatctactgattatcgtgcacgtcttattgctagtgatcagatgggcaagattaacggccaaattaaccaagcccgacagctttcaatgggtgtagagacatacacatggcaaacggcgaaagatgagcgtgtgcggccagatcaccagcataaacagggcaagacatttagatgggattcacctccagatggtggacatcccggtcagcctatccgatgtcgttgtacagcgctgcctaactatgaggatattttgattgattag

SEQ ID NO: 51871 - DNA, 1335 bp, Acinetobacter baumannii
atggctgaaactaaaaagcccgatgcaattggcgatgcaggggcgtatacaaactttgtctcaaatattggtaccgaacgtgacaaagcttcacacggttctttcgttaagaaagtaattcctgatgagcaattagaagccgtgtatcaacactggttggctaagcgcatcgtaaaccgtccagcaagtgacatgctccgagctggttggttctatgaagggatacaagacaacgatttattgaagcttaaagaggcgtgtaaggcatttaacttagatggggtgctcttatctagtttagtactttctcgcttatatggtgtttgctatgtgcttctaggaacagtggacggcggcaacttagatcaaccgtttgatttaaacaagttaggtattggtcgtttagagtttttcacggtgcttaagaaaaagcacattgaagctgataccagtaaatatttatcgcctaaggaggcaggtggcgttttaaagcagcctgaattttataagttaaagctggacgggaaatcaactcaaagaatccaccatacccgcttatataagtttggccatgccgatgtagttaatgaagagccggtaagtgtcttacaggaagtttatgaggatctgcttgatcatgccgccgtaaagaaagccactgctagtctggtccatgaatcaaaaattgacgtgattagaacacctaacttggtcgataagatcaaagaggatatgaaatccgtagctgaacgttttcttagtgtcggattgcttaagggtttaaacggaatgatcgtcttggataaagaggaggagtatgactctaaatcttatagctttggcggtctgcctgacctcatgcgcgagtattcgattcaaactgctggtgcagctgatatgccatatacgattttatttgggcaatcacctgcaggcatgaacgcaactggtgagcacgacacacggaactattacgacagtatcgcaactaagcaaatatggtccttaaagccattcatgatgaagcttttaagagtaattgttcaagctacatttggtcgtcagattccaagtttagatgttgtgtttaacccgttatggcaattagacgctaaggtgcgttctgaggttgagaaagctaacgctgaacgggattccaagtatttagaaatgggcatcattaccgagccacagatagcaaaacagcttgttattgacggtgtttattcagtgatcgatgaagctcatatcaaagagcttgagacaatggtgaagcttaatgacaacgataattcagatcctgaaaccacacctccagcaggcgaagaaacgtaa

SEQ ID NO: 51872 - DNA, 642 bp, Acinetobacter baumannii
atggagcagatcagaccatttccaccacaggaattaattgataaagcggatgaagaagaagcaattcgattagcgccagcccctgatttaatgaattgggtaattgcaaattttttaactattggtggtcctttgcataatccagatcacgaccatatcgctgagatgcttcatgacaatgagggtttcttggctttcgcatgggcttcttctgcttataccagagctaagcgtatggtgctcggccaatgtgaaaaggttatgtttcaacaaggcggctggaagaaagcccgacaagagcagcaaatgcgagactggttcggattcgttccagtttacttaatcaccatcgatgcaagcttttgtgaaaaggcaaacgatagcgagttctgtgctttgcttgaacatgagctttatcacattggtgtagaacgagactcggacggtgagattatttacagtgatcatactggcttaccaaagcattatttagctggtcacgatgtggaagagtttatcggtgttgttaaacgctggggtgcaaatgaaaacgttaagcggcttattgaagtcgctaaaaacccgccgtttgtttctgatttagatatttcgaaatgttgtggaaactgcgtaattacctga

SEQ ID NO: 51873 - DNA, 312 bp, Acinetobacter baumannii
ttggcgattggttttgaaagtaagtttcaaccgatccataccaaacactggcgctttgattttcatattgtgaaattgcgtttgctcattgaaattgagggtgggccctggtctggtggacgtggtggaaagctggcaaataaagcatggagtcttgatcgatatgatcaagctgaagagatgggttataaaatagagcgctttcatccagattctattttgtcgggatatgtcattaactggattaaagacgaattagcgagaattgaagatggagcagatcagaccatttccaccacaggaattaattga

SEQ ID NO: 51874 - DNA, 483 bp, Acinetobacter baumannii
atgaggattattttcttatatgttttattagtttttcctagtctttcttttgctaatactgtgaatgagtttttttcaaagtttcaagcaaggaataattattatatttataaggataaaccagagaaatggatctatgagtgtgctgtggaggcgaataagaaagaaagctctacgaatattaattctgtaagttttgatcaaaagaatcagtccattaaattctcattcgatactcctgatcatccattttataaagtaactaaaatattgaaaattaaacctaatgagtatgaagtgtatttccaagataagaatacgggaattaattttaactttgaggttattttaaaaagtaacggtatttcagattggttttttcatactcctaatgaagatacagaaaacttcatcgatagaagctttaccttagtgagtttcaatgagtctccaaagtttaatataacgaataagtgtaaatag

SEQ ID NO: 51875 - DNA, 381 bp, Acinetobacter baumannii
atgaatcgcgactacgaacaatttcccgatgacgataacggcaatgtactttggcaaatggttgaagatggggatgacttaacagagctgcatgaaattgaattttcaattgcttttcatgatcaaaaaaatgcagagcaatgtgcactttatttactttatcaagaacaaaaagtttctcttttccaagatgactctgttgagccgaatgaatgggtaattaccatctttgtgaatatggaacctgagtattcagatattgttgacttggaacaatggtttgccagcatcgctgaaaaatttcagggtgaatatgatggttggggctgtatggcttatgtcttcgaagaagagagtgaggaagatgacctgttacagtaa

SEQ ID NO: 51876 - DNA, 381 bp, Acinetobacter baumannii
atgagcttatctcagaaacaaattgcggtacggtttctagaacttgccgcagcaggcgaagtcgatgaagcctatagcaattacactgcgcctaacttcaagcatcacaatccttattatgcgggtgatgcgacttctttgaaggaagggatgcgtgaaagcgcggcagaaaatcccaataaagtctttaatgttcaacatgtcattgaagatgggactttggtcgccgtacattcaaaacttgaaatgcaaatgaacgacaaacctaccattttggctgtggttcatatttgccgttttgaaaatggaaaaattgctgagctttgggatatcgggcaaatgcagcctgaacagcttgtgaatgaaaatggcatgttctaa

SEQ ID NO: 51877 - DNA, 417 bp, Acinetobacter baumannii
atggccaacattacccctcatttttcaatttcgacagatggttttattcgtatgaatgagaaccaactcatgaattacccttttcaacacgttgtatctatcgttgaatcagcccaaattgaagaatctcaaattgtttattatggttttactgaatgggcgacattaaaaactcctgctttaagtacaggatgggactgggaattcgttgaacaaaacggttttgttactttaaaacgaactggtctgcctagaagcaatattatgattgttgatatatctggtacagatattggatttgatagcactgaaaaattaatcaaaaggaagatagatactttgttctgggaacagttcatttatgctcaaatcaatacaagcttaatcaagtctaaagtaagtctgaatttctcttag

SEQ ID NO: 51878 - DNA, 282 bp, Acinetobacter baumannii
atgactagtgtatatattgaaaatgagcgtcatttcgcattgaatcttgccaaaaataaagattggtatttagctgagatgaaacactttaaacaatgggctgaaaaagtcggtgttccatggcgtgttattgaaaaacaacttcacgcgatcatggacaaagcacggtcagtatggccagcgctattacaagatttaccaatggattctgctcataaagaaaaattaagggaacattggaaaaaattgcatccagactttcagatatttacagatgattag

SEQ ID NO: 51879 - DNA, 273 bp, Acinetobacter baumannii
atggtcggaatagatgtccctgagattcgcttggtggatatggcactcttacaaaaccttccagcattaaatttaccccaagagcaatatgcttttgcaatcaaaagatttgatagacagagtactgctgatactacaaagcttattcacatcgaagactttgctcagatcttcggtgcatatccacagcagaaatacagcaccacaaattatgagcagataggaaagatcatttatcaattttcagataacaaaattcttgatattcagtaa

SEQ ID NO: 51880 - DNA, 1260 bp, Acinetobacter baumannii
atgctcaaaaaacttaatgtttactacaatggatggggtgaatattggctttggggtacactggtctcctcaactgcaatcacaggtcggccattaattgcctttgaatacagtgcagaagcgatcagtaagggtttagaactttcctcttacctacttccattaaaaggtgactcattaagaacgaactttcctacacatcaaatgggattgccaggtcctatatatgatgccttgcccgatggttggggcatgcttcttatggatcgcttatttaaaaaaaatggactcaatccagcacggattgggccattagaacgactcacgtatatcagtacacatgcgatgggggcgttatcctttgaaccttcagcacctgagttaacattaactgaaaatattccactgattaaactcgctcaagaagttcaggaagttctcaaaggagaaggtgcagaatttttacagcatttattaattatgggtggatctccacaaggtgcaaggccaaaagcactcgtctatcgtgattttgtcaccaacgaattctcaacagttagctcacatcaacatgaagcttggctgatcaaatttcccgctcagcaagagcatcctgaagtttgtgcaattgaagctgtttatgcagaatgtttacgtcattgtgatattgatacccctgatactcaatattttactcttccgaatggattaaccgcatttgcatcgaagagatttgaccgccacgatggcatgcgtatccctatgcaaagtttagcggccttcaccggagctgattttaaatcaccagggagtttagactacagtaactttcttcgcgctgcacacttttgcaccaatgatgttcgcgaaaaagcaattgcattcaagcgagctgttttcaatgtagtcttcaataatcgagatgatcattgtaaaaacttttcatttctgatgtcccaaaatgggcaatggaaactctcccctgcctatgatgttactttctgtgaatggccaggtggatatcatcaaatggatatcatgggtgaggcactggatattcctcgacaagctcttgtaaaacttggtactcaggaagcggaactttctgcccaagaagtcgatgaaattattagttcgatttgtaaggttgcaatccgattcagcaatatcgctcatgatctattacctggacaaattcaagcagagactatccaaatgatccaaaataggattgagcataatatcaatttattgcactaa

SEQ ID NO: 51881 - DNA, 303 bp, Acinetobacter baumannii
atggatttaaacttcaaaaaacctgaagaggttgtcacgttattatgtgaaaggcttcgcaaagaacgactttatctggaaatgactcaggcagacgtcgctacacgtgctggtattagtgtgaatacagtatctaatctggaagctggtcgaaatgtttcatttgaaaatttagtgcgcgttgccatggtattgggccgattaaaagaattagaggaactcttcaaacctcatttaaacagtgtaaatgacattctccgctatgagagcaatacggctcgccaacgtatcaaaaggaaataa

SEQ ID NO: 51882 - DNA, 237 bp, Acinetobacter baumannii
atgaacacctccaatgaccctttacacggcaaaaaacttgctgacattttggatgaattattggattactacggtggctttgaaggcttaagtcgcaaaattgaaattagatgtttttgcatagacccaagtgttaaatcatcattacgattcttgcgtaccacaccatgggcacgtgaaaaagtagaaagcttatatttgtacgtcttacgtcaaaaggccaaacagaaaccgtag

SEQ ID NO: 51883 - DNA, 3234 bp, Acinetobacter baumannii
atgtcatcattcaataaaaaaatccaaaaaaaacgctatgctgaagataggcgtcaacttcaacgtaatgaattagaaaagactctacgagctgatgcagaacaagagctccgacaatactttgatgaacaaaaattctcaactgaggacttaattcaagcttatcctgcgatttatgagtttattaaacgtaaagcaccaaatttggtttggaaaaaatatgctcatgaattcttccgaacatatatcaaagacctcaataagagcaataacctagacttcccattaccgtatctcacctttgagatgaaacgcgatgaaccaattttcactttggattggatccaggccggtcatgaaattgacatcattatagaaaaactttgggattattggattcttgctcaagatagttccgctttttctgatgatgaaattattgggaatattctgctttgctcaatgttatacggtggattaaatcaaacagcttcattaaatgctttgctcgaacatttaaaaaaccctgaaaaaatccaaaaaattttcgattttaatatcatctttttagagccactttctccaagctatggcgatctatttgttgatgaaaaaacaatacgaaaatcgcgtaattttgttccagatcaactcacacgactctggctcattcacttcaatacaagacaaattcgtgacatcagtctagacgtgaatgcgtatctgcacctcatttttcaaaaaataaaacatccatacaccaacaagacttttaaatttttacgtgactacgccaattttaattggctacaactgcagaatgcagatgttgatcctgccctttcacaatgtttgttagaaaacacgctcacgtgtggtttatcagaacatgagtttgaaaactttgcattcccaaaatttaaaactcaattaagtgatgaaatcgaacgaaatgtctcttctacagccaaagtcctaccagatctcaatacgtctgaagcagttgaaaatgtgatatttattcataaaaacttgctgaaaattattcgcacatcatcaacggaccaacccattgctaaactcattattgatttttgcctgcttcaccaagagcagtttaatgagttttctaaacgtattattttgtggctcatcagtctctatcgaccaagttcagagcaaataaaagaattatcaaccacctttgattttgatacaactcagtacacgaaggcatttcaagacaatcaaaaactcgcagatagttcaatctatacatattacacccggatcgcagaaccgtttttaattcatgccttacaatacttcgatgccgacgatgacattaatgatctgctgaacaaaatctatcaacaaatcattagcaatacacgacttgctgatgaagcagatcgacctgagttcaaaaaatctaaagaccaaacaatccgcatgttgaaacgctttcacacctttcaacaaattgtttttcaagcggaagatttcgaacttgaatttattgcatcgcaaagtcgaccacgggcacgcatcataggtcacacagccttccaggtcatattaaagaagttaaatcagctcttacatgaccaatccatctcagaccatcactataaattattaaaaatcatttatattttggcttaccgtactggtatgcgtattaacgaaatactcgggttacgtgtaaaagatatcgagggtttaaatcaattttctatctgggttcaaccttatggttcaaaaaaacaagggaatcaacatctgctcaaaacggatagtgcagaacggattgtgcctgcatacgctttgctaaaagatgatgagtaccaattctttagcgattttgttgttgaaaaacgtttagagaataagaaaagtttatatttattcagcaacttgaatgaaaataaaaaactgaataaacacactgtcaccgtacccctaaaactgatattaaatcaggtctttaaagggcatcattactcctttcactcttttcgtcacactgcagcgaatcatttatcgcttttactgaactgtgaatatgcaccacttgtgcaaaagctaaccgactatagcgaaaacgaatatcaaaaaattcgagctgagctacttcaaaatcaacatggacaaaaccattggtttgttattgcacatctcttaggacatatagagccagttgaaacattcaaaagctatattcatttaagttatctcatagctggtcaaaaactactaaaacatcatccagatatgcctaatgaattggctaaaaaaattatgggacacaatgcaacgtttaaaaatttgcaaataacaaatggtgaaaaagactttaattttgaaaaaaaccaggccgttctagcaactatattattgaacgatcaaacaaaatggcttcaaagtaatgctactgacattttagatgaactgtcgttacaaatagatcaatcccatgatttttttgctttctttgttggaacagaagattctaaaatttcacttcaacgcttctatgaaacgctcaatatattggagactactaaagatcctaaaagtacagctcaacgtatgtgcttgccagaagaactcgtcaattattggtatgaaaatgctctaaatttagcaaacattaaatcaaaaaaagggaatccacgtttatttagtattgatagctcaacccacttaaaaccagcaatgcttgatagcactgaagagcttcatgcggtgacttatttttttgaacatctacagaaaatagctcgtaaaaatccaatacaaattgcatgcgtcctgaatatatttttgaatcgagtgaccgcatcacatacaggtatccattatcgctggaaggatatcgatcaactcgaacatttttactcccaagttaaggctttatttcctgccaaattttggcacttacttggacaagatttgcaaacaaagttagatgctaaacaacagcctcaacttttcaaattagcaaaagcatcaacagataaacatccaccaactcaagaggagtttcctcgtctacaactctactcagtcaaagatggtcatgctcttgctgcatttaaattttgcttacatctagcatgtattggtcgcccacgatctgttcagcttaatgagttagatgacatagcgcctgttaccctgcatagacctatcgctgcattacaccaaaaagaactttttaaaactgattaa

SEQ ID NO: 51884 - DNA, 1686 bp, Acinetobacter baumannii
ttgcctgagtttgatcgcaatctactcaatgatattcgcattacttttaactatgttttaaaaaacaaagcgaagattgcacgtgcaagtatcgatacgcagcttcaacatcagtttcttgatgaagaacaattcattgaagaaagtatcgaaatcaaaaaaggggctaaatctaaagcactgaatatagaaaccttaatcgatgagccgattaatcggcaaattgttgtcaatccaactgacgtcacaccactcgcagcacattcagaaacgagtcaaagctatgttctaccgcttgttgcaaaacatattcaacgcaaagaacatttactcacgtcgagtagtttttttcccaatccatctagcgtgaaccatctactgaaaagacttcatgtggactactctgaacatcaaaataaaagtgctttgatcctgatgctcgcatttttaacaggcaacagtgtaaatgagtggctatatatacaaagcaagcgagctaaaaacttaaataaccgccaaaaattgatccataaaaatgatcagttcttcttaagcagtaaatttaatgtatttgagaaccgtgattttgagtattcaaacagcttgcttaatcagacgatctatttagacattccaatcccgaatctattcattgaggatctccgcaaaatggattcggttagtttcgatgatatacagcaatatttacgcaaattaagacaagaattattgattccaaaactgtctgtcgtaaaggtgagttctctactgcatcatacggttcttgcaaaaacagggaataaacaactcgcagatttaatcacagggattgatgccaatcagtcatcatctgtttcttattgtcatcagaatattccacgattacatgcacaatatgttgatattctaaaatcactttgtgcagatgtagcaaacacatatgaaagttgtgtaccttcgctccctgattcaataattcattttggtagtcgtaaggctccaaaaccacaggtcattacagagatttttgctgtattgaaatttaatattttttcacaagctgaagacgatctgattgctatatacaaccactacaacatatggatgtggcatatcctgcttctttttacagcagcacgccccgttgctgaattccctggatttcttaaaaactttaatttaaaacgccaaattttgatggtttctgacaaagaagtaggcggccgcaatggattcggacgtctaatcccactttgttcatttttagttgaagagataaaaaaattccttaaatttttagaatatttttcgactcaaatcataatgagccatccagctttaagtgatgttatacaacaaatagaagcaagtaagctgccctttttggggatcatccaagatgatgagtggaaaccactaagtccttctacagtcaaagatttccatcctgaattaggacttgatcatgcaaattggcatcgccatacagctcgtgcatttttgactcataaaattaccgaacctgagattttagctctctttggacatgagctcatgcaacaagaagcagcacatcctttttccagtttatccctatctcaattttctaaaattgcgaatgttttagagcaaatgaaagatcaatttaaaattagcgggattgaagtaaatgtcatcattcaataa

SEQ ID NO: 51885 - DNA, 2790 bp, Acinetobacter baumannii
ttggaagatgtggtcgtaacaactggtgatatgtacggtctgtttagtcaccctgatcacgaaagaattttaaatgtattaaaagcgagatttggtgatgatttatatattgaatttagtccgatcaatacgccattgttcgaccgcttaaactacttaggctatttggcgtatgaacgcgaaaaaattaaaaccgtcgtcacttatccttttaactatcttgagaatgaagatgcggacactttggatgtattgagcgctatcgcaaccaatacccaacttgatttgcactatcgtcctattcaatacgtaaaagattttggttttaaagagccaaaattcattttagaccatacaaaagctgctattcagcgtatggctaaatatgagcgcgtcaattcagcggaagcttggaaagaaggtctaaagaatatttctgagctggtggacaaatgccaatatatttttgagaagcagccagtttccctacctaagctaagcactgacgaatttaaaacactatgcgcgaaatgcttggaaggctggaagaaacgcttttctaaagagattcttggatataagccaacgaaagctgaattagatacagtatataaatctcgcttaggctatgagctttcaatattaaaaaagatgggctttgagtcctacttcctgctcgttgaagacttggtgatgtggtctaaaaacaacggcgtgattgtaggccctgggcgaggttctgttggaggttcattagtcgcttatctgcttgggatcacggacgttgatcctatacgttttggattgatcttcgaacgtttcatcaatcctgaacgtcttgacttgcctgatgccgatctggacttcgcttcaagcggtcgctacaaggtgattgattaccttgttgaaaaatatggtgaagattatgtcgctggtatctcgaactattcaacactagcttcagcctcagccctacgtgatacaggtcgtatcagcggtttgaacaacatgcaattaagtgcgaccaagcttgtgcttaaagaacatggaacgtcacttgacctgaatacttctgcggacgctgtgcctgagctagacaagttccgcaatgaacatcctgttatctggaagcatgcaactaagcttgcaggcacaatgaaatcgtttggccaacatgcggcaggtattgttgttgcaggcgaacctatcgttaatcgagccgtgctcgagactagaggaaagtcaccagtcgtcaattgggacaagcgtgtagttgaggattggggattgatcaagatggacttgctcggtcttgccaccttagatgtattaaacattgcttgcgaatatatcaaggaccgtcatggcaaagagattgatttgctgtctattcccctagacgacccaaaaacatttgatgcatttgccaagggcgaaacgacaggtgttttccagtttgaaagtaaggggatgaaaaaccttttaagggaaatcgccaaaagtggttcgatgacctttgaggatatttccgcagcaaccgctctttatcgccctggtccgatggattcaggactgcttgatgactatgtggccgttagacaaggattgaaaaacgttgagtatgatcatccaaacatgatcgatgctttgaaagacactttaggggtcattatctatcaagaacaggtaatgaaagtgtcggtcgactttgctggctttaccaatgcagaagcagacagtttgcgtaaagcaatgggtaagaaagacaaagacaaaatggccgaaatgcgtcaaaagttcgtagacggcgcagtagccaaatcaggtgtagagccagatttcgcaggtgaaatctttgacaagatcgaagcgtttgccggatatggctttaacaagtctcactcggtcgagtattcaatcatttcggtttggtgcgcatatattcgcgttcattaccctgctgaatactttgccgcaagtctcagcgtggttgatacagaagataagctcactggacttgtgaaagatgcgcgtgaatgcggcattgagattcttcctcctgatattaattattcagccgatcgttataagattaaatccaatactgaaatcttggcgcctttcaatgcagttaaaggtatttcagaaacgattgccaaagcgattgtgaaattgagagagaagaatcgggcttggaaagtcgttcgctacaagaagtcgagaaagacaggtgaaaccacaccgatctatggtcctgatggttcagttccaccaaaaaaacgttttgatagctttgacgagttcgagaaagcagcatctcaaccaaactcgaaagtgaataaaacaatcgttgaaaatctcagagcaattggggcgtttgcaagcattgaacctagtgagccttcagcgaaagacctctcacgacgaaaggatcaaatgaggctattaccaggattaattattgattctgtaaaagcagatagatacacagatacctcagagccattcctgcgagcttcgttggtcgagcatatgcgcgattgcaagcaatgtaacggttgcgaccttgctggacaggttcatccagatattcgtttgggtaaaaagatgcgatttatggtcgtggctgactgcccaacttgggaagaggaaaagaaaggaaaacttcttgaaggcgagacggcccaatatgtgaaagctgcaattaaagataatgaattagcagtagcggacggttattacacaacgctcgtcaaagccaaaaaagggactgttctaaattttgtgtaa

SEQ ID NO: 51886 - DNA, 666 bp, Acinetobacter baumannii
atggtaagaaatcaagatcagcttttcagagatcatgacaagcttcttcgtcatttggcacaccggaatattagccgacttacctcagtcggctattgcattgacgttgaagagctgtatgccattttctgtgaagttttcgtggtatcgattcagacttgggatgaaagcaaaggcaaattaacgacttatttaactactgcttgcctcaacatggtatcgagattactgaaaaaataccatttgggcgataacagaacggaatacgagtccgacattttgcatcgtatgggtgatggtgaagatgactgtgattatgacgtttttgttgatcaccagagccaaaatattttaggcccatatgagttgatgcagactcttacagaagaaatgcagcagctttcaccgttcgcaaaaattttactcaaattcaccttaaatccgcctgatttcattgaaagagagttgttggcacaagaagccaaatatcagctttccctcaatacgcctgagaaaaatgaatcgcggggaccaagacgtcgcaaattgaatctaagttttgtggctaattgcatcatgaaaacagccgaaacaaacaaagaaaaacgattcattcgtgacgctgtgaaagaagttgaagaagccgttacgcgagttgctgtctaa

SEQ ID NO: 51887 - DNA, 438 bp, Acinetobacter baumannii
atgcgagaggcttttgtagcaagtagcgcaacaaactttggcattgaaatctacgatgaaagcgagcgaccaatttttaactccaatatgccaatattccgtccagtaagttatcttcaagctattaggatgaatcaaaattacaatatgcctctgacaactccaagtgccacttacattgagccaattgctggcggaactgtgggcaaaaaaattgctattgttattactcaacttgggtatcaaggtaaatgttttattctcagaaatagttttggattaaatttctgcattcctgctttctggattgacgaagcaaacggtacatttaatttgcaatatatttggaataaagtagcaaaggatagaggctctagcacagccgcagtcggaaatgccacttgtattgctatggcaattgacgtcactaatatgtaa

SEQ ID NO: 51888 - DNA, 729 bp, Acinetobacter baumannii
atgatctatgtagcacttgctgttattggggttctatcaggactgattagtggggtagtagggactggatcatctattattttgttgcctatactttcttatatttttggggcgaagcttgcagtacctattatggcaattgccgcaatcatggggaatatttcacgtgtagtaatgtggcgtaaagagcttaatattaaagcatttatgttgtttacgagtctgggcatacccgcaacgatactgggagccaatactttatgggttatgtcaccgatattatccaacttatgtataggtttctttttcttttgcttaataccgattaggcattatgccaaacgccataattttaaatttaattcatggaaaatgatagtcgcaggtggtgtgcttggctatatcactggtgtagtattctccacgggtccattattacttccggtttttaatggttttggtttaactaagggagctctcttggcaacagaggcggcagcttcatttggaatttacgtaacaaaaagcttaacttttggtgcgctaggtgttttacataaaaatattttaattgcgggagttgcggttggtttttctttaattattggtaattatattggtaaaacatttgtaataaagatgtctgaggaaacttttaatttattgctagattgcatgttagcagttgctggtttttctatgatatttgcagtttttactcattcttaa

SEQ ID NO: 51889 - DNA, 1521 bp, Acinetobacter baumannii
atgcttaatcaatcaaaacaaacaaagttgtgcacttatctcggccttagtactttaattttaagcgcagcccttgttggatgtggtggtggcagtagtagcggaggttcatctagcactccgacaccgactgtgccaactcctgaagtcacaacagattttacacttaaaacccccgtcgaaatgcgcaatgtgcaactcaaagtctatgacaataccgacaatagtattttgattgatacccaagttgccagtttaacaagttataatattaaacttccaagtaccaagttgaatcggctttatcgagtagaagtcacaactcaagcctcatctcaggtatttgatccaattaattctaaatatgagaacatttctggcgtctatcacgcttttattactccaagttcaataagcaataaaacgcagccgattagcccaagttcagaagcaatttatcagcgtgccgtaattcgttcaggccaacttccacaagaaacgatagacccgacccgtattgaacaatcacatgttgatttggcttctcaagatgtttataccgctcttattagtgcgtttaaagatgccgccataccaagcttaagccctgctagcccgctgactgtactaaatttattacagtattcaactaaacagcctagtacttatgtagatagctatctgagttttggatatttacaatattggaatacgattcatggtagtaccaatgcatatcaagaacttacaaatagtgttgccaccgatttaaaagatggatatttagacggcaaaaagcttaatggtgacaatacaaccatgacacctatttttagtccatcgccagataatattgaccctgtaaaaaatacgcttttggacatagcagccaatcaaaaagcgactcgcgattattttgctaccaatttaaaagctgccacattgcaactagcagatgcacaaagtcagtccagtttagatcaaacaggatatgttcttttgcagaaaaaactctattctggagttgtgccttctggaaatacaactgactttttccgtatagatggtgctggtgactaccgacgtgccgtaggatttagtggtattaccacaagttgtaatggttcggcttatccatgtaaacaaggcttaactagcatcaatatatctgaccctaaactgccttctacggactatttagttggtcactatgaaaacagcgcatcgggttgccaacttaatttccgtgctaatggccaaattgagttaattcaaggttcactaagttatcgctcagccttaagcgcagatagtacagataacttactgcaaaccgacgctgcaagttatagctacttacttaactcaagttcatccgaacccaacaattcaacacagcaatataattttatacagctacatattaaagcgaataagattgttagtgctcaagcaggccttgatagccgcaaagcaccagatgtcttacaaacaacacaattagaatgtagctttagctaa

SEQ ID NO: 51890 - DNA, 1338 bp, Acinetobacter baumannii
atgtctcttaagcctaaaccacataagacattaaacctaagcccaccttctcttttagcgctgggttttctaggctttattgtctttggcacattattactcaaacttccaattgccaataacggacatgtcagctggatggatgcactatttacagcaacttcggcagtcacgattacaggtttatccgttctaaatattcatgaatcttttacactctttgggcaagtcattattttattgttgattcagtcaggtggtttaggcttcatgacttttgctattttggccgcactaagcctttcgcctaaaattggccttaagcagcaaatgatggctcaggacagcctgggtcaaacgagcctatcaaaagtgaccttcgtagcgaaaggagtagtgacttatactctcctatttgaactgatcggcatagtcattctcacctgtgcatttacacccgcttttggcttcgctcgtggtttgtattatgcaattttttatagtatctcttcgtttaataatgccggtttttcattatttaacaatagtttaatgggttttcaaaacaactatgtgatctgccttacggtaagtttgctttatacaataggtggacttggctttttagttctcatggatattaaacaaaataaaaaatggaaaaaacttagcccaaatagcaaactgatcttaacgactattgccattattaatttagtcgcctttattttaatttgggcaatggaagcacaaaaccctcatacgctaggaatgctaagcgtaggtgatcaagctttacatgcttggttccaagcgactgttccacgatcttcagggtttaacaccattgacacaggtgcaatgactaatagtagttctttgcttatgatgctacttatgtttattggcggtggttcattaagtactgctggcggtataaaagtgggtacttttgttatattagttttaagtgtcctgtcctttttaagacgtactgatgaaatcagggtttttaatcattctgtttctcacgaaactacttataaggccttggctgttactgcgattaccagcatactcatatttattgggttctttatacttttgcttttagaaccaaaagccgactttatgaacttactatttgaagtcgtttcagccgcttgtacggtaggcctttcccgcggtatcacgccagatttacataacggtagcctgtttatattaagtttacttatgtttgctgggagacttggacctttaacactggcatatttaattgctactcctaaaaagagccgtctcaagcatcctcaggccaacattcaaattggttaa

SEQ ID NO: 51891 - DNA, 549 bp, Acinetobacter baumannii
atgatattcaatcgcggttcagcatttatattttcatattttttaattacttcattaaatgcgggtgaaattggagctaaattaacgagtcaaattgaattattaccttcttgttctatcaataataaagttgtagaaaataatacagcaaatttaaattttggatctgtagattttggagaagctacaactacttttaatggagtgttggaagcaagtttaataaataacggaaattccggcttacaaatacaatgtgctggtatttcaaatgtaaaaataatatttggatctggaaataatgatagtaaagttcctgtttcattctcacaaaattattatcatgcattaagtaatggtaaagattttatcgcttataatttactctatggtttaaataaacaagtcattagagcaaatgatgtttttatacttaatgatatgaatactaaaaagaatatcgatatttttggtcaagctgtacatgatggtagtggtatatctaagggtgaatataaagatatagtgccaattacaattgagttttaa

SEQ ID NO: 51892 - DNA, 399 bp, Acinetobacter baumannii
gtgaaagtttttagttatcaagtcatcaatattgatcatgaacagcagttattgctggcttttatttgctatgaagatcagccgattatgacttctgtttactaccgccatatagatggaacgtcaattcaatacaacggagatatactttttgaagtaaccagccttcaagaagaaccactgattacacctgataatttttcaatgaatgtaccaaatacttttcgctgggctgcttatcacaataatcaaaaagttttagatatttcagctcaagtcgacactccatattgttttggattggctgctggttttgtttcttcctatgcgtggcaaggtgaattctatgatcagccattagtgggaagggggtatttcgaatatatagatcgccgataa

SEQ ID NO: 51893 - DNA, 888 bp, Acinetobacter baumannii
atgaaaattaatctgaatgatttaaaaacattttctgaagtagtaaaaactaaaaattttacaaaagccgccgcatatatgggcgttacccagtctgctgtaagccagagtattaataatcttgaagcacagttaggtataaaattattaaaccgttctacccgtagcctcacccttacagaagcaggctcgcggcttattgagctcgtcggtcaaaacattgaaaatattgacttaggcgtagaacaaattagctctatgaaagacctacccagtggtcatgtacgtatttctgccgatgcatttaccattaaatattatttatggccaaagcttaaaaagcttgtaaaacagtatcccgatatatctttggaactgacttctgaaaacagacgaattgatatagcaaaagaaggatatgacgccggagtacgtgtcggaaacttggtcgaaaaagatttaattgcagttccgattagtaaagaaattccttttcgcttagttgcctcacctgaatatttagacaagtatggaacaccgaaatctatagatgaccttaaaaaacacaaaggcatctatatacgacttttaaccgataactctctaatggcgtgggaatttaaagataaaaataaaagtgtattttttagaggccctgttcaactggttatgaccagtttagatgaaatgtttgatgctgtactcgatggttgtgctatagcttatttgccatattttttagttaaaccagctttagaagataaaaagttggtcagtttattggaacaacacgcagtcaccttaccgcctttttatttgttctatacaagtcgtcggttaatgtctccagcctttaaaattgttaaagatacgttgagtgaaatataa

SEQ ID NO: 51894 - DNA, 141 bp, Acinetobacter baumannii
atgcctttaacaaagttcaacacagatgagttgattattgcaggtgataaggtcggtgggtttggttcatatcgagatagtttggaaatttatggacgagcacgttcagaaaataaagagcttgtgattgtagaaggttag

SEQ ID NO: 51895 - DNA, 915 bp, Acinetobacter baumannii
atgaatactgttaaatttcaaaattcgaatagccaagatattaccatggcagcaaatattcactatccatcaaactttgatgaaacacaaaagtatgcagctattgttgtgactcatccgggcggtggagtgaaagagcagaccgcaggcttatatgcatcaaaactagctgaacaaggttttattgcgattgcatttgatgcgtcttatcaaggtgaaagtacaggtttatctcgtcagttagaaaacccttacatccgtaccgaagacattagtgcagtgattgattatctaacaaccttgaactatgtcgaccacaaccgtattggtgcaatgggtatttgtgcgggcggtggttataccgcaaatgcagcaatcaatgatcgccgtattaaagcagtaggtacggtaagcgccgtcaatattggttcaatgtttagaaatggttgggaaaacacggttaaagatgcagatgccttgccatacattcaagcaggttcagatgcacgcacagccgaggcaacgagtggaaatattgcaaccattccgcttgcacctttaaaagaagaagatgcaccgaatgaagagcttcgtcaggcatgggaatactatcatacgccaagagccgctcaccctaactcaccgagttttgccacagcgcgtagcttgactcagcttattacttacgatgcgtacaataaagccgaagctttcttaactcaaccgttggttgcgattgccggaagtgtggcaggaagtaagtggatgagtgaagatttaattcaacgtgctgcaagtcaggacaaaaccttacatattgttgaaggtgcaaaccatatggaattatatgatattcctcaatatgtaaatgaagcgtcaaacgtacttgctgatttctttaaaatgaaattataa

SEQ ID NO: 51896 - DNA, 372 bp, Acinetobacter baumannii
atgatgagtttaaataatccaaaaacagaaaatcaacaatctatcgagacactaaatgttctggaaagacacttaactgcgtttcgattaggtgatgtagatttaactcttcaagattatgctgctgatgccattatcattaatggaacaggagaaatagtccgtggaacttctcaaattcatgagacatttatttcagtttatcgtgattacttcccagaaggtacacgagatattgaaattgatgaaaaaaccatttgtggtgaagttgcttatattcgttggcgcgcaccaaatgcaaaattagcaaccgatacaatcattgttcgcaatggcaaaattgtcgcgcaaacttttgcggcatatttttaa

SEQ ID NO: 51897 - DNA, 936 bp, Acinetobacter baumannii
atggaaaccttgtctaatctggaatcatttataagaagtgctgaacatggtagtttttcagcagccgcacgacatttagccttaactcctgctgctgtctctagaaatgtggcacagctcgaacaaaatttaggagtgcgactctttcatagaagtacaagaaatcttaccttgaccgaagctggcgagcatttttttacaagcatccgcgataatttaaataatattcaaaccaccatttcagaatttaatacagactcaagtcaccctaaaggaactttaaaaattagcttaagtgcgggctttggtgtcgaatatatacttccactcatgccagactttatgaataaatatccggatattaagctcgaatggcatttatctaataaacaagtgaacttaattactgataactttgatgccgcgatcggaagtggatttaaattaggtcagggaattattaaaagatcactctctcctcttcacatgattattgtcgcttcaccaaattttttaaaaaataaaattttacctagtcatccagaagatatatctaactgggatggaatcataatgaggtctccccaaactggtaagctgcatgaatacaaatttataggacccgatcagggggaagcttatctaaatcttaatgaaaaactaattgcggatgatccaagtgctttacatcaaggtgcagttttaggaatgggaattgcagcaatctctactgcacatgctaaaagttatatagaaaatggaactttaattcggatcttacccgagtggtatgcagatctaggcgaaactaatctttatttttcaagtaaaaagcatatgccggccaagacacgctgttttattgactttatcgtatcgaaatttgaacagctaaaaattaatgagcaattatcagctcataagcttggaaagtaa

SEQ ID NO: 51898 - DNA, 750 bp, Acinetobacter baumannii
atgttaaataaactatcacttacgggaaaagttgcacttgtaactggaggggccagaagtataggtgctgaaattgttaaaaagttagcttctcacggggctacagttgcatttacttatcatacctctcaaaagcaagctgaagagctagttaaagaaattgaattttatggaggtcatggtttagcagtacaagcagacgccggcaatcctgaaatggttattcaagctgtggctgaagttgcaagaagatttaatcggattgacatattggtaaataacgcaggtatcagtcatttaggcagtttagaagctgtaactattgctgactttgaaagaataatagccgtaaatgttacaggggtgtttttgacgactcgcgagagtttaaagcatatgagaaaaggcggaagaatcataaatatcggaagtaccatggtgaattattcaggatttagtggagcatcaatttatattctcaccaaaggagctattactggtttttctaagggactggtgcgcgaacttggttctaaaggcataacaattaacacgattcatcctggccctatcaatagtgatatgaacccgtcagacggtccaatagcaaatttactgctaccgaatattgctgtagggcgatatggtgaaggaatagatattgcaaattctgttctatttttagcaagcgaagacgccagttatatcagcggggcagaattaagcgttgatggtggatttattgcctag

SEQ ID NO: 51899 - DNA, 558 bp, Acinetobacter baumannii
atgccacgttatttagaaacgccttccaaaaaattacacattattcgaacggctatacgtctatttacaacctatggatttcataccgcaggcgtagacctgattgccaaagagtccaacattccgaaagctacgctttacaattactttcgctcaaaagcaggcctcattgaaatatgtcttttacttcaaaaagacacactcatggaaaaagtaagagaggtgatagaaacaacccaatattccacgttaaccgataaactcagacaaatttatcttttacatgccgacttaaatagcgcttattacctactgtttaaagcaatttttgaaactaaatcactttatccttatgcttaccaaagtgccgtgcgttataggcgttggctaaaaaatgagattttctgcctcatggtagaaactaagaaaatgacttcttatgcagaagcagagattttggtatttatgatagatggggcaattttagggcttttgacctcagacagagttgaagaacaaaccaagttgttagattactttttggtgagggttaattaa

SEQ ID NO: 51900 - DNA, 1392 bp, Acinetobacter baumannii
atgaactttaaatttctgcgttcgcttgaagtccgtattaccatactggtcacgctttgttcggctctcattttatgttcagtcggctttatgacctatttaggcattaaccaaattttattaaagcagcaagataaagctttagtagaccgaattaatcgtttggaaattttgctacaagacagtgaaaatgttgagcaaattattgcgcgtcctaagctgtatcaaaacatgcttggtaaccaagacaacttatttttacttattcataaagacaaagctttaattaatatcaatccactccatattcagctacctcagcttgcagagcgaacaaatcttcaatttcaggacttggctaacaactcatatccaacgcgaattgcatggaaaaccatcactattaatcaggaaccttatctgcttattgcgggtaaacagtggtctgagcgcatcaatattcttttaccatttcaaaagaatcttttgatgtatgtggtaggaggaattcttgcagtttttgctctttgtattttgatatgccatttagggttgcgttcgctacaacggcttcgcaagcaaactcactcaattaacgtaaatcagctacaaaaacgcttagacctaccaaattcacctttagaagttgagctgctttctaaagatataaaccatatgcttgaacgtattgaaaagggctatacgcagctcaatcgtttttctgaagatatcgcacatgagttccgtacgccgttaaataacttgataggacaaaccgagattgctttaacagatgagcgttcagtagagcaatatcaagatttgttggtgtctcatttagaggattatcacagattaaaacgcatgattgatagcatgttgttcttggcaagagccgatcaaaaaatggtgcttgttagcaaacagcaaatcaatattcaggacgttttagatgggctatgccagatttttgaatatcagtttgaggaacaagactgccacattagttttaatctagaagttccaatgttatttgcagatccagagttatttcaacgagcggtttacaaccttgttttaaatgcgctggttcatgggggctgtaacagaactatcttggttacaagtaaatataagacacttgatcacaagaatatggtgagcctaagtgtgataaccagtggtatttcaattgctgaacatcaacttgaacatctttttgaaagattctaccaatgtcattcaagccgaactgatgagagtcagacaggcggcttaggtctatctattgtggcttctattatggatttacatcatggctcataccgtgcttataacacggttgcgggggtatgttttgagcttgatttcccaatcgcagatactccatag

SEQ ID NO: 51901 - DNA, 567 bp, Acinetobacter baumannii
atgaaattattatttaaatcaattgtgatgagtagcagtttggccgtagttagtctattggcccctttaagtacctatgcagaaactaccactaaacccgtagctgttgacgctatcgatattaataaatatgtaggtaagtggtatgaaattgcgcatttacctatgttttttcagcgtaattgtatagccaatacaacagcaacctattcgattaacgcagataaaaccgtgggcgttttaaatagttgtacggataaaaaaggcgaagtgatttcatctgaaggtgtggcttatccgcaaaatgaaggtaatagtaaactagaggtaagcttcttaccttccggtttaagatggattccttttactaaaggtgactattgggtgcttagagttgacccagattatcaagtcgctttggtgggtggaccaagtacagaatatttatggattctttctcgtagccctcaaattgatcaagcaacatataactcttatttgcaaaccgcaaaacattatggctatgatgtttccaaactcattaaaacaacacaaacaaattattga

SEQ ID NO: 51902 - DNA, 792 bp, Acinetobacter baumannii
atgttattaactaaactggctatggctcccgcacttattcgtcacagacgttatagtcccaaaactcatcaatttatatcgaccttaaattatttatggtttgacccagatcaattaaatgaaattacacaagattgtttattttggtcgactgatcattggaatgtattaaaactatccgaaagtgattttttaaatatgtatagcggttcggtaagggatcgggttggaaaagcgctactgcaaaataacaacttatatatgggttcagattggcaaatcagagtattggctttgcctcgttgtttgggttttcgctttaattcagtcgtattttattttgttttaagtcaaacaggccaaccgctatttattcttagcgaaattaccaataccccgtggaatgagcgaaaagtctatacacacgactgtataaaacaacaaggtcaggtgggtgattatcagagtttcgattttaactttgaaaaatcatttcatgtttcgccgttcatgcccatacagttgacttaccgttggcggtttagtttttcagtcttacaaaatgttattcatatgcagctctttgaagagaaaaaacaagtctttgatgccactatgcgctttgaacttgtgcccatcacatttccttcacagcaatatcgatatgctcttatcaacagcctagcgccttttaaaatgctgttttccatatatttagaggcatttaagttgtggcgaaaaaaagttccattttatcgtcatcctaaaaagatcaaggtagataagacatga

SEQ ID NO: 51903 - DNA, 573 bp, Acinetobacter baumannii
atgaaaattataaccactgccctagggctgattaccttagtaggtctaacagcatgcaaaagcgtgcctagttactcaggtgattatggtaaagccgaacgacaaattactggcgtcacattaaatgatgagcaagcactggagattggtcaccgttttgttgctgcgtttaacactttaggcacaccttcttttgtaagtaatgcgagtcaactttatgcggatcagctctatatcaacgatacactttcccagttctcgcaaaaaaaagatctaattaaacactttgagggtatgaacgcacgagtaagtaacgtcactgtaaaactgattagcgcaactcaccatcaagatacagcctatattcattggtatatggcttatgactttaaaatgctaggccgtacaaaaaccatggcttcttatggcattagtcaaatcaaaattaatgaacaacaacaaattattttccaacaagacttctgggaccctgcgaatggtctctaccgttctttacctgtatttggaggagtttataaatggatattgccattcaaaaaagtcgaatcttaa

SEQ ID NO: 51904 - DNA, 483 bp, Acinetobacter baumannii
atgctgaacaagttactcatgataaataaattacttattacgacctctttattgttaataaactcgacactttttgctcaaacggttcaagtcccaaagagtgaagtagcatctatttttaaagctgcaaatttcaaaaaaacaaaacatggctggaaaggtaactgtgatactggtgaaattatcatttataaagatttaaatggcgatggctataaagatgcggttattcaagatagtagcactatgtgttatggcaatacgggtgttggctattatatagtttcacagcaaaaagatggtcaatggaaaaaactatttagcgactctggcattcccacctttttgaaaactaaaggcaaagatggctggcctgatattgaaaatgggggaacaggcttctgttttcctatttatcgatggaatggtaaggaatacacccttaaccgtcgtgaatatgaaggtaaagcttgtgagttataa

SEQ ID NO: 51905 - DNA, 1128 bp, Acinetobacter baumannii
atggtgctctggtacacaggtggaaacacatggggaacttttatcggctttgctcaaggctatcatcaggctcaattacctgttggtgttagccgtttttggtctccaactttcttatggttttatgtctggtttttagtctccacagcattgtttgctggtttttggaaaattgtttctaataatccgtggcagcgttggtctatctggggatcggcatttattttatttaatatctggtttggtgttcaggtcagtgttgccattaatgcatggtatgtaccattttgggacttaattcaaaaaatgctttctgatggaggtggagacctctcagcactatacagtgaaactctagtttttctttatattgcaatggttgctgtgaccttggccgtaattaatgcttttttcaccagtcattatgtattccgttggcgtacggcaatgaatgagtactacacggaacattgggaaaagcttcgccatattgaaggtgcttcgcaacgtgtgcaagaagatacgatgcgttttgcgactattatggaggacctaggtgttgaactggtaaaagctgtgatgattttaatcgcgtttttacctattttatttcaactttctaaacacgttcccgttttaccaattgttggtgagttaaaccactctttggtatgggctgcaattgtatgggctgcttttggtacagttctactcatggtggttggtattaaattaccaggtctacaatttaacaatcaaaaagtagaagcagcttatcgtaaagaactagtttatggtgaagatcatattgaacgtgcaaaaccggctactttaaaagagctttttagtcgagtccgtacaaactatttccgtctttattttcattatgcttactttaacttggtagcaacttggtataagcaattagacattttatatagtctagttgtcttattccctgcaattgcgagtgggaagatgacgttaggcttaattaaccaaattggtggtgtatttgataaggttcgtgaatcattccaatatttaattagttcatggaaaaccattattgaattactttcgatttacaagcgtttaaaagcttttgaatcaacattgcataaataa

SEQ ID NO: 51906 - DNA, 204 bp, Acinetobacter baumannii
atgagtttaccgctcatcaacaagcagttcatgaaacaaggattggcgattaccattgcgaccatgaaaatgaacttaactcacgcaacgactaagccacaaaaaatacaacagcttggtacacatctcaacgcactcttcttgaataacaaagaaaggggcgcagatagtcgcgtcatagcgatggcttgttacagtctttga

SEQ ID NO: 51907 - DNA, 894 bp, Acinetobacter baumannii
atgaatattgcctcagttaagacatcctattttgaaccatggttacagttcaaccacccaatggtaagacaattagcatttaccattgctagtcctaatttactttgccaacttccccaaagcctctctattcggcatagttttcaattacattctgatcagacttggaaacaacattttcaaaattatttaccacgtttacaccaacttgatgagacgcctgagcctttactccaatttatgtctcgccttaaaagtacacgtttaggtttacgttttgagaatttactttggttttggttacaggaagatcaataccattcttatcagttattaggccatagtattcaaaaaattgagggtgcaagaactttaggtgaactcgatttcttaattttaaataaagaaacacaacaagttgaacactgggaagttgctctaaaatattacttgggtgaaggtcagttaaatttagaacaatggattgggttaaatagagaagatactttgagcaaaaagctgtatcactttaccgataagcagttccaattttcagaagctttagattttaaggtacaacagcgttttgctgttttaaaaggccagctctacctacctttgaatttaggcaaaaaacaatccatacccaattgggtaaattcaacacgtcgactcggatactggggcacaactattcctgactctaaattttatcgcctagaaagacatgaatggctttgtcctaatagacaagcaagttcaaacgctgcttattggtggacagatggcttatattgtaagaacaacgaagatacacagttttatatgtttagacgtcctcctctactaagcctagcacttgttaacaatgaaaaaatgccactttacaagtag

SEQ ID NO: 51908 - DNA, 291 bp, Acinetobacter baumannii
atgttttttctctatcgttttgttttggtgagccttgttacactcagtgttttaaatctgatgggctgcagacccatgagtaaaaatgaatttaatacacgttgtgttggggcgggacatgacctttcacagtgtaattgtatctatagctcgttagagcagcactattcaccacaatttgtagaaagcttaccaaaagtgagcttgcagaatattgatactaaaatgaactttgtagaaacaatgaataaaactatgcaacagtgccaatttagtgcaaggaaacaatga

SEQ ID NO: 51909 - DNA, 1095 bp, Acinetobacter baumannii
atgatgattattcgctacattgaacctaaggatgttaatgatctttaccttttggctcaaaaagcgggttttggtttgacatctttgcagccaaatatggaaaaattggctgcacgcattgaacgggcttgtaaaacagtagcaggtgaattaccaaaagctgatcaggtttatttatttgttttagaagataccgagctcaataaagtggtaggtgtttgcggtattgaagttgcgcttggtttaaaagagccttggtacaatttccatgtgggcacccaagtgcatgcctcggaacctttaagtgtctataacgctttaccaactttgtatttgagtaatgaccacacgaactgtagcgagctttgtacgttatttttagatccagactaccgtttaaataaaaatggtaaatttttatctaaagtacgattcttgttcttgtctgcatttcgtcaatatttcgaagaaaccattgttgccgaaatgcgtggttattccgatgcaaatgggcaatcaccattttggaatgcggtaggccataaattttttaatattgaatttaccaaagcggactatttaagcggaatagggcaaaaggcttttattgccgagctgatgccgagacatccgctctatgtcgatatgttgccagacgatgctaaagcggcaattggtatggttcatccaaatactcgaccagcctacaacctcttactggaagaagggctgcgttataaaggttatatagatatttttgacggtggcgcgacgctacaggcagatattgaaaatttacgcgctattaaagaaagtcagattttagcagtcaaagttgtagactctactcgtctaaatttaggcgatgagccttatattgttgctaatgacgattatgaaaactatcgggcaattgtggtgtatagctcaccttatcaggaacaactacagctaagcgccgaacaggctcaagaactgaacgttgaaaatggagcattagtccgcgtcttgagtattaatgttaaacaggtttcaaaaccaaaagcagcaaatagatcggaaaatacccagtatttgcaaatggtggttaattag

SEQ ID NO: 51910 - DNA, 1878 bp, Acinetobacter baumannii
atgcaaatgaatgccactcaatcacaagaccgcgaacggttcgtaaaattagggcaacacgatattcattatcactataaagatcaaacgctctatatcagcccaaaagagcaattaaaaccgtatccacaaaaactgacagatcggttaattcattttgcacaaaccaaacccgaccatatttttgcagcaaaacgcaatgctcaaggcgaatgggtcaaactgagttatgcagaagttctacaacgcgcatggcacattgctcaagctttgcatgaccgtaatttaagccaagaacgaccactcgttattttaagtggcaatgatctcgaacatttaacactttctatgggtgccatgctagcgggtgtgcctttctcggctatttcccctgcctattctcttatttctcaagacttcggcaaactcaaacatgtgtttgaagtgctcacacctggtatggtttatgccagcgatggacaagcttttgccaaagccattcaggcatgcattacatacgatattgaagtggtgaccaataaaggtattgtaggcgatcagatctgcacgtcttttcaatcgctgttagatacaccggtttcaaatgttcaagagttttatcaaacccttgatgaaaaccagattgccaaattcttatttacatcaggttcaaccaaattgcctaaagctgtaccgaccacacatttaatgttgtgtgttaatcagcaaatgttattgcagactttccctgagtttgaagaaacgccgcctgtcctactcgactggctgtcttggcaccacacttttggcggcagtcacaatgtcggcatcgcgctctataatggcggtacgatttacattgatgatggcaaacccgttgcaggaaaatttgaagaaaccattcgtaacctcaaagaaatttctccaacagtttatttaaatgtgccaaaaggttgggaagaactcaccgaagcgttagaaaaagatgaagaattaagagaccgcttttttgccaaagttaaaattttattctttgcaggcgcagcgctttcagaagcgggctggaataggctcgacaaaattgctcagcaacattgcggagaaaaaattcgcatcatgagcggattgggtatgactgaaactgctccctcttgtgcttttacaactggcccacgcgtaatggctggctttattggttaccctgctccgggatgcgaaatcaagctagtgccatgtggtgacaaacttgagttttgtgttcgtggcaaacatgtcatgaaaggctattggcggttaaaggcagaccagcagagcactatttttgatgatgaaggctttttccatacaggcgatgcagttcgtttagtcgatgtcaatgatccaactaaaggtctcatgtatgacggacgaattgccgaagactttaaactcaatacgggtacttttgtgaatgtgggcacactacgcaataaagtactgattcagggtaatttactgattcaagatgtttgtattacaggttcaaacctaaatgcggttggctttctgatttttccaaaattagaagcttgcgctcaatatgcaggtcttaagcttggtgaacattctcaagcagagatactgcaacaccctaaagtccaacaatggttccgccaatttttaacaacctttaataaagatgcgactggcagctcaaatacagtctcaatgctttatttaatgaccgagccacctcaactcgatgcaggcgaagtaaccgataaaggcaacctcaatcaaagcagtattaccaagcgtcgtgctgctttaattgatgaactttatcaaaagcagactgataacccactaattattcgggtgcccaccttaaaacaataa

SEQ ID NO: 51911 - DNA, 834 bp, Acinetobacter baumannii
atgagttatgaaaaccgctgggaaacagtagatgttaaagttgaagatggaattgcatgggtcactttaaaccgccctgaaaagaaaaatgccatgagcccaaccctcaatcgtgaaatgattgatgtgcttgaaacccttgagcttgatcaaaatgctaaagttttggttctgactggtgcaggcgactcttggacagcgggtatggatttaaaggaatatttccgtgaagtcgatactcaaccagagattttccaagagcgtattcgtcgtgactcatgtcgctggcagtggcaacttcttcgtatgtattcaaaaccaaccattgccatggttaacggctggtgctttggaggcggtttctcacctttagtggcgtgtgacctagcaattgcagcagatgaagcaactttcggtttatctgaaattaactggggtatcccaccgggcaaccttgtaagtaaagcaatggcagataccgtaggtcatcgtgcatctttgtattacatcatgacgggtaaaacttttagcggtaaagaagccgaaaccatgggccttgtgaacaaaagcgtaccgcttgcccaattaaaagcagaagtaactgaacttgcaaattgcttactcgagaaaaaccctgtggttcttcgtactgctaaaaatggctttaagcgttgccgtgaactcacttgggaccaaaacgaagattacttatatgccaagcttgatcaatgtatccaccgcgatactgaaaacggtcgccaagaaggtttgaaacaattcttagatgaaaaatcgattaaaccgggtttacagagttataaacgtactggttaa

SEQ ID NO: 51912 - DNA, 2199 bp, Acinetobacter baumannii
atggaaatcaaggttaattatctcgacaatcttcgacaggaagctaagttcgatgactttacggtaattgccgatcaaccaattcgctacaagggtgacggttcggcaccgggcccatttgactactttttagcatcatcagcattgtgtgcagcgtactttgtaaaagtgtattgtgcagctcgagatatcccaaccgataatattcgtttatcgcaaaataatattgttgatcctgaaaaccgctataagcaaacctttaaaattcaaattgaattaccagccgatatttcagagaaagatcgccaagggattttacgttcgattgaccgttgtactgttaaaaaagtgattcaaacgggtcctgaatttattattgaagaagttgaaagcattgatgcagatgcacaagcattgttattgccaagcttaacttcagaaaaccatacctatattcaaggtaaagatttaccattagaagaaaccattgccaatatgtctgctattttggcaaatttgggcatgaagatcgaaatcgcgtcttggcgtaatattgttccaaatgtatggtcgttacacattcgtgatgcacagtctccgatgtgctttaccaatggtaaaggtgccactaaagaaagtgctttggcatctgctttgggcgagtttattgagcgtttaaactgtaacttcttctataacgaccagttctggggtgaagatattgccaatgctgaatttgtgcattatccagatgaaaaatggtttaaaccgggtccaaatggtgaattacctaaagaaatcttagatgaatattgtcttgagatttataacccagatgatgagttacttggcacgcatttatatgatactaactcaggcaatatagagcgtggcatttgctcgctaccttttgtgcgccagtctgacggtgaagttgtatatttcccatcaaatttaattgaaaacttgtacttaagtaatggtatgagtgcaggcaacactttggcagaagctcaagttcaatgtttgtctgaaatttttgaacgtgctgtaaaacgtgaaattttagaaggtgaaattgcacttccagatgttcctgaagacgtattagcaaaatacccaagtattgtggctggtattaaaggcttagaagagcaaggttttcctgtattagttaaagatgcatcattaggcggtcagttccctgtaatgtgtgtgactttaatgaacccgcgtacgggtggggtgtttgcatctttcggtgcgcatccaagttttgaagttgcgttggaacgtagtctgaccgaattacttcaaggccgtagttttgaaggcttaaatgatttacctcaaccgactttccaaagtaatgcagtgactgagccgaataactttgttgaacactttattgactcaagcggtttagtttcttggcgcttctttagctctaaatctgactatgactttgttgaatgggatttttctggcgaaggcgaagagtcgaatgcagaagaagctgcaactttattcggtattctcgaagagatgggtaaagaagtgtatatggcagtctatgagcacttaggtgcgaccgcttgccgtattttagttcctgattattcagaaatttatcttgttgaagatctgatttgggacaataccaataaggcacttgcattccgtgaagatattctaaatctgcatcgtttggatgatgaacagcttgaggcgttggttgagcgcttagaggaatgtgagctagacgattacactgaaattaccacactcattggcatcgaatttgatgacaatacagtttggggacagctcacaattttagaactgaaattgctcatttatgttgcattacaacaatttgaagaagcaaaagagcttgtcgaaacttacttacaatataacaccaacaccgttgagcgtggtttgttctatcaatgtatgaacgtggtacttgaagtaatattagatgaagaactagagcttgaagactacctgactaacttccgccgtatgtttggtgacacacgaatggatgcggtattaggttctgtcgacggtagcgttcgtttctatggtttaacaccaacaagcatgaaactagaaggacttgatcgccatttacgtctaattgagagttataaaaaattgcatgcagctcgtgctaaaacggtagcgatgtaa

SEQ ID NO: 51913 - DNA, 198 bp, Acinetobacter baumannii
atgaaattagctaaaactttactcgctactaccctagctttaactgctgcttcaacttttgctgcttctaaacatgataaagttcatgctccagcagaagataaagttgtagtttcaactcaagaacaagcaaacactgcaaatgctgcatctgaagcggtaggttctgcttctgaagctgctcctgctgctcaataa

SEQ ID NO: 51914 - DNA, 789 bp, Acinetobacter baumannii
atgtcaaatcaagaaggaaaagtcagccgtgaaactcgcggacatatttttttaattggcttagatcgcgcagcaaaacgtaatgcctttgatagtcacatgattaaagacttatcactagcgctcaccgaatatgaaaataatgacgccctgcgctgtgcgattgtttttgctcacggtgaccattttacagctggcttagatttggttgagttacaacctaagcttgctacaggtgtttttgattttagtgaaaatgaaattaacccgtggggcacaataggtcgaaagctgagtaaacctttgattgtggcagtacagggttattgctataccgctggcatagaactctttctcaatgcagatattgcgattgcaagtgaaaatactcagtttgctcaaatggaggttcaacgtggcatcttaccttttggcggagcaactgcacgtttcactcaagccgcgggttgggccaaagccatgcgctatttgcttacaggtgactcttttgatgccaaagcagccttggatatgaacctgattacagaagtttgcctagaaggtacggagcttaaccgtgccatagaactcgctgaacatattgctcaagcagcgccccttgccgtaaaagccattcttgcctctgcacgtgaagctattaatgaaggttacgaggttgcttttcatcaattgcaaaatcatctacaacctttactaactacagaagatgttcaagagggtgtttttgctatgctacaaaaaagaccaccagtgtttagaggcaaataa

SEQ ID NO: 51915 - DNA, 600 bp, Acinetobacter baumannii
atgactcatactttaaaaaaacttttattttgtttatttctttgttctggttatgcaaatgctcagattaacgctgttcctttaaagcagcttagtaaattaccggattcatgtcagaaagatgaagctgctgaaaataataaattagttatacagacggcacagataaaaatacaaagctattcttgctttaagcctgatatagctgatgcactaggctataatgtatttgctatcaatttagataaaaataaaacctattattttaaagcgcaaagtcgggatatatctgcaatagctggccaaaccatacataaaattgattctgaaacctttgctatagacaattatcaggagcgtggtggaaatttcattattttttgggtagctgactgggcaaatatttatacacaagatatttcttattatacgaatgatgaaacttccatagatacctttattaaagacaaactgatttatttacagaagaaaaaatatttggataataccaaaactaagaaagttggatctcctttaatcattatgaaagacaaacaaaaaggtttgatcattaataagactaaggcacaaaacttttaa

SEQ ID NO: 51916 - DNA, 468 bp, Acinetobacter baumannii
atgaaaaatttaactcatatatttttattttgtattggctttttagtagcaactacctcttatgcgcaagtaaatattaaaccattgtggcatggtaaagtattgaacagttttgatattcgtttaaataatttgaaaaagccaaagcaggttattaaaggtgaggctgatgaatgcaatggtggttattttccagatcaatgggtatatgaagatggagtgatactctctacgggatctttagataaggtatatgtaagccagcaaaatggtctaaagtatggttctcgattatttaatcatttaactaccgagaatgattttaaaaagttttttggtaaacaaataattatatctgaaaatcatacttactctatatttccttgggaaggtagtaatgatggcttgcactttcatttccgtaatggaaaactacattactatacgtactctattgatgactgttaa

SEQ ID NO: 51917 - DNA, 219 bp, Acinetobacter baumannii
atgatcctgaatttagtcatatataaacagcaacagtttgatgcggtggcccaaaaaattatggctgaccctgcaaaatatatagattttaattcagtgtcagatttctataaggttgcttggctcaaggactttccccaagggacccaagtctctgtgacaggtttagatgatggggctgaagagttttatgcagtagtacagtttaaacagcaatag

SEQ ID NO: 51918 - DNA, 792 bp, Acinetobacter baumannii
atgaaaaagttgatgatgattggttttggcgcaatggcagcagaagtgtatgcccacttgcctcaagatctgcaactcaagtggattgtagtgccatctcgcagcattgaaaaagtgcagtcacaagtctcttctgacattcaagtgatttcagatattgagcaatgtgatggtacgccagactatgtcattgaggtggcaggtcaagcagcagtaaaagagcatgctcaaaaagttttagcgaaaggctggaccattggtctgatttcggtgggtactttggctgatagcgagtttctggtgcagcttaagcaaactgccgaaaaaaatgatgcccatctgcatttacttgcaggggctatcgccggtattgacggtatttcggcggctaaagaaggtggcttgcaaaaggtcacttacaagggttgtaaaagtccaaaaagctggaagggcagttatgcagaacaattggtcgatttagaccatgtttcagaacctacggtcttttttacaggaactgctcgtgaagctgccatgaaatttccggccaatgccaacgttgcagcaaccattgcacttgcagggcttggaatggatgaaaccatggttgagttaactgttgatccaactatcaacaaaaacaaacacaccattgtggcagaaggtggttttggacaaatgaccattgaactggtgggcgtgccgttgccaagtaacccgaaaacatcaactttggctgcgcttagcgtgattcgtgcttgtcgcaatagtgtagaagcaatacagatttaa

SEQ ID NO: 51919 - DNA, 162 bp, Acinetobacter baumannii
atgaaatttggagtgttattatgcagaagccagttaaaagcggggacagcgtggcgcatcaatattcgttatctaggcaaacgttatacggctactcgagatacagcgagtgagtgtgaacaatgggccactaaaaaattattagaattacaatctgaatag

SEQ ID NO: 51920 - DNA, 588 bp, Acinetobacter baumannii
ttgagcaaacatgtctatgggcatgtttgctcttactttgaggagaataaaatttctattttcttaaggccactacaatacaaagagatcgatttaatttggcaacacattagtcgacgtgaactgattacccaactctacatacaaaaacaagatcaactcgaattaacagattgtttttatgatgttaaaaattgggatgcctatcatttagaaaatgacccaccaaaattaaaagaactctatcaacaaggtgcttcatttgtaggtgcttttaatacggctgaacagctagtgggcattagtgtcgtatcgaatcaaatcattactgactatcccaatgcaaaattactgcaatatttttatgtcgatgccgatcaacaaggccaaggtattggcgcaaagctgatgcaagcagccaaagagtcaaccaagcaattgggcgctcatcaactttatatttcagccactccaagtaaacgtacagtcgacttttatataaaacatggtgcgacagtattaaaacatccagatcgagaattatgggagctagaacccgaagacattcatttgctttgtatgctttaa

SEQ ID NO: 51921 - DNA, 2646 bp, Acinetobacter baumannii
atgaatagcgctgaaatcatggctgatctctctaaccacactccaatgatgcagcaatatctcaaagtcaaaaaagactatcaacatgcgttgctgttttatcgtatgggcgacttttacgaactgttctttgaagacgctcatttagcagccaaacttttaggaattaccctaacccatcgtggtaaagcaaatggcaacccaattccaatggcgggcgttccctaccattcagccgaaggttatctggcacgtttggtaaaagcaggtcgcactgtagccatttgtgaacaagtgggtgaagtcacaggcaaaggtcctgttgagcgtaaagttgttcgtattcttacccctggtacattaactgacgacgcactactcacaagttatcagtcttctaaccttgtggcgctatgtatccatcaaaatcagatcggttttgctttactcgacttaagtgcgggtatttttaaagttcaacaacaagactacaaaccggaacaacttccaattgaacttgcacgcctcatgccaagtgaaattttaattgatgaagatttggttgacccaaatattatcgaacaaattaaaaagcatttagattgcccagtaaccaagcgcccaaatgtcgattttaatttaaacaacgcacaaaaaaccttatgtgaccagttctctgtatcgacgctttctggttttggtttagacccgttacctttggctaaagctgctgctgcggctttaattcactatgccaaagaaacccaaaaaacggcgttaccacatattcgttcaattcttttagaacaaagcactgactttattgcgctcgatccaatcacgcgccgtaatttagaaattattgaacctttgtttgaacacggaacttctttattccaactggtgaacgactgccaaaccgcaatgggtggccgtttactcagccgtacactcatgcaacctgttcgtgataccgcgttgcttgatgcccgtttagatgcaattgaacagttaattcagggctaccatgaaagtccggttcgtttagtgcttaaagaaattggtgatattgagcgtgttcttagccgtgttgcgctgggtagcgcacgaccacgtgacttagttcagcttcgtcacgcttgtgcacaaattccatttttaagaaatgctttagcacctgttgtacaagcgaagaaatccaagttattgggacagctcgatcaagaattgggtgactttaaatcgcttcatcaacatttaatggcagccattgttgaaaacccaccggtattacttcgtgatggcaatgtaattgcagaaggttacgatgccgaactcgatgaattacgccaaattcgtgatcatgcaggccaattcctgattgatttagaaataaaagaacgtgaacgtaccggcatcaataccttaaaaatcggttataaccgtgtgagtggttactacattgaacttactcgcgctcaagctgaacaagcccctgccgattatattcgccgtcaaacattaaaaaatgccgagcgctacattacgcctgaactaaaaagctttgaagataaagttttatcaagtgagtctcgtgcattagcacgtgaaaaagcgttatttgaagctttacttgaaaaccttcgtgaaaatattgcgcatctacaaatgatgagttcagcaatcgcgcaaattgatgtaattgcaaactttgctcatcaagcgcgtttaaacaactgggcacgccctgaatttacaccagaaacgggtatcaaaattcaaggtggccgtcaccctgtggttgaagcattaagtaaagcgccctttacaccaaatgatacgttccttgatgcccagcaccgtatggcaattattaccggtccaaacatgggcggtaagtctacctttatgcgtcaaaccgcattaatcagtttgcttgcttactgcggtagttacgttccggcacgagctgccaaacttggtcctattgaccgtatttttacccgtattggttcagccgatgacttatcgacaggtaaatcgacctttatggttgagatgactgaaacttcacaaatcttacaccatgcaacgaatcagtctttggttttaatggatgaagttggccgcggaacgagtacctacgatggtctttctttagcatgggcttgcgtggttgacttaacgaagcgtgttaaatgtctgtgcttgtttgcaactcactatttcgaattgacagagttagggagtgaagcaggtattgataactaccacgttactgcccaagagttaaatggcaacctgattttattgcataaagttcaacaaggacctgcaagccaaagtcatggtttacaagttgcgaaattagcgggtattcctgctaatgtcattaaagaagctcaaaagcgtttacgtattttagagaagcaacaacagcaacacttacaaaccagtgtacaagatgatttgtttgcaactttagattcggaagctaaaaccaatactcaagtcatagagaaagtgattgaaatcgaagtgccttcacctgccctagacttacttaagcaaattgaagtcgacaacttgacacctcgccaagcacttgaacaactttacgagctaaaagctgcgcttaaatcataa

SEQ ID NO: 51922 - DNA, 765 bp, Acinetobacter baumannii
atgccaaccaatttatttgatttaacaggaaaaatcgcattaataactggtgcaagtcgtgggattggtgaagaaattgcaaaacttttagctgagtatggcgcacatgtcattgtctcgagtagaaaaattgatgattgccaagcggttgccgatcaaattattcaggcaggtggtaaggcagaagcgtttgcatgtcatgtaggttcaatggaggatattacggctatttttgatcatatccgttctaagcatgggcgtttggatattctagtcaataatgctgcagcaaacccttactatggccacattcttgatacagaccttgtggcatataacaaaacggttgaggtcaatattcgtggttatttctttatgtcgattgaagctggaaaactgatgcgagctcaaggcagcggtgcgattgtcaacaccgcttctgtgaatgcattacaaccaggcgatcgccaagctatttattcaattaccaaagcagccgtggtgaatatgacgaaagcgtttgccaaagaatgcggtcctttagggattcgtgttaatgcgatactcccaggtctaacaaaaaccaaatttgctggcgccctatttagcaatgaagaggtatataaccgttggttgcaagaaatcccattacgccgtcatgcggagccacgtgaaatggctggaacggttttatatcttgtctctgatgcagcaagttataccaatggtgaatgtattgtggttgatggtggtttaaccatttaa

SEQ ID NO: 51923 - DNA, 756 bp, Acinetobacter baumannii
atgtacgatcagtattcagatcaagtggtcttaatcacaggcgcggcgagtggatttggtgcactactggcccagcaactggcagaacagggagcaaaattagtcttgggagaccgcaatatcgcagggctgaatgcagtggttgaaccgttacaacaagcgggtatacaagtagttgcgcaggcttgtgatgttagtcttgaagcagaagtacaggcattggtacaaagtgcggtggatcatttcggtagaattgatgtcagtataaataatgcgggtatgagtccgccaatgaaaagctttattgataccaatgaggcagatctggacttgagttttgctataaatgccaaaggcgtattttttggaatgaagcatcaaattcgacaaatgctacaacaaggtggtggcgttattctaaatgttgcttctattgcaggtttaggtgcagctccaaaactggcagcttattcggcagcaaaacatgcagtcgtgggtttaaccaaaacagcagcagtggaatatgcaaataaagggattcgggtcaatgcgatttgtccattttataccactacaccaatggtactcgacagtgaactgaacgcgaaacaagactttttggcacaggcttctccgatgaagcgtcttgcccatccgagtgaagttgttgcaatgatgctgatgatgtgcgctaaagaaaattcatatctcacaggtcaggctattgcaattgatggtggtgttacggcttattaa

SEQ ID NO: 51924 - DNA, 909 bp, Acinetobacter baumannii
atgacaatcaatttaaccaaccgtgttgcaattgttacaggtgccggtgcaggcttaggacgtgagcatgcgctattactggctcgtttaggcgcaaaagttgtagtcaatgatttaggcagtgatgtacatggcaatggcggatcaacttcagctgcacagaaagtggttgatgaaatcattgcagccggcggtgaggcgatcgccaatggtgcttcagtcaccgatgctgagcaagtccaacgtatggtcgatgacactatggctcgttggggacgcattgatattttagtcaataatgcgggcattttgcgtgataaaacctttagcaaaatgacattggaagattttcggctagtgatcgatgtgcatttgatgggggccgtgaactgcactaaagcagtttgggaaatcatgcgcgagcaaaaatatggtcgtattgtcatgaccacatcatcatcgggtttatacggaaactttggtcagtctaactatagtgctgcaaaaatggctttagtaggattaatgcaaaccttaggcttagaaggtgaaaaatataacattcgagtcaattgcattgctccaacagcagcaacccgaatgctggaaggcttgttaccagaaacctcactcgaagcacttgcaccaagtgcagttagtccagcgattgctgtattagtcagcgaagaagcccctaataaaatgattatttgtgcaggggccggaagttttgaagctgcacatattaccttaacccaaggcattcatttaggaactggcgatgaggtggcgcataacttagtccagcatttaagtgagcttactgatcgtaccaatgaaatcgttcctacgatgggcgcagcgcaaggcaatttagagttgcaaaaagcgggtttaagcggggactaa

SEQ ID NO: 51925 - DNA, 456 bp, Acinetobacter baumannii
atgagcatagtgacgattgagcaactgtttgacttgcaagataaagaactaggtgtctctgattggttgaccattgaccaagccatgattaatgcttttgcggatgttacgcgagattggcaattcatccatattgataccgaaaaagccaagcaaactccatttggtggcacgattgctcatggttttttgactttatctttactatcggccatggcggcagaagtattgccctctgtagagggacaaacctcatcggtaaactatggcatgaataatttacgctttctaagccctgtgccgagcggacatcgtgtacggggaagatttagcttaaaacaaatcatagaaaaaagagcgggaagctatcagttgaccttaggtgtaacagttgaaatcgaaaaccaccccaaaccagcgctcgttgccgaatggttaacgctgatgaatttttaa

SEQ ID NO: 51926 - DNA, 1824 bp, Acinetobacter baumannii
gtgaataatgaaatgattctttctcgacaggatgtcgatttcttactgtttgattggcttaacattgaagcactcaatcagcgccctcgttttgcagggcaagagcgtagtgattatgtggcagtattgaatgtatatgaagacttggcaactgatctttttgcgccccacaataaaaaaaatgatagccatgaacctagctttgatggtgagcgtgtaactgttaacccagaggtaagtgtcgccttaaaagcctttgcagatgcaggtttgatgagcacagctttttctaccgaatggaacggaatgagtttacccaataccattgaacgagcaggtatggcttacctgatgggggcaaatccgggtacggcaggctacgcttttttaacgattggtaatgcaaacttattgatggctcatggagaccctaaaaaagtaaagccatatattgatgccatgattgcaggtgactgctttggtacgatgtgcttatctgaaccacaggccggatctagtttgggagatattcggacacgtgcagtgccaacagccgacggacgttaccgtttatttggcaataaaatgtggatttcaggtggtgagcacgatatttcaagcaatattgtgcatttggttctagccaaaattccagatgaacaagggaagttacctgctggcgttcaaggcatttcgctatttaccgtacctcgaaaattagttgatgagcagggaaatataggtgagcgcaatgatgtcgctttggccggaatcaaccataaaatgggctaccgtggcaccgtcaactgtgtattaaattttggtgaaggtcgttatacaccagaaggagaaccaggcgctattggtgagctggtgggcgaagctggcaaagggctttcttatatgttccatatgatgaatgaggcccgaatttcagttggtctgggcgcagccgccttgggatatacaggttatttgcatgcactggactatgcaaaaaaccgtttacaaggccgctctcgtagtgaacgtgatccgagttctccacaaattccaattatccaacacgcagatgtgcgccgtatgcttttggcacagaaatcatatgcctctggagcacttgcactttgtttgtatgctgcaaaattaacagatgatattcactctcttgaagatagcgagcaacagaaaaaggcacaactacttctcgatttacttacacctgtagtaaaaagctggtcatcagaatggggactaatggcaaatgatttagctattcaagtacatgggggatatggttatacccgtgaatacaatgtagagcagttctatcgggacaaccgactcaatccaattcatgaaggtacatttggcattcaggcgatggatttactcggacgcaaaacacggatcaacgatggtctagcgatgcacgttttgaatgaaaaaatcacagaaacaattgctcaagctcagtcaatagcagcattacagcgccatgccaatactcttgctcagacatggcaacgggttcaggaggtaacggcagcattacatgctattaaggatatggatatgcaattggcaaacgctgccaattatttagaagcatttggacatttggtggttggctggttatggctggatcaggcaataacccttcatgaaaatctagccacttcatcagcaacagattttttaaatggcaagttagctgcctgtgattatttttttggttgggaaatgcctaaaatttacagttggcttgctgttcttgatccaattgaaactacgccattaaatatgccggaagcttggttttaa

SEQ ID NO: 51927 - DNA, 912 bp, Acinetobacter baumannii
atgcgtccggctctagattttaataccctgaaagtatttattgctgtggttgaaaaagaaagttttgtgggtgcatcgaaactgcttgaaatgccaacatcaaacgtgagtcgctgcatttctcagttagaagaaaaactcgatcttcagctcattgagcgtagtactcgacatatgaaactcactcaagcagggcaactactctataccagagcaaagccattactcgaagcgcttgagcaaacggagacagagttaacgttgcgtcaaatgcagcttaaaggtccattacgaatttgtattccaaatgaaataggccctgcactgctaggttctgtgattgcagaattcgcctgtcagtatccagacttagaaatcagctgtgtcacaaatttgtcgggttttgaatctctgcgagatgatttggatttagctattattattagccgcggtcagatggataacagtgactacatcgctcgtcatctagtgactatcccttgcacgattgttgcagccccttctctcattcagcgttatggcacccctactcgtatcgagcaatttgaagatttaccctgtattacaacagtcagtgcactcaaaggtgctccttggcaatttgtcaataaaaagggggaattcgagaccattaaggttaaaggacattatcgagtaaacagcggagagatggcaggacaagctgctgtagcaggtatcggttttgcaattctatcgaaacaaacttgccaaccctacattagcgacggacagctagtcgagattgagtttgaacaaaaggcagcccctttgcagttattcgcactgtattcaaatcgtcgttacttacccgctaaaacaagagcgctcattgacttcatacatcaaaaattgagtcatatttctttataa

SEQ ID NO: 51928 - DNA, 1194 bp, Acinetobacter baumannii
atgtccctagccacacagacgtttaattataaagtcctcatgcggatagccactgtaattgctttcgtccagttcacgaatgcactggaatatatggtgttcaatcctatttttgtttttatggcgacagatttcgcagtgccagtatcattctcaggttatgtttcagggatgtatacgcttggcgccgttctttcaggacttattgctttttactggattgatcatttcaataaaaagcggtttttgattattaatatggcgctactaggtctactcacacttttgactacctgtacatccagttttagtctgctacttgtacttcgattttgtgcagggttggtcggcggtaccacaatgggagtgggtataagtatattaataaacaacgcactgcctaatttacgggggaaaatgttagcgacggtgattgcatcattttcaatagtaagtattgtcggaatgcccaccatattatttctatgcactcactatggatggcatgtggctttgtggctcataagtgcattgtgtgtgttggtattgccattaattgtatccattatacccaaagaccaagtctatttagatacgcctcgtgcgctgcctctggatatgaacacattattgttcgcctctgctaatgcactcgtacagtttagtcctatgctgattattcctattttggcacccttaatgattcagcagttgggtgcttcacaaaatctattgccttggctttttttcagtggaggtgttataggttacctatctacaaaaattacaggagtattaacttctcgtttttctgctttagtgctgggtacaggttcaaccattgtttttatactgagtttgctaataccaatactaggctatcagcatgcagcgttatttattggtttatttctcggtgcatcttacagccgtttggtgtcatgttcagtgcttacgattcagtttcctaacgaccaacaacgagctggattttcttcattacagacatccatcatgtatttaatgacaaccgttgcatttttcttatctgcttttttattgcctgaacagggtatgacgccacaaagtgtaaatacgttactagcgatatgtgcaatttcagcagcagggttcccagttcttgtgattgttctgcaaaagaaactggctaaacgttttcatgtctttttataa

SEQ ID NO: 51929 - DNA, 999 bp, Acinetobacter baumannii
atgctcctcacttttatcttattctttgtgtccgccgcagcgatttatctcgcctgtgaatatttcgtcaatggtatcgaatggttcggtaagcgccttaatctaggtgcaactgcagtaggttccgtactcgcagctttcggtacagccttacctgaaagtgcagtcactttcatggcggtcgtatttggtaataccccagagcaaaaagatcttggtgttggagctgcaatgggtggcccattggttctagcgactttaggttatgccgtagtcggtctggtattaattcttcatcgtaaaaagttagctcgaacttcacataaagtacaagttgattacgtccgtttaagccgagaccaagtctcttttcttgtcatctttgttttaaaagtagcacttggtttagtcgcatttgccattaagccgtggttaggtgtgctatttttagcagcttatgcagcttatgtttggcgtgagattaaggaagctgacacatctgccgatgaagaagaacttgaacctctcaagtttcgtccaaataccgccgaaccatctctagggtgggctggtctgcaagtactgctggctttagtcgtgattagtatcgcttcacatacttttgttgctcagcttgaagcgattggtacagcattaagttggccaccgcatctggttgctttgttgcttagtccggttgcgaccgaattacccgaaattatgaatgcgttgatttgggtgcgccaaggtaaagaacgtttggctttagcgaatatttctggtgccatgatgattcaggccaccataccaagtgcattaggtattttctttacgccgtggcgctttgatacattgctattagcatctggcattattactgcgctagccattgtgttcctgtggaatttattccgccgtggtgcagtcgatgatcgatcattggttgcagtcagtgcgctgtacggtgtttttgcaattcttgttgtgatttatctctaa

SEQ ID NO: 51930 - DNA, 1344 bp, Acinetobacter baumannii
atgatagcttcgtcttactttaaaaaacgcaaaaaaaattaccgtactgtaaaggaccaacagcttacaattgcagccaaagccaatatcttcatttgtattattttttgtttgttttggactatttattttgcatttgcaaacctatggctcattgtttacatagatatcactttcacattaatttccatatttagtctttttctcatttatataaaccggatttcagcgggcatacttttatcgcaaatggttttactggtttttccggtcatcttttgcttattttttgatattgctacacctcatcgccctcaagtcgctcacttgtttttaccagccggagcaatattggggtatttaaattaccgcagagacccaagctttttacaaattcttttaattttattgtcgattggatgctttatattttttagcgcgacctcttttactctcaatagtgcagcacctttacctgaagatattcgtaatcatggcggatggattgcaactggtgttgctacgctgatgatttgtatttcaatttataccatgcaattagagatacaaatcgaaaatagcatggtacatgacttacgttcggcacttgctaaagaacagtttgaacttttttatcaaccgcaaatcaattcatctgaaacgctaataggtgctgaagccctgttaagatggcaccatccaactttaggatttatacctactcaagactttattccggcagcacaaacgtttgggttaatgccagagataggagaatgggtattagttgaagcctgcaaagttttgcaagactggagcaaaaaagaagaaactaaagatcttacactttcaattaatattagcgccgatcattttatgcagccgctttttgagcaaaccgtgataggtatggttcaaaaatatgacataaatccatctcggctcattttagaaattactgaaaatattgccttaaataattgtgcaagcatgatcgaaaaaatgaatttcttgtctagacatggcattcagctttcacttgatgattttggtacagggtactcatctttaagctatttacaaaaaatgcctatgagtcaaatcaagattgatcgaagttttgtacaagctgctttggatgataagcgtagcaataaactggtcacaggtattattaaaatcggtttagacttaaaccttcgtgtgcttgtagaaggaatagaaacgactgaacaatttaacgcttttaaaagtaatggctgtactgaatttcagggctatttatggggctgtccgatgcctttaaatgactttattaaacagttgccatattttcataagtag

SEQ ID NO: 51931 - DNA, 456 bp, Acinetobacter baumannii
atgccacaatacttagctattgcagaaagtgtgtataggaaagttaaagacgttgagctttcttcagatgacactattgaaaatcttaataatttaatgatttttatacgtaaagagatcacggggagtgtattcaaattaaagtataactacattgatttcgaagaagctttaacaaaaccgttaagtgaatgtaaagtaaaaatagatgttagccttattccacaccatagtatggaagacgaatatattttatggctagctggatttgttgaaaaaattacggagggtgggcccaaacctccaccaccaattaagaaatatattcctgaatttattagtctcgaatcagaactagattttttaactgttccaaaggaaaagtttttaaatgaaggcgaagaaattaccgactattttaattcagaagcatttaccaaaactgtgaaaaagtaa

SEQ ID NO: 51932 - DNA, 237 bp, Acinetobacter baumannii
atgaagtacattaagtatattttcgccgcattagtcatcgcgctttctgctccaacctttgcaaaaggccacgcttaccacggctcacatcatggttatggacatgcttatcacggcagtcattatggtaaagcttatgcttatcgtggtaatcatcatggtaagggctactatcataataaagcccatggcgatcatgggtctgatatgcatagccacggacgtggtcatatgtaa

SEQ ID NO: 51933 - DNA, 639 bp, Acinetobacter baumannii
atggctttgctgtgccttttttctcccaaaaaagtatctcgtttagaaacaacaagaatttataacggtaaaactatgccaaattatttagaaatctcttccaaaaaattacatattattcgaacggctattggtctatttaccacttatggctttcacacagcaggtgtagatctgattgccaaacagtgcgaagtacccaaggcgacgctatataactattttcgttcaaaagaagggctgattgaaatgtgtattgcctttcagaaaagtttactcaaagaagaagtactcgccattatttactcaagccattaccgcacacccattgataagctcaaagaaatcgtggttttacatgttaactctaacagcctgtaccacttattacttaaggctttttttgaaattaaagtggtttacccgcaggcttatcgtatggcagttgagtatagaaaatggctgacccgtgaaatttttgaactaatttttagcttagaaatgagtgtgttaaaacccgatgccgacatggttttaaacttaatagatggcttaatgtttgagtttttaagtacagatagtgtggaaaacaggaatgcagcgatggactgcttttttaaacctatttgtttgaagtaa

SEQ ID NO: 51934 - DNA, 885 bp, Acinetobacter baumannii
atgcttcctaataagaaaaagaatatagccctttgctacattcttcctttgattttagttattggcttctatgcctttttccgtgtatctattcttccttatatttataccaagcaagcacagcatcaacttttaacagcaaataatcaatcaactgaaatttattggaaagaaccagacctcttagccgataaaaagtatccagcaattatctttttacatggcattcacaaagacaaaaaaggtgcaaaagcctttgtacgctcaggcttgttaaatgaatatgctaaaaagaactttttcagttttgctgtatctatgagtggatatggtaagtcatctggaaaatcagacttttgtggtaaagcctcacaaaataatcttgtacaagccattaattttgcccgatcacagccaaacgttgacccaaacaaagttgccgtagttgggattagttgtggcgcctctatagcaaatgttgtagctaactcagacaagataaatgctttgattttagtatctggattttatgactttaaaggtatgtatgctcagtggagttctaacgctagaacactaccttcaaatgtaatgaatgaaataaatgaaacgattactgctgagaaaaatatagaaacggcgtctgctgctagatcatcgttaccaatatcatctcaatatccatctactcttatattggttggcaccaaagacccaattgttgatccaaagcaaagtatacaactacatcaattacttgatagtaaaggtattccaaacaccttagaacttactcaggatgccaaacatcctgtgcctgctaatgtatggaaatcaaaaagcgataagtttttggaaaagactttgagtgtaaaaattaagtga

SEQ ID NO: 51935 - DNA, 888 bp, Acinetobacter baumannii
atgaaagcaataattgcattacaaaaattagttttaactccatcatctaaagttagtgatatcttacgccatgcatatttaattgcttgtaaattgaatttagaagattttaaaaaatggtgtgaattagaattaaatggatattttgatattcctgatgaagatgttccaaaagatagatatatttttggatctttatgtgtaaaaaacagtttggatggtagtagagccacctttcaagctgatgcagtattttcggggcagcttattaaagaaggtatttctttttttgaagaagctgttgctactacgagtgaaagtataaaacttcaacaaaaagatagcctagatgccttattaagaaaagctaatcctcaattaaatgggactaatttcattttttatatagaagttagtaaagcacctttttataaagtattagagaatattaaatttaaaatattagaattgtcatatgagcttgaaaaacaaggtatattaggtgaagaatgggaattcacagagcaggaaaagcaaatgacacaaaatatcaattatcatattggtaatgtaggcaatatggcgaaccataatgacaactccacaatcaatcaaacatcaactaatactgtacaagtgataaaaggcgattttaactctttagcaagcaagctaaaagattatggtgttgaagacgcggatattgaagacttaagaaatgtcattgatgttacaccatccccagcatcttctgatgaactaggagaaggagttactaattggcttggtaagatgtctttgaaagcattaaaaggttctttgaaagttggaaaagatgttgcgatgggagttttagttgaggctatcactacttattattgtggttaa

SEQ ID NO: 51936 - DNA, 678 bp, Acinetobacter baumannii
atggattcaaaaatattaaagcgtttagagcaacttttaaatgatggtgttgaattacattccttaacgcatatagttccagcaagtaataccaatattgaacatgaaagtttgggaaaagatggagacgcacaatatgtagaatggaaaatcaaaattaagcatcttttaaaattgatttgtggaaataattcaattcattatgaagcttttttaaatgctgaaagataccagttttatgatacaaatgcggttgttttaaaccgtttgttaccagtaataaaagcaacttatgatgatttcaagaatggctttttaataactttcaagcagattgttcaagcagaagtttttgatagtgagcttgagcaggctaaatcacttcttgaaaatggatataaaaatgctgctgctgtaattgcaggtgtagttttagaaactgcaataaaagaactatgtctaaataataatattgatttggaaaagaaaaggctcacccgcttaaatgatgatttagcaaaagcaggcgtttacaacacccttgaacaaaaacgaattacagctttagcggatataaggaataatgctgctcatggtaagtatgatgaatttacaatagaagatgtagaaagaatgattagtgatattgagagatttttattaacttattcttcatag

SEQ ID NO: 51937 - DNA, 555 bp, Acinetobacter baumannii
atgccaaatttagttctcccaacacgtgcattaaaagtcgtcaataaatcaattgagctgttccattacaacgggtttcatatcgtgggcgtcgacagacttgtgaaagagtcggaaataccaaaaatgacgttttataactactttcaatctaaagaacgctttattgaaatctgcctcatcgtgcaaaaagaacgacttcacgaaaaagtagtcactatgctcgaatacgaccacggcacaagcgcagccgataaactcaaaaagctctataacttacacgcagatatagacgggctgtattacctattatttaaagccatttttgaaacgaaaaataactacccaaacgcgtacacaaccgccgtgagatatagaacatggctcaccaacgaaatatatagtcagcttagagcacttaactcagatgtttcttttactgatgccaaactatttctatatatgatcgaaggtgctgttattcaacgtttaagctcagatgaagttgatgaaagggtgttggaggtgtttttgagggggaatatcggtaattaa

SEQ ID NO: 51938 - DNA, 249 bp, Acinetobacter baumannii
atgggaaagcgtaaaactcaccacgccaacacccagctctgtgaacaacctgccccttttaaagatcaaaatggtgagccctacctagaaacccaccatattgaatggttagcgcacggcgggccagataccgtcgaaaatacggtagcgctttgcccgaattgccataagaaaatgcatgttgtgaatgctgaggcagatcgggaaaagctcttattaaagacaagaaatttacaaacacattcttaa

SEQ ID NO: 51939 - DNA, 681 bp, Acinetobacter baumannii
atggaacagtttttaaaacgtatatctttttttcttatctacttacccgcattagtatatgcctgtcaatttgcctattatgcaggattaggcgagcctttaaatattcacgttacttctttgggtttaaattacccagaagtagtgttaatgggatatttatatatttctctaccagtactacaatttattctttggtcagcaatatctataactttgatcttatgtattgtgtttgtgactttcagtattcgctggttacaaaagcataaaggcacaaaaattgaatatcgtgaatatattcaaaaaagtttcaaaagagtaagaatctgcttagataaacaaaaaaaggatttaataaaagcaattaattctttccttggaattttaggcttatactttgtcatatttatttttacttttttattaattctattttactataaattagggataaaagagattgaagataaagttcaagaaatttttaattcacaggcttgtgatgcttcagatggatatataacttccaacaatacaaaagtaagagtcaaaactattttatgcggttacaacaaatgctatggaatttctttagataataaagaagctattatttacccaccagaacaaactgcacaaccgatttcaagaattaaaaagttaaaagaagcaccttaa

SEQ ID NO: 51940 - DNA, 1584 bp, Acinetobacter baumannii
atgacatcaaatagtgcaaagtcttacaaagttgaatatttatgtacaattgattcagatggcgatttttgtaaatctatctctagttttaaatctttgttgaagtcatacgataaactaaaaatagaagataaaaaaattgtttgggatagtaaagagtttgcatttgaaatttcagatggtacggttttaaactcaaatcataagttttttcatttaaaattcgttaatgctaatgctaacaataagcaagagtttttatcacttttgaaaataattagaacaatattaagtaaggttaataataatcagccacctgaaattctttgggatgatatcagtagtgaatatgcaatacagtcttatcctgtaattcatgaattagaaaatcttatgagaaaattaataacaaaattcatgataacgaaggttggcttatcttggaccaaagaaaatattccgaaggaagtagcggaatcaatcaaaggtacaggtacttcaaagaaacagaattatatttatgatactgattttatacaactatcaaggtttttgtttaatgaatatacaacaacaaaagttgaagatttagttagtaaaattaaaaaagctaacaaaatagatgaattagattttaacgatctaaagaaagtagtacctgtttctaactggaccagatattttaaccctatcgttgaatgtacttctgaagaattatcaacaaaatgggataaattatataaattaagatgtaaagtcgcgcataataattttatggacgaagatgactttactaatctaatttctttatctaatgatgtaaagtctattatagaagatgcgataaataatcttgataaagttagtgttactgaagaagataaagaggaattagttgaaagcgcggcgattaatcttaataaattctacggtgaatttgttttaagatggaagaaattagaaagtttgttaatgttatttagtaagaatagctatcgtataaaaaataagaaatacccattaaaagcaatgtttcaagaattggtacaaaaacaatatttgacaatcaaggattatgatgagtttgataaattaaataatattagaaatatgatagttcatgaagctaattttgaattagatgaattccaattaaacttggcattgaaagatttagaaatattaattaacaaaattagtaatataagctcttcctttgattctttaaaaggatggtatgaaattataaaatatggtgatagttattctttttatctaaaaaatcatgaaggatttactttaattttcagtgaattatacatggataaggaagcggctttacaaggtcttgaaaaatttaagattagatctttaaatattaataattatataaagtttaaagttgacggtcttggtttttcatttaatttattatcagaaaatggttctattttagcaaaaagttcattttatactgattcagagcttagagatataaaaatagatgaaactataaaaatttcagaaacagatattattattgatcctccaaataatgatgaaacttatgcgctttcatcataa

SEQ ID NO: 51941 - DNA, 282 bp, Acinetobacter baumannii
gtgagtgaattagacccatttcgtaaaaccaaatctaaaacccagtgccaaattgatgacaatgaagcccgtgctgtgcagcgcttggttttagatttaatggggcagagcgaaatcatggacgaatggatggatgcgattattgatcgttacttccgcgggcagtcatggccggagatggtcagagaggatcgttcgcaatcagatgcacgtagtgatgtgaaatgtggcttggctgtgttgcattgtcggtatgggtttattgagataaaaaagtgttga

SEQ ID NO: 51942 - DNA, 180 bp, Acinetobacter baumannii
atgacagtaatgatcgataagaagcatgttatgcactcagtggactggtctcggttcgatctggaaggttggttatatcagttcggtgaatggctagatcaaaagagttttaccggtattccttctggcgcatatagcaatccaattgcctcagcgatggtgcaggccgagaagcaatga

SEQ ID NO: 51943 - DNA, 408 bp, Acinetobacter baumannii
atgtctagcatgagtttagctgaataccgtgaattatttccagtgaagacaaagaagcgccgttcagcaaagcaaggtaccagacagccaagtgaaggcgagacggtactggcaacacacttaaaagcttgcaagatcggttttgaacaggaatataaatttcatctaaaacggaaatggagagcagattttctgattaccggtacgaagattttggttgaggtggaaggggggatctggatagcaggtggtgggcgtcacacaagaggcaaaggctatataggggatatggagaaatacaactcggcggcaatgatgggttttacagttttacggttcagtacagaacaagttaagtcaggtttagcggttcagccgatagagaaaatggttgggggaaatgaatga

SEQ ID NO: 51944 - DNA, 132 bp, Acinetobacter baumannii
atgggaaccgtatctcaagcaagtcgggttcaaaggcacattgcagggggcaacatgacagacctctacgatgtcaacgtagcgctcttggatggtgagctctacgcttttgaaaggggcttgtatgtctag

SEQ ID NO: 51945 - DNA, 597 bp, Acinetobacter baumannii
atggctggcagaccaagagagtttgatcgagaagaagccctcgtaaaagcgagagattttttctggcttcacggctatgaaggcacatctatgtcagatttagttgaagttttggggattgcctcagctcgaatttataaagcgtttggctcaaaagaggccttgtttagagaggccgtaaatcactatgaaaacaacgaaggtaatttcgcgctaaatgctttaaagcaaaaaaatattaaggatgcaataaaccaattatttcaagatgcactagccctttacacgcaagccaaccattcgtatgggtgtatggttgtgtcggcagcgagtgtgttaggtgaagaaaaccaagctgttttggaatggatgaaagcacagcgtattgcacggggccaaagtctggtcgatcgatttgtccaggcaaaatcagacggacaattggtggcagaggcggaccctaaaaccttagggcaatattacgcgcttgttctgcatggattatcagttcaagcaagagatggatattcgaaagaagagttagcgacagtaatcaactttgctttacagaaccttgatcgatatttggcaacctaa

SEQ ID NO: 51946 - DNA, 1053 bp, Acinetobacter baumannii
atgaaaaccatcaaaggcccaagtattcatcttgctcaatttagtgatgatgttttcccttttaaccgtctagaagatattgctgcttgggtagcaaaccaaggctttgaagcggtacaacttcctgcttgggataagcgtttatttgatgtcaatttggcagcagaaagccaagattattgcgatgaaatattaggtactttaagcaatcatggcttaaaaattagtgagttaacgactcatatttttgggcaattaatggctgtacaccctgcttatgactcaatctgcgataactttgccccctctcatttacatggtaattcagcagctagaaccgtgtgggcaaaacaacaaatgctcgcttcaattcaggcatctgcccgcctagggcttaaagacatggggacattttctggctctttagcatggccttatgtatttccatttcctcaaagaccgtcagggcttattgaaacagcgtttgatgaattagcacgtcgttggcttccgattttgaatgcttgtgatgaacatgacgtaaacctttgctatgaaattcaccccggtgaagatttacatgatggcattacatttgaaatgtttttagagcgaactcataaccactctcgttgccatattctttttgacccaagccattttgttttgcaacaactgaactatctggaatatatcgatatctataaagatttcattcgcatgtttcatgttaaagatgccgaatttaacccaacaggccgccaaggaatgtatagcggctatcaaagctgggaaaatcgagcgggtcgattccgttctacgggtgatggtcaagttgactttaaagcgattttttcaaagttggcgcattacgactacgaaggctgggcaacgttggagtgggaatgctgcctaaaaaataaagacgatggcgcacgcgaaggtgccgagttcattaagcaaaacattattcatgtcaccgataaagtgtttgatgactttgcggctgcccctgtgaatcagactcaaattaatctgttattagggatttaa

SEQ ID NO: 51947 - DNA, 900 bp, Acinetobacter baumannii
atgaaaactcagctattcaatgaaaactcacataacgaattccaacatcattacattcacatcgaaagcaaaaaattacactacgtcaccttaggtgaaggtcctgcggtattattaattccgggctggccacaaacatggtacgcgtggcacaaagtcatgattgaactggcccaacagggttatcgagcaatcgcggttgatttacccggaacaggaaattcagctccactggatggaagttacgatacggggcgtattgccaaaattttatcaatgctcatgactcaacttgaatatccaacttattcggttgttggccacgatattggcatgtgggttgcctacgcacttgcatcggactttcctgagtcagtcactcgtcttgcggtcacagaggctgtgattcccggtttagcgcccgcacctcctatttttgttgagccgagtgaaaatatttttctttggcatttcatgtttaaccaaaccctagatttacccgaagccttaatcgcgggccgtgaagatacttatttaaattatatgtttgataaatggtcgtggcacaaagataaagttgcaactgaaacttatattgaagcctataaaattccgggtcgtttaacggcgggttttaattattaccgctctattccagagaccattcgtcaaaataaaatcagagaaactaaaaatttagatatgccagttttagccataggcgctgaacatgctacggataatgcgccgtatgaaaccatgaaaaaggtttcaccgcatttaactagtgcgattgtaaaagactgcggtcatttcattatggaagaacagccaaaaatatttagctcactcattttagaatttttgcagcaggaaaaaagccatgcctctacttgctga

SEQ ID NO: 51948 - DNA, 912 bp, Acinetobacter baumannii
atgcctctacttgctgaaattgaaaactggcttaagtccagacctaccccacaaggtataaactcattacaagcgttaagaaaacaagtagataaagacattattgatcagcaaggtattcagcatgatgcaagctatcaacaaagtttttatgttgctgtgtcagaggatgccgaaattgaagtacgtgtttatgttccctattcgctcgaaaatgttgagcaacggcctgctttagtttttgcacatggtggcggttggtgtctgggaagtctagatgcatggaaccgcacttgtcggttgttagcagaatatattcaacacgttgtattttctgtggactatcgcttggcgccagagtttaagttcccaacacccttaaatgatttttttacggcattacgctatattcatgagaatgcttcactatttggaattgactcaaaccgtatagctgtaggtggagatagtgcgggcgcaaatatagcgaccgctgcatgtctaatggcaaaacaacacccagaaattaaggtgagccatcaacttcttttctaccctgccttagatgccacaatgagtagcaaatcttatgaccaatatgccgaaggttatggtttagagtcatccacaatggtttattgctgggatcaatatgtgcaagatgaaagtgaaaaacagaatgaacttgtaagtccgttactcgctcagtctttaaatggactgccagatgcgaccatttttgtgtgtgaatatgacccggttcgagatgatggtgaaagatatgctcaaaaactgtgggatgcaggtattcaggtgaactttcatttgttagacggaatgattcacggtgcgattcacatgacagcaatcacctcagaagcaaaagcgatctatagtaaaattgcactataa

SEQ ID NO: 51949 - DNA, 246 bp, Acinetobacter baumannii
atgttaaatacacctttaggcatatttgatttttcgactgcacgctcaattgcctgcgctacgaaatctgctgtcgccatatgcccactatgcgcttttactaccaccgaacatccagccgctagtgccgaagcagtgtcaccgcccgcagttgagaatgctaaaggaaagttacttgctccaaacactgcaacagggccaacaccgattttaatctggcgtagatctggtcgaggtaaaggctga

SEQ ID NO: 51950 - DNA, 603 bp, Acinetobacter baumannii
atggtatgtgaacttgaagaaagacgaggttttataggagatgagaatgaactatttttatttggttgtgcattgtcatatagatcaataagtgcagctcgtgaagatggtggggaaaactctaaacaccctttaagcgatgactatattaatgcttccattaatatgtttatggactggattgaatctcccctgatcggtggaaaaagatggtatccatcaacacaccaatttagaagactatttgctgtagtgtattttaacttctcagatcaagttggattagatgagctatcttggttcatgggccactctaacctcgatcaaacattctattatgcagaagtgtcacctgatgatgaatggatcgacgaagctgaggctactattgcacggataggggcatcattaaacaagcatattaatggtgatgaagcagtgagaagcataattaacaaagccagacagtcaacaaatatttcaactgtgctagagacactggttcgtagattgattgacgaacataaagaaaaaacaggtcaacaagtccgtttctgtaagatcgatggaaacgaagttttcttttactttattaagccataa

SEQ ID NO: 51951 - DNA, 537 bp, Acinetobacter baumannii
atgtcaaagtttaagaagggggaaacttcaaaatcagttatcgataaaaagattgaaatatcctcatctataaagcgaaaaactgaactcataaataagatagaatgcttcgaagatatacctagcagcttggaaataaaaaataacaccatttcacaaacttcagttcataagtggaatgatagtgaacataatattatatcttattcttacaatacagctcatgctgcgcataacttaaaatatttaaacgatctaattgattcaattaaaaatgccaatcataggctttctaaactctcagaatcagaaaggaaggataaaggtaattccaccactagaatatcacaaaaggaagtgaacaaactaaaaattgaaaacgaggaattacgtgttgcattagcggaagtgtatagagcttatatgagtcttttagatcaatgtcgagaagataaggaaatcgatgcagcatatagaaagcttattctatctcaggctcaaatcctaggtagaaatcgactatggctggttaaataa

SEQ ID NO: 51952 - DNA, 1356 bp, Acinetobacter baumannii
atgtcttctgtagtcgttgcaaaagatcctaaccttaaatttctcaatactagtaggcgaatagaccaaaacaatgattgcccacttcccatgattttaaagaaaggtggtaagtttgattggaatgctaattcatttattactcattatggcggtggttcacaaacatataatattcgcccattagcaaaaaccgttcaaaaaaaagcatatagtttaaatttgttctgtgatttccttgaagataattctataaatctgagcgagattaatgatagcactctttatcaatatattaaggagtcaaaagataggaatattaaagacggtactattattcaacatggaaggactgcaattgagtatatagattatctcagtaaaatgtatccagaatggaaactaggcactacagggaaagatccagataaaatattcagcgtgcattatgaaaaacttaaattcaagaaaggaagtataacaggtgaatatttttatcatgaatcacttgttggactaattaacattgcctctgaagttgaatacgtgcatgatcacgagttagttatgtggctagatgccatcaactgcacaaccaaccatccaagaataaatacattcctcataagcaggtgggaagccttaaccacattactagatgttacaggctctagaataagtgaagctcacgagataacccgaactatgataaaagaggcagcggattcattactcatcagtgacaagcagccaataatccgaaatattcccataaggaaaggaaaatacaaaggtaaaactcgatcagtgaggactacccatgaggatattcaagttattcttttatacgtccatgtaattgaagatatgtttcctgatatgaagcatgatgctctttttgtcgattcagtcacaggaaaaccattgaaatctacttatttaaaaaattatgcaaaaaaggttattaacggtagtaagtattgtgaggctctgaggcacctaaccaatcattcttttcgccatagatttattacccttaatatagctaaagcaattaagaaaatatcagcacaaggtagcttttcaagtattctgagtgttgcttcaaatgcatgccgtaaagttaccatgcacgcaaacaatgaatctttatcacattatgtgcatctagccactgaatataatgaaaaaaacgatcaagcagatatagatatgagcaatgtttctcctcaaattagaattcgtgtaaagaaaatgatctcaattgcaaatttgttccgcttaaaggaaataaacgaagctgaagctttagattctcttctttcaacgatagatggatttaagaagttcacataa

SEQ ID NO: 51953 - DNA, 3117 bp, Acinetobacter baumannii
atgactagcacaacaaagccgattgcagaatcaaataattttattgtcttagacaaatacacaaagcaaacgcagataagtgaaagttaccagagcgaaggtgatttagaacgtgagctgattcaggacctaagtaaccagggctatgaatatttacctgctctgacgacacccgatgccatgatggctaatgtgcgcaagcagcttcaagctctcaataaggtccagtttactgatggtgagtgggctcgcttttgcgagcaatacctgagcacacccagcgacaatattctcgacaaaacccgcaaggtgcacagtgactatatcttcgattttgtcttcgatgatggccatatagaaaatatctacctattcgacaagaagaccattgctcgtaacaaagtgcaggtcattaagcagtttgaacaaacgggaagccatgccaaccgttatgatgtgacgattttggtcaatggtttgcctttagtacaaattgaactgaaaaagcgtggtgtggctatccgtgaggcgtttaaccaaatacatcgctacagcaaagaaagttttaatgcagagaactcgttgtacaagttcttgcagctgtttgtgatctctaatggcaccgacacgcgctactttgccaataccactaagcgagacaaaaacagcttcgacttcacgatgaactgggcgaagtcagacaatacgctgatcaaggatttaaaagactttaccgccactttttttcagaaagagacgctacttgaagtgatcttgcgttactcggtgtttgacgtcagcaatactttgctggtaatgcgcccctaccagattgccgctacagagcgcattttatggaagattaagagcgcgtttaacgctaagaattggagcaacatcgagagcggcggatacatttggcacaccacgggttcaggcaaaacactcaccagctttaaagcggcacgtttggccaccgatttagactgtatcgataaagtcttctttgtggtggacagaaaagacctcgactatcagacgatgaaagagtatcagcggttctcacctgatagtgtgaacggttcagacagtaccgcagggcttaagagtaacctagataaagacgataacaagattgtcgttaccactatccaaaagctcaacaacttaatcaaaagcgaaagcgatttagctatctacaacaagcaagttgtctttatttttgatgagtgtcatcgaagccagttcggtgaagcgcagaaaaacctgaagaagaaattcaaaaagtactaccagtttggctttaccggtacgccaattttccctgaaaacgccttgggtgctgaaaccactggcagcgtgtttggccagcagttgcacacttatgtgatcactgatgccattcgtgatgaaaaagtactcaagttcaaagtggactataatgatgttcgtccgcaatttaagagcattgagactgagcaggatgaaaagaagcttagtgccgcagagaacaagaaagcgttcttacatccaatgcgcattcgtgaaatctcgcagtatattctgagccattttaaccagaaaacgcatcgagcctattctggcgccaaagggtttaacgccatgtttgcggtcagtagtgttgatgcggcgaaagcgtactacgaaacatttaaaatattgcaggccgaggctgagaatggacccacgagtaaacctctacgcattgcgactattttctcatttgctgccaatgaagagcaggacgctattggtgatattttagatgagagctttgaagttagcgcgatgaacagcagcgcgaaagagtttttgagcgccgcgattagcgattacaacgccatgtttaaatctaactatggcgtggacagtaatggctttcagaactactaccgagaccttgcccagcgagtgaagaatcaagaagttgatctgcttatcgtggtcggtatgtttttaacgggctttgatgcgcctacgcttaataccttgtttgttgataaaaatttgcgttatcacggtttgatgcaggcgttttctcgaactaaccgcatttatgatgcaacgaagacctttggcaatattgttaccttccgggacttagagcaggcaaccattgatgccatcaccttgtttggtgacaaaaacaccaaaaacgtggtgttggagaagagctacaaagaatacatggaaggttttaacgatattgctaccggccaggcgcgtcgaggttttgttgatatcgtaaaagagctgcaagaacgctttccaaacccagaaaatattgaaaaagaacaagataaaaaagagtttgccaaactgtttggtgaatacctaaaggcagaaaatattttacaaaactacgatgagtttgctggattaaaagcactgcaaagcttagataccagtgatggacaagctgttgaagagttcaagtcaaagtactatctggacgatgctgacatcgaggcaatgcaaactatcgatatgccgagcgaacgtgctatccaagattatcgctctacttacaatgatatccgtgactggttgcgacgcgataaagaaggtcaggacaaagataagtcaacggtagactgggacgatgtggtctttgaaattgatttgcttaaatctcaagaaataaacctcgattacattcttgaactgatttttgatcacaataaaaagaacaagagcaaagaaggcttgattgaagaagttcgtcgtatgatccgcggtagccttggtaatagagcgaaagagagcttagtggttgattttattaaccagacaaacctagatgagatcaatgacaaagccagcattatcgacgctttcttcaaattcgcccaggtggagcagaagcgcgaagccgatgctattattgcctctgaaaagctcaatatcgatgctgccaaacgctatattgcgtcatcactcaagcgtgagtacgcctctgaaaatggcactgctcttaatgaagcgctgcccaaactcagccccttgaatccgcagtaccgaacccagaagcaaacggtttttcagaaaatcgccgcttttgttgaaaaattcaaaggtgtgggtgggcagatatag

SEQ ID NO: 51954 - DNA, 1131 bp, Acinetobacter baumannii
atgagtaaaacgctaacggaaatagcagagttgttgcaagcatccgacaaaaaagtgcagttaatctatgcctttaatggtacaggtaaaacacgtttgtcgcgtgaatttaaagagatcatcgcgccaaaggaagatggacaagatgcgcttattgatgcagagcaagcaccactgtcgcgccacaagattttgtattacaacgcgtttacggaagacttgttttactgggataacgatttagatgcagatgcccagccgaagctaaaaatccaacccaatacgtttaccgattggatattaaaagtacaaggtcaagagcctaatatcaccaggttgtttcagcgttatagcaacgagaagttgacgcctcattttaatgaagactttactcaagtaacgttttcatttgagcgaggaaatgcggaaagagcacagcatgtaaaaatatctaagggcgaagaaagtaattttgtctggagtatttttcatgggcttctagagcaagttgttagagtcatgaataatcctgatgaagaggatgatgagagcttcaatcagctagaatatgtgttcattgatgaccccgtcagctcattagatgaaaaccatttaattgaacttgcagttaatttggcggaactaatcaagttaagcaaatctgagaagcttaaatttatcatatcgacacataatccgttattttacaatgtgttgcacaatgagcttaatgcgaaaatctgttacttgttgcaacgttttgaagacggaacctttgatttaaaagaaaaaaaaggtggcgcgaataccagtttttcttatcacttgtatatcaagcaattgattgaacaagctatcacgaacaatgaaatacagcgttttcacttcaatttactgcgcaacctttatgagaaagtcgcagcatttttggggtacgcagactggacagcgctattaccagagagccgcgagctatacgccaaacgagtgatgcacttttatagtcatcgttcattatcaaacgaagaagttgcagaacctaccgaacctgagaagcagattgttaagtttctacttgaacatctattaaataactatggttttaaactgcaaggagcacagaatgactag

SEQ ID NO: 51955 - DNA, 1266 bp, Acinetobacter baumannii
atgaaccattttagctatgtagagaaactactcgatggtgttgaagtggtttggtttccgatcagcgaagttactgagcgaactacgaatataaagtggcgtgaaacttctgaaagccatcagtatattgatctaacttcagtcaacgttgatacaaaaaaaataatagaaacaacagaggtaaaagctagcaatgcgcccagccgtgctcaaaagcttgtaaaaaaagacgatgtattatttgcaacaactcgtccaacacaaatgcgctattgcttaattgatgaggaatatgatggagcagtcgcgagcactggatattgtgtattgcgagtgaaaagggatgtgattctacctaagtggattttgcatttgatttcctcaagtgattttaaaaagtaccttgaagagaatcagagtggatctgcatatccagctatttctgatgcgaaagtcaaagactttagtatccctatcccatgcccagataacccagaaaaatcactggcaatacaagctgaaatagtgcgtattctggacgcatttaccgctatgaccgccgagctgaccgccgagctgaccgccgagcttaacattcggaaaaaacaatacaattactaccgagaccagttgttgagttttgaagaaggtgacgttgagtggaagaatctagaggatgtcgcttcatttaggcgtggctcatttcctcagccatatggaaacagcgagtggtatgacggagagggctgcatgcctttcgttcaggttgctgatgttgctgatttcggctttacactgcatcaaacgacgaagcagaagatttccaaacttgcacagccaaaaagcattttcgttgaaaaaggcacggttgtcgtttctctgcaaggtactattggacgcgttgctatcacccaatacgacagttacgtggatagaactttagcaatatttaccagctacaaagaagatataaataaaaaatattttgcacatcagctaaaagcaaaatttgatttagaaaaagagtttgcaagaggaagcactttgaagactatcacgaagcaagagttttcaaagttccagatacctattccaccaattgaagaacaaaaccgcattgtggctcttttggataagttcgatactttgactcattcaattaaacaaggattgccccgcgaaatcgagctgcgccaaaagcaatacgagtattatcgtgacctgttgttgagcttcccgaaatctcattcagatgaggcagcttaa

SEQ ID NO: 51956 - DNA, 1374 bp, Acinetobacter baumannii
atgtctgacgatgatgaaaacatcaagtttgctaaagaagatgccattaaaaccaagggctattttctttaccctagccagttgtttagcaatgtggcggctaatgcacacaaaaacgaaaatttaaatacggatttggccgctatttttgctgcaatcgaaaactcagccaatggctacgattcagaaaaagacatcaaaggcttgtttgcggattttgatacgaccagtaatcgtctgggtaatacggtagaggcaaaaaacaaacgcttggcagccgtgttaaaaggcgtggcaggtttaaccttcggtaattttgaagacaaccaaattgatttattcggtgatgcctacgagttcctgatttcaaactatgccgccaatgcgggtaaatcaggtggtgaatttttcacccctcagcacgtttcaaaattgatcgcgcagttggccatgcacggccaaaccagtgtcaataaaatctatgaccctgcggcgggttcgggctcgttgctgttacaagctaaaaagcacttcgatgcgcatatcattgaagatggcttttttggccaagagctcaaccacaccacctacaacttagcgcgtatgaacatgtttttgcataacattaactacgacaagtttaatattcagttgggtgataccttaaccgaaccgcactttttagatgacaaaccgtttgatgccattgtctcaaacccgccttattcggtgaaatggattggtagcgacgacccaacccttatcaacgatgaccggtttgcgcccgctggcgtattggcacccaaatcaaaagccgattttgcctttgtgcttcatgcactgagttacctatcaagcaaaggtcgtgcagccattgtttgcttccccggtattttttaccgtggcggtgctgagcaaaagattcgccaataccttgtagataataactatgtggaaacggtaatttcactggcacctaacctgttctttggcaccaccatttccgtgaatattttagttctgtctaagcacaaaactgacaccaccacccagtttatcgatgccagcggtttgtttaaaaaagaaaccaataacaacgtactgactgagcagcacattgaagacatcatgaaagtgtttgccagcaaagagaacgtggatcattttgctaaatcggttgaattggaaatcatagcaggcaatagctacaacctttcggtgagcagttatgtagagtccgaagatactcgtgagttagtagacataaataagctcaatgctgagcttaaaattaccgttgcgaaaatagaccgacttcgcagtgatattgatgccatagttgcggaaattgacggtgaggaggttgaggcatga

SEQ ID NO: 51957 - DNA, 1944 bp, Acinetobacter baumannii
atgtctaactataaatttaacgacaaccaaatcgccattattgaaaagctcgagcttaatttaagtatagacgatgtagagaaactctttttttcaaataatcacagttgggaagagttggaaatattgcttaaagttgctaatgctctttacagatccggttatccgattattgaagataagcagtatgatgaatatcttaactacttcaaaactcttgatccagagaacccattcttattaagtgtagagcctgaagttttaatcgatagtaagactgttccacttccaaagaaaatgctttctaccgataaagcatattctttggaagaaattaaaaaatggacggaaaggattactaaagccgcttcagaaattgaatttgatcaaaatttgattgagattaaggttacaccaaaacttgatggttatgctgcttatgatgatggtacaactctctacacccgaggtgatgggacaagaggtcaagatattactcgtgcatttgaacgaggacttaaagtagcaaaaaatgcaggaagaggtttaggccctggcgaaatcgtaatcaagaaaagttactttaatagggtgttgatagaaaagtttgaaaactcacgcaatatccaagcagcaattatcgctgaaaagaaagttgatgaagatgtccaaaaggcaattgataaaggtgtctgtgtcttctaccctttttcactattagataactggacgggaagtattgaagagttattgtcaaactttgagagtattcttgaaagtatgtggaactcagttgattttgatattgatggattagtcttagaaactacaaatgcaccgatcaaagagcatatgggctctacgagaaagtttcataggtggcaaattgcttttaaagtgaacgatgaatcggctgaagttgaagtattaaaagttgttcctcagacctcaaggactggtcgagtttcaccagtagctgaattggttccgacaaaacttagtggggctactttaagcagagtaactgttcaccactatcatatggtgaagacaaatggagttggtcctggcgcaatcattaagctagtcagaagtggcttagttattccaaaaattgaacaagttattaaaccagcagagccagaattacctgaaaattgtcctagttgtggtgctcatcttatttgggaaggcgatcatttgatatgcccgaataagtcagactgtccagcccaaaccgaaaatacactgattcatttttttaaaacattgggtaatgtagatggctttgggccaaaggtgattgaaaaaataaccaatcaaggtattaagcatatccacgaaatctatcagattcctaagcatcaatttgtagagtttggatttggagataaaacgtcacagaatcttattgatcaactccaagcaagtagacagattgaaatagaggattggaggtttcttgctgcatttggagttacccgattagctggcggaaactgtgaaagattacttcagcatcatgccattgctgaagtttttgaaatatcggtcgaggacttggttaaaatagatgggtttgcacaattaagtgcagaagctattgttgaaggtctagcaaatgtgaaagaagagttttttaaagtatataacctaggtttcaatttaagtattacgtccaaggagtctgatagagagcgttcagattctcctatagctggatcacttattgtatttactggttcgatgcaacaaggttcccgtagcgatatggaaaagcatgcgaaagcacttggggctaacgtggctaaatcggttactggtaaaactacctatctagtaactggcgacaaggtcggtgaaactaagattattgcagctcgtgataaaggcgttaaagtattgactgaacaggaataccttaaattaattggggaactttag

SEQ ID NO: 51958 - DNA, 243 bp, Acinetobacter baumannii
atgaatttaaaacttaccttagctgctttattaattgttccagtgatgttgactgcttgtgcgaaaaaagaagagtcttctaaagcaggacaagatgcagcatctacagcagtttctgataaagtaactcctgaacagcaagctacaattgattcgcttgataagccagttttagatgaaaagaatacagatgtggttgaaggtagtgcgtctagcgagtcggctgcttcagaaactcattaa

SEQ ID NO: 51959 - DNA, 1038 bp, Acinetobacter baumannii
atggcactcatttcaatgcgccagctcttggatcacgctgcggaacataactacggcgtaccagcatttaacgtaaataacttagaacaaatgcgtgcaattatgcttgccgcagatgcaaccaattcacctgtaattgttcaggcatcagctggagctcgcaaatatgcaggcgctccattcttacgccatcttattttggctgcaatcgaagagtggccgcacattccagtggtaatgcaccaagaccatggtactagccctgatgtatgccaacgctctattcaacttggttttagctcagtgatgatggatggttcattaggtgctgatggtaaaacccctacaacttacgattacaacgtagatgtaactcgtcaagtcgtagcaatggctcatgcttgtggcgtgtctgttgaaggcgaaatcggttgcttaggtagccttgagacaggtatggctggagaagaggatggtgttggtgcagaaggtgtactcgatcattctcaacttttaacttctgttgatgaagcgaagcaattcgttgctgacacaaatgttgatgccttagcaattgctgtaggtacttcacatggtgcttataaatttacacgtccacctacaggtgacattctagcaattgatcgcattaaagaaattcatgcggcgttgccaaatactcatcttgtaatgcacggttcaagctctgtaccacaagaatggttaaaagtaattaatgagtttggcggcaatatcggcgagacttatggtgtgccagttgagcagcttgtagaagcaattaaacacggtgtacgtaaaatcaatattgatactgacttacgcttagcttcaacaggtgcaattcgtcgtttcatggcagagaatccagctgaatttgatccacgcaagtacttcgctaaaactgtcgattcaatgaaacaaatttgtatcgatcgttatgaagcctttggtacagcaggtaatgctgacaagatccgtccaatttcattagagaaaatggtagatcgttataaataa

SEQ ID NO: 51960 - DNA, 1014 bp, Acinetobacter baumannii
atgaatacacaacgtgaacaattgatacatacatggcttacatctgttcttgaaaatgatcaatttcagatcgcttatttggcaggggatgccagctttcgccgttatgctcgcatccagttacaaaataaaacttatatgcttatggatgcgcctcctgaaaaagaagactgtgttccgtttgtaaccattgacgaattttttgcaggtcatggggttcgcgtgcctcagattgttgcaaaagatttaactcaaggttttctattgctagaagattttggtgatgtactgttgtcgacattattaaatgatgcaacagttgatcaatattacgaacaaagctttaaacagctcactcatttgcaatcaattaatggtattgatcatttcccagcttattcttatgaaaagcttatgtctgaaatgcagttgctaacagattggatgttgccatcacttggaatacatccaatggctgagcaaaagaaaactattgatgatgcatttgatttcttagccaatgctgcattggctcaaccgcaagttattgtgcatcgtgattttcatagtcgtaatttaatgaaaattactaatgaagaagaattgggggtaatcgactttcaagatgcggttattggtgccgacacttatgatttaatctcgattacacgtgatgcgtatgtacagtggaatgctgagcgtgtttatcaatggtttaaagttttctatgagcttttaccagcatctgctaaacaaaaccgaacttttgagcaatttaaacgtgatgccgatttaatggcaattcaacgtcatatcaagattttgggcatttttgttcgtctgtttgagcgagatggtaagtctggatatttaaaagacttgccgcgagtcatgtggtatttacttgaagagagtcgtggttatcatgagcttgatgacttcatgacgtttattcgtaactcagtcatgcctaagtttatagaaaaatatggcccctatgaggtagcagcataa

SEQ ID NO: 51961 - DNA, 330 bp, Acinetobacter baumannii
atgaaaaaactaacaacagcaattgttctttcaatgagtggtttaatcgcaacaacagcaatggctgctccaaatgaccatgatcgtcatggtaattacccaaaccatgaagtaaaaacagttaaagtgattaaaaaagacgaccatcgcaatgactggcgagcaggtcaagttgtaccccgtgaatatcagcacccacgttatgcagttgactaccgctcacaccagaaactgaccaagccagggcgttttcaaaaatggtataaagtgaatggtaactatgtactggtaaatgaacaaagccataaaatcattaaagtgattcgttaa

SEQ ID NO: 51962 - DNA, 462 bp, Acinetobacter baumannii
atgaatagatcaaaattaattttattatttttaagtattagtactttttcttcttcggtattttctgaaacgattacttccccaattaaacaagaattttatgaccaagaatcgaatcgccatagaagtatgcttgagctaagtaacacttcaagtcataagtttaatgaatcacaacacaattcttttcactgcgattccaataagcaaagagtagatttttttgaaattgccaaacaatatcaagatgagaaaccaaaaaatacctactcgcattttgctgacccgacagtgaacatgagcgatcatgatcgaagtctctattacattaaaaatcatgatgatataagccttaaaagggatattcgtattcaacaatatagatcattaaaacagcaatacgataaaggagtcatttccaatgatgaatacaaagagaaagtttataaaattttaaaataa

SEQ ID NO: 51963 - DNA, 432 bp, Acinetobacter baumannii
atgagctggaaatttttaacattttctgttttttttactgatatttttttattgtttttaatgttctatcttggctatgacttcgaaacttttaaaaaagtagctttagctgaaactttactagttattattgccctaatatttgattccatggaacaaaagaagaaacctatttttcctggttgtatcgtctatccattgttgggcattttattcattttaggatttacacctattcttgatttttttgcagaacgaccaaaaggattccatagttgggatattaaaaatatgtggatgattaatgtgaatgaaggaaattatcaattaaatagacttgcttggtatggtaaagcttatgtacaactgggctttgcaatggtagggggaattttaggattcatttttcatttagtctttagaaatacttaa

SEQ ID NO: 51964 - DNA, 1326 bp, Acinetobacter baumannii
atgtcattgatcgcaaataccaccgttgtgcgtggtcgttttttagatattcaacaaactgtctctgagccaactgatattccaaatcaagtgcgttatctagaagatggtgtattgattagtgaacatggaaaaatcaaatggtttggtgcatgggaagacgctcaacagcatcttcctgctggagttgaggttcaacattacctagaacaattgattgtacccggctttattgatacccatattcattttccgcaaaccgaaatggtgggagcttacggcgagcaacttttaagctggcttaatacatatacatttccaaccgaaatccagtttcaagataaagcatacgcaagtgaaattgcccagttctttgttcaagagctattaaaacacggtacaaccacggccctcgttttctgtacagttcatcctgagtctgtggatgccttatttgaagccgcagagcacgttcagatgcgtttaatcgccggtaaggtactcatggaccgtaatgcccctgaagcgctgtgtgacacaccagaaacggcttacagcgacactaaaacactcattgaaaaatggcatggtaaaggccgtgctctatatgcaattacgccacgttttgcaccaacatctacacctgaacagttagaaagagcagggcagttaaaacaagagtttccggatgtttatgtacatacacatttaagtgaaaacaaagatgaaattgcttgggtgaaatctttatttccagaacaagcgggctatttagatgtttatcaacattatggcctaactggtaaacgttctgtatttgcacattgtgttcacttagaagatcaagaatggcaatgtatgcatgatacacaatcagctatcgcattttgtccaacctcaaacctcttcttaggcagtggtttattcccattgaaaaagacatgggaaaaacaagtgaaagtaggtttagggacagatatcggtgcgggtacatcatttagtttgctacaaactgttaacgaggcttataaggttcagcagttacaaggtgataaactttcagcttatgaagcgctttatcatgccacgctaggcggagcaaaagcacttgatctacaagatcagttaggcaacttcaacgtcggtaaagaagcagactttgtggtactaaacttaaagccaacagcactccagcaacttcgccagtctaaatctaagactgttgaagattcactgtttgcattattcactttaggtgatgaccgtaatattgaggcgacttatgtttatggaaaacgtgcttatcaaaaagaaacagcccagtaa

SEQ ID NO: 51965 - DNA, 156 bp, Acinetobacter baumannii
atgtttatggaaaacgtgcttatcaaaaagaaacagcccagtaaaaaaggcattgttaagtttttgttattatttggaatatgtgctgttgcgttaaagcgtgatcgacatatccagcaaaatgataaaatttcagctccttcaaagggtgcatga

SEQ ID NO: 51966 - DNA, 1008 bp, Acinetobacter baumannii
atgaaaaaaatcgtacttgctatggctgccgcttctgttgttggtttttctgcttcagcacaagcagcgagtaccgtgtgtgtattcgacctcttaggaaaagcaggcgactcatataaaatgatggaagaatgggctctagctgcaaaaggctggggtactgaaattaacttagttcctcgtcaggacgaggctgttgcagataatgattttaaagctggtaaatgtgatgctgtagcaatgactgctatgcgtgcacgccaatataataaattcgcaggatcaatcgactcgcttggtggtgttcctaacaaccaaatcgcacagcgtgctattacctatgtattagatgcacgtaatgctgcaaaaatgacaactaaccttggtggtaaaaaatacgaagttgctggtatctctccactaggttcagcatttattttcgtacgtgacaaaaacatcaactctgttgaaaaagctgcgggtaaaaaattcgccgtattaggatatgacgatgcacaaaaaattatggtgcagcgtgtaggtgctcaggcagttctttctgatatttcaaactttgctgctaaatttaacaatggtcaggtagatatggtaggtgcgcctgcttatgcatacaaaccattagaactaaacaaaggtttaggtgcaaacggtgtaatgtggaacttcccagttttacacgtaactgctgaccttgtattacgtgcagataaattcccagcgggctttggtcaaaaatctcgtgattggttcgtaaaacaattacctaaaaactttgcaatgattaaccgcctagaagcacagattccgggtaaatacaaaatgaacctaagtgctgaagacaaacttaagtaccaaaaaatgttacgtgatggtcgtatggacttaacgaaacgtggtatttacgatgccggtatgatgtctgtattgaaaaaagcacgttgttctgtagacaaagctaactttgaatgttcaatggctggtgaataa

SEQ ID NO: 51967 - DNA, 309 bp, Acinetobacter baumannii
atgactgaacaacaaattgaaatattcgaaactgaatttataaaagaaaatagattaacaacggcgttaaattggtatcgaggatttttctgggataaagcccggaattcgcttaaagccatagatgttccaacgttgtttatttggggtaagcatgatattgccgttacagaaaaaagtgcggagctaaactcacattattttaaaaatagttatgacgcagtttttatggatgcatcgcattggattccatatcaaaatgcacaagaactcgtgcaatattttttagaatctgtgcgtgaagagtaa

SEQ ID NO: 51968 - DNA, 873 bp, Acinetobacter baumannii
atgaaaaagctgatcagtctttttttaagtatgtcagtagtattattgacagcatgtggtaaacaagaaagtactccacaatccgaacaaaacaatgatagttctaaagtacaaaaggtagtgattgcctctacaggttcggatgctgatatttggcgttatattgcaactctacctgaaactcaagctgctggtttgaagttagaagtaaaaaacttcacagactacgtttcaatgaatacagcgattgcaaataaagaagtagatttgaacgcgttccagtcttattcttatcttgttgcatttaacaactcaaacccagataagattgcggcagtttctaccacttatcttgagccaatgggtatttattcaagtaaatacaaaaaagttgaagagcttccagaaggtgcaattattgcaatcccaaatgatgctgccaacgaagcccgtgctttactgctattacaaactgctggcttaatcaaacttaaagctgactttaaccctgctcaaggtagtccaattgatgttatcgaaaatcctaaaaagatcgatatcaaaccaattcaaatggctactgcaatgcgtcttaaagacgaagttgatgccgttgcattaggtaacaccctagcaatggaaggtggtttaaacgtcctcaaagattctattttctttgaacctgttgaccaaagtacaaaactcaatgttaacgttttagcaactgctgaatcacgtaaaaatgatcctgttctgcaaaaagttggtaagctttaccacactccagctgttaaaaaatacgttgaagaacactttggtggaacaaaagttgacgtagatcaaccaatcagctatctctcagaagctaaatag

SEQ ID NO: 51969 - DNA, 303 bp, Acinetobacter baumannii
atgaaaacgaccatgttaaaaatcttaactgcatctctcctttgtttttcaggcgtaacgttgacccacgctgcgactaatcataatgccaaatcgactcatactactaaatcgagtcatactgctaaaacaagcaagcatgctgcagagtcaggtacatcagtaacgcaaaaagaactgagagcttgtgctaaaaagcgtcagggtgattgggtttcttacagccataatggtgcaaccttcaatggtacttgccaaccaaacgaaaatggcaaactacaatttaaggcccctgctccctaa

SEQ ID NO: 51970 - DNA, 597 bp, Acinetobacter baumannii
atggttttactcaattcgagtgcacaccacatttattggttgggccgttatttaatgcggattaaatttgctgtatcacatttaccatttaccgatgatgaaaaagcaactcaatttgcagcggcatttggactggtcattgagcaagcagaattactgaactgctatatgttggatacgaaacaaacatattcattactgaaccagttcatgattgctaaagataatattcaagaattaagagggatactatcttctagcgcttatgccgaactgaatcatgcgattaagtcacttcaagctcatcctgattcattaaataaagctttagctcaatgtaatcaaatacttgattctgaaaatgaagatatagccttatttctgaatttaggaaagaaagtagagcaattagatatacaactacgttttcagcaagaccttacgggacttttacaggagctagaaaaattgcttcaacggctgaatgacttaggatgggagaagctaaatcaatcttggcaattattaaaagatcatccgtcttgggatgcttattataattttactcagcagctagaatacatgttcgaggtatga

SEQ ID NO: 51971 - DNA, 825 bp, Acinetobacter baumannii
atgaatggtaatgagtctactttaattaaacaagattttcctgtttcttggatgtataagtcaggcaatgttgaatatttatctattccatatattcatggtgacatttgtatctttggactgcctttaagtgaggttgataatgaattcacggtaacagactttcccaaaaaaactcgaacaatttattcactttgttctactaaatttcatccttatcttaaccgtatgatcgaattagagttaaatgaaaaagtagaatttatgttgataggtttacagcatgaatatattgattttaataagagtttttttgatgactttagtgaaatgagcaaagctttaagtaaaaaatactttcctaaattaaaagtgttcaaatatggatttgatgaactctatgttaatgagtgcagaatatatcctaatttaggtgacatcacagaaattatagagaaaatgcccgctttagagatattagagattaatggagcatttgaattaacaaagcctttaaatttcaaatatttaaaatcattgtctatagaggtggatttaggtattgaagactgcaacgatgttatggcaattagccaaacgacccttgattttataatgagttcaaaaattagtgaactagaaaattttgaactcattattaataataatgacttgaaatataatctaaatttagaactttttaaaagtttagacttagataaattaaacaaagtttctatatctggaagctttcaaaaagatttagaagttgaaatctataatttattgagtagcaaagttaaaaatatacggattaataattga

SEQ ID NO: 51972 - DNA, 1074 bp, Acinetobacter baumannii
atgaataccgttcaaccagcaaagccgataaatatgatgcagcaattaatgagtaaattaggtgtaattggcctaatggtttgtgtaacaggtgtatcttcagctcaagaaataaaatcaggagagtctgtcatgggctatcaaaatcaagcagcttggcaacaaattgaacaattccttcctcaagaatttcatattcctaaagaccagttaccaaaagaagagtggtggtcttggaatggtcataacatccatttggatacttaccgtaatcccaatgccaaaattaaagtgattttatttcacggcgtggggaccaacggtcgacaaatgtcgatgattttaggaaaaccattggctgatcgaggttatgaaacaattgctgtcgatatgcccggctatggtgtcactcaagttaaaaagggtaagccgattagttataacgattgggtacaagctggtagcgatttaattgatatggaattagccaaagataatcgtccagttgtactgtatggcttaagtgctggtggtatgttgacttaccatgttgctgccaaaaataaaaaggttaaagctatagtgggaatgaccttccttgatacaagcaatcaaaaagtgaaagatactgtagcaagcaatttgtttatgagtcgggtaggaacgccaattacacatttaagtgctaagacgccgttagcagctatgcgtgttccgatgagttgggcaagtaaaatgagtactttggtgaataataaagctgccttaaaagcttttatgaaagatagaacttcggcgggtaactcggtttctttgacctttttagattcatatatacattataaacctgaggttgcacctgaagactttgacgtatgtcctgtcttattgacccaacctgaaaaagaccgttggacaccacttgatttaagtacgccttttcttagccgcattcataaagtgccggtaaaaactgtgatattggaaaatgcaggccactatccattagagcaaccggggttatctcaaatggttgatgcaatagatagtttttacacgacgacagtgaaataa

SEQ ID NO: 51973 - DNA, 1032 bp, Acinetobacter baumannii
atgttagagtttcaagattatttacgagctccatctagcgtacagctattattagaactaggtgatcaattaaaaattcaaagaacacatctgttagccggtactggtttaaccctgactcgtttaaatgatactaacagtgttgttacacccgatgaagaactgggtgttatcaataatttaattaaaattttatctgcgcacaccgcaggtttaggtctcattactggttttaaccaccaactgacaacttatgggattttgggttacgcattaatgagtagtgcaacaggtttagaggcaatgcaacttgtgcaacattatctggccctcacctatacctttgttaaaataaattttcagcaaaaaaataatgagtgcatgatttgctttactgaacctgtgggcctaacacaggagttacaacggtttgtacttgaacgtgcgatggctgcaactcttcgtgttattagcgatatttatgaaggttcatttcaattagatgcatttcatcttaaatatggtgagcctgagtcttgtttgttaaatatacctaaagaatatttaggcgctccaattcaatttaatcaaaaagaaaacattttaaaatttaatagttcgcaattgctccacgctctaccccatgcaaacccgaataccgctgccatgtgtgaaaggctgtgtatggaacttattagccaacgccatacctccttaacaaccacaatgattgtccgtgattttttaatgaacgctccttctggcacattacttaatattaaagaaatttcacataagttaaatatgagcgaacggacgctaaaaagaaggttacaagacgagaatatctcttttagagcacttcaaaatgaaacgttgcatcgacgcgccgattcccttttagcgcaaaatctaaatttaagccaagtggcagaaatattaggcttctcagatttatctactttttctcaagcttataaacgttggactggcgttgctccaagtcactataaaaagcaaatgattaaataa

SEQ ID NO: 51974 - DNA, 198 bp, Acinetobacter baumannii
atgtgccagtttctagatgtctggtctgctaacccttcttcattctatcactctaattattttctagagattaaactttatattcatctatatctgagtttacctttaataaattttaacctaatcaaaattttgttttttaattgttataactacattctatataccaatattcaattaaatttaaaatctaactga

SEQ ID NO: 51975 - DNA, 498 bp, Acinetobacter baumannii
atgacattaaagactttatatattgagctttattatggagaatattcagctcaaaaagggatagaaaagattaataaatacattgaaaaaaacgaagatactcacgtagatttttttaccgaattattacagccatttaatgattataattctttattactgcgaatcataaaattaacagaccctaatttttcatataattgtattgaagcagaaatattagcagctcgattttttttagatattttaaataattatcaagaaaacaatctaagtccagttcagctatgtacaattttcagtaatttagaaacaggttttatgggcgcttcaagaaatcttccagacaatataatttattaccctacttggctcgaatctttctacgatgcttgcgattggtgtgatgaaacatggactttagagaattctcctcacctaattgaagccacaaaacaacaaattcacattatagaaaaatggctattcttcaaatag

SEQ ID NO: 51976 - DNA, 180 bp, Acinetobacter baumannii
atgttgacatgtcgacaagccactcaacttttgtctgagaaacaagatagacctttgtttttacgtgagcaaagtagtttgcaattacatttattggcatgccgatcatgccgtcgttatgcaaaacagatcaaaacaattagtcagctttctaaagcatttaaaaatttggatggctaa

SEQ ID NO: 51977 - DNA, 621 bp, Acinetobacter baumannii
atgacttcggccgcggcatcacatcatgacgacctaggggatcaactgcatagcccagcgtttttacaagatttaaggcagcaaatgattaaatttgcttttttacagttgtcctcacttccgcaagctgaagatgtggtgcaagaagcattaacgagcgcttttcaacatttagattcatttaaagggcgagctgcgttcaaaacatgggtattttctattttaaaaaataaaattattgatgtacttcggcaaaagtcgcgcttggttgccatgtctgaattatttaaagacgaagaaagtgaactcagtgttgatgaattatttgatgcttcaggacactggcataaatatgaagcacctcaagcatggcaaagccctgaagaaatgatagagcagtcagatttttggataatttttgaagcttgcttagatcatttaccagccaaatatgctcaagtttttatgatgagagaagtgatagagctgagttctaatgagatttgtagcaagctagagttatctatttccaactttaatgtgttgatgtatcgaagtcgtacccgattacgcgaatgcttagaaaataaatggttattgaaggaggattgttcatgttga

SEQ ID NO: 51978 - DNA, 285 bp, Acinetobacter baumannii
atgacgctagaacaagttgaacttgcaccaagtgcaataatggtctggcgtgatcaacaagataaagtatgtattgaacagctttcacctttgtttgctatgctgattgaacagttaacgaaaaatatagcgttaactgaccatgatattttcacactcattcattctgtactcactgacttgtctgagcctgaaatttatctgcaaattcaagaactcaaaaacctcttaactcgactacaattaattcaaattccccatgattttaaagaggtacaaggatga

SEQ ID NO: 51979 - DNA, 210 bp, Acinetobacter baumannii
atgtacttaatgatcgtttgcagtgtacgtggacttcatgctcagctccgtgagcgtactgttcaatgttttccattacgtgtgcccttaaagttcacactgataatttgcctaattttcatccataaaaaaattagccaaaagtattatatgaaaataaattttgtagtttgtcttgagcaatctattttttacattttaaaaatttaa

SEQ ID NO: 51980 - DNA, 342 bp, Acinetobacter baumannii
atggatatgaacttccaaacaatactttcatctttcaaaaatcaatcgactggtacagatgcatttaaaaacttaaaaaatgcgtgtgagcagtatcttaagcaatcttcaaatttaaatgaaaaagccgcagcttatcttatttatgggtttgctcgtagttatgtcattttatatgaagatgaagcggtaactaccgagtttgcacaagcttctaaagaaacattaatgaattacatgaatcatttaaatgaagccttacttactgaaaaccacagcacaattttgagtgccttaaatcaggtgagtaatgactatatgcagggctcaagagtcttttaa

SEQ ID NO: 51981 - DNA, 894 bp, Acinetobacter baumannii
atgcaacagaatgatctgatgaaaagtttggtagaggcttttttatatttggctcctcaagaagggctgtatcccacctatattccaaatatcactcttatgagggtagatcattccacacagcctgtcgccgtattacaagagccttcaattgttttagtgatacaaggcgtaaagcgtggttatatcgggaaagatacttttcagtttcaacaaggccagtgtttactcatctcgattgctattccttttgactgcgatacatgggttgaaaatgaaccgatgctggcaattgcgattaaatttgaagcacaaatgatggctgatttagccactaaaatgaacaaagagcagcagttatctatagacgaacttgaaaaaagagatataaagctcagttgtggtttaaatattatagacatgaacgcggcaatatctgaggttgctttacgcttattgaatttacttcgttctaaacaagataccgcgatattgggagagcagataaaacgagagcttatttatagggttttgcaggcgggtagccgtgatttaatcgaaaatctttcggctatgataagtcgaaatagtgtgatttatacaatttgtgaaattattcaaagagattactatcataatttaacggttcaggaacttgctaaacaagcaggaatgagtgtctctctttttcatcaagtgtttaagaaagtcacgaactattctccattacagtacattaagattactcgattacataaagcacgtgatttaatcttaaataatcaaatgggtgttgcggaagctgcctatcaggtagggtatgtaagtgcctcacagtttagtcgagagttcaaacggctgtttggagttccacctaaatcttcaatgaattaa

SEQ ID NO: 51982 - DNA, 2193 bp, Acinetobacter baumannii
atgaagaacttcctcataggttatggtgaaaccattacaaatccagtctatataaaaactggaggtggagataagaaacatccctattcaatagaagaagggagattaagatttcaacataatttagaggaaattatgtgggaaatcgaaaataaacctaccgatgcatgtgctaatgatgaggttgtggtcaaatttattcaacacccttcatatttagctaaaacctattatcctcgtaagctattcaaaaaatttgggatgaaagacataggttcaaaatctgtaaaaatttcccctgatagttgggctacccgcaaacatccagatattgctgtaacttcttgcatatatgtatctgggaaaaaaactgactatcaaaaaatgcttaaagatgttgaagaaaataatctagatcaaactactttagactttattcgaacaattgaacgagtagatatttttacttcagaagaaaagattaaaaatttagatccaactagacaaatcaacaaacttgaagtggtaattcacgcatctcaagaagaggaaagtattctagaagcttttttaaagtatgttgataaactaggaggaaatgcggaaaaaaataaaagtaaatttgttgggggcttaacattcttacctgtcactattgaacatggtcttgaggaagaactcgcagaattttctcatttgcgagcattaagaagtattcctaagttacgtttcaataagcccaatttaacaaggacactattaaaggaaacatttgcctttcctcagaattatcaactgtctgataagtttaaagtatgtattttcgatggtggtcttggaagcactcatctcctaggagatttagctaaagaaattatacctgctgatgtttccgcgtctcatccccattttttagcacatggcagtgaagtatgttccacttacctatttgggccatatcagccaggttctggattactaggctctccttacacaagtgttgatgtagtcagagttctttcaccagaagatgaacacgatcctgatttatttaacgttttaacaagaattgaagctgtacttaaagaaaaaaagtataaatatattaatttgagtctaggtcctcaaatagctgttgatgatgatgatgtgcacgtatggacctctgttctcgaccaatatctacaagatgggcattgtttagcgacaatcgctattggaaatgatggagacttacctggagaattagggcgtatccaacctccaagtgatatggttaacagccttgctattggggcaattgattgccaaagcaaagattgggaacgcgccccttatagttgtacgggcccaggaagaagtcctggactaattaaacctgatggagttttatttggtggaagtgaaaaggagatgttccatgtttattcaccattaactcattcaataatcgcgaccatgggtactagctttgcttccccacttgccatgcgtgtagcagctggtattgatgcattaacggattttgaattaacaacaaactcaattaaagccttaatgattcataaggctaaacctgaaaaacattcacaaaataatgtaggttggggtaaattaccacatcaaccagaagaagtattagaatgcttagatgatgaagctacaattctttttcagggggaacttaaaccagaccaacacctgcgtatacctattccagttcccaaagacgcagattgtacatgggttgttttaaaagcgacattctgtatcaatgctattacagatcctgaacatccattacactacactcgatcaggtttggatattacctttagagctaatcaaaataagaaaaatgatgaccaacagcatcctgatgcaaaaacgtttttctcaagtaaaggcttatatcttacagaagaggaattaagagaagatgctcataaatgggaaacaacaatatctagaagccaaagatttaaattatcaactcttgaagatcccttatttgatgttaaataccatgctagagaacaaggtgcttcaacggaaatatcagaactacctcctattaagtattctttagttttatcaattcaaactgtaggtgatgtgaacgtatacaatagtattctacaaaaaaatcagaccctcctacccgtcaaagtttcaaaccgaattcagctttaa

SEQ ID NO: 51983 - DNA, 1101 bp, Acinetobacter baumannii
atggaactaaaacttagccaactccttatcgattctgctctaactggtaatgtcagatcagttgaaatggcattaaaaaaaattgctcctaaaattaagagtgatgatccagagttgtaccattttattaacagtagattgcaatcgaaccttttacgttcgaaagataattcaaaaatacttcctgttgacactgattcacgattacaactagttcgtgtcgaaaatccagttattatgtcttcaattcctattctgtcagaaagtattgaaagtaaattatttcaagtagttaaggagcgctctttaattgaaaaattgttagaactcggattagcccctactaaaactattttatttgaaggtcctccaggcgttggtaaaacaatgtcagctagatggctggcgaataaattagaactgccattaattgttttagatttagctacagttataagtagttatcttggtaaaacaggcagtaacattcgagcagttcttgattacgcatcctcgttcccttgtgtaatgctattagatgaatttgatgcaattgcaaaacgtagagatgatgagcgagaactaggagaattgaagcgtctagtcacagtacttttacagacattagatgattggccagaatcatctatattaatagcagctacaaatcatagtgaattacttgatccagcaatttggcgtagatttgacttacaacttaagttcagtaatccaaccccacaaatgatcgaagcttatatagagcagcaacattccgatttaaaaaagcataaaaaacttttatgtgaacttttttcaggaaaatctttcagcgatattgaacgaacatttaacttatctagaaaagaagcctttataaaagaccaagcactcattaatattcttttaggaagaaatgaaaatttaaaatcagtttctaatgcttctcaaaagcaaacttctaaaaccgaaagaaatgaaattgtgcttaacttataccgaaaaggtctttctcagagaaaaatcgctgaagaaacaggcttaagtaggccaacaattaaaaaaattattaccactttacaaacaattgagagtaattaa

SEQ ID NO: 51984 - DNA, 294 bp, Acinetobacter baumannii
atgtttaaacacaaatatatcatcactgtagaaagcgaatctccacctcagatatgcttaggagataaaattcacggcgccacagttatttcattagaagtagagcaatatcccgatcttgtagatttagcatggctcactaaacgctttcctctatcaagagagatgctctcacaaaaattagaactatttaatgttggtgggaatagcaagaaactctatgatccaaatattgttgttccatttctaaaaacagatttaacacatcgaataggcagaccaaggaaaaactaa

SEQ ID NO: 51985 - DNA, 294 bp, Acinetobacter baumannii
atgtttaatgaactttattgtttttctgtcccagaaaatttgtttattaataaaaaggttagaaaatattcagccccgaactatatttcaatgttgaatgagctcaaagaggaacattatttgacgggggaaaagattgcattcgtacttgatatacaaggcggtagtactgtttcagcatgggcaactggttcaataccagagtatgttcacggggacttatttattgatttatggaagactatgaccaataagtctgatgatcaaattccacttattgttcgctttaattga

SEQ ID NO: 51986 - DNA, 447 bp, Acinetobacter baumannii
atgacttctaaatttaaattacgtgaaccaattacaggtttagacattgagcgagcgcaagagttatgtagtcttgttatacaaggtataaatcagtttcaaactgatatttactatcatgattctaatcagctttttgatcactgtctcgttgataagctaaagttgatagcaaaaaacttagatgaattaatttatatattattagggttggttaaacccaatagtattcattatgcaggcatgaaaaaatcagttagcttaattaatacaacaccaaatgtctttatcattacggcgcactacttgaacccagacaataaatataagcggttacttaacaagtactacttcgatcaagaacttgaaggaataaaagctaagttaagtttagtaatagttaacttagaaaaaatgagtatccaaaaatctttaaagagaaattaa

SEQ ID NO: 51987 - DNA, 576 bp, Acinetobacter baumannii
atgaaaagaatagttgccctctcattagttctttttactgccagtatccatgctgaaatagttgttccagcaaaatacttggaccccgccaatggttatgatatcaagcagacaccccaacgcttatcacaagaaaatccctttattgtagagatggcatacagcgcgggtggcaacgaacatagagaaaactggcatacaaaatgcggttatgagactaattatactacgggctttgatgaaattatctgtgataccagacaaaacaatctaatgattctgacgcatggagattttaaaaagtcagttgtatttatggatgcattccaaggtgctgatcgatttaaaaccaaagtgaatcttaagctagatggcggcaatgttatagcaggcatacccgctgatcttctaggtgataatcaaaccgatataattttaagaaaacttgaaggcggcaaagaattaatttacacctggaagaaagctaacggacaatttgaaaaagttaagatcgatctctatggccttaaggagtctttagaattcgtagatgccttaaaaacagcgaatagatga

SEQ ID NO: 51988 - DNA, 369 bp, Acinetobacter baumannii
atgtatgtttatgatttaaattttgacagtactgtgcaagctggtggtttaccccaacgctttagaaaacttaagagtgaaaagaagataaagcagtttcttgtgaaaagacgtggatataaaacacctgactttggacgaatgattttagatttacgtaaccttggctggtctcatgaaaaaatatcttatgtattagatgtaagtccaagtgctatatcgagttgggcaactggcagcatcccaaactacgagcacggagatgctttcatagatctatggcgaagtgaaactggtattagtagagaaccacgtgagggcgagtggcaaacttataaatacaaaattggacaattagaactaatttaa

SEQ ID NO: 51989 - DNA, 795 bp, Acinetobacter baumannii
gtgagcattgatgcaacacggtgggcttgggctgctccagtaaataactcatcacaacgtctcgttctgctttcattagcagatcgggccggtgaagaacatacggcttggccaagcatagagcgcttggctaaagataccgtgctggataaaaaaacagttcaaaaagttattttagagttaattaaacttggtctggtcgaagatactggagagcgcacaggacctaccagacgtgttcgtgttctcaagctcaacggcgtaaagggtcgcgaggaatacacccaaaatctagatgatgctaatacacccaaaaacgggaacattaaacaatcccaaaaacggaatgattccaaaaatgggaatgatcccaaaaatagtgctttgaataaccccaaaaacgggatgttgaatgatcccaaaaacggggtgcagaacctatcagggaatctaccaatgaatctctctcaagagcatgactggattcctgatgtggatcagttgataacaaagataaagatggcaggtcacagcaacaatatagacctaatctttggcctacctagctttgaattcgagctgagtgcattcaactcttattttgataacagcggactatctgacagtaaaaaacttcataagttcacggcttggatcgtagacaagtttgaacgctacaaaaagcagaatcctgaatatggcattcagtctctaaccggacagcaagctaatactgctcaaccatttcttaatttaccgactaagcctaagagcctattaggaggtcctcaatga

SEQ ID NO: 51990 - DNA, 168 bp, Acinetobacter baumannii
atggataagccttctcgagatttgaataaaacagcacaagcagaagaagccactccaccaaggaacccacttcctcccacatatcctagcctggtgaaaattacaggcgaacggctggtaaatgcgctaaacaaaatttatcagcaaggaggatccagtgagcattga

SEQ ID NO: 51991 - DNA, 558 bp, Acinetobacter baumannii
atgaacgctaaagtacaaattcaatttccagaacaatcaattcctttttacagtgtcgctgatattatcagtgcctattcacttgcatctgaagctgccacacaacttcgaactttggctaaccagatcaacaaagcaacggctttcgttaaagcatttgtacaagaaaatgataaagccgactcctctgcttttgctgaactagaaaatctaataataatttcccagcagcttgctaacagtcaagcagacacttacatgcgtgaacttaacagacatacgcataagcctgatgatcagtacgatgctggtgatctgtactatgcatactcattagcttatgaaaatacatcatggcttgagaccatgttttatgaagctaaagatgaagtcgaaataatcaaagaggctattaagcaaaatactcatggcgccgtcttcgcgactcttgaacgcttaattcatatcgccgcgtacttggccgaaactcatagcaatacattcgatattgaaagcgaaaagtatgaatcagaatgggaggctactaaaaatggataa

SEQ ID NO: 51992 - DNA, 714 bp, Acinetobacter baumannii
atgaatgcttctaaaaacttaataactctttcgtcagttcaaataaatattgatggagctacaattcatcaagatcaacttgggcgtttttgcctaaatgacctacatcaagccagtggtggggaacgtaaaaaccagcctcagtacttccttgaaaacaaacaaactcaagaacttgttcaagctttaatcgatacaggaatccctgtatcccctgtcgaagtggtacgcgggggcttaaatcaaggtacatatgctgttaagcaaattgtttatgcatacgctatgtggattagcccatcattcaatttaaaagttatcaatacatttgatgcactgatcactcaaagaccacaactccctcaatctttctctgaagcacttcagttagcagcagatcaggcacgaaaaattgaagaagataaaccaaaggttgattactacgaaaaaattgtagttcgtgacactttactcaatgcgactcaagtagctcagaaaattggtttatccgctatagccttaaataagcttttggactctctcaaagtttatagccacggcgtaaagcgtgcacgtgtatttcaacaatggtttatcgataaagggtttggcgaattaaaacaaactgatctgggttactcacaaccaatgtttacgacgaaaggcgaagcttgggtaattcaaaaattagtaagtgaaggggttatttcatga

SEQ ID NO: 51993 - DNA, 1281 bp, Acinetobacter baumannii
atgcaaactttatatactttagatgaacttttagtcgcttcagaaaataagttgaatattagtacaattaaacatcattgtagactcggtgaattacatccttgtttatacttcgaaggtaatattatttgtattcatgaggaacgtttccaaaatggtttagacaaacgtgatcctattgctcatagtagaactgtgagttggtcaaaagcatttaaaggctatatctacgttacagattttattgattatatagatcactcaaattcagaaactggtggtgtgttttttgatgttgaaaaaattattgactatatttcacctaataccgagtttccatatcttaaacaagatgagtatcttaaagccttacctaaaatgattgatgatgacattcaagaaaaaagatggttacacgaaataaagtattttgaagggaatccttttaagtctaaagaaattgtttttcatgtaaatgaagtaaaaaatattttaaatcctaataacaaacctaaacctgttgcttttttggattattcagacagaccatttttaacaaaattgtttaaaaacgatttttttactcccattgaagctgcatgtttaatatcaaaggatgatccggatataattgtattgttgtacaaaaataataaagatcaatttaaaatgaattatcccaaaacttatgatgctttagtcttaattcaaagagctatcgaacttgaaatcttaaaaagtgtcaacgaaacggatatcccccaacttgatctagcagaattcctagttaaccgcggatacgtaataaataattttaataaaaggaactttgaaggtagatgtgctccttatcttttttattttgaaggtcgaaaaagacctaaaccagaggttatagacttttcaaacattgaagatcctttatcagaaattaattatttacgctttaaagtgtctaaacaactgattgaaatagaaaaattaaaatttcattctagcactgtattgggagctaaagagccccaagttaatactatgatcactcaagtagatcccaatcaatacttaacacctgcattaaaagcaataaaaggagtaattcaagaattttggataaaatataatccagaaacagatatagctccaaaacaaagcactgtgatggattggatcggagataattatccagaatttactaataatgactatatgaaaaagtgtatagacaagatttgccgtcaccccaatgcaaaaactggaggtaactcaaaaatcaaatag

SEQ ID NO: 51994 - DNA, 459 bp, Acinetobacter baumannii
atgtgtgtagagaaaattttttatactgtttttacagtgatcactatgctttatagtggatatgttcaggcttatgatttttttcaaccagaaagcgatgattctgctttattaaatacagatcagttgttagatgaatcagatttaaacttggaacaaaggcggttggcaattgagcatgatgatgaaattaataactataatgtgcttaaaaacgaattttattcaaatgagcgttgggtgatttataattatacagcctatgatacggggcaacttcacagcaaaaacatcgctggtttaacgaatcatattaatattcaggatttatccatttcatttgggtatggagttaactatagtgttaatccaagactaaaaattggttatgaatatatttcgagttttccttacgaccgaggtcaactcatacgattttttacaatctatttattctga

SEQ ID NO: 51995 - DNA, 180 bp, Acinetobacter baumannii
atgaaaatcattttgattttagtggtattgctgagtctggcactattgttatttttactatatcaaagtcaaaaaatgttgcgtcatgtgcagaaacaacaggctttggaaaataaaaagaacggacgagaacgtcaactacatcccaaattgcagcaacttaaaaaacctcaggattaa

SEQ ID NO: 51996 - DNA, 696 bp, Acinetobacter baumannii
atgaataagatatacaaagtaatttggaatgcttcattaggaatttgggttgctgtttcagaaattgcaaagggtcattcaaaaactcgtagtcaaagaacaaataatgctttgatgccttctactgaagccaccgatgaaggactatttggagtaaaagtctggaattatgtattagatatacgtataccaaatagtaatcaatatcaacgctgtcagttacgcattgattttaataaaaaatatttggcagaaaatttattttggaaaggtgaggcatgcgaaggtttggctacttggggaggttataatcagtcgccagagcatactaatttaatttttgagcgggcagcaagtgtgttattcacctttgatagatttgataataatgctgttgaacaaggtgttcatagtgtgcaggaaattgctgaacagatcaaaaaaagccagacaacaacaccagttattgtttcaggttttaccgatcgattgggtaaatttagctataatcaagaattgtcttcacagcgtgctaatacagttgccaagttattggttcaacaaggtattgatcctacacggatacagatacaggcgaatagccaaactgatctatacaaacaatgtgcaggaaaaaataattcacagcttattgaatgtttagcgccaaatagacgtgtcaatataagctggtaa

SEQ ID NO: 51997 - DNA, 807 bp, Acinetobacter baumannii
atgctgaagcatgattttgcttctcatatagaacacttaaaatgcgtaacaaaacctaaaagttcagctttaggaaggcatctatggacatgttctatagatgctcattactactggctaaaatatcaagtgccgcatgtacatgctcaaggtgagcaagattttttgcatgaattgcaattttatgaaaatattcagcataaaaatataaattggattttgccatttaaaatagttgatgccgacattatttccccactacaactgcttaaagggaaagtattaattttgccaggcaccgattgctggtttgatgagttagatcaaaagcaaaatttaaaagatattcatgagatgatctatacagcgcttatggctttagcagaacttcatgagctagggtggattcatggcgatattaaaaaagaacactttcgaaagtttgagcaaagactttatttaatcgattttgaaaaagcacggcttataactactcctgattcaatcattgatgctacaccaagatatatggcacctgaactgttccatggaactaggaagaatatacaaagcgatttatatgcttttggagttgttttatatgaatggctaagtcaaatacgtttacaagcaaacacttatcatgactgggctgtattgcattgccaaaacttaaacattcaattgccagatttatttcaaattttttacccgttactggtggggttattgcaaaaacagcagaaaaatcgattttcaaatgcatttgaagcaatcaattgtttaaatgctctctcaaacttataa

SEQ ID NO: 51998 - DNA, 561 bp, Acinetobacter baumannii
atgccaaatttaattctcccaacacgtgctttagaagttgtaaaaaaaggaataaatctgtttcaccacggtgggtttcacactgtgggcgtcgacaaaattgtgagagaaactgaagtgaacaaaatgacgttttataattattttcactcaaaagagcgcttcattgatatttgtctagtcgtacaaaaagaacggctccaagaccaagtggttgcactggtggagtatgagcatgatacaaatgcaatagataaactcaagaaactttattttttacatagtgatatagaagggccatattacttattatttaaggctatttttgaaactaaaaatagctatccaaatgcttaccaaaccgcagtaaggtacagaacatggctgaccaatgaaatttatagtgtacttagaacactcaaggccgatgcaacatttaatgaagcgaaactctttttgtatatggttgagggtgcaattattcagtatttagataagaacgatgcgtatgaaggaaataaggcattagattactttttattaagggtagggctggtttag

SEQ ID NO: 51999 - DNA, 1122 bp, Acinetobacter baumannii
atgaaaaaaatttcaactttagcagtttctatttcatttattatgttaacggggtgtggtggaggcagttcaagctctaataatactgaaaatgtatcatcacaagctcaggaacaatctactcaaaatgtaaatagtctaaagtgtgatagaggtattctcttaaattctacgctttcaactaatacaatttttgatgaaacgctatattctttaaattatagatttaaggaaatttcttcaggaaatcctccaacttcaattccacaactttatgcatatgaaattaaaagaaatgatcaaatgttatatgcttatccaaaagcactttacaatataactgctgatgaaattgaaagtagtttggctgaagatatcgtccaaagttatgaccttaactctttcggtcttttcactaaaaagacataccaaaagcaaaataatggttggcctttaggttatgtcgttgcatcccaaggctcacaaattacaactgctcaatttaatgatagttgtagtttaaattcagataatgtgagttacgactacgaaaaaattgatgtttcaggtaaaaaaatatctgacattttcccatctaatattttaacaagtcgaccagaaaatatagactacttatatatgagtaatcgctttgctggaatacttaaaaataatcaaacagcttttacgagcttattgaatagtaatgcgactttcccaagcggttcttttgtttatgtaccgaagtctgttgtttataacaataccgaattttatttctttgataacgatagtactaatttcaaaaccctagctgaatggcaacaagccctttatccaaccgttaaatataaatttgatactgtggctggctacaatgtgacttactctgtagacagtgcaggtaatcaaatttattcgggtggtaaagaccctgccattgaaatgaatggtaaaatttacgatggtgaatggcaagttaaaggtaatgttgtttctgaaacatacggtgaaccagcaattatgtcgaccactaattatcaaacaaaaggaaaatttgctttatacaataaagcgagttatgactttcttgttgcccaaatccaaacttactataagtaa

SEQ ID NO: 52000 - DNA, 480 bp, Acinetobacter baumannii
atgaatgagattaataaattaaaaggattaggtggttggttaactttagttgggatagccttaattatttctcctattaggctgattgtaactggttaccagacttactatcctatgttttcagaaggggtgtttaatttattaacttcagttgactctccatactatcatccactttggaaatattatctttcttgggaaatagtagctaatatacttttagtcttaatttcctttattttgctatacttattctttagaaaacattctctttttccaaaattatttatatcattttgcgttttaattataattcttattcttgtggatgcatcattaataaaattaatattacctaatgaagagatttttgataacgatacttcaaaggagcttatgagaagtatcttttatggaatgatttggattccatatatgctgttttctaaaagagtaaaagcaacttttgtagagaaataa

SEQ ID NO: 52001 - DNA, 426 bp, Acinetobacter baumannii
atgactttaaaaacacatattgaatttcgttcagatcatttcccccgtgttcctaatgaaattggtcaagaagaacatatttggggatacagactagctcagtatttatcaaatagattaattgattctggctttgatgtatcagattttataaaagaagactggggatatttgatccctttaaagaatgatgaatttaaagatatttggattggatgtaaccattacgcggagtttgataatggatttttagtgtttataaatccttttaatcctattgttcggaaaggattttttaagaaaatagatatatccgataaaataaatcaaattagtcaggcacttgagatgatcttaatgaatgaccctttaatttatgctcagcgttggtggttagacgaagatatgaaactaattaccagataa

SEQ ID NO: 52002 - DNA, 510 bp, Acinetobacter baumannii
atgaccgttattttggtaaaacctcatttaagatttaaagatagctataacgactatatcaatgaattagctgatgaagagcgttaccctttgacaatggattttgatcatagaaattttgatacttttttgaacaaactgagtgactatgaaaaagggaaatctctacacgaaggtcatgttgccaacattacatattggttggtagagggcagtgaaattattggtgtatctaacttaagacctaagctaaatgaacagattcaatattgtggtggacatattggtttaggtattcgtccttctaaacgtaaacaaaattttggttcaaaattgttggaacttacaattgaggaggcgtggaagttaggtctgacagagttacatatacattgctataaatctaacttagcttctgcaaaacttattgaagcaaacaatggccgtcttcattccgaaattacactcgatcaagtagttcaaagatatgtagtgaataaaacaatataa

SEQ ID NO: 52003 - DNA, 285 bp, Acinetobacter baumannii
atgaaaatttataaaccgcttttggctttaagtttcattctaggcagctacggtgtttcggtttacgacccagaaactcatcaggagtttgaaaaaatttgcttgtcaggtgggcatagcgagtcgagctgtgactgtatttaccagcgacttgagcaagtttactcccccaagctgatgcaaggtctagaacatgtcagtttgcaaagtcctgttctcccacaggactttgcccctacttttttcagcgtcatgcagcgttgtgacaaaagtagtctgggctaa

SEQ ID NO: 52004 - DNA, 474 bp, Acinetobacter baumannii
atgaaaaaaattttagtattagttatggttatcttaagttcacaagtttcttgtgctcaaaaaagtgagaataaaaccgaaatgagtattaaaaattctaattctattgtcattcaacaattagaacagtttaaaacacaagatcattttgctggagatggacagctatatacgggtgttcaagagcctgcattagctataagtttaaatcgtaaagtggctgatactgcccaagcttttattactctctatcaacaaaaaaatgagccaaccaaagcagaacttttacgtgtccttgctcatggaattagccaaatcgatcctgatacgcttgatacagaagatcgagaacaagtggcaaccacatttgaaaattttctcgatattgtaggcctagaaagttcagatggaattttaaataaatggttatacggtgaagcaataggtgagttattagagcaagatcagcattga

SEQ ID NO: 52005 - DNA, 702 bp, Acinetobacter baumannii
atgaacaacaatattataatttttggttatggaacaggtatttccaaagccgtggtacagaagtttggtaaagaaggctataaaatcggtttagtggcacgtaatgctgaaaaactcgaaaaagccattttagaacttaaagcacaaggtattgaagcttacgcttttacatgtgatttagcagttcttgaagatataccaaaccttattaaacgtattaaagatcaattaggagaaattaaaaatattcattggaatgctttccatgatattgaaggcaatattttaaaaacccctccactagagcttactaaaagctttcatattcgtgtttcgagctatattgcgacggtacaagcttgcttacgtgatttagaaaagaaccacggtagtattttatcgacaaatggaatttttgctttcgatgcagtgggcatcgacttggttgccaaagagtactcatcgttagcaactaccgctgccgctcaatacaaggccaccaacttgcttgctcatagtcttgctgactcaaatgtttacgtgagccaagtgattgtaaatggctttgtagatggaacccctgaagcgaaggataaaacctacgcggtacatccagaaacagttgcaaatcagttctggtacttacaccagcataaacaagaaactgtttctctttgtggtgaagccattcaagctgcttaa

SEQ ID NO: 52006 - DNA, 195 bp, Acinetobacter baumannii
atgctaaagacaaaaaaagaagtctgcgaattattgagtcttacacgtgatggtctgacaaagttacaacagaaagatccatcatttcctcgacctataaaattttcaaaagaacgtcaagctcatgcatattttgatattaaagagctacaggagtggcttgagttaaaaaaatctgaaagagaggaatattaa

SEQ ID NO: 52007 - DNA, 1365 bp, Acinetobacter baumannii
atgagtaatattcttttatctgaattatctaaagatcaattgattgaaaaaattgaagaatatccaatttatgcgtttccaaaaatagttgctaatgcgattcaaaaatctgcttattatcatcatgttcctgttgcagtcgcggctcaaacatatttagctcaaatgtcatttatcgcacaaagatttattaatgcgccaagtgataaaaaagaaaatggacagccagctagtctagctgtattgacagtttttgcgtcaggcgaaggaaaagatgtatgcaaagatgatgctgcaaaaattgcaatcgaagtcgataatacgaatatgcaaagttataatgaagaaataacagcatggaaaatagcgcatcaaaaaaataaaggtgaacgtccgattagtcctcaatctatttttgtaagagcaaccacgcaaggtgtattaaagcatatgagtattagtccttctacaagttttatttggagcaccggcgaaggaggttatttatttggcggctattctctgcaaagtgatacaaaatcagatgctttaagcacattaacagatttagttgaccgaggaacagtaactacaaacttaggaggtgatgatagtactcttgttatgaataaacgtttttgtctagatatagcagtacaagacgttgtggcacgaccatctcttgaaaatgaaatgtgcaaagaacaaggtttttttgcaagatttttatttgctgcgcctgaatcattgccttttaagcaaatcacaaaagataatcgtaaattaaagtcttatgatgataatgatataaatatgtattggagcttatgtcgagaactgcttgacccaataaatttagctattgatacagctgaaagacaagttattatgaaaaatgacgaagctgacgatattcatattgaatatgaaaattatattaattttgaatctcaaaaagatggtttatattattctattcaagcaaatgcaaaacgaacaaaacaatatgttttaagagttgcggctattctttctttttttgaatctaaaaatataattgatgccaaaatcatgagaaatgctattgatatatgtaagtattctctaaatcaatggctaatatattataataagggtgaaaaaacagatagtgaaatactattttcgtggattaaagagcaatataaacgtggaaataaagtaattttaaaatctagcattaatcaaaatgttaggaaagtaaaaactgctcaattaagagatgcagccctaaaatacttaatcgaagctgactatatcaatatagaagaaatcggaaaaagagaatatatctcattgactaataaagctcttgagaacatctaa

SEQ ID NO: 52008 - DNA, 1353 bp, Acinetobacter baumannii
atgaaaagagtcgatataaaaaaatatcctttatctgatactactcttgcaagtttagagcctgaagaaaaagagtaccgtgttaaagatagcaataatctatatttcactgttcatagtaaaggaaacaaacgctgggaattaagatacaaaagaccaagtgatggtaagtggacatggttgggtttaggaggatatccgtcagtcgggggaaaacttgcaagaaaaaatgcagaagaaatgagaaaattaatttcagaggggatagatccaaaaattgatagagaaaataaaaagcaagccgatttattaagcaactcattcacatttgagcaattagctatagagttttgtttaactaaaacatggacagaggcgacgagagttagaaatgaaggcgcattaaaaaaccatatttatccagtcatgggaaaactggattatagaaaaataacaaaaaaggcatggttagagttatttcaagcgattcaaaaaaaattacaccctaaaacaaaaaaacctattgttgaaatgggtaaaaggctatgtacattatgcagagagatttatgattttgcagaagttacaggtcgtatagattacaatccagtcactggtattacaaaatttttggacaaacatgaaaagcaaaatatgccacatgtttcagaaaaagagctgccagaattattgaaaaaaatacgagcatatccaaatagaatgacggctattggattagaattgagtattatgttaggtacccgcccatcagaaatgaggcaagctgtatgggaggaatttgattttcaggaaaatctatggtctattcctgcacatagaatgaaaaaaaggaaagagcatattatccctttaccactacaagccttatcacttcttaacgagctaaaaagaatcactagtgattctttattcttgtttcctagcagaagtaccaagaaacaacccatttccaataatacatttaataaagccttaaagtcattaggttaccaaggacgccagactccgcatgggtttcggcatattttaagcactactttgagagaaaaaggctttagaaaagaatatgttgagactgccttagctcatgctgttggtggagttgaaggcgtttataataaagctctttatttgaaacaaagatctaaaatgatgcaaatttgggcagattatttggatgcattaataaatgatcagcattttaattttgatactgagcaatttgatgttatcgataatttaaatactttgacttctgacaaagttaaggtatctcaattaaaattatttattcttgatatgttgaaagatgaaaatgatttagcatcttag

SEQ ID NO: 52009 - DNA, 843 bp, Acinetobacter baumannii
atggatttgttgcatgttttcattctggcaattattcagggctttgctgaattattgccggtttctagttccgcacacgttattttagctgaaaagttaatggggtatgatccatctgcacctgacatgaccttcttacttgtgatgttgcacacaggtacgatgtttgccgtgatcgtttacttttggaaatcttggaaaaagacttatctttcttcttgggaaagttttaaaaaacaagccttctatattattttagcaaccctaattactggtgtactcggtttagcgctccaatctattattaaacatgtattcttcggcggcgcgagcagtttcgaaattgagcatttgtttagtaactcaaaattaatggcggctgcactgatttcggcaggtgtcctgattattttatcttcgcgtttagatcgcggacaatcaggtgaaatcagtttgcgtagtgcttctattattggggcagtacaggcgttatgtttacctttccgtggcttttcacgttctggcgctacaatttctacaggattatttttaggtgtatctcgccaaaaagctgaagagttcagttttgcattggctgtggtattaacgccagcagtaattctaaaagaattatatcgtttagttcacgctcaaggcttacaaaccgtagctcatggacaagtattccattcgatagttccaagcttattagggatgtgctttagctttggtgctgggcttttagcattaaaatggttgtcttcatggttagaacatggacgctggcatttattcggtctgtactgtattggtttcgcaattgtcgtactctgcgtgaattaa

SEQ ID NO: 52010 - DNA, 1119 bp, Acinetobacter baumannii
atggattttaatgacttgctcaacctgatggttgaaaaaaaatcatcggatctttttattacagatggtgttgcaccatcgatgaagattaacgggcaaattgttccaatttcaaaaaatagcctttcaggtgaagtaattggtcaactcttacattccatcatgagtgaaaaacaacgtaaagaatttgcagagactcgtgaatgtaactttgccatcatgaaccgcgataaaacggcgcgttttcgtgtcagtgcttttcagcaacgtgacatgccaggtatggtactacgtcgaattgaaacgaaaattccttcaattgatgacttacagttgccgactgtgcttaaagatttatcgatgaccaaacgcggcattattattttcgtaggtgcaacaggtacaggtaaatcgacttcattggcttcaatgatcagccatcgtaaccataactctaaaggccatattattaccattgaggacccgattgagtttattcacgaacatgcaggctgcatcattactcaacgtgaagtcggtattgatacggactctttcgaaattgctttaaaaaatacattacgacaagcacctgatgtgatcttaattggtgagattcgttctcgtgaagtcatggactacgcaattggctttgctgaaacaggtcaccttgtattagctacaatgcacgccaacaacgccaaccaagcactcgaccgtattattcacttttttgaaagtgaccgtcatagccagctctacatggacttgtctcttaacttaaaagccatgattgcacagcagcttattccaacaccagatggtaattcacgccgtgcagcgattgagatcttaattaactcaccattaatttcagactatatccgtaaaggtgaaattcatgaaattaaggacttgatgaaacgctcacgtgagcttggtatgcagacctttgaccaagctttattcgacttatacaaagccggccaaattacttataaagatgcgcttaaacatgccgactcaccaaacgatttacgtttaacgattaaacttgcaaatgaaggtcctgatcaaataacagacgaaaaacagcatttaacttttgatcgtcagtaa

SEQ ID NO: 52011 - DNA, 390 bp, Acinetobacter baumannii
atgttagagctacagcaaaaaatcaaagaagcgggcctaaaagtcactcatccaagacttgctgttttgtctttaattcaacagcaagcggaagatctaacggtcaaacagatttatcaaaagctatatacccaaaaacagaagttgagtttggcaacagtttatcgggtggtcagtgatttggaaggagcaggcctaatctcaaatactcaatttcaacgaggtgaagcgaaatttaatttatcagacttagccaataatcaacttctacaaatttattgtgcagagttgacacaagcgaaacaagaaaaatttctagcgagtttgcaatctgtatttactcaatttcaagttgacttgaagcagattgaaattatccaaaaccattaa

SEQ ID NO: 52012 - DNA, 552 bp, Acinetobacter baumannii
atgcacttgtgttatttaagcgatttaacattagcagatgtctctaatttagttagactttatacaaatgatacgactagaaagtatttaggtggccccctggaagtatctctggctcaaacgcgagcacatactgatattaatactccaagtaaattacctatttgggcaattcggtcttctactgatcataattttctaggaattatatctctggatactcatcatgacggctcagatatcgaagtatcgtatgaattgctgccagaatatatgggatatggatatgcaactcaagcacttgaatttgttttaaattattcatttaatgagttaaatcttaagaaagtaatagctgaaactcaaacacagaacaaagcatcaatcaaattactagaacgtgttggaatggtttttgagaaatcagtagaacgttttggttcaaatcaaagtatttttttattactagtcaccagtatatcgataaacataaataatgcttttatcaatagacataaaaaaggcaggattaaatcctgccttttcatttaa

SEQ ID NO: 52013 - DNA, 228 bp, Acinetobacter baumannii
atgattatttcaaacttggcagttttattagcagaaaggaaacttaaggttgctgatttggtaagaagtactggaattaataaatctactttgcacaaactttataatgatgaatctgtacggattgattttgaaaccattgataaaatttgtattgcattagatgtgggagtgggtgatttattgatttttaagaaaattgataataatcaaaatgataatgattag

SEQ ID NO: 52014 - DNA, 210 bp, Acinetobacter baumannii
atgtcatatacctatctcacagcccagcaactggctgaaaaaatccagtacgacgctcgtactattcgcaaccagctaaaggacagtgtctttatcgaaggtgttcactacatccgtccttttggtggccgcaaaattctttttgtttgggaacgcattgaaactgaaatgcttaaattcactggtttaagcatggatgccctgcaataa

SEQ ID NO: 52015 - DNA, 744 bp, Acinetobacter baumannii
atgaataccatgcttaaaacactccagtttcgcgcagaaacaacggaaacactttgcgctacccatcatatacccctgatggaaattgctggtcacaggctctgtaaattatgtgcgaaagaaaccgtccaccactcaaatgcagcctatgaggatgaactgcaacagcgattgctacaacagaaaatcaaaaactcagggctcaataaacgctatctggaccgtggcttcaagaattttgtagttgcatgtcctgctcaagacaatgccatcaaactatgtcaggcttttgcacagcagattatttctggccagaatccgaacatgttgatgattggtacaccgggtacaggtaaaacccatctgagtgcatcaattattcgcaacgttctgcataacagtacaaaatctgcacgctactataccagtgcagaaattgctcaaaaaatgatggatacctggtcagacacttcacgctctgagaaagaagtcatcgaccatttctccagttttgatttattagtgattgatgaatatggcctgcatgaccggcatgaaaaacgcctagagatggtacataaggttctatatagccgttatgacaatatgaaatctaccctgctgatttccaatttcacagtccaaaatatgcagcgtgatttaggtgtaagattatggtctcggttacatgaaaatagcctgatcattgttccatgctactgggcagatcaaaggattacttaa

SEQ ID NO: 52016 - DNA, 3207 bp, Acinetobacter baumannii
atgaaattagcattctggaaaaagaaaaaaagtactgactctgttgttgaagataacttagtggccagtataaagtctttacaatatgatgaagttggattgatttatccttatcaacagaatgctaaaaatgacgctgatttttattggggaagtcttgaagaagaagatgtcgcctatctcctggataatcagtatgtattgccatgggaggagctgtttcagctacagcaaaatcccgaacatagtaacgtacttaatttactcaacttacctagtccaacgaatttacatccagtaattcgtagtgagggaggtttaagtgatgctgattttaaaatcattctggatggatggtgtgatcaaaataggattaagtctaaaggcccaattaaacgaataggtgccgtactgaatgttgatggtcaagaatatttactaaatgaaacgacttggaaacttgtagaaaaaattaaagaatttgctcgtatttcaaataaagatcataaactcaatcaaaagtattgggctcaaatacgaagtttagctaatcgaagtcaggcaaatttagatgagtttcttcgtaagaccgtggtactttcacctgaaaaattacaattgaatctacgtaagaacttgattagtcaggaatcagttgtagaagtacagcccgaatttgatgaagcaccgtcaaattggttgcaaacttttgatcactataatcaggtacaagatcaatatagcattagcctaccagatggtggagtcgctcatgtagtgattgatcctcaagtcaaaaatgtactgagtgaaattaaaaagatgccgaatagacgtgtatctggtgaacgcgctcaaatatttttgcataatcctttcgcacaattaggagatgatgccacacaggtgatctctccagaaggttttgaaaaatcaaagcaagatgcagaaatctatagttacagcttacagatagataaattttataatgagttaggacattatgtttctgctcaattaactctcaacgaaaattctggccgtgaacaacaaccaattccgttggaactctccaatctagagcaaacaaaatattttattgctgcctatgaaaagccgtcaccaattttcatgtgggcaggttatacaattgataaaacaagttatttagatcatcaggttcaagagcttaaaagtgatctaacagaaatccaaaaatatgaagatgagctacaagcacaacaagtgttggatttatccaattacagtgaccgggttattggtattggtgaggcacaaaaacttaactctgagtttattcaaagagatagtggtgaatcagagtggttgccacagcatctcatggagttggagcaacaattacaagatcgcttctccgatgaaacaatagaattgcttgaacagcgtatcaaacaggctgaacaagaaggaaaagctcgtgttgtaattccaaatacagatactgaagtttctatcgatgaagccaaggaattattaaataaattaaacacttccaaaaaaattagtcttttagagctggaaaaagagcctttagaaaatcttcagaaaaaaaagaaagatactttgcttatcgcaagtaatattgaagaagcagaattcactaaacaaagaatggaactgctaactttggataaggtaagttttccaccaccaagattaccttcaagttttagaaagcaggaatttagtttaaagcagcatcaagagtatggtatttcatggttgcagaatctctatcaatatgcaccagaaaatgtgagtggttgtctcctggctgatgacatggggttaggtaaaacacttcaattgttgtgctttattggtgagtatttagaaactgcaaaacagaaaaagccagtattgatcgtcgctccagtatctttgcttgaaaattgggaggctgaagcaaatcgtttctttagtgcaaaatttgcaaaaattctaagtttgtatggagaaaatttaaaagatcgaaaaattcctaaacttttgatttctgctcaacttcgtgaagatcatggaattacaaatttacttgaggaagattggctaggcgatacagatattgtattgacgacttatgaaactatgcgtgatctagagttttctttagcacgagttgattggtcaattatggtgtgtgacgaagcacaaaaaatcaaagtacctacagccatggtcacaaaagcagctaaagctcaaaaagctgattttaaaattgcttgtactggaacacctgtagagaattccttggtagatctttggtgtttgtttgattttatacaggaaaatttacttggatcattaagtgcatttaataaaacgtatcgtcgcccgattgaaagtggtgaaaatgcagatagccaattattagagcaactacgtgagttgataaaaccacaagttcttagacgtatgaagaaagaagtagctgatttaccgaataaaaatgaagttagtgattgtaagagaattggaatttcaatgcttcagcgtcaattatatgctgaagtaattaatcgttatcagaagttatctactgaaggtaatcaaggggcaatgttagcatcattgcacagcatgaggatgatctgtgcacatcctttacaaattcgtcctgatgcttcgattcaagattcacctaaagttgattggttaataaaaaccttagaacaaatcaaagcaaagaatgaaaaggtaattatttttactgaatttagggatattcaggtttttctcaaacgtattcttttagaaaggtttgggttgaatattactactgttaatggtgattcaagtacaagcagtaaaaaaggtttatcacgtcaaaatttaatcgataaatttcaaaatacagttggctttaatgtcattattttatccactgttgctgtgggttttggtgtgaatatacaaaaagctaatcatgttatacattacacgcgcagttggaatcctgccaaggaagatcaggcaactgaccgagcatatcggatcggtcaagataaagaagtttttgtctattatccaacaatatctgctggtaaggattttgatacttttgaaataaagttagatgtacttttatcaagtaagcgggctctggcggatgatatgttgaaaccaaatactgatctaggtaaggaattgatccgcttaatttaa

SEQ ID NO: 52017 - DNA, 1416 bp, Acinetobacter baumannii
  misc_feature (539)..(548): n is a, c, g, or t
atgccaattgacacggtgatagtgatgagtattgcgaatctgaaacgtcgtcttgacgaaaaaataagtgtattttctgactcaactcatatacagaccaaatttgttaagcctcagcgtttaatgaaaagattgtccattcttgagcataaatttggtgatcttgaaaatgtacaaccattagaagaaaaaattatcaaatcagttctaaaacttgaacaacacgggtttgatgggatgactaaacgagattggaaaaatttggcttggtctctcagtaaaaaactgcccaattatgaagaaaaaattttattcacacctgtaggtgtaagattaattgattatttcaaccaattgggaattgaccaactccagtttgtttattttccattgttgtatagttattttgcttttgagcaacatgaactagaaaacttacctagtaattggattcagttaagaaaaatactagatgaaaataaatcttcgatatttaaagcttcaactcggcctaaaaaatggatgacgactcttatagnnnnnnnnnntcttatagataattcagaggttttaaccacagaacctacgaaaaaatttgtacgtgaatttttacaaaataatgatgaaaacggagttgctaatcaattagaaagtttaagaatagcttcggttagttggttttgggatgatttgattcgatctgcaattaagtcgatcaagacaatgaaagaagatgagtattttcaaattatcccacgttttttagtattgcttgaaaaaaataaaatatatgcgacggatattttagctgcgcttctagaacggtatgctagtacttctcagagagagaaagtacatgaggtattaaaacatctagcattggatcaatggggtaatcctcagtatgaatcttcagcgggatggaataacgtaaatgctgataccaaaaaaatggtgattcagtggtttgtaagagcagatttagaagcattctttaaggtctttagttatggtgcagaagtacgcagatttaattattggatgaggtttattaaacaagttacattgtcagaaatttttttaaatgatgatgcaatgttctatgcaacatttcaacaggaaaagttcaaaaagaataatgttggaagatttaaacgaattgtggggaaaagcacagcagcaaatgcttttatgataaaaattggtgggtattatattgttgaattttctgaattaaataatgcaacatatttttatcgtaaacaaccttatgtcgattctaaagctaaattacaattagttaacattggtgatttgaagtcaactgcaaaatgtgaattctatctatcacataatggagcctgggaaaaatctttcgataatagactgaaaggactaggaatcactccggattaa

SEQ ID NO: 52018 - DNA, 732 bp, Acinetobacter baumannii
atgttaggtaacaggtactctaagaaaccaagttctaaagatgaaggtgaaaaacctttttggatttcatttgctgatttaatgacagcattaatgaccttgtttttagtcgtaatggctgtgtcattaatggtcgtaacgaaaaaaatcaatgaagcaactcaagctgaaaatcaacgtagttcagagattatggatatttgtactagtattcaaaatgatgccgcgttgaaaaacaagattattgctgttgattgtaaggacaatcgtatcaactttggagaagctggtcggtttggccataatgactaccggttaaatgcagcaggtgtagaggcattaaatacgttagtaccaattgttttaaatgctgctaatagtgaaaatggaaaaaaatggtttaaacaaattgtgattgaagggttcaccgatacggatggttcatatctctataacttaaacttaagtttacgtcgttcagaatgggtcatgtgcagtttacttgatccaaaatttagtcatgggttaagtctgagtgatgcacaaaagaaccaagttaaacaactgtttttggccggtggggtctcttttaattcagctaaggatagtaaagaagcctcacgtcgtgttgagctacggatgcaattctatggtttaaaagaaaaagagaacgctgagccgcaacctcattttgtttcagtgcctgttgaaacatgccaattgacacggtga

SEQ ID NO: 52019 - DNA, 2067 bp, Acinetobacter baumannii
atgaattggttggtttgggctgaatttctgcagagttactatatcattccttttggtatgttcattttagtaacatatattggttacagattttatttaaagtatataacacctgctaaaaatcttaatacacaattagagtcagcaatcagtgctttaaaaaaggttgaagaacattctggtttcaataaaaattcactagattcaatatttgaaaatggtactcctttaaaacatgcttggttgaattacaaaaattcttttcatgacatctatgaaactgtagatggagaagatgttctagtttcctcacgtgcaacggtatcaagtgatgtatttttttcacaagctgtcattgtggatacccctttaagagttgagttttataagcacttgccaggtattatcactggtgtaggtattattgctacatttgctggccttctatttggattattagcttttgatcccgcaggcgatccagcaaaagttcaagacagtttaggcttgttattaggtggggtaagtgaagcattcatggcttctgcacttgcgatagggactgcaatgattatcacttggcgcgaaaaatcgtggttgcgtcagtgttatgaacagttagaaattttaacgacagaaattgataagctttttgaaactgattccactggagaggagtatctagctaaattattaaaatcctctcaggcaaacgaaaccaatgctcgtcaattaaaagatagccttgttaatgacttaaaagtcatgatgacgaatttggttgaggaaaataaaaagaatcagattgcttttgctacacatttaagtgaaagctatgcgaaatcaagtcaggatatggcgactcagattggtcaatctattacggataccttgcaagcacctctagataaaattgcttctagcgtacaacaagtgagtggtgaccaaggttcagccgtccaagaactcatgactgatgtgcttacagcctttatgagtaaattggagtctacgtttggtagtcaaatgacgggcatgactgagatgatgactcaatcagtatcagccatgaaggagatgcaattagggttctctcaattactgacagatatgaaagttaatagtgaaacttcgacgaaaacattagaaatacagatgtcgaaaatgattgaagatattcaacaaaaacaaaatgcgatgtctaatcaaatgaatttaatggtggatcatttatctcaaggtgccgcaaaaattggagaacaaggccaacatgcgattgagcagttaaatggcaaagtctcggagttgatagggaatctaggcggaacgatgtctgagttaatgtctgatgtcacgaaacagcgtatggaacaagatcgtgtgattctagaaaatcagcaaaaactgcacgaacaatcatctgcattaattgataatttaggaactgaaattaaagatttaattgcacacagtcaaaatgcagtccaagtctataaagaaaatattcagaaattatctcaagtgacaacggatagtattacgggtatgaataacggcgctgaaaaaatgcgcttagcttctgaacagtttaatactgcgggcagttctttgattacagtgactgataagacatcacagctaattgcagaagtaagtaccacctctacgcatttgaccagcgcaagcagcaatttaatctctctattaaaagactataaagactcacaagagagtgttaaacaggcaatcagtactttagacggtttaattaaacaagctcaagccgaagttggtatgagcagtgaaatgctgaaagatatgaatcagatgacaactgcactcaatcaagtgaagaaagaaatgcaggattatcttgagcaagtcagtgatgtgttggtgaaaagctttgagagttttggttcctctgtagaaaccagcttaaatcattctttaggtgcttttgataatacacttgatcaagctgtaaaacgccttgcaacgggtgtagaaggcttgggtagttttgtagaagatctggaagatctcgtacaacaaaagaaaaactaa

SEQ ID NO: 52020 - DNA, 654 bp, Acinetobacter baumannii
atgccggtagtatatttgcagaatttaaatggtcaaaccgtagaatttctctataatcttgaagattccaagcagtccctcaagctgttgcccaaggtgatgtattgcttaagacaatttagtgaaatcattgaagagttgtgtcagaaacgctggattgatttcgttcggctaaacaagcagaacctggtggtactggatggtttgcctgacctagatgaattcatgtttgctccaagtcgtaatcaattggggcaggtcgcagacttcttaattgacttacagcaatgccagtgtttttactgtggaaaaagtctcaaaaattcaaaatttgccgtggatcattttattccctggtctctatatcctgccgataccgggcataactttgttctggcggacgacaaatgtaattcacagaaaagtaattatctggcatccgagcgattcctagatcaatggagagaacgtaatcatctgcatgatcaatctattgttcaggaaatttcccaattgggttttttgatcgatctgcagcgttcagatcgggttgcagattgggcgtataagcaggcaatagagaataagtatttagtttggttgggggggaaagagaagaagatactatcccatccaataactgctatattttga

SEQ ID NO: 52021 - DNA, 543 bp, Acinetobacter baumannii
atgcagttcaaaattatcgcagcccaagatctagataaaaatcaacgccatcaaattgctgaattatgttttgctgcttttgatgaagatccttggagccaatatgctttcatgcaaaaagcatttcatgtcgtgggtatattagatgatcaaattgtttcacatgccttatggacggatagagtttttactataaatggtagctccaatgtaaaaactgcttatgtagagtatgtgactactaattacacgatgagaggtaaggggcttgcatcacaattactaaaatatttagttgaagcattaactgatttggaatatgaacttactgcattacaaccagaagatgaagcgttttataaaaaattaggttggactacttggtggggagatttgtacatcaaacaagatacatctacttatctgactgatgactatgaaattatgctatatcctttgagtatctctatgaaagatctactattgcatcgctcacagggcgatagtatttgcgcagaatggcgagagggtgaggtttggtag

SEQ ID NO: 52022 - DNA, 234 bp, Acinetobacter baumannii
atgaaagcacagaaacttttattcctcttaattttatcgggaatgatgtcttttatcgtttcaggtatttcaacttttaaagtagtaggactaaatcattacttcgtttcattgtggatatcagcttggattattgcatggatactggcttttccgagtgtattgatttgtgctcctgtagcccagaaactcgttgaccttgtatttaagaatgttaaaaaagtacgtctgtaa

SEQ ID NO: 52023 - DNA, 525 bp, Acinetobacter baumannii
atgaaaatttttactgttgaccaaaatagtgctttaacgcgctatgcaggacaaagtctggttattaaatttgatgacggaaaaatactagagatcaatgacagccaagaacctttagccgcgttccctgaaggcattcttatatggagtggtcgagctcccaatcaagatgctataactgatttgcagttttcccaactaagcatcacgccagttgctagtaatggaattattatcgcgccataccaagaacaaatagcgacagctataagcctgaccctgttcgttaccgatgaaaatgcgcaattattcccaattaaagaaaaaaatgttgtgattgagcttaaaaatgggaaaaccatagaagtactcgaagactatgctaaaaaaggcttgttggtttggggcgggcgtgagccgatttcagggttttctatagaacaattaaaagaaagaaccgaaagcctagggatttatcctatggctagcaatgtcatttatttatttccatttaagttggcataa

SEQ ID NO: 52024 - DNA, 576 bp, Acinetobacter baumannii
atgtcaaatttagaaatatcttcgaaaaaactacatgttattcaaactgctatacacctatttacaacttacgggtttcatacagcaggcgtagacctgattgctaaagaagcccaaattactaaatccaccttttataaatattttggctcaaaagaaggcctgatcgaaatttgcattgcctttcaaaaaagcttgctcagagaagaagtgctctccattatttactcaggccattaccgcacttcaaaagagaaacttaaagaaattattgtcttacatgccaactttaatagcttgtactaccttttactaaaagccttttttgaaattaaaatcgcttacccacaggcttaccgtatggcaatagagtatagaaaatggctacttcatgagatttttgacctgatttttagtttagaaactcatgagttaaaaccaagtgcagatatggttttaaacttaattgatggtttgatgttccagattttaagctcaaatagtttggatgaaagggatgtggtggtggagaggtttttgggggagagaggcgcagttaattggtcctgtttttaa

SEQ ID NO: 52025 - DNA, 276 bp, Acinetobacter baumannii
gtggttcctgtactagaggaaaaagccggtcgattactcataaacggctacccaacaggtgttgaggtctgtgatgcgatggtacacggcgggccatacccagccacttcagatgcacgaggtacttcagttggaaccttggccattgaccgttacttacgtcctgtgtgttaccaaaactatccgcaaagtttattgccagaagctttaaaagacagcaacccattgcagattttaagactggtgaatggtgagatgactagagaagcgatctaa

SEQ ID NO: 52026 - DNA, 156 bp, Acinetobacter baumannii
atgctgttcagttttactgatgaacttcatgtgaaaatggaaatattttcatttagaaatattgaaccaaataatcttataacgcgccgtattgctgccaactttcaccgctatgctgtgttttataataggcttgaagttgttcgagctgcgtaa

SEQ ID NO: 52027 - DNA, 951 bp, Acinetobacter baumannii
atgaacaacttaataacgagatttttaagtaatttggggcagtggcatgaaacagcactcacaacgactaaagccattattgctataggtgtactatgcttagtcgcatatttagtgacgattagctatatcccgtcggaaattagcttcggtgatacgctcatttttctactgatttttgtagcgtgttctattatttatgcggggctaagcacgattttgtttttctttggtatttctttagttccagtgacatatatcatctttagtgtggttgataagtatttaccaccccatatcagaattggacaaaaactgccatttccaaagattagcattaccacattggctgcatacctttatctgttatatgttattcatagtttgtttttactgcattggaaaatcaatctttacataggtattaccgtattttttattgcctttacttattatcctttttatatcaaccgacagaagattaaagaatttcgtataaagtttgagaatttacaagatattattgatgacgcagatgcaagtgaccatcttaaaacatttgcaataaagaaattcaagagattagaaacgcatattaatgatagcttacaagtcgctattattttgatcttgataccacttgtccccatgttttttattgaagaggttggtaatacgtttctaaattatgccatgcaaaaaactggtgtgagagtagaaaaagcgactttatacatcaaagaaccttatgcagatttaattgaattgccaaaaacgactactaaagaactgagtcaatataaaacctttatttttaaagatgttaaagtgttatttcaaggcattggtaaaagtactttaatttcttataaagtgaaagatattgaaaagcagttagtaatacctaacgactatattactgtagaacgaactcagaaagctgataaataa

SEQ ID NO: 52028 - DNA, 1260 bp, Acinetobacter baumannii
atggattcaagccaatataaagactacattttagttttactttttattaaatatgttagtgataaaaaagaacaattagattttatcgagattccagaatcagcaactttcagtgccatgattgagcttaaaggtaatgctgaaattggtgacctcattaacaagcaaatcgtggccccacttgccgaagcttgtgcactaaatgttaaggcaatgcctgactttaatgactcgaccaaacttggggatggtcaagaaaaagtagaccgcttaactgaccttattgcaattttccaacgtccagaattggatttctccaatcatcttgccaatagtgatgatttacttggtgatgcgtttgagtatctcatggggcacttcgcctctgaaagtggtaagagtaaaggtcaattctatacaccaacagaagttagccgtattgttgcctcaattgttggcattgatgagtttgaagcacgtggcgatactactgtttacgatccaacctgtggttcaggttccctccttcttcgtgtcgctgctaaatctaaccgtgatgatatttcgttatacggtcaagaaaaagatgcttcgacaagcatattggcacaaatgaacatgttcttacatggttcacccacagcagaaatccgccaagggaatacacttgcaacgcctaaatttcttgtcgatggggaactccaacgttttgacttcattgtggctaacccgccattttcagataaaaaatggtcgatgggcttagatatttctacggcagatgccgatatctatggtcgctttgaagattttggtattcctccatcaaaacaaggggactacgcttacctgctccacatcattaaatcactaaaatcgacaggaaaagctgcctgtattctacctcacggtgttttattccgcggtaatgcggaagccgatattcgccaaaaactagtagattatggttttattaaagccattattggtttacctgccaacttgttctacggtacgggtatccctgcttgtattatcgtgattgatcgtgaacatgccgcagcccgtaaaggcattttaatggttgacgcgagccaaggctttattaaagatggtgcaaaaaaccgtttacgtgagcgtgatttgcataaaatcattgatgcctttaaacatcctgaacagcatgacgagcgttatgcgcgtatggtcggtttagatgaaatcattaaaaatggctataacctgaatttgccacgttag

SEQ ID NO: 52029 - DNA, 696 bp, Acinetobacter baumannii
atgattatccgcattggtgatattacgattgacctaacacttaaagatattgaaaacattcatttaagtgtttatccacctgaaggtgctgtcaaaatgacggctccttcatatgtgtctgaagaatcgttaaaactctatgcaatctctaaactttcttggattaaaaaagaacaaaaaaagtttaaggaacaatcccgagaaagcaaacgtctatatgtcgaaagagaaagtatttatatttgggggcaacgttacctgcttagcgtcgcaagagccgaacgcccatctatcaaatatgactcatttaatatggtctttctctgcccagaagattacaccttagagcaacgtcaaaaatacgtaaatcggtggtatcgaaaggaattacgtaaatttgctgaacctctgattttacagtgggctgaaaagcttcaggttcaaccgaacaaattgcttgtaagtaccatgaaaaccaaatggggtagctgcaatcccaaagacaaaaatattcgtttaaatacagagcttgctaaaaagcccaaagcgagcgttgaatatattattgttcatgaacttatacatttgcttgaagcaaatcatggtgaccgatttattagtcttttagatgaacatatgcccgattggcaacaccgcaagcaaatgcttggcgagatgcctttacattttggttaa

SEQ ID NO: 52030 - DNA, 1008 bp, Acinetobacter baumannii
atgcctgattttattcctacagcaccagaacagctaaaatttctcaaaaatattcagctgattttgcagtcgggtagttttagtagtacgtataagtttgcattactgattagtctcagccgattggctattgaaaagggtgaagactcaggtgagggcctatcacttgaatatgccgagattgcagaaaagtttattgaactgtattggaagcaggctgtcccatatacctttaatgatgaaggaatactgattttgaatcagaacaatggcaagcaagccgctattgtgaatctaatcattgaacttcggcagagctactcatctcttggacttttacgacgagattcattcgtatggttgaagctagttaaggatgtagcaagaacagtaaaagaaatgcctgttcgttacttgcaaaatatcaatggtcaaaattttgagttcttatatcagctcgatcggtgtggaaagcaattgatccttttgcctcaagtcatgttctgcttaagacaattcagtgagattattgaagagctttgtcaaaaacgttggattgactatatccgtaaaaacaacagtaatgcaccagttttgaatcagctacctaatctcgaacaattcatgtttgagccgagccgaaaccagttaaatgctgtggcaaatgtcttggttgagttgcaagactgcaaatgtttctactgcaataagccgatgcgaaaaggcaattatgaagtcgaccattttatcccttggtcaatgtacccgtcggatacaggacataattttgtgttgtcagattcaaattgtaattctaagaaaagtaatttgcttgcatcagatgagtttttgtataagtggtatgatcgtaatgaagagcaagacttgatcattgtagaacgaatagcagtgttgggtttcctaacagataaagagcgctcgcataaggtggcggagtgggcttatgcacagggtagagaaagtaattatgtcatttggcatggttag

SEQ ID NO: 52031 - DNA, 192 bp, Acinetobacter baumannii
atgtcatttaaatatggcgacagtgatcgagaaaaggatggtcggaagttcacagatttaaatggaactcaggcaaaggcattacttgagcattttgatgttgttcaacagatccagcattggattacggcagatcagcgacctgaacgtcaagaaaaatggctcaatctactttggaaaaaatatgcctga

SEQ ID NO: 52032 - DNA, 723 bp, Acinetobacter baumannii
atgtctagatgtacagctcctgttcgaggccatagttctgctgcagctgctgcggcttgcccagcatgtcgtaacagatatggttctcgttctcgtagttattcttactcatcatcatatagttctggtagttcttataatgggtctagtaggacctatagtgattctagtagagctgggggcagtgggagttcaaaaagtgtttcaaaacctcgctgggctaaaacaggctcctctcttgtatatacgacaaatgaagtagcatccctaacacctgtcagagaggtaatcgagaaaaaagcttctgagcagcctgaccttcgtgatgtgtttttatgccatgcatgggatgatcgtaaggaatctgctaaacaactacacgattttctagaggctgctggtgtaaaagtttggtttagtgaaaaagaccttggtttgggtgttccaatgatgagagcaattgataaaggtttggctaattctaaagttggactcgttttggtaacaccagctttgttgtcgcgcttacctaaagaaggtgtagcagataaagagctttcaactcttctagctggtaaccgtttgattccaattgtacataatacaacgtacgaggcacttagagatgtcagtccaatgttagcttcaagaagtggtcttgatacatctgaagatacgttggagatagttgcggaaaaaatagctgagttagttgcgatttaa

SEQ ID NO: 52033 - DNA, 1005 bp, Acinetobacter baumannii
atgattgattacagcccccacacaaaatacaccgcacaaaaaattcaagataaggtcacaagaggatcatatttttactgcaaatttatagtgcaaactgaattaggtaaaattgatattgaaaagattattcataaattaaccgaacgatattcattaaatttaaccagtcggcaaagaacatatcgactaaaacaaggattacctgttgctgatctcattgttcaagacattctttataaagatgcatggttatttgtcttgttgatcaaaacccctaatagccatcgtcacagcaaagaaaccataggcaaagtgacttcaacaaccatatcagcatatacatcaaaagataaaattgctgaacttgaacctgtcatctgggacaaaattacagtcgggcaagaattaacttttatccgtcaatactataaagacaatgaacagtttaatttcatattgaataaaccctatttaagcttggattttggaaaatatgaggctgaattagtacggttaagccataaaaagtatgctgaacatcaaactaagttttaccgtaaaagtaataagaatttctcatggacgtggcgatttaagaaaactgaagtagagaaacaaaaaaaagaattaacccaaattctcaatcgagtgatttcacagaaagatcagaccaaagcgctcaatgatcttcttgcatggcagaattattttaaagtttatgcagtattcagaggcaatcgacagcaggcgggacgtttatataccttcgggaaactattctttttcagtcggaaaagacaacgatgggatcaggcacaaatgccgatgatggacttaacaatcatcgcgcggtatgaaacctatgcggattcttatactgagtattgtatgcgtagatatttttatgagtcctttgaagcagagcttccacgtgaaatttcaaaaactgaagattggacattaattaatgcgtatattgatgctgaatatgaccaactttaa

SEQ ID NO: 52034 - DNA, 1047 bp, Acinetobacter baumannii
atgcaaaacagttccagaaaacaagcacaatattaccatatggacccaaacagcatttcatttaagctgtttttggtttatgacatctttatggtgtttattattattttcaatctgttctgtcttgcagcaaatttctttttaatgagcagtattggggcatggtttttcgaacatattcacttgccccaagtactcagcttttataaaacctatttacacccatgggtaattacgacagaagcttggtttattggctttttaattactgaattttttgtccgttggggcatttctattgtttataaacaccataaacgttggttcttctttccatttattcactggtatgaaattttagccatcataccgcaattgcgttttttacgtttgtttcgtgccggcattattgcctatcgcttatatgaattaggctatccggttattcctgaaagctggagaaaaaacggtttattttattatcgtgtcgttatggaagagctatctgatcgcgtggttattacggttattgatggcattcgtaatgagcttcaaacaagctcaacacataagcaaattattcatgagctggttaaccatcatcgtgaacaatttacggttaccctgacctccatattacaagaatccttagctacagcattaaaagaacaaaagcctgcaattacaaaaggtgttggacaaattgttgatcaagccatagaagatacgccagaattaacccaattattacgcttaattcctttagtcggaggccgtattgaacagcaaatacaaagtattggtcaaagacttggggaaaatatcagtgccggtttaattgaacctttaattgaagggtcaaaagaacagcccaatgcaacttatcaattaatttcagaaaaaataagtaacgtgaatattaataaccgtgagcttgagcaacttgtagagtctgtagtgtttgaaagtctcgaagcaattcgcaaacaagttaaagtcaaacagtggcaacaaacccttgcggagcatgatcgaatcaaagaataa

SEQ ID NO: 52035 - DNA, 885 bp, Acinetobacter baumannii
atgcaaatgaagaagcattctttattatttattgccttaatgagtaccacttctctatacgcgaacattcctattgaatctcgtggtttaagtcaaaatgatggcagtgcatctaatacttcttcaagcaatatttcagttcctacaaacttaaactgggaacttatgcaaaaaaatcaacaactagaaaatgatatccgcactttaagaggtcagttagaagaacaagcgaatgatattgatcaattaaaaaaagaccttgcgaatagatataccgatttagatcaacgtttagaattattacatcaaaaagttgaccctgatagtgctacacaagaagacggtacaaataccaatactaatagcgccacacctgctagtccatcagtatctcaatctcagcctgcagatggcaataaagtagttgccgccccatctcaaacgtctgaacaacaatctaatacaccagtaaccaacactcaaccagcgactactgctcaaaaccaatctaatccacttgaattagaaaaagccgcttatacagtagctttagatgcttataaacaaggtggagcaaaaaaagcaattgctccgatgcaaaactttattaaaaaccatcctaacagtatttatacaggcaatgcttatttctggttagccgagtttcatttagctacagacccagtgaactacaatgaagcaaagaaaaactacaatattgtcgctagccaatatccaaactctagcaaggcacctcgagcactctatcaactatatagtattgccaaagatgtcgataagaatactgtatcagctaatcaatacaaaaataagttacttactcaatatcctaaatctgaagaagctaaattctttaaaaaataa

SEQ ID NO: 52036 - DNA, 687 bp, Acinetobacter baumannii
atgcataaaatagtgcttttcgatatggacggaactttattagatttggcttttgatgattttatctggaacgaatgcttacctgaacgacattctcagacgcatcaaatctctttaacacaaagccatgaaatattaaaccagttttatcgtagcaataaacatactctttcctggtattcttcacagtattggacaaaaaggacaggagtagatgttttaaatcttcaaaaagaatttcaacacaaaattaaaatacgatcaggatgtatgaagttacttaatactctgaaagaacaaggctatcaatgctggttagtgaccaacgcagactgtgcaagcttacagttaaaacttgataacatccctattcaagatttttttgatgtgattgtatctagtgaacaaattggttatgcgaaggaagaccttaagttttggcaagaattacaaggcttgcattattttgaaccccaaaacactatttttttagacgatactattcaagttttaaaaactgcagaaaaatttggtataagacacttgtttactatcttacagccctcaactcttaagagtaaaagacagctacaagatttagagtataaagcactagatcagcttacagagctactgtctattttgaatcaaactgatagaaaggataatgatgtcaaaattgcgtga

SEQ ID NO: 52037 - DNA, 543 bp, Acinetobacter baumannii
gtgagtgaaacatcagaagaaaagaagaagaggaagttaattgcagagctgagagatcatcaatggctctatcaatatagtttatttccaagattagaaggtcaaaatagagacgaggataaatctaatgcagagacaactatcttgcgtggactagatgattttagagatagattaagaagaaaaactcctaatattggtatcttattcgagcttagaaaattgaatgttgcaagattaagaaattttgtcacaagatacagaaacaaaaatttcatacagatttatattactttccgtactacaaaagaaattgatgagcagatgttaaaggaaattgcagaggatacatatagcgatagagtgaatatattagaaaggtcaataaatgaagaagatatcattaagtctataagtacaatccgtaatgaaaatttgtatgattttactccatattatcaaatcataggaaagaagtttaaacgatatagttgtattcatcgttcaagttttataaggaaagaagaaattctgcaatgttaa

SEQ ID NO: 52038 - DNA, 1302 bp, Acinetobacter baumannii
atggctaagcaagttcgtcctttaacagatactaaatgtgcctctctaaagcctaaagataaagaatatgtagaggcagatggaggaggtttgtatcttagagtgcgtccaacgggtacaaaaagttggatttttagatacacaaataggggaaatgataaaagagaaaaaattacattaggtctatatcctgcattgtctttggctaaagctagagaggaaaagcataagtttttaagaatgcttgcagaaggcgtggacccaaaagagcaactttctattcttctagcaaagaaaaataatataaatactttagagaatgtagttagagtttggcttgatgcttatgcagttagaaaacctctaagtgaagatactaaaaacaagcaattaagaaaatttgaaaatcacttatttcctaagtttaaagataaagcaattgaacaaattactcttagggatctaaaagatgctttaaatgtaatttatgaccattctcctgataatgctcaaaggattagagcttcattgatccaagtttatagctatgctgttcagcatagctatatacaaacaaatatagctcgtgatttagaagatatggatttgtctgctaaaaagaaccatagagcgacttttagatcattagacctaattcctcaactgatacggcgtattaaagcagatagtggtaatcccttaactaagttatgtttattattggggttgcatacttttcttaggtcatcagaaatacgttttgctaggtggactgaaatcgactttgaagcggaaatatggagaattccatctcatcgtcgattaattgaaggtgtaaaacactctgatagaggtgccaagatgaaagaagaacaccttgtcccattatctagacaatctatagaaatactaaaacaagtgtatcagtacagtggtgactgtgattttatttttccaagtccaaataataaacgtatttttattagtgaaaatacgcctaatgatgctctgcgccgtatggggtattcaaaagaggagattagttttcatggttttagggcgctagctcgatctgcattaggtgagatgtcaatattttcgagagatgcattggaaaagcagatgagtcatcaagagagaaatgagacagtgggggcttatacacatattgcagagtatctagaggaaagagagaaaattatgcaaatatggagtgattggttgagtgctatagagaatggagattatataagtccgcatgagtatgggagacatttaagacttggggctagagttggataa

SEQ ID NO: 52039 - DNA, 507 bp, Acinetobacter baumannii
atgaaaaaaatactgatcctatcctcgttatttaccagttttatatttacagctgtgacgactcacgctgccgaacccacaaataaaaccaataaaattgttcaaacaaaaactgagtcaatcgataaaataagtgcccaaaataaaaaaatagtagtcgacttttatgaaggtgtctttttaaaacatcaagttaaagaatatgccgaccgttatattggccatcaatatatccaacacaatcccaacgttcctgatgggaaggctcctttcgtgaatttctttactgagaaattccaaaaaaatccacaagcaaaaaatgaaattaagcgcgcaatcgctgaaggtaatctggtggttttacacgtccactctacggaaaatgacaaagatagaggcagagcaattgttgatattttccgtgtagaaaatggaaaaatcgtagagcactgggatgttatacaaaacattcccgaacaaagtaaaaactctaatacaatgttttag

SEQ ID NO: 52040 - DNA, 945 bp, Acinetobacter baumannii
atgcttaaaccatttttctttttatcttgtagttttctcttgggaactttaataagtacgcctgttttggctcaaccttcaataaaagatcaatcaaaaatcgtttttcaaaataatcaggcacaattccaaatcaaatctaaaaatacaggtcatgaatatctaattcaaatttataaaccgcctgtggccccgccccaacatggttaccctgtactttatatattagatggaaatgcaactttccctagtgctgccaatattgctcagtcaattggagcaggttcgactaaattaggtttagatccgctcatgattgtagctgttggttatccacatcaaaaaacctttgatgtgcaaaagcgtgcttatgattacacaccagaaccttctgcccaatttcaagcacacggtaaatataaatatggtggtgctgatcagttcattgcctttttaaataacgaactcaaacctgaaattgcaaaacagtttccggttaacagccagcaacaaagcctctatgggcactcttttggaggcttgtttgtgctttatcatttttttcaaaagccaaatgcatttcagcgttacttcgctgcaagtccttctttgtggtttgatcaaggcatgttatttcaacagttagaacatttgcaaagtcaaaaactaaatcatttccctttactcatgaccacagtcggtacacatgaacaaggtggccctcttactcaacttaataatacgcttaatgaagcagaattttttaaagctttagaaaataaacgttcaaacgaatttagttattggcatttttataaccctgccgaacaacacattacaaatttgtatgcgagcttacctaaagcacttatgtttgcttcttgtcaaaatttagaaagctgtaaatctttatttgatggaccattagatcagccagccaagtaa

SEQ ID NO: 52041 - DNA, 624 bp, Acinetobacter baumannii
atgaataaaattattgttttaagcctattgggttttacaacttttagtttaacggcttgcggcggttgtccaataattgcaggttgcaatggtactgataattctccgtactatatgacgactgtcagtaatcaaattcgtggtattccaatcccacctcaaaccaagctgacctatcaatcgcaaaatttcagacagaaatttgagcaaacacatgctttaaaagaaaaaaatttatcaggcattgcattaccagaaaatacagcaatcatttggggcggtatgccagtagatatgtttatacaattttctaatcccgaaatgaaaggcttctcggtctatccagcacgaggatttaaaacagaattatcaaatgagtttttacatttatggaaaagctgtgaaagtgatttagacattaacttaaagaatccaaatgactggtcatttaatcctgaaaatatggaaataacgggttgtggcatcaaccaaaaacgtagcaaatataccgaagactcttttcgtcaagatgaagccgatgcatttttaataaagatcaatcaggccttacacaagttacccaagcaacaagactatcctgtcatttatcgaactaacaaatag

SEQ ID NO: 52042 - DNA, 903 bp, Acinetobacter baumannii
atgcctaaaccgatagtcgatgtcgcaatagctatcttaattcatcgcggaaaaatattagttggatggcgtggtgaacagcagcatcaaggtggaaagcatgagtttccaggaggaaaggttgagcagggtgaaacgcctgaagaagcatgccgccgtgaaatttatgaagaagtcggtattggtttaaaagattggcatcagtttgattatattcaccatgaatatgatgacattatcgtcaaccttcatttgttccatagctatgtacctgatgaattattaaatcttattcatcagccttggacatggtatacgcgtgatcagctagttaacttaaacttcccgaaagccaataaagatattattaaaagattgtattggccacattttattaaaattagcgctacgctcacactacccgaaaatgatgaaattttagtgtattggcgcagtgaaaaagataatgttagtgaggatgatctagaaaaattagctcttttagatacaaatcagctttcaaaattaatcgtgaatgtcgatacttggcacaaactaaaacctgatttaaaaagccgtataagaacagtacatcttaaacagtctcaattaatgagtttgcataaaggcgacttagaagtgggagtacgttttattgctgcttgccacgatgcggtttctttacagcatgctcagcaaattggttgtgatgctgtttttgtaagccctgtcaaagtaacagagacccatcctgacgctatcgcattagggtgggatcgttttgctgacttaattgacaaatgccagattcccgtctttgctttagggggcatgagtcctgatgatttagccacagcacagcaatatggtgcgtatggcttggcaggtattcgtaatttttaa

SEQ ID NO: 52043 - DNA, 351 bp, Acinetobacter baumannii
atgaaagcatttaaagtgatcttgatgacagcgcttactggtatagcgctagctcctatatctatgagtcaagcagcggctatatctgcaacggtcactactgttaagcaagcattaacggcaaaagacgatacgcctgtaaaactacatggacaagtcgtgaaatctattggagatgagaaatatcagttccgagataaaacaggtactatcactattaatgtagatgatgagctttggcaaggtcatcctatttccccaacaactaatattggtttagttggtgaagtagatatagactttaaaccctcaaaacatgtagaaattgatgtagaacaaatccagttttaa

SEQ ID NO: 52044 - DNA, 1005 bp, Acinetobacter baumannii
atgatccatgaaaatattctcgaatgcataggtaaaacgccactattacaactatcaaggctattcacgcatcaatcagtctcagtgattgcgaaaatggaattgttaaacccaggaggaagtattaaagaccgtccagcattattcatgctacaggaaggcctgaaatctggagtgattaataaagacagccatattgttgaaagttcatcagggaacttagctattgcgcttgcaatggcctgcaaaatatatggattaaaatttactgccgttattgacccgaaaattgcctcagcaaacctacaaatgctgaagctctacaaagccaatatcgaaatggtttctgaaaaagaccaaaacggcggttacttaaaaacccgaattgacaccgtaaaacgactctgccaacaactaccaaatgctgtttggaataatcaatacgccaatccaaacaactggaaaagtcactattttggtgaagcagaagaaatcttaaatcaaattgatcgcaagattgattacctcgtgattggagcaagtacctccggcacgattatgggcgtgtctcgtcgccttaaagaaagatttccagaattaaaagtcatcgctgtcgatattgtcggctctgtgctgttcggtggtacatctggtccacgcgaaattcccggcattggagcaagtactgtcccagctctcctctcccccgatgaaattgatgatgtcatttatgtagatgactatgaatcggcactcggttgtagagaacttcttgaacatgaaggaatctttgcaggcggttcgagcggctcgtccatttcagccataaaaaaactgattccaaccattcccgaaggttcatgcgtcttaacgctgctgcctgatcgcggcgaccgctatctcgatcttgtttatgaagatgaatggttcgaaatgatcaagaaacgtcacttcaatcgaaacttacgacgtcaagaaaaccttactttacaaaatgttgtttaa

SEQ ID NO: 52045 - DNA, 1014 bp, Acinetobacter baumannii
atgagcaatttggctacccttcgctatttaagtcaatcagatttattaaatcttggtgcaaatcatagtaattcatttattgaagcgattactgaaggtttaaccctgcatgcaaataaacagtttgtacaacctttaaaaccttatcttcgctggcaaggtgctgaccatattgcggaccgtattattgcaatgccttgctatttaggtggcaacgaccctattgccggaatcaaatggattggttcaagacaacataaccctaaaaaattcaatattccgcgtgccagcgcactgattgttttaaatgattcagaaacaaattatccggttgcagtgatggaaggcagcctcatcagtgccatgcgaactgcggcaattacgggtgtttctattaagtatttagcgaaaaaggacttttcagacattaccgtaattggctgtggtccaattgctcaaatgcagattaagacggtacttgagcaatacgctcaagtgaaaaaaatacatttatttgatgtaaaccctgaagcggctgaaaaactcaaagcattgttcttatcagaatatccaaatctagaaattgaaattcatgacagtgctaaatctgcgattgtgcaagcagatgtccttattacctgcacagtttcagataaaccttacattccgtttgattggctaaaaaaaggctgctttgtttcaaacatttcaattatggatattgagcctgaagtcttcttaaaagtggacaaagtgattgtagatgactgggaccaatcaaaccgagaaaagaaagtcatcaacgtgttggttgaagatggtctattcagccgtgaaaaactgcatgctgaacttggcgacatcattattggtcataaaaacggccgcgaacacgaagatgaaatcattttgctcaacccaatgggtatggcgattgacgatattgtctgcgctaaatggttcttcaatgctgcacaagaacaaaacgttggcacggttctaccgcttttataa

SEQ ID NO: 52046 - DNA, 1695 bp, Acinetobacter baumannii
atgttagatcggatttacacagcacaactacaaaaaacgatagatgcactctacatggagaattatggagattttaaagatcatatttcctataaaaagccttatctggcaattactctcaatgatgagttggagctctatttcaactgtttaaaagtagatggtgtaaatcctttctatgttacccaacccgaagttttgcttcataacctgttgagcaatacaacttctaaaatttctatttctgaagtttttaactatttaactcaagcaacttggtggccgtcaccacaccatcaaaaagcaattaattattggctagacaacttagtaacggctgaaaaaattcctcaaattttacagtcagccctttcattgtcttcgcctttaatcaaaagcgagctgctatcgctggtcgctgatcgtccatttcatccgttcgctcactcaaaaggtgaacttgccccactcacaactcaaaaagaaattgaggtgtattggtgggcatttaagaaggatgatgtcatcaacaatatgaagtcgattcctcacaaagagcttctattatccgaagttgaggaaagtcttattgctgacaaaatggctcagctttcagatgactacttagccctgcctctgttagagactcaacatcgctatttaaagtttgatgaaaataaatacggcggtattgacctaaaccatgtcaccacaattggtttaccgacttcttctttaagaacgcttattcacaacgcaaaccctactctacatttaaaactctcaaccaatgccaaaacattaggtgcaatccgctctatgccaggccgttatttaatgaatgggcatacggcttatgattttttaaatgacgtcattaatgaaactgctttaataaaaaatcgtctctttttaagtaacgaaacgcactggtgggtgctgggtaaacaagagccgattgtaaagaatttaggtgtaattggttgccaagtccgacatttacctgacttttgccaagacaaaaatgtcacatcaatcactatgtcagctttaagctgtacctatgttgacccttgggaaactttaggcattaagggtgacaaatggacattactaaaagacttaagcgttcattttattcaaacattcttaacgctttgggcaaaaggagtcatgcctgaatgccacgggcaaaacaccatggtgtgttatgaaaataacaagttgaaatgctttattttacgtgaccacgataccttaagaatatgtaccacagccattgaagaaagcggttttacacctccggtttataccattgataccagcacgccaaataatcttatctttactcaaaatgaagacttatttaactacttcattaccttagggattcaaattaacctctacccaattgctctagctactctgaaatatacaggtcgtacagaaagcgatttttgggagatggttcaagacattattcaagattttgtagaaacccaacccatttcagaacaaacaaaatcacaaattcaaacctatctttttgacaataagacttggccgttcaaacagctacttacgcctttacttgcgcaagaaagcgactcaacaggcatgccaagtaaaatcggaactacgccgaatccctatcaaagcttatctgtttctagctatgagaccatggatatctaa

SEQ ID NO: 52047 - DNA, 1206 bp, Acinetobacter baumannii
atgcgctcatctcgcctagatcatttcattattttgctctgtcagtttttttccacttttgggctcatggtacttattccgatcatgccgctctatatggaaaaactgacggcgcatatgagtgctcccactatctgggcaggtttagcactcgcggctccggctattggcagcttatttacagcaccgattgtgggacacctatccgacacattcggccataaaaaagccttgctactttctctggcaggtttctgtatttcaatactgctcatggcgagtgctcagcatttatacctgtttatttttgcgcgaattttactcggtttttgcggtctttccgtgattttaaatgcctatgtttcatatctttctaatgaacaacaacgtggtaccgcttttgggcaactacaaagtagtgttgcgctcgcttgcctatgtggccccgtgctcggcgggatatttatggatcaatggcgggttgaagtattactcaacgcaacagcatttgttgttgtgacactcattgtgattgcgtcatttgtattaactaatcccgttaaaactgaaaccacaaaaaccaaagagaaatccaagcttcccgctttctttgatagaacaattttttcatggttaagcgccggcattttggttcaagcgggtggctttggtttggtgtcttgcttcgttttatacattagcgaaataagccaaagcactcactcatcgttatctgccgcgagtttaacgggaaccattcatgcgctttcatggggagcagcctttattgctgcgacctattggggaaaaagaaatgatgataaaggagactcttttaataacttcgtttacgcatctttaatttgcggcatcacgatttttgcattgatctgggtttcgaatatctggctagttcttgtattacgactcatacaaggtttttgctttgcagcccttattccttcgatcttacacaccatttctctaaaagctggcgctcaaagccaaggaaaagtgattggtatttctaacagtgcctttgtcttagggcaacttattggcccaatcaccatcacgctcacctactcatttttcaatattaccgctgcattaatctgcacctcactattttttatcggtgcgggattagtggtgattttgaacagattcttaatggatacaattttaaaagaggcacaagaatga

SEQ ID NO: 52048 - DNA, 3528 bp, Acinetobacter baumannii
atgaactcaattattacaacagatgcatggtcttataaacttttcgaacagtacctaaatactttctttcgtgaacttaaagtgaaccttgaagagcacattattccctctcaagattctcctttattcacactgtataaagagcaaccagataccctctattttgcttatacatttaatgcatctaacacaactgtttatggcgcagttcagcacttatcgaccactggctatcacagatatcaacgtggttttgtactacaaaacttaagcaacgatacatttgactccctcaccgaccctaagcagttagtgaagctgattacagatgaactgaatagcttatttaaaaataaaaaccaaaataagaacctatactccgatattgccaatagtatcgagaacacaaaattctttttagaaaataagccttcccaaacagtaactaaagagttaagtggttttcaggctactgagcaaggcatgttatatgggcacccttttcatgtgacctctaaagccaacttaggtttttctaaagaagacatgaaaaagtatagcccagagttaggcgcaagtttccaactccactacttcgcggttcattcttctttaattcaaaagttagttagcgagaccgaacgttctcaccatattgaagatgaagttttagaagcagcaaaagatcgtttgcaagagaaattcactaattatgaactcatgccaacgcatccgtggcaagccaatttcttacttcaacatccatcgttaaagaaacatttagacagccaagacgtgatctatctaggcgcattaggtcaaaccgtatggccgacctcatctgttcgtacagtatggttacctcaatcgaacctattcttaaaactctctattgatgtacgaattaccagtttcattcgtaataacccaatggatgaaatggaacgtgccattgatgcgagcaaaattattattaatcacaagattaatgagcaatatcccgaccttgtgattctgccggaattagaggcgaaaacagtcaaaatcccagagcttgaaagttcatttggcattatttatcgagctgggctgactcctgctgtactagaaaatacccgaatgctcggtggcttggttgaagaaaacgaaaaccatgaaatcccgcttttaagctttattcagcaagcggcaccgaatcaaaacttacaatcgaacgatgccaaggatttcattactttttggtggaaacagtacgttaaagtttcgcttattccattagttgagttgtttgcaaacaaaggtattagcgtagaagcgcatatgcaaaacagcttaatggaatttaaaaacggttatccgcatcgccttattcttcgagatatggaaggcattagcattgttccagaaatgatagaagacgactcatctatttctgaagatagtactgtttggttctctcaaaaagatgcatggacgtttttaaaatattacctcgtgatcaatcacattgctcatctcatcagtgtaattgcacgagttacggtaattgaagaatctgaactttggcaagctacccgtcttaccctcacacaagaaaactttactgccaaaggcaagcagtaccgcgacttattaattcattcactcacattaccaatcaaggcaaatatgttaaatacgctctaccacagtggtggcaatcctatctggattgaagttgaaaaccctatttataaatatcgcggtgcagaagcgctttgccctcttcaaccaacacaacaaaccaattataaaatcctcgcggaaaaccgcgtgatgggccaattactagaagcgcttatttttgaaaatacttttaaatacgagttttctaaaggtcaaatcaagttctatattttcgataccgttttttatacttgcacggctaaacgacattttagttttaaacgaattaagctagatccttcaagcttaatccgttctgatattacgttagacactgaaactcgccctaacttaaaaatgctacttgccgacctaaaaaatattattgaagctgatccagttaaatggcaaaactttaacgatgaactcaatttaacttacgttaaacatgcgcaaactttaagccaagcgcctgctcagcctttaagaactttgccttacctagaacaagaagctcgaattaccaacgcgcatttatatcacccaagctttaagtcacgtatcggcttcgatttaaaagaaaataaaaaatatgcacctgagctttctgaaggttttacggttcaatgggcggcgactcataatagtttgtgcaagctggttttaagcgaaaccattaacctagatcagctttataaacagcatttttcagaaaaagatctaaaaactattaatgagcaattgaaagatcaaaatgtagattttaaagattatatcctcaccccaattcatccgtggcagtgtgataaaattattgaattgtattatcaagatgcgattagcaaccaactgatcattctgttagatattgaaggtccaacttatttaccacagcagtcgattcgaactttatcaaatattagtgatatctcggcactttctcttaagttggcaatgaatttagtcaatacctcgacctctcgcgtattggcaccacataccgttcaaaatgcggcaaaaatgagtgactggctgtataacattgttgagcaagaccatattttagaaaaacagcgtaagcctgttattttaagagagattggcggtctttcagtgaatcagcagattgcccttcctgttcaatacggcgcactcgcctgcatttggcgcgaaagtatttacagctacttaaaagaagatgaatcggcaacgccagtaacaggtttaatgcaactcgatattgaccaaaaacctctcattgatgattggattcaagaatacggtatcgagttctggttagaaaaattacttaccaacgcttatttaccaatcatgcatattttatggtgccacggcctcgctttagagtcacatgcacaaaacatggttctgattcataaaaatggtttacccattaaagctgccttgaaagatttccacgatggaatccgttttagccgtcatcttttacgtgagccgaatcttttaccaaacttacaagatgcacctaaagaacatgccaaaattaacccgaactcgttcttggaaacccactctccaaatgaactcagagactttactcaagatgcgctttggtttgtaaatctggcagagttagcaattttcttaaatgaacattatgacttcgatgaaatcaaattctggactatgttaagaactatcatcaatcaacacaaagaagctcatccagagtttgcggaacgatatgaattgtttaactttacagatgacaccatcgatattgaacagctcgcaagccgtcgttttcttccggaaattcgtttaagagtacaaaccacgccgaacccgcttagcttcattaaggaaattgaatatgaataa

SEQ ID NO: 52049 - DNA, 774 bp, Acinetobacter baumannii
atgaataagcattcgatttcttttaagaaacgaatagcaaatggagagatgctttacggaatattttgttccgtagcttctccgattaatgtcgagcaactagcactagcgggctacgactttattattatcgacttggaacatactttatttagtacatctcaagtcgagaccatgattttagctgctagagccatgcctcttgatgtatttgtaagagtgcctttaagcgcgaaccacctagtactacctctgctcgatgcaggggtaacgggcattgtgtttccgcgtattgaaaatgcgaagcaggcacaagaggcggtgaactattgccactatatgccacttggacaaagaggactcaactcaacaagattaaatcgatatggcatggacgatttagcgagttttgttcaacaagcctcaaacaagactgttgtcattgctatgattgaaagcttagaaggactacaacaactagatgaaattttaaaagtcgaaggtatcgatattattcttgaaggtgctgccgacctttctcaatctatgggaatgccgtggcaaactagccattcaaaagtgaaagaaaaagttcaagagatgtatttaaagactaaaaatagtcaaaagcatttctgcgccattcctcgacaacctgaagatatcgcggcgtggaaacaacgatctgttcagctttttgtactcggtgatgaccgaagtattattcgccgtgcccatcaaaaccatctaaattcctttaaggacaactcataa

SEQ ID NO: 52050 - DNA, 2235 bp, Acinetobacter baumannii
atggcaaataagaaaagtaataaactttttacaagaaagtccgaagttaaaaatatcattccacttctttcacttggaggagccattattctttcaaattcagcatttgccgcttcacctgctgaaaccacagaaacagaaaaaaagcctgaagcccttcctactattaccattaccgcttcacgtgcagatgaactctctacctctgccaaacaagtcaccaagttagatgaaaaacaaattgagcttttaaaaaatggatcgtctggaaacattgcgactgttttagccaaagccgtacccggcctatccgactcaagccgaactattactgactatggtcaaactttacgtggccgtaatgcgcttattttggtcgatggcgttccaatgaaccttacacgtgatacagcgagaggactttcagccattgaccctgaaagtattgccaacattgaagtgattcgtggcagtaacgcaatttatggtggcggtgctgcgggcggtattatttcaattaccacgaaagctgcgggcggtgaacctacggctaaaacggttgttggacttcaaacacccctcacaaatttgcgttctaatgctttaagcggtgatattcaccagtattttacgggcagttttaatgcctttgattatgcgctcgactttggttatcaacgtattggtagcccctacgatgcaagtggtgaccgtgttgcaccagaaccaagtcagggcgacctttacgactcaaatggatatagcatcggtggtaagctgggttatcacattgatgacaaccaatacctccagtttgctgcaaactactataatgcagagcaagactcagactatgcatctgacccaagtgtaaaaaaagctccagcaggaactgtcccagctaaagccattaaaggcttaaagctcaaagaccaaaataaaaacgaaaaccaaatctacaatttgacctataaccataaagacttttttggtaataaggttgatgctcaaatttattaccgcgacttctttacccgtttttcaccgtttgacgcccgtgcaaatgccaaccgtggtaaacaagtcgaccagatttatcaagaaaataatgtactcggtagccgcttaacggtgaccactccccttgagtttttaggtgacacatctttagtttggggtggtgactttagccgcgaaaaaagcgaaatgcctttagatattttcgatcaaaaaatttatgatcaatcgggcggcttagagtttgtaaaaattggcaaactgatttatttacctgaactcaccacgcaaagtgtgggtggttttgtacagctaaaacaccgctttaatgaccaatggtcagcagaagctggtacacgctatgaagacagctatgcgcaaattgacagctttgttcccttatcacaattaggcaaaaccaacccttacacagttccaggtggaaaagtgaaagctgatgcatggttatacaatgccaatgtgactttctcaccaaacgaccagcactcaatttatgcatcgtttaaccaaggtttccagttgcctgatgttggcttgattattcgtaatgctggtgaaggttttaaccttggatcatcattcttagagcctgtaaaagttgataactacgaacttggctggaaaggtaactttaataacttctcttcaagcttagctgtattccactctacttctgacttgggtgctgttcaatcattcaataatggtttagtgctggctcgaactaaagagaaagtcacaggtgttgaagcaacttttgactaccttgacgatgcaaatgtttggggaactggtggtagcgtaacgtggatgaaaggccgtgagaaacctcaaaatggtgctgaacaggacatgacgggcttccgtattccaccattaaaactaacaggttatatttcttatagcccaactgaaacttggacaaaccgtctacaagctacttacttcggttcagaagattaccgtttgaatggtgtaaatagttttggtcgttacgatgtaaaatcttataccacggcagatttaatcagtagttttgcgcttaacaacaaagacaccatgaccattggtttagaaaacatgtttaaccgcaagtactacccgctttatagccaattattaagaacaaacgataacaccagccacttacttgcaaatggtataacgcttaaagtgacttatagccataagtggtaa

SEQ ID NO: 52051 - DNA, 555 bp, Acinetobacter baumannii
atgccacctttagtactttctacacgtgctttaaaagttgtgaataagggaattgatttatttcaccatcacggattccatttagtaggtgtcgacagaattatcaaagagtctgaaattacaaaaatgactttttatcattactttcaatccaaagcgcggtttatcgaaatttgcctacttgtgcaaaaagaacggctgcaagaccaagtcattagtatgcttgagtatgatcacagcacaagcttggtggataaacttaaagcactttatgacgtacatacagaattggaagggctgtattacttattatttaaagccatttttgaaaccaaaaatacctattcaaatgcttatcaggtcgcacttaaatatagaacttggttgattaatgaaatctatagtcagcttagcgtgctaaaagctgatgcctcatttcatgatgccaaattacttttgcatataattgaaggaactattattcaaaggctcagtcataacgatgtagatgagcgggacaaacaattcgaatattttataatgatgttttcatag

SEQ ID NO: 52052 - DNA, 246 bp, Acinetobacter baumannii
atgagaagaaatagtacgcatagcggactccttgtgtgtaaagaagttctaccagatcactgtcaaatgattatggtggtagaacgagagaaggttgacagactgacacacaagaatcagcacgcacaaggcgtccctccctcgccctaccgctacgaagggggacgaacgagttcgccaccaaaaagagaactttttgatgtcttgtgtgttaaatcgatctgtcaaaatcgactggcaatgtag

SEQ ID NO: 52053 - DNA, 528 bp, Acinetobacter baumannii
atgaatactatctcagctactcttttatatgaacacccaattgagggatgcattaaagatgcaaatggcaatttaaaaccattccctattcttgcaattgataatattccattaaatatatggatgcatcaaaatgcgcgtattattgacgaaatgaatgatttagttccagcccaagggtggttgtatgatcatgatagtgagttagcattaagtaacgcatggaaacttcttaaaccagaagcttatgaaaatgtagctatttcaacagtggttccaatcttaatttgccctgatgatttagatctaacatgtagcgtaattatggttgagcaagttgtttcagaagatcaagtcgtatgggctcgttttggttacgcatttaaccatattcacgatgttgtgacatccgtagtctggaaaacctcgacttctgttcctcaattaagttttccattgagcgaatttgaaaaagcatataatgatttaaaagaattagacaaaaaatggagtgaaggttttatctag

SEQ ID NO: 52054 - DNA, 480 bp, Acinetobacter baumannii
atgtctaatagttataaatttcaattaaaaatggagctagatctaaaattaatcacgcctgaagagattcagaactgggccgtgcatgcactagagaatgatccaacaaatgagctagctttagacatctgttttttatcaaacactgaacaaatattacaatatttcagactcacggaaaaaagtgaattcaatgaaatttcggtagatgaagtaacaaggaaagttttggaaaattatatttttaagcacttaaatacttggaattataaagatcagatagattctttctttcagaatactcattacctgattcattatttagaaaatgcagaactagcttcgttaattcactcatatgagagtcaactagatgtggcatttctaggttattcacaattagagcctgaaacactatgggaaaattttaaattagagttaaaagaacacttttcatctcccactaattccaacaactaa

SEQ ID NO: 52055 - DNA, 339 bp, Acinetobacter baumannii
atgcgtaattttttagtaacagctttcactttattggtagggtcatcagtttatgctgctcaagagcctaaaacttatatacagcgaacaacttgcgagagaacagtacaactacatggttttttaagccgtgctcaacttgattgtaattatcactatacttcacaagaattagttcatgaatctgacaaatgtaccaaacatgaactaggtgaaaaatatggtagagaagttatgagattaggtatggaccaatttgaagcacgcaaacgtgaagatatgaaaggccaattatgtagtacggttttaaaagagtttccaaactatattagaaaataa

SEQ ID NO: 52056 - DNA, 216 bp, Acinetobacter baumannii
atgaaaacatacactgtaaaactatatgaaggcgttagtcgggagaaagttaatgaaactttgaaatactaccctgattattttggtaaaatatcactaaaagcatttgaaggaatcgacgttataactgccaatgatctaatgattaaaatcgttgaacgtttaaaagcttctcaattagtagaaaagcataatttagacttgttgactgtctag

SEQ ID NO: 52057 - DNA, 477 bp, Acinetobacter baumannii; identical to SEQ ID NO: 44640

SEQ ID NO: 52058 - DNA, 402 bp, Acinetobacter baumannii
atgtcatcagtcagcattgctgaataccgcaagttatttccgataaagaaaaataaaaagcggcgttcagcaaagcaagttgccagacaaccaagtgtgggtgaaatggttctggcaacgcatttaagagcatgcaagattggttttgaacaggaatataagttccatcctgatcgtaaatggagagcagattttttaataacgggtacaaagattttgattgaggtagaaggcgggatctggagtggaggccgtcatacaaggggcaaaggctatataggggatatggagaaatacaactccgcagcaatgatgggttttacagttttacggttcagcacagagcaagtgaaagcaggcgtggcgattaaacaaattgagcaattggtaggtgaaaaatga

SEQ ID NO: 52059 - DNA, 531 bp, Acinetobacter baumannii
atggcagtaaaaagagttgaaggttcttggaaaaatttcccatatagaaaagattttgaaaacggtgcatcaaataatggtggctttaatttggtagaaaatccagcgcaaattgacttgataactgaatttgacaatcttcctaaaatcaaaaaagcggtataccaattaaatatacaaaatacccccttcatgacaactggctttctttttgatagagaaaatgagaatgcaatttatcatggatatatcgagttttgttttagacccaatattaattattcattaatcgacattcataaacttgatgaaatgtttgtatccaacacccttgagactattgggaaacagtttgctgatttttatcaaacggagtttgtttgggaaattcgtgaaggaagcgttcagcaatcttccctagttccaatttattgtgttttctttcgagctcgcaatcatgctgaagctgagttggagttactccctcttctaaattggctacaaagttcatttcaacacctcatgaattaa

SEQ ID NO: 52060 - DNA, 324 bp, Acinetobacter baumannii
atgtctaatttcaaaaagcaccccgacggctacaagtcatttttaggccgtgatgataagggcctctactctgttcgcattggctggcaagtgtacgcatctaatgctaatggctcagttctttacaaagttaaagacggagttaagacgcctttaaatgtgttcaggttccaaacttattatccaaaagtttggaatgaactcacccaagaaatcgattttcagcgcagaaagcagctcgcaataaaactgcgtgaaacaaatatccctacctatgaccgcaaagcttataaaactaagcgcggcttcactggctcaagatga

SEQ ID NO: 52061 - DNA, 1122 bp, Acinetobacter baumannii
atggctctaccgattattactgctgaccaaactttattggttcaagcaattattgtgtacctatacgctgatccgggtttaggtaaatcatcgatgggttttactgcggaaaaagcaatttcttttgactttgaccgtggtgctcaccgtactggtgaattacgtcgaggtgcggttgtacaggttcaacaatggagtgatgttgcaaaccttacgccgcaggacttagcaccatataaaaccgtagtcattgataccgtgggtgcaatgcttgaatgcattaaaacccacctgttacttacggcaaataaccgtcaaaaagatggttctttaaagttaaaggctcaaggtttagcgaaccaaacgttcaagcaatacatcaatactttgatcagtttaggtaaagatgttgttttcattgcacacgcatcagaagatcaaaacggtgatcaaattatttaccgaccagatctaggtggtaaaaaccgtaacgagctttaccgtatcgcagatgtcatgggttatctaacaactgttactactagtgaaggtaaaaatgccagcgttattaatttcaaaccttcgcctacacatcatgcgaaaaactcaggtgctttaggtggtgaaactggtgaagtgtgggtaccagatcttaaagcacatcccactttcttggctgacctgattactcaagctaaagaccacattaacaccttaacgcctgcacaacttgcagcagctaaagcccaagaagaactagaaaactggaaacaaagctgtgaagaagctgaacatgcaggtgaccttaatcaattaacggaatcgcttgataaagaacatatgtattaccagaacatgcgacaagcaatgttaatgagagctaaagcattgaattgcacgtttgataagcaacgtggcacttggattagtccacctgaatttaacggtatctcagatcaacaaagagatgaacttcaaaactttattgctgaacgtggcctcgatgtaaaaacagtttgtgagcacttaggtatagatgccctcattcaaatagaagcggcaaaactaactgcagttaaacaagaaattgaaaccttagcgaaaacggggatgacagcatga

SEQ ID NO: 52062 - DNA, 378 bp, Acinetobacter baumannii
atgaaaaaattgatgcttgctatggcaccagttgttttagctttaacggcatgtgcgaccacgcctggtgcaggttctacagaaacagcaactcaacagttaggcatgactgcattaaaagtggctgtaaacgcgaaatgtattacagaaattaataatgttgctgcatggaaaacagcaaccaagcttatgactgctgaacaacgtgatagtattcaaactaatgtttgtggttgcgtaagtgaaaaggcaccaaacagtgttacagcagttgatttggctactgctgcacttgaccctgcggcacgtgcaacagttgtaaatcaggttgtctctaatactgtaaacgcttgtgtagcagaagctttgcaaaagtaa

SEQ ID NO: 52063 - DNA, 1227 bp, Acinetobacter baumannii
atgatgtctgttaaaagatttgtaatgagtagtggcgagcgatttgctgttcttttggatagtgatggtattcctatgacttatccaaatttatatacgattattcatttaagaaatcgtggtcaatcaattaatacaatttcagctaatttggaagatattaagttactcttccagttgttagataagttaggaattgacttagaacaaaggataaaaagtaaagactttttggaattaaatgaaatcgaagctatatcaaatttagccagttttagtcgtagccgattagatggaatgactccaaataaaaaaattataaattttccaaaaggtaataacagagagcgatctagagcaaaattggttgttactcaggactatgtgtccaaacaattaatatataggcgtttaactaattttgctgagtatattggatggttagagacatattttcattcatcagcaataacaaacacaaaacgcttgtttacatctcgtagacctcgaaagtccatggatattgagtctgaatataagtcctttgatagtgagcaattatataaaattttaaaggcggttgatcctgatactcagaatcgtatttggatttcagattatattacttatagaaatgagctgattatctatctatttttgtatctaggatgtcgtaaaggggaattattaaatttaaaaattacagatataacatcccaaaagaatggtgctgtatatcttactataagacgtaaccctcacgatgggagtgattctagactatatcaacccttggtgaaaactagaagtcgatcaattgcagtcaataaaaatctaaagaaaaaattagaaacttatattttaaattataggtcaaccgtgccgaatgtagaacttacggactatttaattttatcaaataaaggccagccactttcaatcaatgctcttgataaaatcttttctgaaatttcgagaactgttgcatttaatgtacatgcacatgcatttagacatacttggaatgataaattttctgagaaatctcaaattttagtggcaacaggtaaaacaactgaatttaaagtagaaaatgatcgtgcatatctgatgggatggatacctaactcacaaagtgcgagaagatattcaagacgtgcagaaaataaacgagctatagaagtaggtttaagtattcaagaaaaatttgaggatgaaaatgactaa

SEQ ID NO: 52064 - DNA, 222 bp, Acinetobacter baumannii
atgactaaattacttcaagttgatagtttagataaaccgccaaattcttttatttcattcaaaggctttgaagttgatatttatgatcatacatgggttttagatattaatcacacagttaatatgttgaatctctcaaaattttcggagaaagttagggcggatgttttaaatacctttatacattttgctaaatatagctcaagcacacatgctaaataa

SEQ ID NO: 52065 - DNA, 1335 bp, Acinetobacter baumannii
atgatccgctatgctcttaaatatcctgttttgacaggagagtcagaaattactttaaaaggaattttagaatataaaaactattttaatgataaacggtacgaatataagttagcgaagtttagagtctttttaaaaaaactctacaatttaggatactcttcagtagatgatgaaatttacgatttaatagattcatggagattaggtgggaatgaaaaaggtacagccgttctttctcttgatccagatgaaggcccatttagcccatttgaattccaagcaattatcactaaaactaacgaatatttagcagaaaataagatttcctattatgaggctgctttaattcgtgttttttgtgcgactggtagaagacccatccaaatttcaggactaaaggttaaagacctatacgtgtctgataaatatagttttaatgataaaaatgcagttcatatccttaagattccgagagctaaaattagaggtgctagtggattccgatttgcttttagtgaagtagggattcgagaaagcattgcaaaaattttatttgaacatattcaaattctaaagcaaaaattaactaaacaaataaagagagagctatctgaacaagagtttacagagctaccactattctatgattttgagaagttagttaatttggattggggaaatcaaaatgaaatttcagagattttgacaaaagaaattattcatataccgagcaataaattaacccaaattttgaaaaaagctattcaaaaacttggtatccgctctagagaaactggtaaaccaatatctgtaactgcatatcggtttcgttacacgcttggaactaatgccgctcgacagaaagcaggtgtgaatgtcattgcaaagctattagatcatcatgatacccagaatgcacattgctatgtacaaagtgttcctgaaattgcacaacaaatctcttccattatggatgagaacttacgcaaatatgcagatgcttttcaaggaagagttgtaaaggatgagatagaggctcaatcacaaattaaagatgctaatcgaatatcttgtgtggaacaggactgtgatgttggctcatgtggaacacatcaatattgtagggatcatgcgccaatagcatgttatctgtgtagcaagtttatgccttgggcaaatgcaccccatcatctagttctagagcaattaattaaagaacgagatgatctaatagcaatgggatgtagccttgaagtcgctgctgtgaatgaccgagcgattattgccgttcagcaagtaattgctgcttgtaaggagtttaatcatggataa

SEQ ID NO: 52066 - DNA, 2124 bp, Acinetobacter baumannii
atggataatttaatatattttccatcagacaaaatccagtctccttacttcgaaattaagcggtttattgattttgttaaacagttatcagaattaaatgaagatattagatttgatgagaattattggaaaggcgaagtaaactttgtcaaatcaggtgtgccatcacaagacagacgacctgaaaatctcttggatcattcaattctagaatttgccaaggcgtatgttaagtatcaaagaattaatagtaagttaaaaacccaagatacgattttgggaattcgggtattagaaaaaatatgcttagatcgatatggtgaagtggatttatctaaattagttattgctgattttgatttagcggctgagaatgcaaagaaaagttataaagcaagttctgcttatcatgtgggaagacacttaaagattctcttggattttattcgccaattaaaaatagtgaatttaccagagtggaaaaatccaattaaaaagcctgctgataaggtaattctgctagataaagagtcagaagaatatagatcatctaagcttccagatgaagatgctatttttgcattggctgatattttctcacgaaaagattcagagttgtcaaatagagatatttttgtcaccagtgctgtgagtttgcttctagctgcgcctgaacgtgcatcagagctgtttttcttaaagcataattgtatctacgaggaagaagtcccaaggcgttctaagagcagtttagagcttgcagaagatggttcgaatattgagaaagtattaggtattagatggtatgcacagaaaaattatgggtatgatattaaatatattccgagtgtcatgattccaacggttaaacgggctattgaacgtttgattaagatgtcagaacagcctagacatttagcatatttgcttgagacaagcgataagtttccgagacataagttctgtcctaaagtgcctgatgatcaattattaaaacgtagtgaagtattgtcggcaatgggatttgatgtgtcgctatatgatgagactagtaaagaaaaaaatagtggcaaaagttttttaataactcgtgagattcctattagtgattacgcagtctgcctgaatgatttaaatattattctgcgtaatagactgcctcagggctttccttatagaccttttagaactggtaatggagttcagattaagtggtcagaagctctatttgcatcttttcataatcaatttcattcaaataagataactatcttttcagaattatggattccaacaattaataacttaaatgaagatttatcgcccacaagaagaaatttaaaaggaaaacgccaattatgtaatatgaaatctatttttcagcggtggggacatggtaattatagtatgacaactcatcaattccgacatttattgaataccatagcaaatacgaatggaatggatagcttgttacttgctaaatggtcgggacgagctgatatgaagcaaaatcgagtatatgaccataccacggttgaagatcgtaattatggcttaattgagatgcagaaaaatgaggttggtatagtaaatactgatagtacatttacatttcagaccgctacacctcgaactctacaggagttaaataccaaaaccacgttgtctatgcacactacggaatttggactttgtacacattcgtatattgatgaaccctgcttaaagtatagaaactgtttgaattgcactgagcatgtttgtattaaaggtgatgtagaaaagaaaaaacggcttcaagatagactaaaaaaagaaaaaatcttatgggcaaaggataaagagtctgttagtaagaatgttactggtgcaacggtgtggttggagatgagagaattaacgattaaacgttgtgaacagatgattgcactattgaacgatccaaacattcctgatggtacacctttgagccttccatcttctgaagatatccctcatcttgatttagcgtatcaaaaggcaggtcgtaaacgcattcctactattgagaatactcaacgtaaacagattgaaaaacagcaagttttgcatgaatctttgttaatggatttatggagttaa

SEQ ID NO: 52067 - DNA, 420 bp, Acinetobacter baumannii
atggcacaacatttaacggatcagaatattcaagatattgttgaaattcttgattattggtcaccaaatgaaaagttaacgtgggaacgattatgcaaagcgattgaagtgcaactagaacttgtacctgcacccactcgtcaaacactacagaaatttgcaagaattaagaacgcttatgatctaggaaaaaaatctccaacagctttaaaaatattgaaatcaaaacaacaaaagcttcctgcaagcttgaaaattgctcaagctagaattgagagtttggaagccaagaataccagattggaaaaagaaaacgctatgttgttagaacagtttgtagtgtggcaatataatgctcataagtatgggctaagtattgctaaattgaatgagccgatgaacaaaaaaagttcagattga

SEQ ID NO: 52068 - DNA, 159 bp, Acinetobacter baumannii
atgttcttatatgcttccacacactgctataactaccaaaattcaattttggtaaataattcgtctcatacgattcaaagtattcgagctatgttcaagcccgcgactttccgtcagcgttggttcggctttgggctaattttctcttcttcatcgtaa

SEQ ID NO: 52069 - DNA, 228 bp, Acinetobacter baumannii
atgccatttataaatatacaaactatagaaggtttactcgataaagacagtaaggccgaactttttaaacggataacagacttatttgtagaaatagagggtaagggtaatcctgcttttcgagagcatgtttggataagaattgatgaatatccacctgaacagtggcaattaggtagcttaagtccaacaaaacaaatgattgagttaatgacttcagcaaaatga

SEQ ID NO: 52070 - DNA, 474 bp, Acinetobacter baumannii
atgtcaaatcaaattattccagaccataaatttcccgtagatgtatgtggaatctttaaaattactgaaatattgaatgacagatggacaatcctcttgttaagagaagctttctatggggtaacaaaatttaatgattttttagtaaatacaggaatatcaaaacaaattttatctaatcgtctcaaacatcttattgaattagaaatatttgagttatctatttataaagaaataggtgtacgagaacgtaaagaatatttacttaccaaaaaaggtaaaagcctaaatattgttttgcttgctatgcttgaatctggcggtaattttatggaagcagatcgggatgtcgttaaagtttttaagaaaaattcagatgatgaactcaaattaaaacttgttgattcatttgaccaagttatagattttaatcatttggaactgaaactaactcatcgtagctataagaaataa

SEQ ID NO: 52071 - DNA, 543 bp, Acinetobacter baumannii
atggaccaaagttataacttaaaatcagttttactcatcattgatatgcaaaatggactattcaaagcaaagtcgacgccatataaccatcaatttgtactttcaaatattcttaagctgattaattatcaccgttccaataacaagccaattatttttgtccgtcatgtcggcgaaaaagatacgcctttagatcccgatagcctaaatactcagttgataacagagttatcttgcaatccagataaagatattgtcattgagaaaacatatccgagcagtttcaagcatactgtcttaaaagaactattagagaaacttgatattgatgaaattatagtgagtgggatgaaaacggaatattgtatagatacgactattagagctgcttcagagtttggatacaaagtaactttaatctctgatgcccatacaacatctgattctacggttttagatgcgcagcacataattgatcatcataaccaagttttaaacaatgtttttgctaaggtaaaaactactgaagagtttttccattaa

SEQ ID NO: 52072 - DNA, 360 bp, Acinetobacter baumannii
atgaaaatttctaaaattttacttggtgttattggaagtacttgcttcatgcttagctctgcagcgatggcgaaaactaactctggtgtatattcacctcaaaagggtgtcatttgtgataaatacatttgtgcggacaaaaaaggcgtctctaaaaaacttacagctaaatatttaggtccttataaagcgaataaagctttctctcaaggtgattttgatacttcagcatttacattctcaaatggtgtgttttgtgataccaaaacaaagctatgtcatgtcgatcgatactttcaaaatgggcatcgtagcaaaattgataaaaatatgactgataaattattcaaaagtaaataa

SEQ ID NO: 52073 - DNA, 2445 bp, Acinetobacter baumannii
  misc_feature (312)..(321): n is a, c, g, or t
atgcttaaaattattttattggggtgggttgttggtattgcattgatgggcattaatttacctttaattatgcaatatggaaaagtaggcaaagctctgctgttacttgcttttattttctatctttttaaacgctcagtattcgttagccgaccatttttaaaggcaatgtattctttgttatgtgcagccagcctttttgttgtggggtatcaatatgccgagaatgcgttggtcgaacgcttacaacaaagagaaatggattcaaaaaatctcgatattattgtttatataaatcaactaagtgaagannnnnnnnnngaaaaagacaataaagttcaacaaaatgctcaagtattaaacctatctaaagatccggtaaattggctactgtatttaaaaaatgataatcaaagtgtgttgaagagcaatcaagaacttcaattaggccattactatcgactatctggaaaaacaaaacctgctcatagttacgccacagcaggagcttttgatcaggaaaagtggtttattcagcgaaatataatgtttggttttattgttcagcatattgagcctttaagccgtgatgaaatttatcgattgggatatcaacagcattcaagagaacagcagtccttttttaatagatttcaaataaatatagaaaagctgcgcttaaattttaggcatctattgcaaaattcttcactacatcaaaaaggactaattttagctttgctgactggtgatgaaagccttttatcagatgagacccaaatacaatttaaacaattgggaattgctcacttgttagcgatttcagggccacatgtacttatttttgccatgatgttgtcttggttctgtcatcaagtcatctgccgttattatcctcaaatttacttatggaaacccaaacaagttttgatggctataccatgctgtttcggtgttttaatttatacagcttttgtgggtttcgaaattcctgcactacggacattgttgtcagtctttatatttatttcttttatattattaaaacaacctcttaaaccatttgcgttgctcctatacagtgcaagtttattattactcatggacccgtttagtgtcttgtctgcaggtttttggttgtcttatggggcatgctttattttattaagaatttatcaaactatagttcaaatacctgatcaacattttttaagcttacgctcgaaaatgatttttatgactaaggttttaattgagtctcaaggcaaaatctttattgcattaagtcctttaaccttacttttctttcaacaaatttcttgggttgctccattaaccaatattgttgcggtgcctatcgttggtgggattattgttcctttaaatatcctggctgcttgtacatggtttattgccaaaccatttggaaacatgcttttttatttcaatgatatcttgctcagtatattgctgagttgtttaggcttattagaaaaactgtctttaccactacaaggtataagcttgacgccactggctttattcgcagtgagtttaggcatccttattttatttttgcctaaaggcattttgccaaaaacatggggaatgctctgttgtttacctctcattgttgtgaataaaacgaaccaaccaattcaacttcatattttagatgttgggcaggggcaggccatttttttacaacattccgaacaaaactggttaattgacacaggcggttcttacgatgaaaaaatatttagtattggacaaaatgttgtagtgccttttctacgtcagcaaggcgtaagacaattagatcatgttgtgttatcccatcttgatcaagaccatagtggcgcgtttcctattattgaacaagagattcctgtaacgcagcttatttcgaatgaacaattaccaaattatttaaagcaaccgttccaatattgccatcaagggcaacaatggcattatcctgagttagatattcaaattttatggcctaaagaaaaagatctggtttttgttgcttctaaccagaatcaatattcttgtgttgtatatcttcaatttaaaaaagttgctggttaccaaaattttcttattatgggcgatgcaggatgggaagctgaatacgagttattaaaagattatcctaacttgaagatagatgtgttagtgctagggcatcatggaagtaagcacagttcggcttatgatttcttggcgaccttaaaacctaaactggccattgcatcggcagggtttgataaccgttatggccatcctagccaacaagttatagcacgtttaaaagctctacatattccgctaaaaagcactgtggaacaaggaaccttaagttttgtgttggaaaaccacaaaatagttttacatgaccgacgtttggataggctctggttgagtagaggtttttaa

SEQ ID NO: 52074 - DNA, 534 bp, Acinetobacter baumannii
atgagaaggtttgcattatcaaataaaaaagaacggggaattccacgtaaattaagaaatcttaaatattggagtgaaagttttaaagggtatttccctgatttagacgggtatgaagagcaatattataattggaaaatacctgtagctatgaatctagttcaggggaagcatgctcaacaagaaataaaggcacagtgtgtccagtatttaattaatgcatgtcagtatttaattgaagcaaaacctcaaggactaatattctgcaaagtggtctgtataattgtacagccagatatgtttgcgagtgagatttgcttatatttggatgaagattattttaatgttcatactttgtccgcagattcttatgatccccaatatcttttagcggacaacctaagtttggccaaaaattggagactacaaatacctgataacatgtatgaacaaggtgtaaaaatccgtaataccgacttagaagataaagcggagaattatatcgctgatcactggtacttcattgaaacttga

SEQ ID NO: 52075 - DNA, 501 bp, Acinetobacter baumannii
atgagaaaagaatttgaacttcgtgtttttgaagaaatcttaaatgatattaaatatggctatttgaaaaatttaaataaaaaagaaatgttttggcagtgtgcacaatataattttttatttcgcgcattaaaggaaagtttcaaacatgaaaatgatgactcagcatttggtggcgattatgcttatcgtgtgcagacttattttgaagagactattcaagctcgggttaaatatcattacataccaagttgcgcgaagttaaagggcaaaatattagcatttgatgtgcactcatcaatgtttgactgtttaggtgaaaaagaaacaggtggctttatagatggttctgatacaccacctcctgaattttggattcatttcgatggggaaaatttatattcatttattccaaatgagctcacaaatattgtcgacttagcaatagatatttcaatgagtggctcattggaatggcacacggatgtgattgaaatttag

SEQ ID NO: 52076 - DNA, 363 bp, Acinetobacter baumannii
atggtcatgaaaaaaacaattggtttaatttctactttaatgttatctgcattcatgttcactggttgtcagaatatgagtccatctgatcagcgtattggtgcagcggcattaggcggtgctgttggtggtggtgtcggtaaccatgttggtggcgggctaggcgctggtgtaggtgcagcagctggtgcgggtgtaggtgcgaatgctaaaggtagtaataagagttccacaacaagtagtgctatcggtgccggtattggatctgtagtagggaaagccatttttggtggtgacacaggcgctgcgattggtggtgcacttggtggtggtgccggcgctgcgattgaagaaaagcgttag

SEQ ID NO: 52077 - DNA, 723 bp, Acinetobacter baumannii
atgcaaaacttagtgtttccttcaggattatctgttcaaagagcaaagaaacgtgccaaagagctagttaaaactgaacaagccaaaaatcagactgaagcccttaactcaatttctataaaagaagtcaataaaccttgggctttagcaatatcacaactacatcaaaactcaaattatttaattacactcgcggatattaaaagagtaatggagcaagaacctttacttgattatagtggatttggtcatgctgatacatatcatgattctttttataaaagacatacttttagaaattctaaaacagaatatcttcaaagttttatagaaaatagagaaaaattaaagaatgctattgatgaatgccaacgatgctgtatgtatttacaacatcttaaaaaaattaaagtagtacgatatagattaggtagctatggaacaaaacatagtgtagaaaagtatcaccgctatttaaagcagtttgaggatgcatatgtatctaatggagcatttatctgtgcagcaatacatatgggttttaaagtaataagaaaagatgattttagtcccaatgcatggatttgtgcgagtgtacgatccgacataatcatatgggagagattacttgaacaacaaaattcttaccatcattttacggaacaaaacctttttaaaaaagtgagtaaaaatatcggtcttttttcagatgaaattatatag

SEQ ID NO: 52078 - DNA, 360 bp, Acinetobacter baumannii
atggtacttgcaattgctgttctggcaattgtgctcgctggtaatcctgacagtaaagttcttggtcttgttgcttatgcgtgggctggttttggtgccgcatttggaccactcatcatcttgtcattgttctggaaacgtatgactttagaaggtgctttagcaggtatgatcgtaggtgcagttgttgtaattggttggaaaaatcttttcgcaagcaccggtgtttacgaaattattcctggctttatctgtgcatttatcagcatcatcgtagtgagcttgattagcaaaactccaaatactgatgtaactgaccgcttcgaacaagctgataaactctataaagaaagtgtataa

SEQ ID NO: 52079 - DNA, 216 bp, Acinetobacter baumannii
atgcttgaatcaatgaacgatgatgaagttgcatttcaaattgtagtagccgattcagtatttacgtttttcttaacatttagaaataagcttatagattcaccgcggttggtgcatgaatataatcaattaaaattacagtgtagccatttagatcccgatcaatatagagcaataaaatcagattttattaaccgcgtcttaaatcatctttaa

SEQ ID NO: 52080 - DNA, 960 bp, Acinetobacter baumannii
atgttgcaaaactctaagcgtattggttttctattactcgataacttttctatgattgccttctcaaacatgcttgaagtattacgtatggctaactatgtcatagaagataatttataccaatggaacgtaacgggtttagatggacatcatagctgtgcaagtaatggcttacaaatacaacacacctgtgttttatcacatttactcaatatggacattgtctttatttgtggtggctttcaattatataaaaatatgacgccacgattaaagaattttttatatcaacttgatcagaaaaaaatcgctctaggtggtttatgtacgggtgcatatgtattggcaaaagcgggtttgctcaatggctttcgtgccagtatgcattgggaaaatactttagccgcacaagaagaatttcccttagtacaatttaccactcatatttttactattgatgtgaatcgtttcacctgttctggtgggcttgccgcaattgatttaggcctacagcttgttgaaatgcactatcctaatattactaaaaaaatttgtgagcaatttattgtccatcaaatacgtgatggcaatgaaattcaacatcagcctatttctaaacacagtaaaaagcttgatttgccgattcaagaggtgttgcgcttaatggaaaataatattaatgaacctttaaagatttctgaaattgcacagcatgtaaaactgcaatcacgtaccttagaacgcttatttaaaatacatctgcaaatatctccgaaagaatattacttaaaactaaggcttactcatgcacaaaatttactgaaacagtccactttgagcatttcaaatattgcatttgcatgtggtttttgtagtgcttctagttttactaaagcctataaagctttttttaactattcacccaaatttgaacggaatgttctagattttgctaattag

SEQ ID NO: 52081 - DNA, 1239 bp, Acinetobacter baumannii
atgaatactttagtaaataattttgctgtttcagagctaccatcattattaaccattgaaaatggtgaaaaagtttctgcgacattttcattatctgagtatcaaaatagacaaagcaagctacgccaactaatggaagagctagaaattgatcatgttctatttagttcaatacataacattaactattatgcggactttatttattgttcatttggtcgcttctacggtctggtggttagcccagaaaaagtggtgacaatttcagcaaatattgatgctggtcaaccttggcgtcgtacggttggtgactataacgtggtttataccgattggcagcgtgataactattttaaagcggttgcacaagaaattccgaatagaggtcgtgtaggaattgagtttgatcacttacctttagagcgtttaaacaagttaaaaacagttttaccgaatgtgcagtttgtcgatattagtgccgcatgcatgaagctacgcatgattaaatctgctgaagaaattgcacatatcacccaaggtgctgcagtgtgtgatattggtggttttgcagtgactgcagcgattcgtgagggtgtaccagagcatgaagtagctttagcctctacccaagccatggtacgtgaaattgccaaacggttcccaaactctgaactaatggatacgtggacctggttccaatcaggcattaataccgatggggcacataatccggttacgacacgccaagtgcaaaaaggtgacatcttaagtttaaactgcttttctatgatcgcaggctattacacagccttagagcgtacacaattctttgatcactgtgatgatgcttcactacgtatttgggaagcgaatgttaaggtgcatgaagcaggcttaaaactcattcgcccgggtgcacgttgcagtgatattgcgaaagaattaaatgaaattttctatgcagaaggcttattacaatatcgtacctttggttatgggcattcttttggcgtcttatcgcattattacggtcgtgaagcaggtttggaattacgtgaagatattgatacggtgattgaaccaggcatggtgatttctatggaacctatggtcatgattccacaaggcatggctggtgctggtggctaccgtgaacatgatatcttggtggtaactgaaacaggcaatgaaaatatcactaagttcccatatggcccagaacataacatcatcaaataa

SEQ ID NO: 52082 - DNA, 1293 bp, Acinetobacter baumannii
atgacaaaagacaatcaggtagagcaaaaaaaaaccttaaaacgtgtcgcaagtgcaagcttcattggcaattttgtagaatggtttgattacgctgcatatggttttttggcaacagtcattgcagtggttttttttccgcaaagtgatcctttaactgcattaatggctgcctatgcaatctttgcaatttcatttattttacgtccattaggcggtattttttggggccacgttggggacaagtttggtcgaaaaaatgcactatcttggtcgattatcttaatgaccctagcgacagtatgtatagcactattaccaagctatcaaagtatcggtatttttgcaccgatcctgctcttagtattccggatgatacaaggtttttcagcttcaggtgaatatgcaggtgctgcaaattttcttgcagaatatgcccctaagaaaaaaagaggactttataccagtttagttcccgcaagtactgcagcgggtttactactcggatctgtaatggcagcagcgatgttcgcttttatgtcagaggcatttctacacgaatatggttggagaattccattcttgttggccgcaccattgggcctaattggatattatatccgtgtaaagctagaagacacgccagaatttttagaacaccaaaaaactggccagaaagaaaattttccaatcaaagctttatttaatcaatatcgaccagcactttttaaagcatttgctgttgcatctttaaatgcgactgcgttctatcttatttttaattacatgccaaactatttggcaacagaattaggcgtaaataaaacccaagcatttatctcaggatcaatttcactgctattttatatcgctgtagtttttgcgatgggaaaatattcagaccgaattggacgcaagaaaatgttgctttgggcaagtctaagctttatcgcacttacgatccctttattctacttactttcaactgccagttttgttgaaatggtgatgatccaactggtgttttgcacattgttagcaatgaacgatggtagtttacctgcatatttaacagaacaattccctatacaagtgcgctataccggttttgcctttagttttaatactgctaatgcactgttaggtggaacagttcctttggttgcaacctggttaattcaacaaacaggtaataccttagcacctagtgtcttattaattgtagttgcagtttttgcaagtatggctttattacaaaggaaatcacatcgtttagtcagtgctaaagcttaa

SEQ ID NO: 52083 - DNA, 906 bp, Acinetobacter baumannii
atgcttttaaatgctctacctgcactcaatagaaatatatcgactttaattggtcttacagctgtcatattttggagtacaaatgtaggcttaattcgtagtgtcagtgagagctttggagctgtagccggtgctgctctaatttacagtttcgcatccatgattttagttttcacgattggtatgcctaagttttctacaatcccaaaatcctatttatggtggggaagccttttatttgttgcttatgaattatgttttgctctttctattggctatgcacaaaacagtagacaagcaatcgaagttggtatgattaattatctatggccaacatttaccctagtatttgcaattatttttaacaacgttaaggccaatcttttaattattcccggctgcatattggctttggttggaatttgttgggtgctagggggggatactggatttaatcccttccagatatggaacaatttgaaggttaatcctcttagttatggtttagcttttgctgctgctattttgtgggctgcatattgttctgtgacagtaaaaacatctcagggtaaaaatctagtcactatattttttgccctggttgcagttgtactatggataaaatactttttcatgagtgggtcagctattaattttacttatgacaatacagtcactctgattatggcggctggtgctttaggtttgggatatggtgcttggaatattggaattatttcagggaacatgacattaatggctggcgcttcttattttactcctgtgttatctgctttttttgcggcattacttctaagtacttccttatctttcatcttttggcaaggtgttgcaatggtgacaacaggagcagtcttgtgttggttagcgactcgaaagcaataa

SEQ ID NO: 52084 - DNA, 225 bp, Acinetobacter baumannii
atgccatacgaagaatttcaaagacttatggggaaagcaggtctttcaattaaggaatttgcaaccttattggacatgaatccaaactccataactaactataaaaagatcggaaaagtacctactcatatcgctgttctggtttacttactttctagcatgaaagatgagggtgtagacttttaccctatttttgaaaaaattaagtcgtattcaaaagactaa

SEQ ID NO: 52085 - DNA, 246 bp, Acinetobacter baumannii
atgtactcatacccggattcaaacactgaaaagaaaattgctctcatgatcatcaatgactttttcattcaaaaagcccatgaactgtggatctttttacaactcgatcagtgctttaatgattatgaagccacactgatttggactcgacgttatttagagaagcatcctgagtgtgagtacagcgatattcaaaaagcctttgtttcttgtttcccagagcacttcttcagctttgactgttaa

SEQ ID NO: 52086 - DNA, 762 bp, Acinetobacter baumannii
atggaaatggaaaaagcaaaaaagcgtggtcgacctgctcagttgttacagattgctgagttacatgcatttgtagagtttttagaacagcaagaacagctttctgatcttcaatctcaagtgttaaaggctttaaatagtgttgattgtaattttgaggggctaactcagacagatcaggttctggtcaaagaggctttaaaaccttatcgtgaacatctgaagttgaaattgctgtttgaagagttgaataatctgcctcttaaaaccgagtatgaacagaagtttttagatctgtatgaactttttcaaaagaatgcactagatcagatggaactaaatattttaaaaaccttggcgacacggtatctgaattttaaagcgcaaaagcttgaatacagtgatttagaattgtatttgagtcagctacagaagaaggatgctgggaaaaaacgcaaagctgaaaatcaacgtaaatttgaattaggtggtgctgttcttgtcgcatttaagaaactcaatattgatattagcaatgatactcctcaacagattaccaatcggattgtgaatacgacaaagtttcataatgaagtacgtaaatctttaatttttaaagatgttaagacatatgaaaatgaatattttaaagcaaataaactttttattcaggtgttagaaggattacatacctggcaaaagggcggagaattattgtcagtaattgaaattaaaaaggccttagaaaaaggcgaagagtag

SEQ ID NO: 52087 - DNA, 1170 bp, Acinetobacter baumannii
atggccagctaccacttcagcgtcaaaagcaaaaataagggctatgcgaccggccattatctctacatttcccggctgatgcagtatgaaggcatccgcaaaaccagcaatgagaccatagaacatattgaacctggtcgatgtatgcctgcctttgtaaaagatcccattgatttttggcaggcagcagatacgtatgaacgagccaatgccaaggcctacatggagtatgaaattgccctaccgaatgagttcacgtcagaacagcgtaaaacgctcatagagacgtttttagacaaacatatagttccacagcaatatccgcactcatacgccatacacaacgtaaaatcacgtatcagtggcgaagatcagcctcattgtcatctgatgttctcgctaaaagcggatgacggcattgaacgcagcgcagaacagtacttcaaacgctataaccctcaagatccagccaaaggcggtgccaaaaaaatccaacttcaagatggccatgaagactattccacttttttgatctatatccgaaaacaatgggaaaatcatttgaatgatgcccttgcacagcactgcccgaccgtcacctacacactggatggccaagacatcaccatcaaaaatcaggtttcagcagacagctatgaaaaatataacgagatccacagcacgctataccttccagagccaaaactaggcgttggacaacaaaatgcgacagcggaatatctcgcccaaatccaaaaaatcagagaacacaaccagcaagaacgagaactcgaagaacgccaaaagcaattagatcaacaacatgaatatttttatagtgctgaaaacaacccattttcatcattggaagtcatgtattacctgaattacttaatcaagaatgcaacaaataaggacaaactaaaaaatgatttgaatgaaattatcaaaaaccaaggccctatacttaaacaagaagcttggtccatctacgaaatgaatgaaaaactagaagactcaagacgtaacagtaccccatgttttgagttcaaggtgcattcacttcctgaatacgtattaccgatacaaaatacgcctcccaaacgcactcaatcagaaccagtacaacctaaagctgatgattatgattacggtggccctggtttttaa

SEQ ID NO: 52088 - DNA, 528 bp, Acinetobacter baumannii
atgggaactgtaaagctcaaatcttctgatgaagtttttcaattaaaaattagtctgctaggtagtgatcctgaaatctggagaactattcaaatttcatcggcagctactttatctaggctccataaggcaattcaatctgcttttgattgggaagatagccatttacatgaattcacgactattaagcatgaaaagatcaataaaagacaaaaattgaaagaagttctacgtgtaggtaaaaaaattatatatacatatgattttggcgattgttgggaacatttgattactgtagaaagcagacaatctcctgatttaaataaaaaatatccatgttgtatagatggtcaaaatcatgctccatttgaagatattggaggaatttttggatatcttgatattttagatgcattacaagaccccaaacatccaagatatgacgattacatgcaaattatcgaggatgaaataggagagatagagtttgatccgacctactttaattcacatgatattaagttttaa

SEQ ID NO: 52089 - DNA, 612 bp, Acinetobacter baumannii
atgatagaaatgaatacacgtatttatctacgagcttcaactaaagatcaagatgcagaaagggctttgcagattcttcaggatctaaaccaaaacttgaatttgggtgaaaccattgtgtacgtggaaaactatagtggtacgaagttagaccgacctgaattgaataagctgctgtcagaagcaaatcaaggtgacaccttgttagttgaaagtattgaccgcttatcacgcctaacccaacgagattttcaagagctgaagcgcaggatccaggagaagggacttcgtttagtcgtagcggatcttcctactacctaccaactgattcaaaccagtgacagcattactcattcaatcctggaactcatcaacaatatgttgattgatctcctggcaacaatggctcgcctagacaatgagaaacgtatagaacgtattaagcagggcctggcacgttcgggttacaagccaacaggtaagaaagccaatgaggctaagcacaaacgaataaaagaattgctagcagctggcaatatgactaaggaagaaattgccaaagcagtgaattgtggagttgcaactgtctatcgagttgctaaagttatctaa

SEQ ID NO: 52090 - DNA, 288 bp, Acinetobacter baumannii
atgttaaaaattttagggcgtgataactccattaatgttcgcaaagtcttatggctgtgtgaagaattaaatcttgaatatgagagagaagattggggacgaggctttcgctctgctcaatcacctgaatatttacaattaaatccaaatggtcaaattcctgttgttttagatggcgatttagtcctttggcagtccaacagtattatccgttatctcgccaatgcttacgataaagagcataagctttaccctactcaagcaaaagaaaggttctttgttgactag

SEQ ID NO: 52091 - DNA, 345 bp, Acinetobacter baumannii
atgaaagatatgatggggaatggttttgtagccaatgcggaagctttttcagtgtccacacaaatatatgtgcgtatgcgtagggtcacaggacgggtcatagatgcattgtatgtggtccaaaataaagattacgcaaagtatgtaatagcgctggctttggaaacagatgacgatgaattaaaacgttatgttgaacgattaaattcattgactgacaccataccagagcttcctcaaaaacaaatcgcggaaaatgttcagttaaacgaagaaaaagaaatcacggctgaagacatttatcgggcacaagttccgcaccattatattggtgctttaaggtaa

SEQ ID NO: 52092 - DNA, 417 bp, Acinetobacter baumannii
atgaataataagcaagggtatatgctgggagttttgaacggggtgtttgtattattatcaaatgcctgggcagcacaaccaatgacagaaagtgcgctagccactcaaacaggtgcggtaaccacatctttacccgtcattattgctaaggctcaagatgatgcacaaaaaactgaaatagagcagcaccaagctcgcaaagaattaggcgataactatttgcaagaagttcgttggaactcactaaggtcgagtgtgttatcaccttatcaagaacaaaaacaaaatcaggtaatagatattaaagaaaagaaaaaattagaaatggttgcactaccagaccgagcggaccgctttacacgttatgagtttgagccaaagaatgtacatggtgaagttatcattaccgtaaagtaa

SEQ ID NO: 52093 - DNA, 1524 bp, Acinetobacter baumannii
atgctgcttgttccatcatgcattatttccagtgatggttttttcaaagctttatatccgcttatttttttcgtttttttaatttatcattaccgccgttttttctggcttagtttacctatttatcttttaagcccttttgcactgtactatgaaattacttataacgccccaactgaaatttcagtgtggctcacaattttaggtagctctgcaactgaaggccaagtttatttatcgacattagatcttcctttagcaattggtttgattattgcttacatcattcctttgattttcttttattatttcattccaaatcaaagactaagcactccaatatggctacgtattttagcgttatgtcttattttttcgccaattcaacgctaccttaaagcacctgatcatcagcaagggtttctaaatgtatatcgccattttaaacaatcttaccctttaaatttacttcttggtttaccagcagcgagtcttgaagtaaatcgagtaaaagatttcatagccacacaaaacgaaattgaatgtacacaagttaaggaaactcgcccgaccattacagtactagttattggggaaagtgctcgacgcgaccgtttaagtttgtttggctataccaaaaataatacaacgccttatctagaaaaatataagaaagatttatggttatttaataatacgatttcaggctcttatatgaccagtaagtctgtaccgaccttattaacaggaaagttaaacgggactgataatttaagcccttctattgtgaatgctttcaatgcagcaggctacaaaacttactggtttagcgcacaatcccaatatggagaatatgattctcttgtttcagcatatgcctcttctgctcaagaaactcaatttttgacgcaacattcatattcagcctcactagaaactcattatgatgaggagctactcaaatcatttgatcgagcattggcagaaaaaacacatcataaattcatcgtgttacacctttatggttcacatgcagattttgcaaaacgctatccaccacaatttaataaatttaaagatacctatgacaatacagtactttatacagactacctgctcaatgaagttattcaaaaattaaaagcaaccaatgtggatgccaacttaatttacacatctgaccatggtcttaatcttggagaatgtaaagaaaatagttcactgcatttagacatgaaaaataattttgatgtccctttaattatgtggagctcaaactcatggaagcaacatcatccagagatggcgagtactctttctaaagaacaaagcagtgcaatcagctcaattaatatattacctacactcttagatatgagaggtattcactgtaaaaacatttctcaagagagatcgttatttaattcgaaattcaaaacatacccaagagaaattttagcaacatcagaaacggtcaactatgataaaggtcacgatgacagccaatgtcatttagtgagctga

SEQ ID NO: 52094 - DNA, 765 bp, Acinetobacter baumannii
atgaagatttatgttatcagtatcgaagaggaaaattcacctcgcttaagtaaattcctcagtcaaaatttttttgagcaaggaaacttacctataacgagagtaggcattaaaggaggagacctttcagcaaaagaatattttgaaagagctgtaaagggccgtgaaactcctttaactccaggtgaactaggctgtactttatctcatctaaaagcacttcaattttttttagatactgatgatcagtatgctttaattttggaagatgatgcaattttcccaagtgatcttacttatgagatattagaaaaacaaatagaaagtgctcatttaccatctaaaacattattaagtttaggtgggatacaaatgaaagaatcgcgcaaagtacgaggaaattttaaagaggagtcttttctgaataaaaagattcttgaggttattcctgactattttcatcgtgtgaactatgcgatggcttatattgttgatcgtgatatggcaaaagtacttttggcttatcatcagcctttacgtcgggctgatgattggagttacttatttgattttgatagccaagtgcatcttttaatgacatatattgttgaccatccagtcattcaaaagggagaaaaaaatcaagagttaagtgccatcgaagctgaacgagtcgatgcaactagtttaaagaaaagtaagtatggaacaggcattcgacgtaatctagctaaactgtttagtcaactttattcaaataagtaa

SEQ ID NO: 52095 - DNA, 453 bp, Acinetobacter baumannii
gtggttttttattgcgacatttcaccagtaactaactttcttaatgtgaatcatgctaaggcagcgaatgaagggaagccgttagttgtattgatcgcaccacaagagaaagatcgttcgaaggctcaaaaccgtttgtactggatgtggcttaatcaatgggctaaacgtcaaggtaaagataaagattacgagcatctgttctttaagaaaaacttcttagcaaaaatctatgattgcgatgacgttggccaatacaagaaaacattcaaggctgtaagagagttgaaagattctaagcatcctctctaccaagatgtagcaagtggcctatgtgagctaatgagcactacagacgcaagtacagttcaattaaccgaatacttaaacgacattcatgctttctgtaataaaaacgggtgttatttggaaacgcctgatgatcttaagtag

SEQ ID NO: 52096 - DNA, 2343 bp, Acinetobacter baumannii
atgccaaagattaaaacagaagagcaattcttagatttagcagaaaaatttaaacaagattattgtctattacatgatgatgttgtgaatacacaatttgtcgatctatcagatgatttacgtgaaaaagcccacgctctatataaggaagcgcaacagatatatggctatatatctagctctagacaattaggtaaatattattttctagcttctttaagttattttgcatgtccagatactagtaatacacaagagctgtcatcgcaacgttatttgattctacaagcgagttttttaacatatcggcagtatcaagaatttgcaaaaattgctaaagctgagaataagcaaaaacatgtttgtgacctcctacgctatgtctcacgatatgtgctggattctaataatgctgaattatttcatgaatgtagtaagctgctaaattgttatgtcacgtacgaacgtaatttgaaaaaagaggatcgtaatcaactttttaatattaaaaatttcaaaaaagtacaagtcatagagtatttatcggctctattaataatttttaaaagacttgatgatcgtcgtgttgttcatcgtcagcgtaagtcaaaaaaaagcaaagttttgaaatggccaactaaaattgaactcaaaaaatttcgtgaaataaaatctggtaagtatgaagatatcggacataacgcaaagatcagtttttatgatgcctctcttcacaaagatgaagatggtgaaattgagttattggacattgaagtagaattatactcagaagatgaaaaaactaaaaattttaatcatttaattagtgattatactgcgtattacacgcggcatcgccaacgccgtcatgtgccatttattacaaatcctcattatttagcaccagatgtactgaagcaaattgtttatgtgttgagaactgagttaaatgcggactgggataatgctgcaatcgctgccgcatgtttattgtcacttttgactggattatctcccatagcactgatggattttaacgagctcatacaagatggtgttttgatccagaatggttcaagaaaacgacgggaatatttacttaatttaaatttgaaagttaccgagcagaaaattaagagtttaaagcctgtgcgttggaatgaagagatgactcaccaactacatctacctgcggcatggtttgactacatagaacaagcatcgaatccaaagatctcttcaggagatattaattccgaacttaagaagtggtttgctaatcagtttgtgggtactatcaccgttgaaaaacttcaggcccaattatattttcatatatattatgaaacctataatgaatatcttactcatgtgattgcgaggcgggatatcaagcataatgtgccaggtatttattacggaggacttcccaaagctcagcttgatagcagctatttagcttttttagaatcagcacttacaccacattctaaggaacttacagaagacacggctgaactcaaaatattacaacaacaattcaaagtgcaatctgcatctaaagggagggtagggagtcaactggcacttgaacccagttttgtgaaagagcaatttgcttttttacatagacattgccaagaaaatattcaaaaagatcaacatatcattaatcaattgaatgcatacgcgtgttggatgtggcatgttagcttgctaagcatggccagacggcctaataaaaatctgttggggaatttggaagattattgttttgagcttaaaattctatatgtaaacgataaaaagaatagcaaggtaagaaaggatggacgatttatcccgctatccgatttcttcttaaaagcactgcaaaattacactgtatttttaaaacaaataattgaactgtatagcccacttttaaaacaagtatttgcaaagaaaaaaattgcgctcaatgacttattcggaaaggtcattgatagtaaagatatcttgccgataactgtcaaagagtggcagagcaggaaagttaagttaatccctttatctcgaaactgggtaaatttatatatggaaggaatctttccaaagaatatgtattcgaattggttacgtcattttgatatgaattttttgatgtatgcagaagaaaaagaagaaaaaaaaactgctttagcattccatttaattcaggctctttatggtcatgaccaacgtgaccgagaggcttttcatccgtattcttcacttattccgaatgtctatgtacagcaagcccgccagcaattgcaagataatgtcaaatctttatcgattaaacacttagagcgaaaatag

SEQ ID NO: 52097 - DNA, 423 bp, Acinetobacter baumannii
atggggcaatttatcatgcccttttgctttgagcgacaaaatgttcaatttaagatagtaaaaattaactcagaactactgaaaatcaaaaagattaaacagagtcagaaagtagtagtacaagcaaagttcaaaataatctatgtgaaaatttggcaaaaaatattgctattaatgcaaacggagccatgcttacgtgtacattctaattatgttgcaatcttacagttgatacataatcttgatgattttatcgaaaaatcacagcaacacttatgctttgagagaaaagctcagaaagagctagatgctaaattttttgctagattttttaagctgacaaaaagtccaatcaaagatcaacttttacaaaattgttcagatcgtaatgaatttaaccaatgcaatttgataaaaaattaa

SEQ ID NO: 52098 - DNA, 306 bp, Acinetobacter baumannii
atggatttatatttcactaaacccgaagaagtcgtgacgcttttaggtgagcgtttacgtaagcaacgactctttctggagatgtctcaagctgaggttgcagcacgcgctggtgtcggcgtgaatacggtttcgaatcttgaagcggcacgaaatgtatctgttgaaaatttagtccgtattgcaatggtcttgggtcgattaaacaaacttcaggagctgtttcaacctcagcttaacagtgtaaaagatattctacgctatgaaagtcaaagtaagcaccagcgtattaagaggaagggataa

SEQ ID NO: 52099 - DNA, 546 bp, Acinetobacter baumannii
atgctcaacagtcttaatgtttattacaatggttggggcgaatcatggttatggggaacgctgattagttcaacagccaccacaggtagacccactattgcttttgaatatagtccagaagcaatacagcgaggtgttcagctctcttcttatttactccctttaaaaggtctaccactgagacagggttttcctacttatcaaatgggattacctggtccagtctatgatgctttgccggatggttggggcatgttattaatggatcgatattttcgaaaaattggactgcatccggcacgaatcagccctttggaacgtctaacttatattagcacccatgcaatgggtgctctctcctttgaaccctgtgtcgcagagatgcaaacttcagagaatattcccctgccgcaattggcacaggaagtccaagaagtcctcaaaggagaaggtggcgaattttttacaacatttgctggtcatgggtggctccccccaaggtgccagatccaaagcattggtttaccgaaatcctgtcaattttga

SEQ ID NO: 52100 - DNA, 315 bp, Acinetobacter baumannii
atggcaaaaaatggtcaatggaaattggctccagcctatgatgtgaccttctgtgaaggtccaggtggttatcatcaaatggacattatgggagaagcgctcaatatttctcgaaatgacatacataaactcggtacttcagaagcgaatctgactactctagaagtcgatgagatcatcttggccatgcatgaaattgcacttcaatttagtcaaattgcgcaacgcctgtatcctcatcaaattcgagaatctaccctagagatgattcaatcacgaattcaacaaaatattgattttttaactgaaacctaa

SEQ ID NO: 52101 - DNA, 843 bp, Acinetobacter baumannii
gtgcaacaaagcctttggcataagaaaaaatttaataaaaaattaataagtttggcatggtgtagtttgggcacagttattttgacgggctgtcaaagtcctgctttagttcaatcaacttctacttcagtacaaccatcaaaacagcctcaacgtgtggtttttttcttgggagatggaatgggtatcacgacactaacagctgtacgaatttatgctgttggtgaagattgccaactgccaatagatcaactgccagagtcagcatttgttcgtactttctcagaagttgcacaggttacagatagcgcaccatcgatgggtgcctatatgacaggtgtaaaaatgaaaaatgaagtgatatccatgcagactggaacaattgcagtagaaccaaatcagaccggaaatcatcaatgtggaaccaatcctcagatccaaaataagcaagacacccaaactttactcgaattggccaaagcacgaggttggggtacaggggtagtcacaacaactcgcattacgcatgctacaccagcatcgacttatgctcatatttgtcatcgtgatgctgaaaatgacatagcatcccaattagtaccaagttcgcaaggtgatatctatcagcgttataacgtcaaattaaaagatggggttgatgtgattctaggcgggggtaagcgtcaatttctgccgaaagatcaagggggagaacggatagaccaacggaatttgatcgcagaaatgcaacaagcaggctatcgaatggtctatgatcaaactcaactctcccagatgaagttaggaaagataacactaaatataaaaaaatggaataaataa

SEQ ID NO: 52102 - DNA, 402 bp, Acinetobacter baumannii
atggtggattttatccataataataaacagctgtacggagtcgaggcgatttgtagaattttaccgatcgcaccttcaacctattaccggactttagatctcacagtaaatccagaacatcgagcgaaacgagatttacatgacttgcatcatgctgaggagatcaagcgaatttggaaagaaagttcaggtcgatacggtgtgcgtaaggtctggcaacaactgaaacgtgaaggctatgtgattgcacgttgtacagttgctcgattgatgcagaagctaggtatacaaggtgtttggcgtggtaagaataaacaaactacccgtagccgagatgaccaaaaacgggcagatgatttagtgaaacgtaattttagtgctgatcatccaaaccaactatag

SEQ ID NO: 52103 - DNA, 318 bp, Acinetobacter baumannii
atgacaaaattaaaatatacccctgaaatcagagaaagagcggttcaattattgattgaatctgaaaaagattatccatcgaattgggctgcgatcaccgctattgctcccaagataggttgtagtcctgaaacactacgtgtttggtatcaaaaatatttagataaacaaaatccagttaaagtacagcagctttcagaccaagaacgtatcaaacaactcgaacgcgaaaataaagaactgcaacgcgccaatgagattctacgtaaagcagccgcttttttcgcccacgcggagctcgaccgcccacacaaataa

SEQ ID NO: 52104 - DNA, 1200 bp, Acinetobacter baumannii
atgagtcttactgatattaaagttcgccaagctcattgcaaggaaaaaacctgttttttatccgatgaagatgggcttagcctgaagattgagccgagtggaagaaaatcttggtgctatcgctatacagatccacaaactaaaaaacgtcgacgcattcagttaggtctttatcctgatttatcgctgaaaaaggcacgacaagtcagagatgactttaaagacaataatttctgttttgaacatgatactgcctctaatcttatcacctttggtaaggtcggggaggagtggttacagttcaaactgaagaatgccttcaacgatctaccccgctgtggtgtactacagttagcagaaagatgcttacagcaagatatttatccagaccttcaggatttaccttttcaaaacatcaagcgctatgacctggtttcagtaatcaaaaaaatagagggacgccaagtaaaagaacctgtcaaaaaagcttgtagttatttgaaccaaatttatgactacgctgtagcgatgggttattgtgagttcaacatcgctcatggtttaaataaaatcaccattaacagcaaaatcaagaaaaattatccgtatttgaaagcggaggaaatatctgattttaagaataaattacaaaaattggatgcccatcccattattaaaaaagcactgatgttcaaattacatactggcgtgagaggggccgaattgttattggctgagcctcatcattttgatttaaatgaaaaaatctggaaaatacctgccttgcatattaaacagtttcgacgaaaagttatattaggccatgagattccagattttttagttccactttcaaatcaggctttagagattttgaaagacgtcatgcagtggtcatacggtgaaaaatacctttttgctagccctcgcaaacacaatcaaccgattcattttaatactctaaatatggccatacgtaagatggggtatggcaaacatcaactatcttctcatggattacgttctacttttagtaccattttgaatgactcaggtttgttccaagataattggattgaggcacaactttcacatattgataagaaccgtacccgtgccagctataatcacgctgactatttagctcaacggactgaaatgatgcagtggtggggtgattatttaagtactagtaagtga

SEQ ID NO: 52105 - DNA, 1296 bp, Acinetobacter baumannii
gtgattattaaaagttatgaagatttagatccatattttaaagatttccagtggactgaacatcgtaaagaccaagcttcattgtttattgcaggggcagagtttcaagcacacttcctttattttgcaggtcatactccagaaaaacgccaagcattggcagaatgtattgaagaatataatcgccattatgctgaatactttacttgggggcttaattttgatgaacaaggtaaagttcattataccgatatggcagagatgccaaccattcgggaagtcattgcaaaaaatccacatcctgatgaccaaattgaatggcgatgtgcatcaggtgatcgtgatgaagccccagaatatatgctttcagcctttaccaatagaggttgggagggacatcttcttgattgctcagctcttacttttcgtgtgccaaataaactcatatttgatcagggacacaaacagattttgatgtctttaattcagacgtgtattgataaacttggggtatatcatgcggtagcagggtttcaaggagcattaccttatagaccaatgggtgtaggtgattattcgcttgctcaaggtgaacgattttggggaatctaccaaggggcaggtattagagaaactagcagaattcaggatggaattaaaagtattgattggcttacctatatcaacaataccttggtacagcggatttgtgagcctaaaacctttccccaatattgtgaacatttcaatttacatcctcaacagcaggaacatggattcttgtttcaactggaagattacccgcaattgcttccaagtaatctcccagttttagagagctactttaatctgaacaaggcattacgcccattaagaaacggatcatattggtcaattagttatgatgttggaaataactataaagtcttggatgtagaagcaagccgtaagtggatttgtcgattagatgctccagatgtttttcctgatcgtgggcattatgaagaaagagagccaccaaaaaagaatatctatttggaatctggccgaccttgtgaaatagaaggtatctatcgttatgatgaacaagtcgatttggatggtcaaccagtatatgttggttacgcagatcgcaatgaatacaaaccaaatgatgttaatgactatcgacaacatgtggttttacgcaaaggtgatattgccccacgttttcttgagttctatgaccatgcgattttaaaacaagccaagaaaattaaatggcatttggtatatgagacagttaaggtcaaatag

SEQ ID NO: 52106 - DNA, 1014 bp, Acinetobacter baumannii
atggctcggaatcaatcaggttcaggtagttccagtgaacaaaaagcaggacaatcagaaactaaaaccagtaccaaaggtactgttattaaactggaaaccggaacaaataagacatacttatgtgcccatatttgtgcggccaataaaagccctaaaatcggtaaggcaggacaaaatctttatcagcgcaccgtcacaacagcaattcaagcggaggctgaggcaaatttcggagtatgggcatatctagcagaggtcggctataacatgcgtatgcgccctcccaaaccacttatgagtgaaaaaccagaacggatgcaccgaccttctagctttcctttgggcgcagcgcaaaagcagattgaacaattatctaaaggtgactttcgtattcctgacgtcacgattttaaccattaaggccgcagaaattattgaaatgcgaatgtcgggtacaattgactggaaacgcttttatcctgaaagaaataatattgaacgtctggttgaaattaaatttggtaaagatgaatgggctgagggacaatatagagcttatgagcagatagcgccagacaaggtaagagaagtatcagataaagattgtagttgtgagacacggaaaccaccaaatggtggtgtacctgttcctgtttacccaccaattaaaaatccgactccatataaaagtgcgatctttcgtcctaccacgctcagtttagctcccaaaaaaggaatacctatgttgggggggttaggtcacatgattgcaccaccatcgccaaaagtgattttttatcgaaaattagttcctttaaaggagtatcacaatatgatgattcctattgctgccagtgtgggcatcgcaggcgtatttatctgtggaacagtagttttggcaggcgcagtaacaggcggggctgttgcaaccgcaggtgcaattggtggtgctgctgaagcagtgggtggaggtctattgattacaggctttgcaactttggcacattcataa

SEQ ID NO: 52107 - DNA, 525 bp, Acinetobacter baumannii
atgaaatactacgtttgccttggtgatcgaacgacaggtggaggcgttgtaattgagggtaatattcagacgattattttagggcgaccagttgcgtccatgggaatgaaggccatctgctgtaatcggccacaaacaattttgcaaggttgggctgggcatctcgatcatggcaaacaaattgcctatgatgggtgcttactaagctgtggtcataaagtggttgccagtcaaaacctgatgggatggtctgatgggaattgtagttcagatgttccagaagaggtcatgtcaaaaccccaaaaacatcatgagttttttaccctacttgatgatgaaaacaaacctgtagtgaaccagaaatacagattatctgctgacgatggttctatcattgaggggtataccaatgcacaggggcaaacagatcatctctggacacatgaaaaacttcctgtcaattttgaggttattgatgatgaggaagaaacagagtttgacaattaccatattacagacaagtaa

SEQ ID NO: 52108 - DNA, 165 bp, Acinetobacter baumannii
gtgaatattaaattcattagaaatgatgatgatcttactaatgcttttattcgcttagaaagtatttttcaagcagataaaggtacgcctgaagctgaggaaatggagactttagtcacactgattgaagcttatgaagatgaatattatccaattaagaattaa

SEQ ID NO: 52109 - DNA, 609 bp, Acinetobacter baumannii
atgactgaattaactaaaccaaaaatcatcccaatcgaaaaccgtcctcagaaatctaagctatttttaaagtgtgtggtcttgccaattgtgatttttctcattgtcgccaaaattttttcctttggcgctttcgcctatatcttctttggctttgacctattctggtttgtgatcatttactacctctatcaatacggaaatacctacttcgatgggatgaccgaacaactgaaacgtcagggtgaaacctttaattatcaaaatcgtggagtatggattaacagtcaggataagaccatcatcctgtttgatcagcctgatcaacgcctagtcaaatatccttttgactatattacctctgtaggccattacaatttggtcgaagatcgcttcagaaccacaactacagtgattagtaacccgatgatgggaacacatattaatcagcgtgagcatagaacaccgatgaagcgagagttccaagtcaatattgggacaagagatcaattcaaacctaactatagcctaaaagtgttattcccttggcgtagtcctcaaatggcaagtgaaatccgccagttactctcggctgatcattatcaataa

SEQ ID NO: 52110 - DNA, 531 bp, Acinetobacter baumannii
atgaataaatattgtatcaaagaatttttatctaatactttagaaagtcatgagtcaacattaaaagaaacaagctttgataaaacaaacaatgagtatttatgtgaagatgaaaaattaagagttatttatgattttgatagttacgtacgtcaaaattttgaccaaaggctcttgcctgcatctcctgatgctatctatgttggaaataaaaagctttattttatagagtttaaaaatcaaaatccttcagatattgataaatctcaaatgaaacgtaagtttgaaagcgggacaaagatattaaaagaggagttactaaatggtttctaccctaaagatgttgagtatattttctgtgttgtatataaaaaacctagagccagatatttcaacccttatgccatagagtcaaatattcctaaatttggtttggaagaaaagaatgaggagttaggtcatttttattcaaaaataataactgaaccagttgaattttataaagaagagtttgcagagttagactgttaa

SEQ ID NO: 52111 - DNA, 1287 bp, Acinetobacter baumannii
atgaaattaatattaaaaaatataggattgcttaaggatgcggagcttgagctatctagattaagcttaattgctggtgaaaatgataatggtaaaagtactgttggtaaggttatattctgtcttgtaaaagccatcaatagatatagagaagatttggaagagtcgaaagaatatcgaatagaagaagagttcagaaatgtatttttctttttaagaactttgtctaatgagcgttatgaatttaaaagcgatactctacgtacattacaaagttctgaatatgattttagtactaaaatagatgcattaaatcaaattattgatgagttaaaaaattcttttcttgagactgaaactttacatcaattcattaatctacgagataaaattttggcaatgatagaaaagccagaggatactcgtgaactaatggaaaatgctttaaataaggtttttgtagccgaattcgattctcgtatactattagatggcgaggatgaaggctttattggactctatgagcaaaacataaagttaattgaagttaaaatatttaaaaataaaatacatttagttaataatgtggagcctattgttttagaggatgcaacatttattgaaactcctttaattctaaataatcatgatttattaattagaagtaaatcggcttttaatttaaaaaaacgaactctatctcatttaggaattccatatacaacatttcatacaaaagatttattcgataaactaatagaacctccatttggagatttatttgatacgaatataaataaattagttgaaagaaaattacgtgaagttgtaaatggtgaaattatttatgacaatagagagaaagactttatttttaagaaagatcaaggaagctcagtcccaataagaaatacagctagtgggattaaagtatttggtattcttcaattgttatctagtaatgattttattaataaaaagtcattgttggtctttgatgaacctgaaaatcatttacacccaaaatggcaattaaaactagctgaaattttaatagaccttgctgagcaaggagtttatattcttgtttcttcacatagtccatatatgatagaggcgcttaaaagatattcggatttagcaggtttagaaaaagaatcaagcttttacttagccaaagagaattcaattcaaaacaaagataaacttgaagaaatatttcaggttttatctgagccatttgaagtatttagaaaaatggatagagaaattttaaaagatgaataa

SEQ ID NO: 52112 - DNA, 1398 bp, Acinetobacter baumannii
atgaaagattgtagtcagtgcggcaaatccgttattaaatatcatcgtatttataagggtgagggatattgccatacttgctatgttcgtgtgtttaagctgctgccatgctcaaaatgtggtgagattcatcgactttattataaggaagaacaagcaatttgtgaggcttgtcgtcataacaaaccttgtatccgatgtggtaaggaagggtatgaaatagggaaaatcacagcgtatgggcctgtctgtaactcatgcagcccatatttcagggagaaaaagccttgcggttattgtggtgtgctgtcctcaaaattaaccaaaactgaaaagaatggtacgggtctttcaatctgtcctaaatgctatcgaaaagagaaaggttatgaaacttgtccccaatgtcataagaatcgcctcttaatagaaacagaacatggcaagatgtgtaagaaatgccatgaagttggattgattaattgccagacctgtggaataaagatgcctgctgggatggggagtatctgtgactcctgtagttggttaaagcggttcatgcaaagagtccatctactaaaatttaccattcctgctgaacagataagagcagcttttattgagttctctaaatggctattacaggatgttggtaatcataaagccgcattgactattgagctgtatgtgcctttttttgtagaaattactcgatactggaataaattaccttcatacgaggtgatacttcatcactttaagccgaaaggattgagaaaatacctcaaagtgaaacaatggttacatatcctttatcaaggaaatattcaggattctaaaaaaacagatttggctgaagagagtaggatagatgccttatttgccaagattgctgatcaacctattgcctgtgaactattacaaggttatcgggctgaacttatgacaagactttatgcaggcagaactacgttaaaatcagtgagattggctctacaacctgctgttggtctactattgcagagaataaaccagataccgactcaatctgaggttgggatgtatttggcagagagatcaggtcaacgagccgctttaacagggttcatcaactatctgaacaaaaattatgatttgaacttaatttgtggacatagtgaaaaagaaaagattcaggctcaacaacgaaaacagaagaatctagaaaatgagatgattgtttttattatcaaaagtagggaagaacagaattcaatccatattattgattggattaggctttccatgcggtattttcatgattgttcttacaagacttcaagcaaatttgaggtgaatcaagatcagtgtacagtgttgcaagatggtaaaacgtatgttctaccttggttacaatag

SEQ ID NO: 52113 - DNA, 1083 bp, Acinetobacter baumannii
atgaaaatttccatattgcgcaccccacatttaattgtggatgaaaccttaagttcttggttggttcgttcagctttgtaccaaggttgtgatcctatggttttgtcgtggcgtatctgggacaagtaccgaatctggacgatagattttgaacggaatttaccgtatgagcatctatttgcattgtccaaggcaacaggtctgggaattgatgtactgaatgaaatgctactcattcatcaggcaaagaaatgtgttcatgattttaatactgagagtgcgatttggtcatgggtattgtgtcagggtaacaggaatcgtaagaaatcagtaggtcagcagtattgctcgcattgtcttgcggaaggtacgccttatctacgcaaggaatggagaatggcatgggcgacagtgtgtaccaaacatcaggtgctgttgcaggattcctgccctgaatgtggtttctatttctcaccgcataaattgaaaggcttggaacaagtattgtctatctgccatcactgtggttttgatctgcgaaccagtaaaggtatacaaggaaactctgcattccagaaggcggctcaagctgcaattcaacagggctatgccaactatgggaatacctctttattaacagctgaatggttctctgtcgcaaaagtctttgttctgttgttaaggaaagctgctgcacatcaggatggccgctttgccaatatctttgctgatttaggtatttgtatagagaaattagttttacctaggactgtaggaacgtttgaatggcttccaattgctgagagacatggtttattaagggattgctacaccttattgcgacagcctctagaaacgtttatagcagttgctcaatcgcattcactcaccgccaatgcaattctaaatgttgttccgcaggataagttacccaaaacactatttcctttggtgaacagtttagaactgcaaagcaagaattactcaaaacgccagcttggaaatgagcctgcttctgagaagagtgttatgcggaagtgggcaagattacagcgtaaagttcagaggattgtagcctcatga

SEQ ID NO: 52114 - DNA, 885 bp, Acinetobacter baumannii
atgatgcagaacttcacacatattcatccaaagtttcagcacattgcggttttatccgatgctgaaagaattgaatttattaatacggcacgttggattggttatcagtctgcaaaggatattttgcagcgtttggaggatttatttatttttcccaaaagaccaagaatgcccaatttaatgattgtaggcgaatccaataacggtaaaaccactctgattcagcatttctatgaaaaatataaagaaccctatgaaactgaagatttagagttggtcattcccatcatactgattgaagctcccagtaccgcaaatgaaaaggcattgtatatttctatcctagagaaaatggctgcaccgtatcggcaaacggcttctactgaaatcctgtatacgcaggctttgcatttaatgcgtacctacagtgtaaaaatgctcattattgatgagtttcattcgatgtttacgggaacagcacgtaaacaacgagagatgatgaatgccctaaaaagactatgtaatgagctacaaataccgattgttggtgtcggaactggaaatgcggtcaatatcctttttaccgataagcagtttgccagtcggtttgaggtagcggaactccctgtgtggccgttaaatgctgattttcaacgaatgttgatgtcgtttgaacagattctgccactgaaacataaatctaatctacatgagcctagtgtggcacaagccatttattacaagtctgagggtaatctggggaatatcagtaaccttctggcaaggtgtgcgattaaggcaatacgcaatggttcagaaatcattgaccttgatttaatcaatgcacagaaagatttcctttccactacaagggggcgggtatga

SEQ ID NO: 52115 - DNA, 1911 bp, Acinetobacter baumannii
atggaaaataattctaaagacactccgatttcccttaatcgggaacaattagatttctctgttggggcatcagtcattcatatacccagtggtaagacttataaaattaaacggcagattgatttttcatatattgaatgccagtgcgccgagactggtagggtagaggttttacccctcctatctctggcaaaagcaaattatccagtagagatgaattatccagacttaaacaatattgagcctaatgcttggaaagaagcagaacgtaggtataacctgattttgcctctactgaatagggcggtttcggggcgaaaagagattgaggaatatgcaaaagaaaaaggtctaggatatgtgactttatatcgatggttcagagtttataaggcaacaggtgctgtaacttctttaataccgaaacaacgagggtggcaagaaggtaattcacgtttaacgcccgaacaagacaaaattattaatgatgccattcaggaatattatttatcgtctcagagattatctcaacaagaagtgtttaaacaggtaaaaattgtctgtagccaaaataatattccaagacctacgcaaaactctgttcgtaagcgaatactagaattatcagctaaggctgttttatacggccgtgggcagcctaaaaaggccaaagataaattttccccgaaagcaggtaagtttccgaacgtattctatccgcttgatgtgattcaaatagatcatacaccagtagacttgatgttggttgatgatgtgaatagacagtcgatagggcgaccttgggttacttttgctattgatgtgtatagccgcatgattcttggttattacctatctcttgatgcgccatctgaaacctcagttgcgatgtgtatagcacatgctgttttacccaaagaggagtggttggcagcgaaagagatagatggtgaatggagagtttggggaattcctaaaaagattcatgtagataatgggccagattttcgcacagaaaccttgaggcgagcatgtctggaatatgacatcaccttagagtttagaccagttaaagtgcctaattatggtgggcatattgagcgtttggtcggaactttcatggaaaaagttcatagattaaaaggtacaaccttttctaacattaaggaacgggctgaatatgattctgaaaaatatgcctgcatgacattcgatgaagctgaaaggtggattctgaaacaaattgtgatgatctatcataaagagatccactctgccttggctatgtcacctaccagtaaatggcgtgatggaatttttggaactggtgatgagataggctgcggtctgccacatgtacctgctaatcctaaaactgtgatgttggattttatgccatttgaagagcgtactatccagaatacaggtgtgacttgggatggggttcgatactttgattttatacttgctccttatattgggttacagggagaggatggtaaggcacgtaagtatatcttccgtagagatccccgtgatatttccattatttatttcttaaatcctgatacgaaaaactatattccaattcctgtagctaatcagaacttgccatccaccagtctatggcagttacgtgcgagtaaaaaacggttaaaagaacgtggcctcaaggactacaacgaacatcaaatcattgaaacgctgattgaaatgcaacagcttgttgagaatgctgaggcacaaactaaaaaaatgagacgtatcagacaacggagcaaaatccatcaaaaaaatattacgccagttcaacctattgaaaaacagcaacgtcctgaaaatgtagtcacacctaaaatggatggattattggatgctgatgttattcagccatttgaggatattcaatga

SEQ ID NO: 52116 - DNA, 648 bp, Acinetobacter baumannii
atgtataaatctgttagaaaaattggcccaaccagacgtagtgtttcaggatactactcttttagaaacacagcttctattccttatgaatcatctttggagcgtgactttgttatgcttcatgaatttgatgacaatgtggttgaaattatctcacagccagtttcaattccatttaccctgaatgggtgcaactatcaatatcatccagattatttggtgctatttcagagttgcaccaaaagtgggatgttggttgaagtaaaaccagaagaagaatggcgagagcattggcgaatttggcgcacgaaatggaaagcggcagctcgatgggcaaaggaacgcaattttttattccatatctatgatgagtctagaattcgtggacaagaactagaaaatattaaaatcctgaatagttttaaaagaactgcttttaatgaacaggaaatgcagaaagcttatgactttattcatggttcaggaatgatctcagttgcagattatttggttcagtttcctgttgctcaacatactagacagtcccaactgctatggcagcttctggcaaaaaggatattggtgacagacttatccttacctctaaataagaattcaatgattgaggtaagtggctatggaaaataa

SEQ ID NO: 52117 - DNA, 1215 bp, Acinetobacter baumannii
atgaaaagagcagcaattaaaaaaagacctttatcggatacagttttagctaatctagaaccagaagaaaaagattatagagaacgtgatacacaacaactttatttcctagtacaaaaaactggcaaaaaatcttggcaattgcgatataaaaatgaaaaaggggtgtggtcttggaaaggactgggtgcatatccaaatgtaagtggagcgatagctaggcgtaaagcgaatgagctatctatcaaaataggaaatggcgagcttatagagacacggaaacaagtcaagaagaggcaacaagaaattgctcaaaggaggtttgatgttttaatgaatgagtggctagacactaaaaaaacatcttggggagaagacacatttgagaaagcaaaaaaatcgattaatcgacatatcattcccaaatttggtgaacgagattttactgaaattatatctaaagaatggtttgacttttttcaaggcctacaacgtggcttgaatatccatactcaagttgagaaattaacctcttattgccgaaatgcttatgactgggcaaagttccaagggaaaataaattctaatccactcgatggtatgaccacgcatttagataaaaaagttggtggtaatatgaaattcgttgaattagctgaatttccaagattaattaaagatattcgtactcatcatcaacgtaaattagccattggtttagagttaatggctttattatttcctcgtcctgtagagttgcgttatgcaacttggaaccaatttgattttgataaagcaatttgggttaaacctgctgaaattatgaaaaagagagtcgtccacgctgtacctttgcctaaacaggcacttaaattattagaggagctaaaaaactataaaactgaatcagatttattgtttgctggtagaaatagcctaagtgagcctatctctgataatacctttaatatggctttaaatcgtatggggtataaaggtcgtcagaatccgcatggtttcaggcatattgcaagtacagcattaaataataaatttagtgataaagagcaagttgtcgaagcatgcttatctcatatgaaaaaaggtgtaaaaggagcttatgataaaggatcgcattttgaagaacgtgttggaatgatgcaatggtgggctgattatattgatcaactattagaagaagaaacattagtttag

SEQ ID NO: 52118 - DNA, 261 bp, Acinetobacter baumannii
atgaaattattttttagagatttagttctttataaaggcattcgaaaagttgaattatcgaatatctataagtatgaaaaaattattgatgcacttgatccagaatcaataatggctgaaaaaattaatgaaaatgagatagtgttgattcaggcagaaagaaactggtcaggctttgggttgttttatcctaagctgagtatgatagctaaacggctttgttgcacaaacctatctctaaaggcttattccacaatataa

SEQ ID NO: 52119 - DNA, 564 bp, Acinetobacter baumannii
atgaacactaaaaaacagttaacttcaacacaattagatttactgcttgaactgttaaaggcgagatttgaaaagaacacacatcgtcataaagaagtcgattggtcgaatgtacgggataaattaataaaatctccagacaaactatgggcattgcaagaaatggaaaatactggaggagagcctgatgttattgtttttgaccagcagaaagatcagtatttatttgtagattgttctcctgaaaccccaaaaggccgtagaagcctttgctatgatcgtgaggctttagaatctagaaaagatcatcctcctaaaaacagtgcaatagatcttgctaatgaaatgggagttgagcttttaacagaagagcaatatcgtcagttacagcaaattgaagagtttgatcttaaaacatcgagttggcttgcaaccccagtcgagattcgtaaattgggtggagcactttttgctgatcgtcgttatggccgagtcttcatttatcataatggagcacagtcttattatgctgtacgtggttttcgttgttgtttaagaatatag

SEQ ID NO: 52120 - DNA, 255 bp, Acinetobacter baumannii
atgaaaaaaattgatgaacaggacttatctagaattattgaaatggcatgggaagatcgaaccccatttgaagcaattgagcgagagtatggcttgcgtgaaagtgaagttattcgtttaatgagatacaacttaaaatcgagcagttttaaactctggcgcaagcgtatggcagggcgtaaaaccaagcatcagcaattacgttcaccagaagttgaaagagcttactgttctcgccagtataaatatgcttaa

SEQ ID NO: 52121 - DNA, 1524 bp, Acinetobacter baumannii
atgcgatttggtttaattctgggtgatcaattaaatcaccaactcgcaacgctcaagtatttaaaccgaaatgaagacattattttgatggctgaagtgcttgaggaaacatcttatgttgcccatcatccacaaaaaatagcgctaatttttagtgcaatgcgacactttgcaaaagaattaaaagcacagggctggaaaatccgttatcacacatttaagcgcgaaagtcatataaaaaagttagtcgactttattgctttgcaggagcaacacttcttcccgaatactctcgtcgttacccaatgtggtgagtatcgcttacagcatgaaatcgatacttcatggtctaactcactaaaactacctgttatttgtttagaagatgatcgcttcttttgtaccgtagaacaattcaagcaatgggcaaacaaatataaaacgctaaggatggaatacttttaccgagaaatgcgcaagcaaactcactatttaatgcatgaccaacaacccgtaggcgggcaatggaactttgatcaagccaatcgaaaagcgtggtcaggcaatccacctttgccacaaaaattagcctttgagcatgatcaaattgatatagatgttattcaactggtcaagaaagaattttctcaacatatcggcaatctcaattcctttctatgggcaacaacccgtcaaaatgccttacttgctttagaccattttatttctaataacctgccccactttggcgattatcaagatgctatggtttatggttcagactttatgtttcatagtctgctctcgccttatttaaattgtggattgttattacccaaagagatatgtgacgctgctcaaacagcctattacaacggacaggtccccttaaatgcagtagaaggatttattcgtcagatattagggtggcgggaatatgtgcgtggaatctattggttgtctatgcctgactatagcgatcaaaatacccttcatgccaccacgccgctgccacaatattactggacaggtgatacaaaaatggcatgtatggccgagtgtttcagaactacctttgaacatggctatgctcaccatattcagcgtttaatgattacaggcaactttgcgcttttagcaggtgtaaatccatcagaaatttgcgaatggtatttagctgtctatgtagatgcttatgaatgggtcgaattacccaatacattaggcatggcgatgtatgcagatggcggcatcatggcaagtaaaccctatgctgcatcaggtaattacatacataaaatgtcaaattattgtcagcactgtacatataacgtcaaaaccaaaactgaaccagacagttgtccatttaacagcttgtattggtattttatgagccagcatgaggccatatttcgtcaaaatcccagaatggcgatggtctacaaaaaccttgatcgtatgaaagataaagcttctgttatgcagcatgcaaagttaattattcatcaacttgataagctttaa

SEQ ID NO: 52122 - DNA, 780 bp, Acinetobacter baumannii
atggataccaacaaccttcctattgcttatatttttcagcaacaacaacttttggttgatacgaattttaatctgccttgccttaaacggcaggaacatgatttacatatacaagcagaccctcaagtaatagcaagagatttccaagaaggtgaacgtataccaaatggatatcaattcatacctattcgccaactcttacagtattggactaaaccgcagtttgaacaggcgagtcgtgctttacagttactagagtggcgtcgtaatcatcaattttgtagtcgttgcggacataaaacccagcagcataagaccgaatattctatgacttgtcctgtatgtaatttcagtcaatatcctagagttaacccttgtgtgattactattattacacgtggagagaacgagattttgctggctaaaaatgccagaaatacgggccagatgtacagtttaatcgctggctttgtcgaggtgggggaaacactagaagatgctgtgcgacgtgaaacattagaagaagttggattacatattaagaatattcagtatttggcgagtcaaccatggccatttccgagtaacttaatgttggcctttaaagccgaatatgaagcgggcgaaattgaaattcagaagaaagaactcagtgatgctcagtttttcaaatttgatcagttacctgaaattccatttaagggcagtattgcgcatgcaatgattatgcatgttattcatggcacacctgttgctgatgacacaaaacagtggctctaa

SEQ ID NO: 52123 - DNA, 369 bp, Acinetobacter baumannii
atgaatggtgatcagctccatcaagttgcaatagagattgcgtgtaatcttccttttagtgagcaaagccaaccctttggtccagaatgcgacgtctttaaaattttagaaaaggtgtttttattagtaggggaaggaacgggcacaaaaatgattactgttaaatgtgatccatataaaagtcaggaatatcaggagctttatccttttattattccggggtatcacatgaataaaaaacactggatctctattactccgcataaaaacttaactcgtgatttacttcaagatttgattcgagattcttatgacttagtcgtaaaaaagctacttttgaaagatcaaaaaagattaaacaaccaataa

SEQ ID NO: 52124 - DNA, 795 bp, Acinetobacter baumannii
atgagaaaaattttaagtttagcttcacttattatgtctactagcgttgtacatgcggaacaattaaaagaacaagaaaaaacttctccttatagcgcgaatgtgacttttgctagtcaatatatttcacgtggtttccaacaaacttggggtaaaccagccttacaaggtggactggattatgctaacccgaatggtttttttgtaggaacttgggcatcaagtgtcagctctaactatctgcgagatgcttcagttgaatgggatttttatacaggttatttaaaaacaatcgataaattctcgattggtatgtctattttttattattactatccaggcgctaaaagtacaccagaaacgggaagtacgagttataactatggtgaaattgtacctcaaattggctatggtcctttaagccttaaatactttgtgacttacacgccagattatgctggttataactctaaaaccatgggtggacctgctggtaaaaggtcaagaggatcaagttatttagatgttaactttactcagccgatcagtgaaacttggacttttggtgcccactatggctatgaaagaatcaaaaacttttcagagtcgaactttcaagatgttaaagccgaagtaattaaagatttaggtgatggttggagtacaggattagcctataccaaggcatgggataaaaatgcttattataaaaagtatagcaatggtgagccgggtgcacctatttcaaatccaattgattcaacttttacagtctctgtaaaaaaagtgttctaa

SEQ ID NO: 52125 - DNA, 369 bp, Acinetobacter baumannii
atgaaaaaaattgttttaagtagtgttcttgctttgggattggtgggctgtgccactggtcctcaatctttatataattggggaagttatccacatcaaacttatttgatgtataccgcacctgaaaaagcgacaccaagtgcacaaatcacgacattagaagctgagattcaaaaaactaaaggtaagggcctagctgttccgccggggttatatgcgcatttagggttattgtatttacaagaaaataattctcaaaaagcaatcgagtatttccagcttgaacgtcaagtctatccagagtctacagttttaatggatcgcttattgcaaaaaatgaatgcgaatggtgggaatacaaaatcatga

SEQ ID NO: 52126 - DNA, 525 bp, Acinetobacter baumannii
atgatgaatttaaatttccgtttagctgaactaagtgacattccatcacttttagacttgattaatcattcttatagaacacaacaaggtagaagctggacaactgaagttgaattcgtgaaaggccaacgtattagtcaagaacaattgacacagcaattgaaattgtctaactcggtattattagttgcagaaatagattcttcacaaattgttgcatgtattggtcttacatttcagaacaatactgttgagataggaacattctgtacagatcctcaaatacagaatatgaaagtaggtcgttcggttttggagtatgctgaacagttcgctttgcaaaaaacaccagaattggacagtgcactcatgtatgttttaaatgtacgttcggagctaattgcttattatgagagacgtggttatgcaaaaacaggtcatgtagaaccatatccgattgaagcagacgttggaataccacttataccaattaaactaattgaaatgaaaatggacctcaaatga

SEQ ID NO: 52127 - DNA, 3147 bp, Acinetobacter baumannii; identical to SEQ ID NO: 47455

SEQ ID NO: 52128 - DNA, 531 bp, Acinetobacter baumannii
atgaaaaagacttttttttatttatcggcaattgctgtaggattattttcttttaatgcagcaaacgccgctacagcaacggggacattaactgttaaggcgacagtaacaaatagttgtgttctgaatacatctgcaacaggtacaaccacaaatgctgttttggactttggtactttaagctctctcgcaactaacgaagatgctgataccacgacgaccggaggtacctcaattaaagtcctttgtaacaatactgtgccatggactctagctttcgatggcggcaaaaatgctcaaacgacccaacgccgtatgattggtggtgcaacaagtaacgaatatatcccttataacttatattcagatacaggacgtgccactgcaattggaattgctacaaccgcttatagtggtacagggagtggtgcggtgcaaacagtaaacgtatatggtcgtattcctgctggctcagcattgccaagtgcgggtagctatgttgatacggtgacaataacggtaacttattaa

SEQ ID NO: 52129 - DNA, 705 bp, Acinetobacter baumannii
atgaaaaaaaatatttttattattacgggattattcttatctttatctaccattattaacgcagctacaatccgtctttcaccagtaacagtggagatcttaagccatcagaaagcatcttcaattagtttatataatcagtcaaatgaaagtgctgatttacaggtacgtatatttgaatggactcaaaataatgggcaagatcaattaacgcctacagatgaaatcaatattagtccaccttttttaaagctaaagcctaatgagtcttataatttacgggtagttagaattaatccagagccgatttctggtgaaaaaacttaccgtattattattgatgaattacccaaacctgttgatagccgaaaagcttctcaaggtgtaaatgtattgcttcgttcgtcattacctgtatttgttgtcaataaagatgcgattactcaactaaattggaaaattgatactcatcaaaaagaaccttccctaaatattaataatgttgggaatcgacatgcactgttaaatgatttaacgcttgtagataacacagagaataagagttatccgattaaggtaaatacagtgaatggctatattcttgcaaagcaagcaaaaagttattcaattagtaattttacatatcagccaaatcataaatatagtatttctctgacagtaaatggtaaaaaaaccacactttaa

SEQ ID NO: 52130 - DNA, 2460 bp, Acinetobacter baumannii
atgaaatatattataggtgtcttatgtgttgcgtactttccagcgcattcatttgctgaacaattagtagatcatacgaatactttgattccaagtgttcctgaatctatagatggcaataataaatatacgcaggaaaagacaaatggacaggagcaaaatcttaattttattcagttatttttaaatatttctattaactctaatccttcagaagatttgttttccgtaaaacaatctaaggacggaaaattatatattcgttctggcgacttaaaaacgctaagagtgaaaatggatgagcatattccagatagccaatgggtatgtattaatcaacttaaaggaatccagtttaaatatctggaaaatgagcaatctttaaacttacaagttcccgccagcatgttaactggttactcagttgagttaagtggtcagcaaactactagttctggtttgctaaaaatgaaacccttaaatgctgcaatcctgaattatagcctgtaccacaccataaccaatgatgagagtattttctcaggttcagctgaaggtatttttaatagcgcactcggtaacttttcatcaggcgttttatataacggtagtaatgaaacgagctatagccatgagaagtgggtacgtctggaaagtaaatggcaatatgtagaccctgaaaaagtcaggatatataccctaggtgactttatttctaatagctcggactggggcagtagtgtacgtcttgccggtttccagtggtcgagtgcctatacccagcgtggtgatattgttacctcggcgttgccgcaattttccggttcggcggcactgccttcaacactggacttatacgttaaccagcaaaagatttattcaggacttgttccgtcaggcccatttgacattaagcagctgccgtttatttccggaaatgaagttacactggtaacaaccgatgcaacaggtcagcaaagcattactaaaaagccttactacttttcatcgaagattctggcaaaaggcataaatgagttttcagtagatgttggggttccacgctacaactatgggctgtactcaaacgattatgatgatgccacctttgcctctggtacaattcgttatggttatagcaactcactgaccttaagtgggggtgtggaagcctccacagacggtctttccaacgtgggcacaggtttcgccaagaacttgtttggtgtgggggtgattaatgctgaccttgcagcaagccagtataaggatgaaaacggctattcggctctggtcggtttagaagggcgtattagcaagaacatttcatttaacaccagttaccgcaaagtatttgataactactttgatctggcccgtgtgtctcaaatccggtatttaaaagataaccagattacttctgaaccacagaactatctcagctatagcgcgctggcagatgagattattagggcagggattaactataacttttatgcaggctatggtgtttatgtcggttataatcagatcaagtacagtgataactcgtataagttactgtctgcgaacttaagcggaagtttaaacaaaaactggggtttttatagttcagcttataaagattatgaaaaccataaggactatggcatttactttgcgctgcgctatacgccgtctaccagaactaatgcgattacaagcgtatctagcgatagtggcaggctgacttaccgacaagaagtatttgttttatcggaaccaaaaattaattcatttggatggggtggatatgtagagcgagatcaggatgcgcatactaacaatgcatcgatctatggttcgtaccgagcaagggctgcgtatctgacaggtcgttataaccgaattggagataatgaccaagttgctctttcagcgacaggatcgttggttgcggcggcaggacgtatatttgcggccaatgaaataggggatggttatgctgttgtaaccaatgccggaccgcaaagccagattataaatggtgggataaatctaggaacaactgacaagtctggaagatttcttattcctagtcttatgccatatagagagaaccatatttatttagatccatcatatcttcctttaaattggaatgttaaatctacagatcaaaaaacagtcgtgggctatcgccaggggacgctagttgactttggtgcacatcaggttgtttcaggcttggtgagaatagttgataaaaacaacatgccattattaccaggctatagcgttcgaattaatggacagcaagatgctgtagtgggctacgatggtgaagtattcgttccaaacttattaagacaaaacaaacttgaagtagatcttctcgatcatggttcatgccaggttaacttcacttataacagtaatcagtactcaactaaaaaattgggaccttatatatgtcagtaa

SEQ ID NO: 52131 - DNA, 1023 bp, Acinetobacter baumannii
atgtcagtaaatagtattaataaggctcaaagagagagctataaaaaattttcattgtctttaaaatattttataggtatttgcttattttatatcgcttatgcattttttagtccgtcacatgctgcttgtacggtagctggaacgaccaataatacgtttacctacacggcagcaaatattaatagtgatgcaacggtaaacttttcaggaacaattacttgtacgaatggagggataatacctcagatctctccgtttatgtgtatgaagaccgtatttacaggaacaaccactgcgaataataacgtgaccttaccctatacggttactgcaactgtaggtggagcaggttcttctaccaccaaccaaacctccaatgtttggtatggtccagtggtaactatcgcttcaaacaatgttcttagctattcggtaaatgtgaaggtacccgcacgtacaggatcactaattgcttatcctcaaggaacatatacagctacagttcaactattttgggatatggatcttctatcagtgttatgtttaggtgatttactcagctgggactctggaagtgtaattttaacagcaaattttgtagtgccgacactttgccaattaaactcaacctcgaatgtagattttggcaatattaatgatattggcacggctagtcgtgattacacaacacaaggtgctgtaaatacgacatgtaactatggaacgccttatacgatttatttgggggatggcaataaccgtataagtggaggattcaggcgtatggccaatagtaataatgagtttattccctaccagttatataaagatgctgcttatagttcggtgtgggatgctacgggtggagtatctagtattggtggcacaggtggagtgtctggtactggaacaggtagtgctcaaacgactacagtttatggaaaaattccgcaaggtactacgattgctagtagacccggtagttactccgataatgttgttgttacagtgacttattaa

SEQ ID NO: 52132 - DNA, 873 bp, Acinetobacter baumannii
gtgaaaaagataattttagcaacaatagtaggtgtttcgggtatgagtaactcttttgctgaatgtacctataactttgatgctagtgtacaagatttaaaaactttagaagcatcattgaattcacctacagggttgcaacgttatatagaacaagtctctaatataaataatgcaaaccaatcaggttatgatcttatacgctattactcagataaaaacgtcgacatatatttaacatctaaaaaatatacccaatttaaaactcaatatcatacaaaaacacccgataacgttattttagtagataaacctattgctagttcagatatctttgtacaggaatttatttttgatgttagcaacttacaggtcaatcttgggactgcctctcaaatgtacgagtacggctttttaattacgggttcctcacagaacaaaattgagttagctttaaatatagcttttactaaaggtaataattattctggtgttatgaatggtgattcgattaacgtgcttggtgtgactaataaatcagatggtactgggtatctagcacctttaagtgctgctagaaatactaatccagtagaagttccagctgatggaaaagttagagtaggtatttatgtgaatcaaaatactaaacaggtgggttatatagttaatggtactaactatggttatctcaatattactatggaaaataaattaagctatatcagcttcacaggggtaattaatcaaaaccattttgccaactctgccttaactggaaaaacggtaggacttcaattgattacagataaatcaaaaatgcagtttacttacccaacagggtctaaagacatttgtggtgtcgctttataa

SEQ ID NO: 52133 - DNA, 684 bp, Acinetobacter baumannii
atgctaaaaacaatatttcagaagtttcaaaaaaagcagggctgtgttgtggttgccggccatgatatagaactacttaatcatgactttgtaattttagataaaaactatcaagctccattacatgtttatcaagttgtgcatgattctactgttcagaacatacaagtaagttacgtaaatgatggcatgacgagtgtgcgcttaaacttggtaaaaactaagcatttaaaaagtctgctgaaatatataacagagcatcgtcataccattgagttatgcgtgtttcagccaaatttttcatcagcgccaaatatcgaagctttatctttagaagaaattgaacacagttggcagaccacaggtttaagtgcagtgagcgtgtcacagttcgtactgaaacctatgttaaagcagcagcggggtacagttatttttcttggagcgccatctcatcattcggctcatcacgatgtattaagtcaaagtatgtttgcgagtattcgagcgttatcgcagtcgttggcaagagagtttcagcccaaaggtatacacgtggcgtattgcatggtggaaaaatgggatggacaaaacccgcactttatttcatcgattaaacaagtgtgccagcacatctatcaccaatctgattctgcatggagccaagagctcagcgtatcgtga

SEQ ID NO: 52134 - DNA, 252 bp, Acinetobacter baumannii
atgtgtactccaatacttactaataaattaaaagtaacgaatgtaaaatattcttgggaaaaagaaatttcaggatttactgtgaatgatcctaaatggggtgaggaattctattctgttgatttgagcgaaattccacaagcacataaatggttattatcgactttagtgcaaaaaggaagaatagttaaaattacatctagggcgtgtggttctagtttgacaccttaccttataagagtagagaaataa

SEQ ID NO: 52135 - DNA, 390 bp, Acinetobacter baumannii
atgcttttcatagccgcaataggagtgggaattttactcattccttttacagttatatcaatcatatgtttgaaaaaaacgaaaaaaactgccttaaatgatggactgctatgggctagtttattccttatatttcatcttgcttttattattgctccagctggtattctgctagcagcttactttgataaagggatgaatttcgttcttattgtaattggttcactttttttagttataaactcatattatttatatgaaaaattcatcaagaagacatttatagttacaataaatagtgaactttattctcaacttcagaaaatatctcaagatgagaataaaagcattaaagatattataaataataaaatcaaagatattagttga

SEQ ID NO: 52136 - DNA, 759 bp, Acinetobacter baumannii
atgagtcgcggaaatattgccatttggtttgatcctgctacgcaatggtatgcgccatcaaaaggcaaacaagggcgaaatcaaacctactccgacgcagccatccaatgctgcttaatgattaaatccttatttcgtctgtctttacgtatggttactggctttgtgcaaagtctgattaaactttgcggattaaattggatagctccagattacactacgctttgtagaagacaaaagcatattgatattgtaatcagctaccaaaaaagtagagatgggctgcatctactcatgggctctacaggcatggagtttctaggtgagggtgaatggaagcgcaagaaacatggacctgaatatcgtcgccaatggcgtaaactacatattggtatagatgccaaaaccctgcaaatacgagcatttcagcttacaaccaataatgtcagtgattcacaggtgcttggtgatttacttaatcagattccacaagatgagcggattgactctgtttataccgatggagcttatgacaccaagcaatgccgtcaggtcattgcaattgcagatcggcaagcgcatgcggtgattccacctagaaaaaatgcgaaaccatggaaagatacaaagagtagctcgctagaacgaaatgaattacttcgaacagttaaacgtttaggcaggatactatggaaaaaatggtcaggctatcattggcgaagttggttgaaactaagatgcattgcatcaaattattag

SEQ ID NO: 52137 - DNA, 624 bp, Acinetobacter baumannii
atgatgatgcagctttatttatcaaaactaaagcatgtttggtttgagctgcatcagcattatgatttttctgaaccgcagaaaatctatgatgaacttattgcggcttatagtgaaaagcagcgagcctaccataccgtccaacatttatatgaatgtttgagtttaatggaggcgattcaatacgaattaaatgatccgtatgctgttgcattggctctctggtttcatgatgttatctatgatcctcaagcaccagataatgagcttaaaagtgctgagttatttgaacaattgatggcgcaagatttatcgttcagtaccctggagaaaataaagcgttggatacttgcgattcaaaagcatgcattaaccgatgaaatagatttacaatttttgttggatattgatttagctattttggcagcaacacctgaacgttttatccagtatgaacggcaaattcagcgggagtattgttgggttgatccagaagtatattcaattaagagaaaacaagttttaatacatttttatcagtctgaaccactttatcaaactgcatatttccaaaagaattttgagttaaacgccaaagataatttaagacaaatattggaatag

SEQ ID NO: 52138 - DNA, 1317 bp, Acinetobacter baumannii
ttgttagaagaaactattacttccttggagaatcttaaacaaactttggtatggcaagaaaatcaatgtgatagggtctattctaaagttatcggtgatgcgacaattgctcaaaaatcagtggcagaactaagagccaatatcgcgagttcaaataatttaggagtttttcttgataatcaaattattcccaaactagctcagcttactgatgagtcgacagtattaagagcgagatgtaatgctcctgactatgatggaactggagtaagtattgagcggcctgctatgcttagagaaatgttaagtgaatggaaaggaacaattaatttattaattcgtcaaataaataaccctcctaatatgaatcctgaaattaaaatagcttcattaaccaatatcaatattaatcaattaacggcagcaaaatctaaatttaaagattgttcagacagtttttgtccagaaatgacggttattccagctggtagttttttaatgggcggaaatataaatgagcaagagcaacaaaatgttcctgctcaatctcggtcatatgaattacctcaacatttagtacaagtcgaaaaagcattcgcaatgtcaacttatgaaacaacaattgctgagtttcaggctttccaaaaggaaactggctgggaagtcgaaggatgccgtaattgggaaacgcgaaatggtgttttcaatatgtggtatcgagatgatttaaatccaaataattcgggtatgaatcagacacctcaggatcctgttgtatgtgtacgccgtgaagatggaagagcattcgcgaaatggttatctaaaaaaacgggccagacttaccgtttgccaacagaggttgagtgggagtatgcggctcgtgctggaacgacaacagcctattattggggagatgaccttaatcttgaccaagcttgtaaatatgcaaatgtattagatccagcaacagttgtagcactaccacaaaccagtggttggagtttatttaattgcacagatggttatccttttacgtcaccagtagggaagtttttaccaaacaatttcggtttatatgatatgagtgccaatgcccgagaatgggtcgatgattgctggcatgcaaattatgaaaatgctcctagtgtgaatcgtcgttggggtgaggaaaataatgggcagtgtaacttcccagttttacgtgggggagcatggatatataacacttataacgtacgaactgcctatcgtaatgcttatgtaacttcacaagcccgttcaatcatgtggggtttccgtttggttcgtgaaatttaa

SEQ ID NO: 52139 - DNA, 1326 bp, Acinetobacter baumannii
atgaaaagtagtttaagccctatcaaggaatgcatagaccctaatgacttgccagagaccattgttaattcctcttaccctaaacctcgatggatgttgaacgagtctataaatgataaaacttggtacttatccaaagttggtattaatttatccttctacaaggaaaacattaataaagcacaaaagtttgaattcaaacaaaggattgcagataatgagtatctgactgacaaaattaatgaagcattattaatagatatccgtaacagtcttctttatcttgattcaacaggtaaaattacaagaccaactaggatttcggatatcgctatatctgtaattcacctcatctaccatgcaaatgaatttcgtattgccaaaagcgaacctttagttagaagcctagagcaaatcaaattcaaagagttgaaacattacttgttatcttttaatgtagagagggctttgtttgagaaagcagttaattttatattaataaaatggaactcaaggagcgatataaactggtctttaataaaaactgagtttgctcttacaactagggaatttaaaagtcttaaatacaaaataattaaatacttagaatcaaaagatgatagctttacttctaaattgatgtataagcgagaatacaataatgcatgtacacgagagtttgacatagactttgatctgtttccaagtcaaagtacaatctctaatgaaatatctaaactggaagccttttttactgcaagaactgcccaaaaatataagtttaagtattcgccaatgaaactgttttcttcgggaaggactatttttgatgaaatgatcgatagagtaaaaactccattgatgccaatttcattatcccttcatacaacctcctcagcattacattttgcacgcgtttatggggagccacttcgtcagtacctttcggatttatctaaaggcgaagttaacaggataaaagaacttggtatagctttatcaaccagcaggaaatatagcctagagataaagaattatgtatataaaacaactaagatcccagacgctctcaaacctttaattattacgtcatgggaaaaaggagatgacaataaatttgactatagcgaattaagaaatggcatgtctgttaatatggctatcagactttacacagctgcaatatggattttgatcgccagcttctctgctggcagagcaacatcattgcggactttaaaccgtaattgttttgtacaatccccagttgatggcttgtttgacatagtgaaccgtaccgggtttgtcggagggtcaatattctga

SEQ ID NO: 52140 - DNA, 2613 bp, Acinetobacter baumannii
gtgataaatcatgacgaaaggctcatttttttatctacgtttattagtgtcggtgagttggtcagaaaatggattgattctaagagcacgaatcagcaacccttgctttcccttatcttgattcggtacatcgaactgatccattcacctttcaacaatgatgatacaaacgagctaattcttaaccttacttacattcgtgcagacctttgccagcagaataaatttaaagatgcaaatgaaaggtatgaaaagatttgcttgctcataaagcacatgattgatgagagctatttcaaaggcggaaatgtcgatggtctatcttctctcatgtgtagtctcactgaatctcaatacgaagcctgtaaggctgagaaaattccattcgaggtttctctcaaactcaactatgacctttccaaatcagatacagtaggcaacgctaaagatgcccccctctcacctactgttgtgctaagacttgaatacttatcaggaattttgaatgctgatgtttattatttaatttctaattttatatctcagtcgaataagcagcgacaaacccaactatcatttttaatgaaaagatacatagcaatactgtatgaaccacttaacaataacgattcaggtgaactagctaaaagcctacaatatattcgaatagacctttgcaaaagacacacttttaaaagcagtatagccttaatcaataatcttataatgatcattaaacgattaattaatacagatttttttaacaagaaagaattaaataagctagataattttcttactttaccaactgaatctcaattcaaactaattaagtcagaaattataccagaagaaatatcgaatcttttcgcacatgaatccagcgccgatgagaactttaataaaatactaaactccacctgcactccagaaattgcgaatagattaaaagagcacgttaacagttttaagcataagaaacatcatagagagcccttaattcaatttttagagcaaatttcatcaactaatattgagtggtataaacatcccagaattattcaaggtgagcttttaaaatatagaggtaacttgcttgatgaatatcaaagaaatactgcgtatagtaaattccagaacgttaagaactcacttgatgtgttagttaaacatagcctattaccagaaaaccttgaaatgccggacaatttacgtaggtgtacaaatacggaaaaggtgcgaaaaaacaacccgctcatatgtgaagtggacatgtatgatgaaaaaaagcgtgatgaatacatacacactccccagtttatcgaatctttaaagagcgaactttcatataacttgtgtatccttgtgaaaaacgcccaagagattgtttttcaggggtacaaaaagttttgtaataaaaatatcatcatagagcaaagccagtttgatgaattcatgaaccaccctcaatttctcgtaagtagaacaaaaggcagcaattctaagtcaaagataaacccttttaatagcgcacatccactacgcttaaataatttaactgcttattacgatcattactttaatgatctactgaatggcaaaactcaacataatattaacggtctcgctataagcgaagatatccttggatatctaggcttaacaagcagtattgcatctgcgatgcaaaccatcatcacagaagaattagggattaatccgtactcgctttatagagtaaaaatatcatctgacggtcacggccatgaatttgttatagtggatgatgagggttctgtaagaattaaagctttaaagccacgagctagaaacgctcgctcaagaaaggcagaaggatcttataaatcattagccgatatagatgcatatgaaataaatgcagctacttgcttaagaatggcattagaaatgacagcaagaatcagagagaccttgggaatacgagatctatgggtttgcctaacttgtcacggtgtcactgttccatgtcctgaaacattccaaaataaatttaataagttctgcttgacgctctcacctcagaacacgactttgcaggaagctacattaaaaaaagtacgtacatcaaaaggtgttttaatttatttaaaatcaaatggcgactccatcaagactgcgacatattttggcaatactgttaagacaactcttaatcgttacatcccgaaatatttaactgagataatttacaggctcaaaataagaaactttcagaagatatttctgtttatggctacctcatctgataaattacctttcgagtcactaaatatgagtgaggccgaatttaaattacagctaaaacaagttttcaacaatccagatatgggaggtaatttatacaaaaaactaactaacccttgtatagataatgaggaagataccccactatatttttgtgtatctgatcaaaaccttcaactagctataaaatatgcgaaagatggtaaagatgagaagttaaagaaaaactgtaaagatgtacttgataagattgggcaagagtcctcagtaatgatgaagaatatgcttaggaaagcacagttaaatgtcgagaaaaatagttattag

SEQ ID NO: 52141 - DNA, 282 bp, Acinetobacter baumannii
atgattgaatctcggcataagctcactacagaattaaaagaaaataatatagcaaatcgtttaattctttctgaaaactttacttttaatggtgaagaactctctattgaatttgatccagattttgatcttataacaaaaaacaacttagaagattttgaaaaatttaaaaagaaagaagagctattgattcgtctttcaaatgaaactataggtaaaaagagatggctaaattttacaaagctagaaaaaaaaatgctggttagattttgcttattttag

SEQ ID NO: 52142 - DNA, 558 bp, Acinetobacter baumannii
atgtcaaatgatttagaaatctcttccaaaaaattacacattattcgaacagctattggtctatttacaacctacgggtttcatacagcaggtgtagatctgattgccaaacagtgcgaagtacccaaggcgacgttgtataactattttcgctcaaaagaaggtctgattgaaatgtgcattgcttttcaaaaaagcctgcttaaagaagaggtgctcgccattatttactccagccattaccgcacaccaactgataagcttaaagaaattgtagttttacatgtcaattacagcagtctgtatcacttattccttaaagctttttttgaaattaaagtgacttatcctcaagcttaccgtatggcaattgagtatagaaaatggctgactagagaactttttgatttggtattttctctagaaactcgtgatttaagaccaagtgctgacatggttttaaacttaatagatggcttaatgtttgagtttttaagtacaaataatttggacgaaagagataaggttgtggagcggttttttatgtcggtggtatag

SEQ ID NO: 52143 - DNA, 282 bp, Acinetobacter baumannii
atgtttaataatacttttcagatcttagagagtgttggttttctctcacaacatcgttcggtgtatcttcaattttcagatgcatccctgaatagtcaggtttttttacaacgtatagatgggcaacattatcttaatcagggcatgacagctgagttgatttgtttatcaaccaatgctcacattccacttaagacatttattggggtgcaggttgctgttgaccaaataacagatcgaggaagttttttccgtactacgggtatgagcttggaaatttaa

SEQ ID NO: 52144 - DNA, 1038 bp, Acinetobacter baumannii
ttgaatcatcttgtttatggttcagggcatatttatgcaattggtttaaataatcaagaagttgcttcatttcagcgtaatgatttgcatagagaaacaacacgattactagcaaatgggcttattcaaactaaacaatataatgatgtgggattactgagttcacagttcattcaacctgagcaagaaactcaagactatttacaatatcaagcacatagacgctatcaatacgatcaaaactatttgcttggtcaagttgaagatagccgtttgggtaagctcaattatcaatatgacccaattgggcgcttaatcacagctcaaagtttacataaaacagaaagttttaattttgacccagctggtaacttaattgattctgactcggtattaagtccagcacaaattaaaaataaccttattaaaagttataaaggtaaacactaccaatacgatgcacaaggtaatgtgacagagattattcaggctggtaaaaaccttaagctgacttgggacaaccaaaacagacttattcgtagtattaataatggtctagttacagaatatggttatgatgtctttggtcgtcgactctacaaaaaaacatctaatgaattaaccttatttggttgggatggcgatttaatgatatgggagtctgtccaatcggcacagactagttatacaaagcactatacttatgaacctgatagctttgttccactattacaaacaggttataaggatttcattcaactgatagaaactcctgattatcaggaatatcaaacaaaaccttattctatttataaagacccagtatggaatagtaatactcgcaaaaagcgtactgatgtagagcagattacattttaccattgtgatcaggtcggaacacctcaaaccatgaccaatacccgcggtgaatgtgtatgggaaattatccaagacacatggggaacggcattagaaattaaagcagtaaatcaagataatccatttgaacaaaataatttacgctttcaaggggagtaa

SEQ ID NO: 52145 - DNA, 309 bp, Acinetobacter baumannii
ttgaacaaaataatttacgctttcaaggggagtaaagcagaagttcagatttcttcttttgatttaccaacaaatactaatcagatagatgaagtagttagtcagttaaaaaaggatgactgggtattaaaaggacatggtcaaggagtagatacttactgtttaggtttacataataaaataaatattgttgttcctatatcaaataatgtttatgactataaaggaagagaattaaatataacggaccatagtatgaatggtgtgtcttacatgtatgataaatggggaatagatatgtgtgaataa

SEQ ID NO: 52146 - DNA, 447 bp, Acinetobacter baumannii
gtgaataaattcctaatgaaaaaaatattttcagtgctagttctgctttttttaatattgcaagttggtggttataaacgaactcataaagaagatgctgacaaatatatgttctttattaaaatgaaacaagtagtaggtaatgatgtaaaaattgttaattcgttaaaccgtgcggaggctcaattagcttatttggaattgccattaaattcagataagacatctaaaattgttgaattattgaaaaaagatggttggacatataaaggagctggaataggttctgaatcctattgtctaggcgtaaataatagtatcaatattgttagacctacttataaaactgttactacgtttaagggtggcgatttatatgtgactgattataataaagatatagtctcttatagttataataaatcgggtttggatatatgtaaatga

SEQ ID NO: 52147 - DNA, 426 bp, Acinetobacter baumannii
atgatttatatgagaaatttattaaaattaatattttcattttctttgttaatacaaataggttgttctaatggagtacatgagcaagcttctaataaatatccatttgaagaaaaaatgaaagcactcttaggcgataatcttaaaattgtaaactcattgcataaagcagaagttcaaatttcttcttttagatttgaaaaagatcacaataaattgaaaaaagtaattaatcaattaaaaaaagatggttggatattaaagggacatggacaaggggtagacacatattgtttagggactaataatagtattaatattgttagccccactgcaattggtgtttatgactatcaaggcggaaaactaaatattacagattacaattttgatgagatatcttatagctataataaatgggggtga

SEQ ID NO: 52148 - DNA, 432 bp, Acinetobacter baumannii
gtgagtaatttattcagatatatagcattatttttcttgtttttacaggtgggttgttctaatggagtttatgaacagcctgcgtataaatatccatttgaagtgaagatgaaagcattattaggcgataatattgaaattgtgaactcattgagtaaagcagaagttcaaatttcttcttttagatttgaaaaagatcctaataaattgaaaaaagtaatcaatcaattagaaaaagatggttggatattaaagggccatggacaaggggtagacacatattgtttagggattaataatagtattaatattgttagccccactacaattggtgtttatgactatcaaggcggaaaactaaatataacagattacaattttgatgcgatatcttatagctataataaatggggtgaggatttatgtgagtaa

SEQ ID NO: 52149 - DNA, 471 bp, Acinetobacter baumannii
atgagaaaaatattatttttaagtttagtcagtatgcttagctcatatagctttgcagaagataataattcggtttatagaggacttggtacagggcttcagaattttttaaagttccaaatactcaaacaaaaaggctttttagccaataaacctaatatttcacgagcagactataacgatatatacaaactgaaaaagccttatgagtttatggggcaaaatgttgtactcatttcagatgaatatatgtctgaatatgtaggctgttgtgtgagtgaaggttggggagctgtatttaagcaaacttctaatttgaaattgattgaaaaatttgcaaaaacaaatcaatgtagtgtcggtcctatagagtcaactagtgattactatggctttaaaatccgttctttaccaaaaggtaattactatgaattatcatgtcgcgaacgtgacttagctcagtctcaatag

SEQ ID NO: 52150 - DNA, 546 bp, Acinetobacter baumannii
  misc_feature (478)..(487): n is a, c, g, or t
atgacatatactcaggaagaaaaacgtagccggatacgtgggattgtaggcgcagcctctggtaatttagtcgaatggtttgatttttatatttatgcagtatttgctgcttactttactcaagctttaaccgcgccagatatggatagcacaactaaatctatctatgtttggggggtatttgccgcaagcttctttatgcgtccgattggaagctggctatttggtcgtattgcagatcgacatggccgaaagaagtcgatgatcatatcaatttgtcttatggctttaagctcatttttatttgcagctttgcctacttatgatcaagtcggtttatttgccccttttctgttactgcttgttcgtttacttcaaggcttatcagtgggtggtgaatatggcgccgttgccacttatatgagtgaattaggcttaaaaggtcagcgtggtttttactcgtctttccaatatgtcnnnnnnnnnnatatgtcaccctctctggtggtcaattgcttgcaagcttactgggcgttattttgttga

SEQ ID NO: 52151 - DNA, 1077 bp, Acinetobacter baumannii
  misc_feature (626)..(635): n is a, c, g, or t
atgaagaaattgcttctcgctgccgcagttgcaactctaagcgtaaacgcggtgcaagcagcgccaactttgtacggtaaactcaatgttaccattgaccaagttgacaacaaaaatttcgatggtaaaagtgacgttaccgaagttaactctaacgcgtctcgtattggggtaaaaggcgaagagaaattgactgataatttatcagcagtttatttagctgaatggcaaattaatgctgatggtgatggtacagatcttggtcaacgtaaccgttatatcggtatcaaatcaaataatgttggtacattaaaagttggtaaatttgactcttactttaaaaatgctgctggcaactaccaagacatctataacgaccacactattttagatattaccaacacaatgtatggtgaagaacgtctaaataacgttattggttttgaatctgatcctaaacttcttgctggtgtaacattcaatgtaatgttccaacaaggtgaaactcctgctgatccaacaccaggtacatctggtaacgatgacaaacgtaacggttttggtgactcagtttcaggttctatcggctacgaaaacaaagatattggtttagcattagctgctgnnnnnnnnnntgctgctgctaactacagcgtacaaggtaaatataatgcctatggccttagcaatattttctctgatgcttaccgtgtaactggttcttacgattttagtaaacttggcgcaactggacttgtattaggtggtttatggcaacatgctgaaccaactgatgagctaactaaatataaaggcttacaagaagatgcatgggttggtgctgtaacttacagaattggtgaaacaccttttgtagtaaaaggccaataccaatcatctaaagcttctgtagatggtcaacaagatcgtaaaattgatcaatacggtgtgggcttagactacaaaattaataaacaagcacgtttctacggtattgttgctcaacaaaaacgtgactggcttgcacaagatgacaaacgtactgttgtaggtgctgggatggaatataacttctaa

SEQ ID NO: 52152 - DNA, 189 bp, Acinetobacter baumannii
atgtttactggccgaagcaccgaagccaagaaaagatcaatccaaaccttatttcgtaatattcaacagtattgccgaattaatcctcaagacattgaaatcacaattttcgaaacccctaaagaaaattggggtatccgtggtcaaaacgcagatgaattacatttaaattatcaagttaacgtttaa

SEQ ID NO: 52153 - DNA, 327 bp, Acinetobacter baumannii
atgtcagcaaaactagttgttactatgttagcaaccagtcttttaactgtaggctgtgttgcttacccggatgatccttattatcgtggtggcggatacgtttaccatgaccatgatcgccgctatgatcgtgatgatcaacgtcgatataatgattgggaaaggaagcgttgggaagagcgtcaacgagtatatgaacaacaacgtaaagatattcgtgaacaagaaaaagatcgtcgtgaatgggataaaagacaccgtgactgggataaaaaacgggtagaagatcgagatcatgatcgccgagattatcgtcatgatgactaa

SEQ ID NO: 52154 - DNA, 630 bp, Acinetobacter baumannii
atgacttggaaactacaagcaattactggtgaatttactggtcaagaaattagtgttgatcgtgatatgttggtggggcgtcaccaagatgccgatttgctattacaagccgctgaaatttcacgtcgccatgcagcattgcttttaaaagaccaattgctatgggtacaagaccttaattcatcaaatggtacgtttgtaaacgatattcgtattgagcaagaaaagcagctacatgatggcgatattgttcaatttgcaagttttaaattttcagtactagcgcctgctcaagaaaatattgatttacctgaaatcgaagcagagccagtacaaactgctgcaccaacacaagacttaagtgatctaggaatgccaagccttgcagagcgtgctgcagaaacagaagttcgccgcgatggtatgccgcagaatgtttctataccaaagcctgcacctattccagagggtgtggatgtcaatgtaaaacaaccatcacctgttacttttgatgagcctgtttctcgtgttgctgaagaaaaagagcagcagaagaatgcttcggttggtttaatcactattattattttagtgattttggctgtattagcatggttattctttaaataa

SEQ ID NO: 52155 - DNA, 786 bp, Acinetobacter baumannii
atgaatacaaactattgtgctgagttaattgactctcttacacataaacatcatgttaattccaccttatattgtgctgagataaaccaagcaattaaatttagacttcccgataacggtaggatttgcgaagttaaagctcaagataattgggaaacaacatttcaaccttacatccctattttgaaactaccatttgatactctttgtcttgagttaaaattacaatttgaaagtccaaaaaataacgaagattgtgaaacaatcccagctgtgattttatgcaaacaattagatgaaggaattggtttctatccttttctaggtccacatacaaatggcaattcagcatggatttgttatacagaaaagccttgcttgcttagggggcaatggggtgaaaacccatcactacaagtaggccctaaagagcagggacagtcagaatttatttcgataattatgaaggttattttgagctttttagctgcactaaattgctcaaatgcagagtcagttgatgatattttaccacctgaaaaactaaacaaatcaagaatcaaaaaggggaaaacgccgttctttagttataaagttctcactattaactcacaaaaaggcaacgcaccttccaattcaaactcaaaaggaagccacagttcaccaagaatacatttacgccgtgggcatatcagaaaactagaatccaaaacagtgtgggtcaatgcatgtgttgtcggagataaaaaaaagggggcggttaataaagactaccaagttatctaa

SEQ ID NO: 52156 - DNA, 1347 bp, Acinetobacter baumannii
atgttgaattatcatgatgttgatgtattactacctgcgcaaaaatttttgattgattttagtttttcaggtaaaaagcccttagactttgttcattctatacttttacgtactctgcgtttgggtccatgtagctcggtccaattggccagctttttaaatctagatcaaaacgaaattactatacttttaaatgagttacttgccaagaatgaaattaagtcaactgaaaatgatttatttaagttatctgaatcagccaagcgttactttaaatctgtctcagatattcctcaagttgagcaaatctcagatcgtacagtttcagtaatatatgatttgattggatttgatccagttttatcttatgaatattcaggtcataatggtatacagatccaagctgatcaagatcagctctctgaatcagaaaaaattgctaaggctgcattccaaaaaaaattttatagctatgttgagcatggcatacttacattttatcaagatcacccccaactttataaagttgataaagttattaaagaccgccaactctttaatcgagtaaatcttgatttgtcacttaaattacaaggtgatcaattaactactgatgttcatgacgttgaaagctgttttagtcacctacctagcagtacaaccatccttactgaaatggttaattcaactttacaaagcataaaagtggataatatcgaatcaattcaagccgagttggcacataatccaatgcttgagtcattgaagattaagaatttttttaaaaatgaaaaactcgatctaacgtgcttagcccaacgaacagaacaccaaattataggacctatttatgagccaagtaatcaagaaaaattcctaaatttacttgaacgatgtgctgaagataaaagtgttcaagatttatattggttaacaccatcaaatcctttttttggtcaatcaacaaattttaagaatttcttgaataaactaattacttctgaaagctatgatttaaaaatgtttcttccatgcacatctttgaagaatgcaccatgggagaataatcatattgaacgccctctattctgtagtgggaagtttcttgcattagatgaaagtggcttatttaatagtgattttgagatacttgttgttaaaaacaagttttgtattgtgattgcccatgtacatgacagtgatgcacctgtcctgacagctgtaccaattggcgagttaacacttgatttaaatgtagtgaatggttttgccgatgtattcgctaaatcgaagcaacaagcggatgaagaacgaggaccatgctatggtgttatcactgttaaatga

SEQ ID NO: 52157 - DNA, 4908 bp, Acinetobacter baumannii
atgattaaaatcaatgcatcaaatttgtcagcacagcaaaaaaatttaatttctaaactcaatatagaaattcaaaaacaacctaaaaacaagcaatggcaaggattctctttctttgctcgttcttttggtaatcaaaagcaacaatatgacttagtgcttttaacgaatgcaaatattttatgcgtagaattctgtaacgttaatggccagattacatctgaccaatataataactggtgggtaaataacgaacgtcttagtccttcacctctaactattggaggaaaaaaagctcgtaaattaacaacagaaatcgaagctattaaacatcaactccataatgctgatcagttagtaaaaaacccccattttttacctaaagttttgaatttagtagtaatgacaggtaaggcagattggtctgcacttaatgggataccatttgtagatcgtattttatcatttgaagatttttgtcaattaattcctaatgaagatttttatcttcatttttctaaaagcaaaaaaccattaccaatgaatgcaaagcaacttaatcgtgattttgatgttttgactaaaatattaactcacaatatggaaccaataacatcacaatctatagaaggttatgaactaggctcactattaatcatgcattctcgtaagctttataaagtctatagtgctgaatctatgggtaatgataatgctgtaattaagcaatgggattttttctctcatacggtaactgataaatatcgtaaagctattattaataatgggattaataccgtaaatagtatcaaaattaaaaacccccaactttacgaaaaatgccttatctctttagaaacaaatccccaagacaatgtagatcaatactatgatgaagtcatcgaattaccggataccaaccatataacactaaaatcatatttagaaacgtgtccaaaaggtttaacaacaaaaaaattagacttaattcagtctatgatctatgtagttagtgagttacataagcttgggattgctcatggtgacttgaattcattcagcatttgggttgatagtactaataaaattaagctttcacaatttacatcggcatttaaccctgatttcaaagtcgataatgctgtacgtactattttgccattactcaatcaaaatatctttgatgaatattcattaacaccgtatacgaaagatgttttttggattgcttgtcttgcttggcatatcattgagggtcttaaggttactcctcacagtattagtgcatttaaagcattaaatcattctgactggctgactgacttattcagtcaagctgctaattttgcatatacagatgcatcagattttttagcagcattcttaaactcacgccctccctcagatattgaacatcaggtatcacccgagattttgagttcttatattaggaatgagagtctagagcagtattcaaatattgtctttgaaacacttccaaatccattgtcttcttatgattgtttatattataaagcgaaactagacaaactagatattcttaagaatcaaggagtaaaaagttatatacctgaaattactgcttttgggattattgatcaagataatcagaaaatatttttttctgtaattcagtctattaatacacctagatggaatgattgtgacttagggagtttatgctttgaagataaaaaacaacttgcagtgaacttgattaaggctttacagcattatcatcatttacaatatggctatggtcaactttctggtgagacagttcatgttgatttggctgatttaaccattaagttaagtaatgtactcgaacctgaaccagcacatcaaggttcgcttgatccaagtgacgtggatatgccaacagtacaacagcgtgataattatgctgtactacaaatgttgaacgctctatttagggaggaacttgaatatgaggattttgattggttatgtgaagcatttttgcttgagtttgaacaaaaacaaggtaaatatctcgatttaagtcgttttctcgatacgctgttggtagaaggtcaagaagaacaagtgcctactctgatcgtcaatggggcaggttggtctaatggtgatgacgattctagtccaaataactttaattatattctgcccgataacggaaaaatttatgggcatattaaacaacaatcagggagggatctagaagttgagctttggggcgtaggtggaaaagtaagtttcttttatactgactaccaacaaaatccgggcttgagacctagatatgtacaacaaaaatcctttattaataaaaaatttattgataattccgtatttgaattaaacatccgtattaaagttgaagatgaacgaagcttttacagaagtactcttccatggttaagtgattttttaatccaaaatgatgactttaatcatgctctacaggagttcaagacagaagaaaattcatctaaagagtatgttgagttctctgaagaagtcgttgatattcttgattctaatgaaatgtcgactaaagcattgtggcgtttaattaaagatactgaagaagaagcattacctattgttgagcttactgatgttctaaaaccaattcgttctaatcattatattaactattacaaagctaattatgatccggttgaaagtaatgatgtgttagatcgctttcagaaaaaagataaggttcaagctcttttagttactgaaaatagagatggtgaatttgagactaaacttgttggtgaagttgatatgatcaaatcgaccagaggggcactttacattaaaaactgtaagttaacacgattaaatgaagggagtcgtcttactttgcagaatatagcagaacaatcttctaatcgtaggcgtaagatagctattgataatatcctaaaaaatcggtcagtcattccaaatctgattgaatatttcgaaaaaaatagcagtgctgaagtggctaaatatgatgtagatttttgtgatcaacaacttgattactataactcgacaactagagagggtaaaactattgctctaaatgcaacacaacgccaagcatttgaacagattattactagtggcccagtaaatgtattacaaggtcctccagggacaggtaaaacagagttcatttcagcatttgttcattacttattccatcatcgcttggtaaaaaatatcttagtagtaagtcaatcacatgaagcagtaaacacaactgtagagcggattcgtcaacgtttcactagtcataaacaagatgtcagtattgtgcgcattagtaataaggctgaacttgtatcaaaggatttgttagatacctattctggttcaatcattgaatcacagcaggcatttttccaagaaaccttaatacatcgtattttaactttaggttctcatcttaagctcaaagaagattacttaactgatttgattcgcgtaaaagttgaaatcttcgaaaaagttaaacaaacacgttctaagattagtgatgaagaggatgctggtactgtatcaccagctgcttttaagcaatttgttttatataaattagaaagtcttcataaaatatatgaactagatactgatgatcttggtttggatataacaagtgaggctttttgggaagttattgaaaatgctgtgatgaatgctttagctgaagaatatgcagttgatccagaaaattcagcaaaagcacaagctttaattcgcttagccaaagattgtgaaactttaatagatgctccttatgctcattatgaacgttttttagcccaaacacgtcagattgtttgcggtacatgtgtaggtattgctaataacagtgtcgatatttcgaatcaggttttcgattttgtaattattgatgaagcagcacgttcaacttcatctgaacttgcaattgcaatgcaaactggtaaacgcattgtattagtaggggatcacaaacaattaccacctttatatactagtgaacatagcaatttattgaaaaagaagttaggcatttcaaaccataaagagttagacgatgttttaaaaagcgattttgaacatgtttttaattcaccttatggtaaaagaattagtgcccaattattacaacaatatcgtatggctccagctattgggaatttagtatctgattgcttctatgagggtaaattacaaactgctgtctgtgaaccgccttttgataaaaaggataattcaaaacgtgtagtcccttcgatttatcactcaaataaagtgaaagagctacaatcaactgttacttgggtcgatacaggtggtaagggagcatttcatcaaaaaatttcagatgaaaaaacaagcttatataatcctcatgaattaaacgaaattatgaatttccttcgtcgtatagactctgatcctgcgttattagagcgtgtgaatcaaaacgttaaaaaagatgaagctgctattggaattatctgtgcctatgcagagcagaagaaacagcttataaaacgttttgctgctggcaacttttctacattacttcaaaattcagtaaaaattgatactgtcgatagttatcaaggtaaagaaaaccgtattgttgtgttctctgtgacacgaaatactccagacttctctagtgcattcttagcttcagaaaatcgtgtgaatgttgcattatcccgctctatggatcgcttggtgatttttggtgctatggagatgtgggagcatgagaagaattcaaatagcccattatataaaactttggcttacatcaaaaaacgtttgagccaaccagaatacaaaatactgaaacgtcgtaatgaaaacgtacaaggagaaaataatgttgaattatcatga

SEQ ID NO: 52158 - DNA, 486 bp, Acinetobacter baumannii
atgttaattcaattagaactaataacagaactagatattacgcagttgcgacaatacgatgatgaatatgacaatgaaattagtgtgttggctgacatttgtgctgaattttctaagaataaactcaatcagtttaagattcaggctttttcaaatgagctttggcctgtagatatcgaaactgatctggttgtttttttagagcaattacctgcttgtataagagaaataaatttaggatctgattgttcagttgatttatatgagcagggaataaatagagaaattttatttaaatttaatcaaggaaattatacttgctatgggcaaagtcatgatggaacttggacacctagctatgttgaaaatgtcagtcaatcagatttattaaaaatgttgcgagctttcttgaatgattttttgtcagctttaaaatataagcattctaataaatatcttttacagtggttaagtggtaatacttaa

SEQ ID NO: 52159 - DNA, 429 bp, Acinetobacter baumannii
atggaaattttattaagacttgctaacgctaccgatctcaaagctataaacgaacgttatgccgaggttgattttgtaccatcacatgaagatgaacttattgtactagcttctattggtgagaaaattgttggtcaaggtagagttgtctcgattgactcaaacagcggtgaactcggtggaatttatgtttttcctggcaatgaagggttaggaattgctcgtaaagtggtcgattttctaattaaaaactcggaattttccaagctttactgtttaccctttgctgaactggaaggcttttacggatcaatgggttttaaccctgtaaaagatatggttcaggttcccaaagctgtactcaaaaaacatgagtggtgtaatagtaattacgataaaccagttttacttttacaaagaagtgaatga

SEQ ID NO: 52160 - DNA, 345 bp, Acinetobacter baumannii
atgtcattaattatacccgtagcagtggatgagggagcgttagaagttctttggtatagcctttttgaaaatattgaagatattattcaatggtggaaagagcaagaaagtattgatatatataaatataagactgacttagaagccactgaggctattctatcaaatggcaaaatagttactgttaaaacagaagagcaatatgatctctactatgcaataagtgcaaaaacagaaactgtaacgctcatgatcgacactgactatacctcgtgcttatcctataagggaaaaaagtatttccatagaggaaagcttcattttttaccccctcctttaaattaa

SEQ ID NO: 52161 - DNA, 1836 bp, Acinetobacter baumannii
atgagctcagaagcacattcaataagcttagttgctccagtagtgttattggcagctgctgtcattgcagtccctatttttaaacgcattggtttgggttcagtattaggttatttaatcgcaggactgattattggcccatttggttttgcattttttcaagattccacagcaattttacatattgccgagttgggaatagtgatgtacctctttgtgattggtttagaaatgcaaccatcacatttgtggagccttagacgagaaatttttggtcttggtacgttgcagatcattatttgtgcgttagctttgactggcgtagggctattgtttggtttcacatggcaagtcgcttttattggcgcggcagggtttgtactaacctcgactgcgattgtgatgcagttattgggcgatcggggtgacttgactcaaccacgtgggcaaaaaattgtagccatcttactttttgaagatttattaattgtgccactactggctattgttgcttttatggcaccaaatcatgtagtcgaaagcacatctgtacgtctggaaaacattggaattggtttactggcaattgcaggtctcattgcggcaggctattggttacttaatccgttatttagactcttggccgctgctaaagcgcgagaagtcatgacggccgcagctttactggttgtgttgggtgcggcattgctcatgcaagtcagtggtttgactatggcaatgggagctttcttggcgggtgtacttttatctgaatcaacgtttagacatcaaattgaagccgatattgagccattccgaggaattttactgggtctctttttcctcggtgttggtatgtcactggacttatcagtggttgctcaaaactggcaactcattgtaagtggcgtagtggccctgatgtttgttaaagcgctcatgatttatattgtcgctcgagtaaccaaaagtcctcatacagaagcattagaccgcgctttactgatggctcaagggggagagtttgcctttgtacttttctctgctgcattaagtgcccaagttattgataatactgtcaaatctaacttaactgcgattgttgtactttcaatggtattgactccaattgtcggtattatttttaaacgatttactcaagctaaagcaaaggtttcattggaagacatcaatattgctgatggactaagcggtagtgttttaatgattggcttcgggcgctttggacaggttaccagtcaattactgttggcaagaggcgtagatgtcaccattattgataataataccgacatgattcgaaacgctgaaaagtttggttttaaaatttattatggggatggctgtcgcctagatattttacatgcttccggtgctgcaacagcacaggcgattgtggtgtgtgtagatagtaaggaaacgactaatcgaattgttgaattggttactcacgaatttcctttggcaaaattattagtccgttcatatgaccgtgagcattcactgcatttagtcaaacaaaaagtagactttatgatccgtgaaacgtttgaatctgcgattaagtttggtggagtgattttacaagaacttggtgtagatgaagacgaagtagaaagaattaccgaggaaatacgtgatcttgataatgaacgctttgagactgaaatcgcagcagatgacgtaaatgcaggagtaggtatgcaatatacccatacttatcatccaagaccaactgcaccattgattcgaccaaagcgggaaggacgtattctaaataaagataatgcctcagagaatgagggaactgattag

SEQ ID NO: 52162 - DNA, 834 bp, Acinetobacter baumannii
atgagtttatctaactgtgaagttggttgtgtagtcatcactggaagtacaaagggtattggtttagcacttgcccatgcttttttagatcttggttgttccgttgtaatagcgggacgaaatgttgagcatcttaaccatgccctatcccatttagaaactcatttcaataaagagaaatttattggtttatgctgcaatgtgacacaaattgctgatgtacaaacactgtgggatcgagcaattcagcattttgggcaagttaatgtatggattaataatgcgggtagctgccaccctacaaaagagttcattgaccttcaaccagatgaattgaaaacaaccatatcgactaatattttaggcacaatgctcggttcgcaagtagctctaaaaggcatgcttaaacaaggttatggccaaatctttaacatggaaggttggggaagcaatggcgaatggagtgctggaatgactgcctacgcgacaactaaacgggcggtaagttattttagtaaagcgctttataaagagactaagtcgactcctatcttaaccggtactctcagcccgggtatggtagcaaccgacttgttagtttcatcttggacccatggcaatatacaaaactggaaaaagatgaaacgcttattcttctttgtaattgacccacctgaagttgtttgtgcgtatttagcaaaacaaattattcaaaataaaaaagctaaccgtcgcatcgcatggataacaccttggaaacttttccttagatttttacagccttactactggcgcagaaatcctgttaaaggcacagccttagagcatctctag

SEQ ID NO: 52163 - DNA, 387 bp, Acinetobacter baumannii
atgggtaatgctaaagcgttaaaatttataaactttgtcctcgctttcttatggatttatcaaggcgtcgttcctaaaatcatttttattaattctgatgaaatttttgtctggcaaacgataggactttcttttgattatgcaaaacttgcaggtcgtggcagtggtatagctgaagtaatttttggtttattatttcttttttctcctcacaaatatattcattatttaagtattttaggattattgggtttactgctgttaattggttttttaataccatctacacttatttcaccttataaccctatcgtaatgaatatttcgatgataagtttatcgattatttatctgcttttattaaaagagcaaaccgctcatttatga

SEQ ID NO: 52164 - DNA, 4893 bp, Acinetobacter baumannii
ttgcttggtccgattacagtaccggatgacttaaatgctgatggcatcatcaatgcatcagaacttggcacagatggcagctttaatgcccgtgtagcgttgggtccagatgcagtggtaggcacagtcgtaaacgttaacggcactgactacacagtaagtgcaactgacttgacgaatggctatatcaccgcagcaattcctgtaactgcagatggtccaattaccattcatgcccaagcagtggattcacaaggtcatatcagcagtccagcagatgtaatcgtgactgtcgatactgttccagcgaacttacttggagcgattacagtaccggatgacttaaatgctgacggtattatcaatgcatcagaacttggcacagacggtagcttcaatgcgcgtgtagcgttgggtccagatgcagcggtaggtactgttgtgaatgtcaatggtactgactacacagtgagtgcaactgaccttggcaatggctatatcacagcagcgattcctgtaacagcagatggcccaattaccatccatgcccaagcagtggatgcgcaaggcaacatcagcagtccaacagatgtcactgtaactgtagataccacaccagctgatttaatcactgcgattacagtaccggatgatttaaacattgacggcatcatcaatgcatcagaacttggtacagacggtagctttaatgcccgtgtaggattaggtccagatgcagcggtgggtacagttgtaaatgttaatggcactaactatacagtcaatgcaactgacttaagcaatggttatatcactgctgcgatcgcagtaactgcagatgggccagtgactatccatgcccaagcagtagatgcgcaaggcaatatcgataatgctactgatgtcacagtaactgtggatactacgccaccagacattaatgctgctgcaattgcgattaatccgattacaggtgataacatccttagtccggttgagactgcaggtacagtaaatattactggaacagtgactattcctgctgatgcaactgttacctcggttgttgttaacgttaatggcacggattatacggctgtagtagatccggcgaatggaacatggacaataggtgtacctggtagccagcttgtagctgatactgatttgacagttgatgcaaaagcaacctttacggatgctgctggcaacagtagtaacttgcaagctactcaaagttatacaattgcaagttcttctatcattgcatatgacaactttgatacagctgttcttgctccacagccattacaaatcgcaaatgatgcggctcttggtagtaaaacttacttggcgcttgtatcacttgctggacttaacttacagcttggttctgaagcggttaactttaatgtagctgccaaccaagaaggtaatgcgacatttacctacagtgctttaataggggttaatgctctatctgattactcattagttgtacaaaaatttgatacagctactggtcaatggacttctatatatggcggtggtcaagcagatattcttcacctgactttattaggttctacaccaggtgttgttatcgatgggcttgagcaaggtcaatatcgtgcctttatgacttataacggtctggcaggtattggtttactaggtacattaacaggtactatggacatttatgatacaactcaaatcggtggtttctatacagaagctgcagatggtaatgtgatcgtagatgttaactcaaacggtcaagctgatgtcgtaactccaaatacagttgtgagtgaagttaataaccaacctgttcttgctaatggcacaatcattaatggtacatacggtacattggtgattaaccttgatggttcatacacttacactccaaatcaaaatgcttctggagttggacaggttgatcactttgtatatacgttaaaagattctgtaactggtgatgtagctcaagcagctcttaacattcagttaagttctgtcaaagctgcagataacttggcagttgctgaaattaatccggaatctttacttgttgcgaatgacgtagcacttggtagtgcaagttatgtagctgcaatatcgttagcaggtctagatttacagctccttggtaacccaacagttgcattcaatgtggatgctgaccgtcaaggtactgcgacatttacattcagtggtttactcaacgctggtgtattgaatgattattcgattgttgttcaaaaatatgatgctgcaacaggacaatgggtatctattggcggaaataacccacaagcgactttagttagtctatctctaataggaggtactccaacagcagtcattgaagggctagatccaggacaatatcgtgcatttatgggctacagtggtctactaggtgtgggtattggtggtacattgacaggtacaatggatgtgtataacccatatgttgtatctggatattcagttgatccgatctctggtaacgtcatcaaagatgctggtattaatggtgcagtagatgctgcaagtaataatgcagtgatctcagcagtgaatggaaatgccgttaacgcaacgggtacaactacaatcactggtacttacggtacgttagtgattgatcaacatggtaattatacctatacaccaaatgcagatggtctaaaccttggtaaagttgatcagttctcatatacgttactagacccagcaacaggtaatacatctcaagctgtcttgtatgtccacttggatagtaacaaggttgctatgacttggaatgcagcagatccatctcagcctgcagtaattacaggtcatgttccagttgatgcaatggataacgttgcttcagcagcaattgacatggtttacccaactacacaacaagttcttagtaacgcgattagttataactggttgttaggagttggcggagtcgttattggctctaaacaaggtacagcaacctttaatgtagctgaaggacatgtgtctgaagccattatctcggttaactttggttcagtagctacagttgttgatggtttacatgtggtattaacacgagtaaatccagatggtactcgtacagtaattgcagatagcgcgaatactggagtgcttgacctattaggtatcttcggctctgaagtgaaattcaaagttgataatttaggttctggtagctatgagctatttatggaaagcaatacgcttctaacagctctaggtagcgtcacagcaagtattactttgaataatggtgatattactcaagtacctaacttggttgtaactccggttacaggcaatgttctttcagacgacaactcggctgtatatggaccaaattatacgccagactacattacgactacgacagttgtgacttctgtgtcttctgaaacaggtaatacgcaggctgtgaatgtaggttcatcaactgttattgttggtgcttatggttccttaacgattaatgctgatggtacttatagttatcaagctacagcgaacacacaaaatataggaaaagttgatagctttacctatacagtgacagacccagtaactggtagaacagacacagcaacattgcatatccaaattggttctccagatgtgaatatcacttggaacaatgctaaccctggtgcagatgcagtaattccgttacctgtagcaaatgctgatactaatcatgcaactgttagtatgaaacaagtgactgatgcagttgttgatgtaccaagtggtaacgtatcgcttagtacattacctccagttttaagtagtacagtgacatcgaaccaatttgttgttgcagctaatactgttactgatgtacatgttcagttgaactatttagcatctttaagcctgtctgttttaccaacgactggatataagatccaacaatttgttgggggagcgtgggttgatacagtttactcaggttctgcgaccgctttggcaggtattttaggtgcaccagcatactcagctgatgtatctcatttatctgctggtacttatcgagtggtatttagcttatctagcttacttccaattggtaatatgtcacttgattcagttgtaacgaccaaaacaacccatctagatacttatacacctgatggtcagtctgattggattcacggcaatatcttgttaggcgatacaactggtggagttgcagatacttcagctgcttctcaactatatgttgaagttacaccaggaaattaccaaattgctgctggtcaggcgatcaatacaggtgaaggtacgttgtatctctaccatgatggttcgtactactataaagctcttgatactgcggcaaatgctacgattgatacgattaactacaaactcgtatcggtgactggtgcagagtcaactagcacattaacgatcaacttaagtcaagagttgaatagcctagctgtaagtacaggagcaaatgatacatttacgcttggaaatggctcggataccttgatttacaacacgttgactgctgctagtgtgaatagcccaacaggtggtaacacaactgctggtggtgtagatacatggactgatttccatgtaggtaatacagcaactgatagccaagctgataagatcgatattagtaacttgttacttactcatccaaacagtttaaccattggtcagtatgtatctgtaagctatgacgctgccacacaaaacgccaccattagtgtagaccgggatggcttaggtttaacttattcaagtacgcaattgttgacgattcatttggatcaagctagaacatcattaacgcttaatgatcttcttaacaacggtcaaattatctactaa

SEQ ID NO: 52165 - DNA, 777 bp, Acinetobacter baumannii
ttgtgcaacaaagccccttcaacaccatttaatcctttaaagcttagtaaacaaattcgtgaggaatgtgtctggccaccaaaatcggatggtatatggggagaagatcagcaaagttttagttattgtcttgccttagtatcaagaattcatggaataacaacctctaatacctttaaatttgtttttcaatccaaaggcctaccaacacttgtagaaaaaatcgatgatttctatgattcaaataaaaaaatcttgagaatagacttaagtgatgttggatttgaatttaaagctagggaaatcgttgcaaatgtgattggaagacatcttttaggtctcgcaagggatcggaaattctcagataaaccgatagttgtttttttagatgaagctcataattttatcgggaaaagcattggtaacgaagattcgattgccaaattagattcttttgagttaattgcaaaggaaggacgaaaatttggtttgaatatttgcttagcaactcagagaccaagggatataactgaaggcgtattaagccaattaggcacattaattgttcataggcttactaatgatcgagatagagaaattattgaacgtgcttgtggtgaaattgataaagcagcttcagattttttacctagtttacaaccaggggaagctgtacttattggaaacgattttccgattccattaacgattaatattcatcaaccgtcaataataccaaattcagcaggtgcagactttcaaaataaatggatatga

SEQ ID NO: 52166 - DNA, 321 bp, Acinetobacter baumannii
atgccaaatcaatttgatgctgtttctataacaaaaaaagcgaatgttcattacgagggacactccattagtcatgttattgaacttgaagatggtacaaaaaagactttaggggtgattcttcccacagaaaaagctctaacttttaaaacccacgtttcggaacgcattgagatcatttcgggtaaatgcagtgttcaaattggcgatgatccggagactaaaatctattcaagtggtgaatcttttaaggttccagaaaatagtaaatttaaaattattacagatgaagtgattgattacgtctgccatttagaatga

SEQ ID NO: 52167 - DNA, 2172 bp, Acinetobacter baumannii
atgtttgctttctccccgcgtaaaaatttaattactgttgaaattttaaaacatagtagcccattacttttatcgctcattccaatgatgtcttgggcagaagcaaccgcaattcaaccggcacaactagaaacgattaaggttcaggctgaagcagacacaagttatatcgcaacacaaacggcgtcgacgctaagaggcaaacaaaaaaatctagaaagcccgcaaactgtaaacgttgtatctaagcaatacatgaaagattatttacctgcaaacttggacaatgcactgacccaagtcagcggcattacgcagggtaatactttagggggtacacaagacaccgtaatgaaacgcggttttggtgataaccgtgacggttcagttaccgtaaatggtatgccaattgtgcaaggccgaaccatgaatgcggccgttgaacaagttgaagtcttaaaaggtccatcttcattactctatggcattatggacccgggtggtgtgatcaatgtcattacaaagaaacctgagacgacacagaaaactgaactttccgtttacggttcaagctttgcagcaggtaaaaatggcttaggtgcaagcatagatactacaggtgcaattggtgacagtaactttgcttatcgctttattgccgatcattctgacgccgactattggcgtaattttggtaatctcaaacagactttaattgctccgtctgtagcatgggataatggtcaaactaaagtgaacctgagttatcaatatcgtcactttgatgtaccttttgaccgttctaccgtttttgacccgaaaaccaacaaagccctaccgatctctaaataccaacgtctagatgaagcatttaaccaaatgaaaggcgaagatcatttggcgcagttgttaattgaccaccaaattaatgataactggtcagctcactttggttatacctacaactacgaaacttatgatgccaaccagttacgcataatcgatttagatactaccaatcacatcgttacacgcagtaccgatgcgaccttaaatgcacagagcgtagatagtaatgctcaagcttatatcaatggttcaaccaacctgttcggtttaaaacatgatattcaattcggttcagacatcgaataccgtaaatatttccgtccagatatggttcgtggcagcacctcgacattagattatttaaatccaagttttggtactgttgaagcatctcgtgagatcagtgataaagatagtgatcaaaccgataaactgcatacctatggtttttatgtacaagatgcaattcacctaaatgaaaaatggattgctgtacttggtggacgttacctgaactatcagcaaaaggctggacgtggcagaccgtttaaagaaaacaccaacaccaatgatgatgcttggctcccacatgcaggtttggtttataaatggaatgatcagctttcattctatggcagttataccgagtcactcaaaccaaattcttcaattgcgcctttgggtggcgatgcggttattgactctgatgttcaacctgaacaagccaagtcttatgaagtgggtgcaaaatatgagttaaatgaccgtattaaagccaactttgcgctctacgatattaaaaaacgtaatgttctagccaaaatcaccaacccatcaaccaaagcagtcgaactacacactactggtgccgtgcgttctaaaggtgctgaactcgacttgacaggacgtgtgaccgatcagcttaatgcgacccttacctatgcctatacagatgcgaaagtaactgaagatgaaagtggccttgagggcaatcgcttaaataatgtagcgaaaaatactgcatctttggcactagcgtataactatggcgaactttacaacggtaatttacgttttggtataagcggtaattatgttggtaaacgtgctggggattcaaaaaacaccttcgatctacctgactatactcttgccaatgcctttgtgagttatgacactactattgctaaacaagcggtcactttccaatttaatttaaacaatatctttgacaccacttactacacagccagcgtaagtaatgtgacagtatctcaaggtgactctcgccaagcggtattacgtgcaacctttaaattttaa

SEQ ID NO: 52168 - DNA, 678 bp, Acinetobacter baumannii
atgaaaaagcttctttctatcgtagtgttgattggcacattgtttagctctgctgtttatgctcaaacgcgaattgccctcatctctcaagttaaaggcgcatcggcgagtacagacattgcgattcaaaaatacttgcaaagcaagggctatcaagttgaggtgttagatcaatctgtttcaccaaacagtttaaagaacacagatttagtcattatctcttctactgttgcttctaaaaaccttcaatctggttggcgtcaacttccccttccaatcatgacatgggaaaacgactaccttgatgatttggctatgaccggtaaacgtattaataccgattttggcgaagtcgagaaagaacgttatttgtggctagtcaatgcaccgcatcccctctctgcacagcttcctgctggaactcgcaatgtatataaggctcaagcgcctatgagttggggcaagcccggtttaggtgccaccattattgcaacgatttatggtcaacctgaaaaagtagccatttggggatatgagaaaggtgcaacaatggattatgaatctttagcgcctgcaaagcgtcttatgttcttccttaacaatgacacctttaccaatctatctgacgatggtttaaagctgtttgatgcctcaattcaatggcttacccataaataa

SEQ ID NO: 52169 - DNA, 471 bp, Acinetobacter baumannii
atgaaagtcattaagtacgccttattttccctaatgggaatgctgataataaatagcgcacatgctggaaatgcatctacctcattaaaggtgagtttaaccattgtagatacttgcgaagtttcaacccaaggaaatctagattttggtacagttgtacgtgcgcagccagtttcagccacaagaaccgatgtctctgtccaatgcagcaaaaatacaccgtatcaagtcgccgtcacctcagacaataactttgagcttaagtctgctgcaagcacagcttctgtggcatatgtgttgtatcaggatgctggtcatactcaaatttggggcggggcaggaagtaaaatacactcaggtgttgcaacgggaatgaaagaaaatattcctatacatggggtaattacatcaagtaccaatgttcaggctacaaagtatgaggattgggtgcgggtaaatgttgtttattaa

SEQ ID NO: 52170 - DNA, 432 bp, Acinetobacter baumannii
gtggttaatactgttttaccgctacttgctgttgtattttgtggttatgcttggggacggatgagtagtaaatttccagcaaattatataatgttgttttctttgttactgaaatcattaaccttgttgttctttatctatgtaagtttttataatgaaattaataaagtttatttacttgtcttgttctcactcaatattgtttcatctagctttgttacttattctttttccaattatttaatgcaagctgttaatagtgctaggtcatcatttaaattttctattttgacatctttgtctatgcttttaattttggtatctgtaccagttggatcttatttagttgataattataactggatttcattttttacctttatatttgctcttcaagtattaagttatatatctgtttttaaaataaaataa

SEQ ID NO: 52171 - DNA, 642 bp, Acinetobacter baumannii
atggatcagatcacaccatttcctccaactgattttattgaccaagcagatgaagaggaagcgattcgcatagtacctgcgtctgatttaaaaaattgggtagttgctaattttcttacacttggtggacctttacataatccagatcatgaccatatcgctgagatgcttcatgacaatgaggggtttttggcttctgcatgggcttctactgcttatacgagaactaagcgcatggtgctcggccaatgtgaaaaggttatgtttcaacaaggcggctggaagaaagcccgtcaagagcagcaaatgcgtgattggttcggttttgttccaatttacttaatcactatcgatgcaagcttttgtgaaaaggcaaacgataacgagttttgtgctttgtttgaacatgagctctatcacattggtgtagagcgagattcggacggtgagattatttacagcgatcatactggcttaccaaagcactatttagctggccacgatgtggaagagttcatcggtgttgttaagcgctggggagctaatgacagtgttaagcggcttgttgaagtcgctaaaaacccgccgtttgtttctgatttagatatttctaaatgctgtggaaactgtgtaattacctga

SEQ ID NO: 52172 - DNA, 303 bp, Acinetobacter baumannii
atggcgacattaaacaaaaagcagaaactctttattgtacaatcgcttgctgtgtttaacacccctcaagaaacagtaagtctcgtcaaggaggaatttgacattgatgtttcgagacagcaggtagagtcatataaccctacaaagtttgctgggagagatttaagtaaggaactcaaagaaattttcgaaaatacacgggaagagtatttgagtcagccactaaataaaatcagtggagcaaatgacattgttcagttgaagattttaagtgatttgctttggactaaaaaaacaatgtga

SEQ ID NO: 52173 - DNA, 237 bp, Acinetobacter baumannii
atgacaattaagatcgtggaccaaatacaaaagatcatgaaagggttttatgagaagaagggggaacaaaataataaaggtggtaattctgaagcgaaccaaactaaagctgaagtagaacttgagattaaaaaacttgaacttctgaagttacaacgtgaggtaaatccacctgaagaggattacaagcttgtgctgaatcctgatgaggagataccaaatgagccaatgctttaa

SEQ ID NO: 52174 - DNA, 1317 bp, Acinetobacter baumannii
atgagccaatgctttaatcctccagaaggttcagttcaattaacgcctaagcaagccaatatttatttgtggggctggcaaaaagaagcccgattacgtgatgctgtttgtggccgacgtttcggtaaaacattcttggccaaagcggaaatgcgaagagccgcaagactagcggctaaatggaatgtttcggtagaggatgaaatctggtatgcagcgcctacctttaagcaagcaaaacgggttttctggaagcgactaaaacaagctattccagcatcttggcgagctggtaagcctaatgaaactgaatgttcaattactttaagaagtggccatattatccgtgtcgttggtctagataactatgatgaccttcgtggatctggtttatttttcttaattattgatgaatgggccgactgtaaatgggctgcatgggaagaagtgcttcgcccgatgctttctacctgtaagtatatggtgaacggcgaacagcgagttggtggccatgttttaagaattggtatgcctaaaggctttaaccattgttatgacacattcatggatggtcagccagggcatgaaccagactgtaaaagcttttcttacacttcattacaaggtggaaatattcctgagtttgaaatcattgttgctaaacgcaaaatggatcctaagacatttagtcaggaacatgaagcaagctttgagagctatcaaggtgtcatctactattgttttaaccggttgctaagtgcatcaagtgaaacagttaaggttaatgatgttcttcatgtgggaatggacttcaacgtaactaaaatggctgctgtggtatatgttcgccgtggtgagcatatgcatgcggtagatgagttctttaatctattcgatactccagcaatgattgaggctatccaagagcgatatcctaatcacgaggttgcagtttatcccgatgcttcaggtgagaatcgaaagtcgagtaatgctagtgagacagatctggctttattaagaaaggcaggttttaaagttcatgtgaatagtcgaaatccagcagtaaaagatcgtattaactcaatgaacggtatgctctgcaatacattatctgagcgcagattattcgtaaatgtagataaatgtcctcactttgctaaatgcctagagcgacgaatctatgatgattatggacagccggataagagtgccggttttgaccatatgaatgatgcaggtacatatccaatcgcttatttattcccgatcgacaagaaatctgttggagttcgaagaattcgcgggatgtcttaa

SEQ ID NO: 52175 - DNA, 225 bp, Acinetobacter baumannii
atgaaaaagattatttttttaagcttagttcttggtttggtagggattaatggttgctcaaaggtggaaaaagagtcaaaagaagctatcttaagcaccttaaaagattctgattcagcccaattccaaaatataaaaggatattgcggagaggtaaattctaagaatagctacggtggttattcaatttgcaataatttgggaagcacactgcactccaaataa

SEQ ID NO: 52176 - DNA, 741 bp, Acinetobacter baumannii
atgctttttcgtggtcgtaaatttttttggggaatggcttgccttcaagcagtacttgctagtataggacatgctgaaataatactgcatggtacacgcataatatatccatcggatgctcgagaagtcagcttacaactaagcaacaatggtacaacaccctcacttgttcaagcttggattgatgatggaaattcaaaatcgactcccgatgagtcgaatgtaccttttattattacacctcctatttcaagagtcgaaccaactaaaggccaaaccttacgaattactgcgctaccaagtgcttctcaattaaatcaaaataaagaaaatattttctggcttaacgtattagatattcccccaaaaccagaagggaaaaaacaagtaaataatgaaccactacctaataattttcttcaattagcaattcgatcacgaattaaattcttttatcggccagcaaatttaaaagaaaatattgatacatttagtgaaaaaattcagtgggtaaaaaatggggaaacattgcttattaagaatcccactcccttctacattacaatgagctcaatttttcaagaagtaaatcatcaaaaaatagatttattaaaacgaggtttaatgctttctcctttttcagaagaccagataaaacttaaaaatagcaatataacgaatatgagctttgtttatataaatgattacggcgggcgaattgaaaaaacaataaagttctaa

SEQ ID NO: 52177 - DNA, 1020 bp, Acinetobacter baumannii
atgaaaaaaatacttattcagagtggtttattaatcactaatttctttatttccaaccaagcaaatgcaaactgtactttaagtaaaggttttactacagttgatattccaataacgattggcaccattgtggttcgtccaaatgatcctgtaggcacagttttacaaaagaatacttttaccatttcacccaataattctactgcaacgtgtaaccgccctggtgaccaaattatagcggctctacctctaaattatccaattagtccaataggcaataatgtttacgccacaaatataccgggtataggtattcgaatttaccgtgaggcaactgactcttcgaactcttctggttattacccttataagcttacattgacgcctcatacagcatatacactttcgccaggctatattgttttggaagtgattaaaactgctaccactactggttctggtgcattagtggctggccgttatagtacttactatgtaacaggtcaacaaaatcgccccttcttaacgactacagtattaggtagttcacctattctcattgcatcatcatcttgtgaaattcaaaatggcgtagatacggttgttgaacttccgactgtgacaaaatcaggctttcgagctatcggaacaactcaaggtgagaaaaactttaacctatccattctttgtaatggtggcgagaataactccggtatacctacaagtaacacattgagtttaagctttgactacaattccgatgctgcaaacagtcaggttattagtaatagtgctgctgaatcaactaaagcgaacggtgttggtgtagaacttctatggaatatgaatggtgcaaatagtacgattcaaaaaggaaataaactaggtattggtactataggctccaaccaaacagttcaatatgatgtgccattaactgcacgttactaccaaactgctgccaatgtaacggcgggagaagtcaaagctaatgccaccgtcacgattcaatatgattag

SEQ ID NO: 52178 - DNA, 195 bp, Acinetobacter baumannii
atgtacgtttgcttgtgtcgtggcattaccgatcaggatattaaagacgctattgaaaatggcgctgaaagctatcgtgaaattcgcgatttgcttgacctcggtacttgctgtggacgctgtgcaccagaagcacgtgctattattagtgaagaattagcagaaattgctgcgcgcatttctgtagctgcataa

SEQ ID NO: 52179 - DNA, 465 bp, Acinetobacter baumannii
atgaaaggcaatcgtgatgtaatcaatcagcttaaccaagtgctgtatcatcatttaactgcaattaaccaatactttttacactctcgcatgtttaatgactggggaattgaacaactcggttctgctgaatataaagaatcaattcgtcaaatgaagcatgccgacaagattattgaacgtatcttatttttagaaggacttcctaatcttcaacatctaggtaaattgtatattggtcagcatacagaagaagttctgcaatgtgatattcgcaaagtgaaagaaaacattgaagctattcaaaaagcagttgcactagctgaaacagaacaagactatgtaacacgtgatttggtacaagaaattttagaaaaagaagaagaatattgggattggttagatactcaaattgatcttattggtagtgtgggtattgagaattatatccagagccaaatgtaa

SEQ ID NO: 52180 - DNA, 1629 bp, Acinetobacter baumannii
atgcaagtattctttttattcctcgcagcaatcctgttaggttttgcatggctatctccatttcactataacccttgggtgatgttttctagtgaaatgagtacctttgcggcaggtctaagtgtcgtagctgcacttttttatcaaaatataaaaattccgcgggcgcaattattactattgccatttattttaattccagtggtacagtgggcttttagtctggtttttgattttagtacagctttgttaagttcactttacttattaggcttttggtttatggttgtggctggctataacctgtcattagattatcagcagcgggaccaaatttttacagggtttagcctacttgctgttattgtttcagttgcaactagctttattgcggtttgccagtggttaaatattgatacgcattttgcacatatgttgcatttaattggtaatcgaccttacggtaactttggccaacccaataatatggcaacctttctcattatggggttattaggatgcttatatttatatgaaaagaacaaggcttcagtttggttactcttgccatcagcactaactattttatttgcagttgtcctaagtcaatcacgcacttcttggattatttttccatttttactcacctattgggctattaagcaatttaacaaaccgaagcgttttggactttttcaaggcttattatggtgtgctggctttttcctcatggcgggcttagttttaccatttcttacaagcttaattgaggcatggtcgcatacagatataactcaggcgagtagcttggctgaacgggcaagctcgggttatttgcgttttaatatctggacgcaaatgttactcgctgtacagcagcatccttggttgggatatgggtggaatcaaactagtgttgctcaaatgtccgcttatgctcttttcccaacgacagaatggacgaccagcgctcacaatgtgttgctagatcttattatttggaatggtattccaattggtatcgtgattattgcttactttacatgttggttgttttggttaaatcaacaagcgaaagaaacaatttcgattattgcagtgatgatggtctgtacagtacttattcatgccatgttagaatttccgcagcgttatgcttatttcttactgacttgtggctttttattgggtgtaattcaagcacagactccaatactgaaaggttttgtactcggtaaacatcttctgcatttaatttggggtgttagcttaatacttatgatcgcaatttggcgtgattacaacgtatatgtcatgaatagtaatttactatttaaaaataagcagccaaatgccgagcttatgggaagtgaccagatttttgttctaacccaatttgagcaacgtttaaagtggattgcgcttaatcctcatgtaactttatctgaagcagagttagttcaatggggaaattttgtgaagaacaaagcaaccccctataatttacgtaaatatgctcagttacttgcttataatggaaaaatagatcaggcagagcgacaaatatttattttgcagcacctttatggacagcaaataacactgccgcaattattaaaagataaataa

SEQ ID NO: 52181 - DNA, 1311 bp, Acinetobacter baumannii
atgctaaaaaagaatattattttattattaatgggaagttatctcattattgctttaatggggtatcaaatagggtggtctggttcacaatatgatgaacttcgattactacaattacctctagccttgtatgcgttattaagcctaatctttacaaaaaaaatagaatattcgatttacactaaaattactttttttattattgcaatattaatatcgattcaacaaataaattggaatatcttccagtttcaagaattatggtcagccatagcattattatttatattatctattttagtatttgagttaaaaggtaaaacttatctacaacatgtcatagctttgattatagtttcagcattaattccatgttcatttattcttatttctattattaaatttatttttactaaacaatggtatgactggcagtttaactcgggcacgattcggatctatgatagcgttattgttcctctattttttttcctgatttttttaaaaaataacaaatatcctcatatcgattatttttatccaatcacaattttctttttttctctagcctggttttttgatggtgcacgttctgctttgtttgcaatcataactggtctaataatatttttccttttatcaaaagaaaatcgtaaactggttctaaaaatatttttgtatatattttcagcttttatagtttataaaggtacagcttattttgcagataaaaatacgatgaccgtaatgcgatcaggtacatctttacgtgccgaaatgtggcattttgtatttgagcaatggaaacagcatccctttagtggagtgggagggggatatttatctagaatccaatatcaatatggccatcatatacataatctttatttaagattaatttttgaatggggagcgattggatgtatatttctagtttggatgacttatcaactagtaaaattatttttgaataagggaagtttacccattgcaaaagctggtgttgctgcaattttaattgatgcaatgttctctggtagcatggtatatccaacttcacaaatcgcttgtatattttttatagcttttgcattttctcaaaggaaagtagcttctagttctcaattttcttttttgtctaccaaagtacttatcagcttatggggggctttatttttatacattacaataacttatttagggcaagatttaatgtgttggggatgcagcagttatgtgggaagaatggctccaaacttttgggaatatggcggaactgaacatctaattccaactacccagattccataa

SEQ ID NO: 52182 - DNA, 1398 bp, Acinetobacter baumannii
atgtcgaaatcggcaactgtatctcgtggacttgttatttctacactttcaattgcactcgttgcatgtgtcaatatgcaagctccacaacctgcgattacatctcatattccacacaatttttctcaaaatgcttctggtaaaacgattgctgaacaaagttataaagagtttatttctgattcgaaattagcacaggttattgaaataactttaaataacaaccgtgatttacgtactgccacactcaatattgaacgtgtacagcaagaataccaaatcacaaaaaatagccagttacccaccattggtgtaatgggaagtgcagcaagacaagttgatccgtctattaatcctaataacccagcttctacatttcaggttggttcaggaatgaccgcatatgaactagacttttggggacgtgtgcaaaatttaaaagatgcggcattaaataattatctagcaacacaaagcgctaaagaagcagttcaaattagtttaatcagcaatgtcacgcaagcttggttaaactatgcttttgctcaagctaatttaaatcttgccgagcagaccctaaaaacacaactcgattcttatcatcttaataaaaagcgttttgaagttggtattgatagtgaagttccgttaaaacaggcacaaatttcggttgaaactgcacgaaatgatgttgcaacgtataagacccagattcaacaggcaaaaaatttactggatttgctggcaggtcatcctgttccgcaaaacttacttcctgatcattcaattcaaaatattacctttgagaaaacctttgcagccggtttaccaagtgatttattaaattatcgtccagatcttaaagctgccgaatatgagttacgtgctgccggagcgaatattggtgctgccaaggcacgcatgttcccgaccatcagcctgacgggctcgacgggttatgcatcgtctgaactgaaagatttatttaaaactggcaattttgcatggtcgattggacctactattgatctaccaatttttgattggggaacacgaaaagctaatattaaaattgcagaaactgaccagaaaattgcattggctaaatatgaaaaagctattcaatcggcattccatgaagtcaatgatgctttggctatgcatgcacatattggagaaaggttaggtgcgcaacgtcgcttagtctctgcgacagatgcaacctataaactctccatggcacgttatagagcaggcgttgatagctattttacggttttagatgcgcagcgttctgcctatgcagcacaacaaggcttacttgcacttgaacagatgaaactcaataaccaaatcgaaatatataaagctttaggaggaggaatatctaaaagctaa

SEQ ID NO: 52183 - DNA, 150 bp, Acinetobacter baumannii
atgcacgcttatacggttgagcctttatatgttccatgtgatcaggaaatgatcgcagctgacttttatattccaaaaacaaataataaatctgcggtaattatcagagcctgtaaattattttgtgtaagttccattttttataaatga

SEQ ID NO: 52184 - DNA, 1374 bp, Acinetobacter baumannii
atgttcgatataattatcattggcgcaggtactgctggtattagcgcatataaagaggctgttaaacataccaataatattttaattatcaatgatgggccatgggatacaacttgcgcacgtgtagggtgtatgccaagtaaagtcctcatctctacagcaaatcgtatgcatgacctccaaaatgctcaagaagttgggttaaatgcttctgtagacattaatactgatcaggttatgaaacatgtaagaaacttacgtgaccgttttacaaaggcgactctcaaagatgtagaccaatggccaactgaacataaaatttcaggtaaagcccattttattgattcagaaactattgaagtaaatgggaaacaatatcaatcaaaaagctttattctggcagttggttctactcctaattatgatcaaacatggaaacaagaattaggtgatcgccttattaccacagaccaaatatttgaattagatactctacctaagtctcttgccgttattggaagtggagtaattgctcttgagatcgcacaagctatgcatcgattaggcgtggaaacaactatatttgctcgtagtaaaagaattggaatatttactagctctaaattacagcaacttgctcaagaagagctaagcaaagaattaaactttttatttgagacattaccagccgaagttaagtctacttctggtggcgttatattaaattatagaatcaatgaagaagaaaagtctcttcaaactgaatatgtgctatccgcgacaggccgttcaagcttattagataacttaaaactagagaatattgataaatcatttcaggatattaagttattgcctataaatgcgaaaacaaaacagctagataactatccaatttttattgctggggacgcttatacttcaacgccattacagcatgaagctgcacatgaaggtaaaaaagttgtttataactgtttgaattatccacagattaattcagttaagactcttactccattaggcatagtatttagtcatccagaaatggcaattgtgggacaaagttataaacaactaaaagacaatggaatagattttgtcacaggtgaagcatcttacgaaagacaaggaagagctattgttcttggaaagaataaaggagctattgaagtttatatagagcgaaaaagccataaactacttggtgccgagttatttactgaggcgacagaacatatggctcatctcttaagttggatcattggtgaagaattaactttaaatgatattttagagaaatctttttatcatcccactcttgaagaaggtctacgcactgcccttaaacatgcacgtaggcaattaaaataa

SEQ ID NO: 52185 - DNA, 1308 bp, Acinetobacter baumannii
atgaatacaaatgaagattccactgctttagctgaaagcattcccccacatgaacttcatggtgtttcatttcgtgaagctttttgggtatggcttaaagtagctgcgcttagctttggtggacctgcggggcaaatcgcagtaatgcataaaattttagttgaagagaaacaatggattagtgaaacgcgttttttacatgccttaaattactgtacacttgttcctggtcctgaagcacataagttggctgtatacataggttggttattacaccgaacacgtggcggactcgttgcgggtactctctttattttaccgggtctacttgcattaggaatactaagctggatttatgcaagttatggtcagattagtattgttcaagcattattctttggattaaaagcagccgcttttccatttattattttagttgctgcgcttatcggttacatcggaaataaaagtggaagtaaagcatttaacgcctcctcatctcattctgacgctaatagctctaatgcttcattagcagctattgatgctgcttttgctaagcagatcccagagcatgtacaaccttcccatacaagagctctaaaaattactctcattggtttggtcttatggctcggcccacttatagcttttattactttaatgggcaaagataatgtttatacgcatatcgctctattcttcagcaaaatgtccgtacttacgtttggtggtgcttatgcaattttatcttatgttgcacagcaagccgtcgaaaacttccattggcttaaacctagtgaaatgctgatcggacttggtatggctgaaaccacccctggccccctgattagtgtagttcagtttgtaggctttatggcagcgtatcgagacccaggatcattgaatcctgccttggctggtactcttggaggtatattagcgaaatgggtaacatttgtaccctcttttctattcatttttattggtgctccatatattgaagcattaagaaataataaggctttaaatgccatactttcgacaattacagcagctgttgttggagtgatccttaatctatcagtgtggtttgcattacatacattatttgctgaagttaatgtaattcataaatatggaatggttttacaagttccagttttatccagcattaacccatggtcactaatgttatcaatcatagctatgcttgctttattccgtttcaaacttggaatgatgactactttagctggttgctgcgctataggaattattcttcactttttcgggataagcggctaa

SEQ ID NO: 52186 - DNA, 939 bp, Acinetobacter baumannii
atgaaaatatctttactcatatcctctttgcctacacagaacacatctacacgtatgagagtatggcgttctcttaaagcaagtggagccgcaatccttagagatggtgtgtatttacttcccatttctcatagcgagaaatttgatcctattgcaagtgacgttatttcagagcaaggctctgcgtatgtattccatgcggagcagcctttaaaccttgaattagctcctttcttcagtcgaaaagaagaatacgatgtcctctataaacaactctctgagttaagagatcgtcaatctaaagatgaaaagaaagagctgctcaagcaaatccgtaaattaagaaaaagtatcgatgcactcgtagaaattgactattaccccgatgagactcaagcacaggtactaaatgaactttctgctttagagctttcaatagctcgacttggtgaagtgaatgagcctcaagcaatacaagcacatattcaacttctagataaaaatagttatcaaaacaaaatatgggcaactcgtaagagaccttggattgatcgtctagcctctgcatggctaatcaagacttttattgattcaactcctacatttatttggttagaaacaccaagtgaatgtccagaagaagctttaggattcgattttgatggtgcagctttcagtcatatcaatcactgggttaccttcgaagttcttttacatagttttaatttagaaacacctgctttgaaaaaaattgcagagattgtccactatcttgatattggcgggattgagccacccgaagcttcaggcatagaaaccgtctttgcaggaatacatgaaaacattacagatgatgaccaattattagtcgcatcaaatgcaatctttaatggcctattgtctagctttaataaaaatagctctgtactgaatgattaa

SEQ ID NO: 52187 - DNA, 129 bp, Acinetobacter baumannii
atggctaaagaagaattttttaagtttttgattttatataaattatttggttttattgtttcaatatacatcaatatttgtgaattcagtattactcatcacaaaaaaaattgttttagttataattaa

SEQ ID NO: 52188 - DNA, 879 bp, Acinetobacter baumannii
atgtcaatacaaactataagcagtaccataacaaggttaaataaggagttagcagatattactcatcgaatgagcttagagcagaaaaagggagctgatataatttctaaaattttacaaattcaaaattctatcgggaagacaactagcccctctacattaaaaacaaagttatcagaaattagtaggaaagaacaagaaaacgctcgtatacaatcaaaactttcagacttacaaaagaaaaagattgatattgataataagctgctgaaagaaaagcagaaccttataaaagaagaaatactggaaagaaaaaaattagaggtcctgactaaaaaacagcagaaagacgaaattgaacatcaaaagaagctgaaacgtgaaattgatgctattaaagcttctacccaatatattactgatgtttcaatatcatcttacaacaatacaatacctgagacggaaccagaatatgatttgtttatttcacacgcttcagaagataaagaagattttgtcagaccgcttgcagagacattacagcaacttggagtaaacgtttggtacgatgaattcacgttaaaagttggggacagtttacgtcaaaaaattgatagtggtctccgaaactctaaatacggtaccgttgttctttcaactgactttattaagaaagactggaccaactatgaacttgatggcttagtagctcgagaaatgaatggccataaaatgattttaccgatttggcacaaaattactaaaaatgacgttttagattatagtccgaatttagccgataaagtcgccttaaatacttctgtaaatagtattgaggaaattgcccatcaattagctgatgttatcttaaatcgataa

SEQ ID NO: 52189 - DNA, 288 bp, Acinetobacter baumannii
atgccattgactacactaatcaagcgtatgcatgaacaagaactaaaaaatggcttaggctatattgatccaaaacagaatcgtataattaccacacatggctttcggtctacttttcgtgactggtctgcggaaaaaactaattatgcgcgtgaagtctgtgaacatgtattagcgcacaaactaccagataaagttgaagcttcttacttgcgtggagattatctagataaacgtaaagaattaatggcagattgggcagagcactgctctacgcttacagagtga

SEQ ID NO: 52190 - DNA, 720 bp, Acinetobacter baumannii
atggtcactggctttgtacaaagcctgattaaactttgcggattagattggacagcgccagactatacgacgctttgcagaagacaaaaacatattgatattgcgattagctaccaaaaaagtagcaatggtctacatctactcgtagattcaactggtttaaagtttttgggcgaaggtgaatggaaacggaagaaacatcagcctgaatatcgtcgacaatggcgtaagcttcacattggtatagatgctgaaacgctgcaaatacgtgcagttcagctcacaacgaacaatatcagtgattcacaggtgctcggtgatttacttggtcaaataccacttgatgagcgagtagattctgtctataccgatggagcctatgataccaaacagtgccgacaggtcattgcggatcgtcaagcatatgcggtgattccgccaagaaaaaatgcgaaaccgtggaaagatacaaaagttcattcgcaagagagaaatgaattactaaaaacagttaagcgtctaggaagagccctttggaaaaagtggtctggttatcatcggcgaagtttggtcgaaaccaagatgcattgcatcaaattattaggcgataaactctactcaaggaattttgacagccaagtgaatgagatccatgcacgtgtagccgtattaaataaatttacagaattaggcagaccacatacccaagttgtaacctaa

SEQ ID NO: 52191 - DNA, 723 bp, Acinetobacter baumannii
atgcgcctacattttattgttcatgaagattttgaagcaccgggtgcatatgaaatttgggggcaaactaataactttgaaatgacatattcaagagtgtatttaaacgaacaattaccctctacagttgaacatattgattttcttattgtgatgggtggtccacaaagtcctgatacgacagttgaaatgtgccctcattttaattcgctcgcagaacaagctgtcataaagaaagctatagaggcgaataaagttgtgttaggtatatgtttgggttcacaactcattggtgaagctttgggtggacaatttgaacatagccctgaaagagagattggtaagtttcctatcatgctgactgagtatggtgttaaagattctctattttcacacttaggaaaaatgacagaagttggccactggcacaatgacatgcccgggttaacaagcgatgccaaaattattgcttttagtgcaggttgtccgcgacaaatcgtggagtattcgaaattagtctatggcttacagtgtcatatggagctaacgcctgaagtcgttgaattacttattcaacactcagcaactgaactcgaccaagcccctgcttataaatttgttaatacccgtgaggaattgagaaatcatgactatcaagaaatgaatcaaaacttgtttattttcctagataaattaaaagatgagtatttaaaacttaactaa

SEQ ID NO: 52192 - DNA, 1182 bp, Acinetobacter baumannii
gtgaatcaattcagtacagatgtcattaatttaggacgaacacccgagcgttttgatggtctagtcaacacacctgtttttcgtggttctactattgttgtaaatagctttagtgagtgggaagaatttaagcgaaatggtggggtatatcgacattatggccgtttcggcgccgcaacagctaaatcttttgaaagtgcaatcagtgtgcttgaaggtggtgcgggtagtatggtatttccatctggattgtcggcatgtacacatgcacttatggcttgtgtagaggcaaatagtcatgtcttgattgccgataatatctatggcccaacacgaaattttgctgacaatatattggtccaaatgggggtaagtgttgaatattttgactctaccagccttgaagcattaaccgaaaaaattaatgatcgtaccactgcggtgtttattgagtcacctggttcaatgacatttgaattgagtgatgttgcagcgatttctgcaattagtcatcaatacggcgcaaaagtattagtcgataactcttgggcaacgccattactttttcaaccattaaagcatggtgctgatatatctattcagtccgtaaccaaatacattggtggccattctgacatactcatgggtgtggctactgcaaatgccgaaacatacgaacaactcactaaaacaggtcatttgtttggtgagaccacaagcccagacgacatttatttggcatcacgtggcttgcgaagtttggcggtaaggttaaagcagcatcaagatagtgctttaactattgcccgatttctagcaacacatccggctattaaagaagtgcttcatcctgctttagaaacaagtccttatcatgatttgtggttgagagattttcatggttcatctggagtattcgctttttatttaaaagaatctaaaccttcatatgtgcaaaaattctttgattcgttgcaattatttcatattggtttgtcttggggtgggtttgaaagtttgattttacctgttggacaagcttatcgaacacataccaatttacctaaagatggctatttagtgcgcttaaatattgggctagaatcggtggtcgatttacaaaaagatttgcaatatgccctacagtgtgcagaacaaatgcgtgttgaaagtgttatatag

SEQ ID NO: 52193 - DNA, 729 bp, Acinetobacter baumannii
atgctacaagctaaaccttatttacgttcggtacaaattaaagcaaatatgcaggcagactggtcaatttatccattttcgataccagccgttaatgatattgaacaattaaccttccatccagacgttactttttttgttggcgaaaatggttctggtaagtcgactattatggaagccatcgctttggcacttggcttgtccgaagaaggcggcactctaaacgtgcggcttaattcagccagtagttcatcaaatttatttcagtatttaagaatgattaaaagctttaaaaagccgaaagactattattttttaagagctgagagttattacaatattggcacatatatgaatgaattgaactatgtaaaaagttatggtggcaatatccatgcttgttctcatggtgaaagttttttaaagttgctcactcataaactacaaggtgaggggctttatttattagatgaacctgaagctgctctttcacctaccatgcaatttgtagcgttgtcggctattcatgaattatgcaaaaaccagtcacaactcattattgcaacgcattccccaattttactagcttaccctaacgctaaaatctatcaattttctgacacagggattcgtgaaatccagtatgaacaaacggaacatttccgtgtgacacatgattttttaaataattaccaaaagcgtatccagcaaatcatagatgaaggatag

SEQ ID NO: 52194 - DNA, 471 bp, Acinetobacter baumannii
atgaagttaaatttagataaatatgaccgtgtaatattagatcttctacagaaggactgcacattggcaatcggtgatattgctgaaaaagtgggattaagtaatacggcttgctggcgcagaatacataagatggaagaagaaggtattattcgtgcaaaagtcgctttgctagatcgtaaaaaactcaacattaatgtgattgtgatggtgtttattaaaactgcacaacacaatattgagtggattgagaaattccactctcatatctataacatagatgaagtgattgaagtgtatagaatggcaggtgaaacagattatttacttaaagtcgccgtatcggatgttgctgaatacgataaagtttataaaaaattaattgaaattaaagggttggctgatgtgagttcgagttttgccatggagcaaattaaatatacgacagaacttcctttaaattttttctaa

SEQ ID NO: 52195 - DNA, 1098 bp, Acinetobacter baumannii
gtggcgaaagtcctgagtcatttagatgacattgattttgatatttccaataccgaagccgatgtactgggggatgcttacgaatacctgattggtgagtttgcctcaggcgcgggcaaaaaagcgggggaattctataccccgcaaacggtatcgactctactggcgaagattgtcacgcaaggcaaagaccgtttacgttcagtctatgacccgacctgcggttcaggttcgttgttgctacgggtaaaacgtgaagttaaagatgtcgatatgatttacggtcaggaaatgaaccgtaccacctacaacttggcgcgcatgaacatgattttgcatgatgtgcattttgcaaagttcgacatcaagcaggaaaatactttaacccgtccgcagcatttagataaaaagtttgatgcggtggtggcgaatccgccattttctgcaaaatggtcagccgatccgttatttttacaagatgaacgctttgctgcttatggcaaattggcgccaagttctaaagccgatatggcttttgtacagcacatgctgtatcaactggatgacaatggcaccatggcggtggtgttaccgcatggcgtattgttccgtggttcaagtgagggcgtgattcgtcagtacttgattgagcagttgaatgtggtggatacgattattggtctacccgccaatattttctatggcacctcgattccgacctgtattttggtgttgaagaaaaaccgtgagaatagcagcaacattctgtttattgatgccagcaatgattttgaaaagcagaagaaccaaaacaagttattgcctgagcatttggataagattgttgcggcatttgaaaagcgtgaaaatattgaaaaatatgcgcatgtcgcgaccttgcaagaagtgaaagataacgattacaacctgaatattccgcgttatgtggatacctttgaagcggaagccgagattgatttagatgcgattgcaaaacagcttcaagctttggaacaagacagccaaaatactgatgccattattgcagatttctgcaaagagctaggtattgcttcaccgtttgcggaggtgaagtaa

SEQ ID NO: 52196 - DNA, 1239 bp, Acinetobacter baumannii
atggctgcgccaaaattaaggtttaaagagtttgatggggattggaacaaaaatactattggtaattttgtattaaattacaaaggtggtgcatctctaacaccagcagattttgtagaatattcagattgcgaagttattcctaaaaaagctatatcttctggtggattacttcaattggataaagttgttccaactttttgcactcttgaattttttaattcaaatcaaaattatattgtagatagtgaatatttaattacaactctacgagatcttgtgcctagtggtccaagtattggttatatcgttaaatatgaaagtaataagaaatatattttagctcaaggtgtttatggattcagaataaaaaatgatcttaatagagattttttaatccagttctcaaatacttctaaatttagactacatatgcaatctatcatggttggcagtacccaagtgcatattagaaatcaagattacttttctactgagctttatactccgtcgttacttgagcaaaccaaaatcgcatcttttctttctaccgtggatgaaaagattagccaactcacgcaaaaacatgagctgctgagccaatataaacaaggcatgatgcaaaagttgtttagtcagcaaattcgttttaaagcggatgatggcagtgagtttggggagtgggaggaggttgctttaagtaaggtttctgatgttcgggatggaacacatgattctccgtcgtatgttaaagacggttatccactcattacttcaaaaaatcttaagaatgggaagcttgatttaactgatatcaatttaatttctgaagatgattatttaaatattaataaacgttcagcagtaaatattggtgatattatttttgggatgattggaacaataggtaatccagtacttttaaactcagatggttttgctataaaaaatgtagcactcataaaagagaaagatgaacttttaaatatttatctaatccattatctaaatagtagtttttttgctaaacaagtagctttgcttaatgcaggaaacacgcaaaagtttttggctttgggacaaattcgttcattatcaattcataagccacaattagctgaacaaaccaaaatcgctaatttcttatcaagtatcgaccaaaaaattgaagtcgtggcacagcaaattgaacaggccaaacagtggaaaaaaggcttgttgcagcagatgtttgtgtag

SEQ ID NO: 52197 - DNA, 912 bp, Acinetobacter baumannii
atgcaactttatcaaacccaagcacagacattactagaactcaccgaagatccttttcgtttggaaagagagattcaaagcctgtttgaaagcaatctttacagttttacaggtctggaatttattaaatctgagtttacgattaaaaataatcgtatcgatactttagctttcgatcccgaaagtcaggcgtttgtaattatcgaatacaagcgtgaacgcaattatagcgtgatcgaccaaggcgtttcttatctgaatctgatgctcgactataaggcagatttcatcgttgagtacaacgagaaccagagtaaacagcttaaacgtcaggatgtcgactggtcacaaagtcgaatcatctttgtttcaccgagctttaccgactttcaaaagcagtctactaattttaaagatttgggcattgagctgtgggaaatcaaacgctatcaaggtggaattgtttcagtcaatccattgcagaaagccaaatcagccccttcaatcaagcaagtgcaaaaggtttactctgaagatattcaaaaaattgctaaagaaatccagcaatatgatgaagcctatcacttggcggataagtccgatgacatcaaagagctatatgagcaattcagggactcaattctgggcttaaccaccgacttagaagttcatcccaagaaaatgtacatagccttccgtaagggtaagcgtaactatgtctatatgagtattgggacaaagcaaattcgtatatggctgaatatgccttttaatcaactggatgacccgaaacagctcgcgaaagatgttaccaatattggacattggggcaatggcgattgtgaggtgatcgtgtcagatacagaaaatttagaatatatcttgagtttaattaaacaaacattgaagtga

SEQ ID NO: 52198 - DNA, 999 bp, Acinetobacter baumannii
atgttcctcacgggctttgactctaagccgttaaataccttgtatgtcgataaaaacctaaaatatcatggcttgattcaagcattctcacgcaccaaccgtgtctataacgataaaaaaccatttggcaatatcatctgtttccgcaacctaaaacgtgcaacagatgaagcactggcgctattttccaataaagaaacgaccaagattgtacttgttcccagctatgcggaaatcgaacaggattaccaagcagcggtgagcaaattgtttgccttaacgcccaattaccaatcagtcgatgatcttgtcactgaagaacagcaactcgaatttattaaagctttccgtgaagtgatgcgctataacgcgcaattacaaacttttattgaatacgatcaagaccaaacacaactcgataaacagcactttgcgaattttgcctctaagtatgctgacctatgtcgtgccgttagaaagaccaccaagagagacaaagtatcggtactggatgatgtcgattttcaactggatttactgcatagtgatcgcattaatgttggttatatcatcaacctcctacaactagtcgtggatacagactcagaggacaagcgtcagaagtaccaagcgcaaatttacgatttaatcagtagcgatattagtttgcacgataagcaagacctcattcaaaaattcattgaagaaaacataccgaagatgatcaatggacagagcgttcaagatgcctttgcacatttttgggatatcgaaaaagaacgggcttaccagcagctttgtgaacaggaaaatctaaagcctgaagtgatgaaagaagttcttgaacactatgaatatacgaaccgttttccacgtaaagaagaattgaaagacttgccaaactataaagtaaaactttttgaacgggataatgtcttcactaacttgctggtcaagacacggcagttgattgaaagattttatactggttttaattaa

SEQ ID NO: 52199 - DNA, 675 bp, Acinetobacter baumannii
atgaagaagcctacacacaaaatctaccgcacaaccaactggtcttcctataatcgcgctctcattaatcggggcaacatttccatttggtttgatccaaacactcagtggtatgcacaaccacaaaacaagcaaggtcgaaatcaaacttacgccgatacggctattcaatgctgtttaatgattaaatccttattccgtctatctttacgtatagtcactggctttgtgcaaagtctgattaaactttgcggattaaattggaccgcaccagattacaccacgctttgtagaagacaaaagcatattgatattgtaatcaactaccaaaaaagtagcgatgggctgcatctactcatggactctacaggcatgaagtttctaggtgagggcgaatggaagcgcaagaaacatggacctgaatatcgtcgccaatggcgtaaacttcatattggtatagatgctaaaaccctacaaatacgagcagttcagcttacaaccaataatgtcagtgattcacaggtgcttggtgatttacttgatcagattccacaagatgagcagattgactctgtttataccgatggagcttatgacaccaagcaatgccgtcaggtcattgcagatcgacaagcgcatgcagtgattcctcctagaaaaaatgcaagaccttga

SEQ ID NO: 52200 - DNA, 912 bp, Acinetobacter baumannii
atgaacattgaagcatatggctactatgataagttaaccaatacatttaaggttaatgaaatcattggcttttctgggctatctacccatattgataagccagtttatttttatcacgataaattttctaatgcctcaaaaaaatcaagtaataccagtaccataccatcaaagccgaatcatgcagaacccaaactcaatgatgaggatgaagcaacgcctagcaatagacccactattatagatagtccagctactttatttgattttgatgatccatttgaaactagaaaaatcgcagataaaacgggctcaaaaaacgctattatcgtggatgatgctaaagagtatattgatgaattaattggtgatgtaaatgccgatgaaccaggaattggcggtacagttaaagctggtgattttgagggtgcgaaggatcaaactgatgatgcccatttatatctagaccgtttctccgcttttatgcagatgctttataaacttgaggaaaagtatggaatacaatattcattgacttcaaaaattttgcctacagtacaggggtttactaaacatctaaagtccgataataatccacgctgtattgctgaagtacattttctgcatcaaggtcagcatttcattttactcgaagttgatacatccgataatgcaaatcgtctgtcaacacaattgttaacaataaaagatatgaattgttgggaaaaaaattatgaaaaaattcgcaaatatatagttcaaaatactcttaactggccaattagtttcattaaagaagtagcaagtcgtcaggctagattcaatcacccacgtattgatgaaggacaacaagttgctattgatgacttagaaggatgggcaaaacggatttacgtagggttaaataaatag

SEQ ID NO: 52201 - DNA, 444 bp, Acinetobacter baumannii
atgagtttaataggctttatgtatgcaagtaaaaccaatagtgaacatagtcaaataaaacaagatttaattgatatcctcacagaagcggtcaaattcaactctcaaaatgatattactggtgtgctttactatggtaatggatacttcttacaatacttagaaggggagaaagaacaagttgagacgctattttataaatcaattttgaaagattcgagacatcaaaactgcgaaattatctttttggaaccgtccgaacagcggttatttaaacattggagtatgaaatttgcgcctataaataccaaaataaaagatttcttttttcatcatcatgttgatgagtttaatccgtatttacttaacactaattcaatcccatcttttattgaattacttgtagatcaacccaatttgaaagcggatcaatatcaagtttaa

SEQ ID NO: 52202 - DNA, 264 bp, Acinetobacter baumannii
atggagaaccatgaaattattcttcaagacgaacaccataaacagcttaagattgtcaaagttcaagatgttcgttttgatactcatacactgaaccatagctaccaatggttatgggtatttgatcatagctcagagttttttccatttgagctgtgggatcaactcgacagtgcaaccgtccatcaaaaaataaagctgaataatcaggtctttaagattattaagattttgacaaagaaaaccaaattaagatattcgtga

SEQ ID NO: 52203 - DNA, 150 bp, Acinetobacter baumannii
atgctagcaaaaggaagacaaataagtgaggtagcgcagcaattagaatttgtcagtgagagtgcatttatcgtttttttccaccaacatacaggtactactccagtccgttatctacggaatatttttggtgaaaattcctataaataa

SEQ ID NO: 52204 - DNA, 936 bp, Acinetobacter baumannii
atgaaatctttggatcttactcgctttgatcttaatcttctggttgtacttgaagctttatggaatgaaagacacgttggtcgtgcggcagaaagcttgcatataacacaatctgcaactagccatgctttatcaaggctacgtaatactctagaggaccctttattcattcgtaaccctaaaggaatagagcctactccactaacagttgaattaatgccacaagtaaaaacagctcttgaattaataagacaagttgctactcctagagggcaattcgatcccatgaacttaaagaggccccttgtactggcagttactgaccatgcaatattaacagttatcaatcctgcatttgctcagcttcagaaggctgctcctgatatagttttgaagttaaaacaagctaatactgaatcagctttaagcatgttagataatggagatattgatattgtaattggctcaggatctttttttcaaatcccccagcgtttagattgccaatttgtccatcaagaaagatttgtagggattgctcgtaaaaatcacccagctttaatcaaacgcgacaataaaaagtacatagatatcaataactttgtcaagttttcgcatatcttagtctcaccaaatggagatatacgaggaattgtagatgaagtactaaaaactcataaccttacacgcaaaattagcgtaatttgccctagttttttggctgtaccattcttagttggtagttcagattcaatagcagtaatagctgagcgagtagcattaaaattacaagagactgctcaattgagcatttttgagctacctttggtattaccaacttgggaggtttatattattcgatcgagagataggattaatgaacctatgatcgaatggattacaaacacactaatatcagcgcaatcagccatttaa

SEQ ID NO: 52205 - DNA, 723 bp, Acinetobacter baumannii
  misc_feature (577)..(586): n is a, c, g, or t
atgaataaccagccaaccctagtcatgattccatgcttctcaggagcagcatggcaacttaatcaacttactgaattaaaaaattataatatgcgcactttttgtttaccgaatgatattaataaaatagaagaattagctgatttcattatggatcaagtaatagatctagataattacgttttagttggtgattcttatggtgctatagcagcaattgctgttgcaatacgtcaaccaaaaggtttaacaggtttggttatttctggcggttttgctaaaagtccgattacttctccactactcaaatttttatcaatgcttgcccctttcttttcaggtccattttatcgacaactaacacttcgatttcattctgcacagctcacttcatcttttgataaagagggagaaataccctggtcaacaaatctaagtagagatttatttattaaatccacgcctcacaaagcctatatcaatcgtattcaatcaattgaagaaatcaactatatatctctcttaggaaacattttagtacccacattaattcttacacctgatgaagacaagctannnnnnnnnncttctaaaactcttttaaagaatattaaaaactcagaagaagtgattatcaagcgtacgggtcatatgtttcgattttcacaccctttcaaatactctcttgaaataaaaaaattcttgaaaaaatattatatgtaa

SEQ ID NO: 52206 - DNA, 240 bp, Acinetobacter baumannii
ttgttagggcgtggatttgcatggttagatacaggtacgcatgattcattgcttgaagcgagtcagtttgttcaaactgtagagcatcgtcaaggtttaaaaattgcttgtttagaagaaattgcatttaacaatagttggattgatgaagagcaacttcttaaacgtgcaaacttctttaagaaaacaggctacggtcaatatttatttaaattacatgctgaacatcaaaaaaaataa

SEQ ID NO: 52207 - DNA, 336 bp, Acinetobacter baumannii
  misc_feature (283)..(292): n is a, c, g, or t
atgagccaagtaaaacgtaaaggtattattcttgctggtggttcaggaactcgtttatacccaatcacaatgggtacatcaaaacaattattgccaatttatgataagccaatgatttattatccattgtctgtgttgatgttggcaggaatcaatgaaattttaattatttctactcctgaagacctacctaattatgaaaagcttttaggtactggtgaagaaattggtttaaagctttcttataaaatacagccatctcctgatgggttagctcaggcannnnnnnnnngctcaggcattcatcttaggcgaagaatttataggagaagataa

SEQ ID NO: 52208 - DNA, 906 bp, Acinetobacter baumannii
atgaaaatattattgctcggaaaaaatggacaagttggttgggagttacaacgctctctgcaaacacttggtgaggtgattgcgattgaccgttctacaagtttagatggtctaagtggcgatttggctaattttgatcaaattaaacagactattgaaaaagtccagccaaatataattgtaaatgccgcagcttatacagcggttgataaagctgaatcagatcaagaaaatgctgatttaattaatcatctcgctgtcaaaaatctagctgaactttgtcaaactcatcatattttactcattcactattcaacagattatgtttttaatggtgaaggaacaaaagcatggtctgagagtgacttaacggatccagtaaatttatatggaaatacaaagcgccttggtgaaattgcacttgagcaaagtggctgtgcttttattaacttcagaacatgttgggtctatggttcacatggtaataactttataaaaacgatgttgaaattagcgtcaaatcgtgaagagctaagtattattcatgaccagattggtgcgccgacaggggcggctcttattgcggatgtgacagcacaagcattaaagtattattcattactgggtgctcagcaacaaaaagatttattagggcattatcatttggctgctgctggtgaatgctcgtggttcgactacgctcaatttgtttttgagctagctaaacaaaaaggacaatctttagcaattcaaaaagtaaatgcaattgaaacgactgcataccctactccagctaaacgacctttaaattcccgtttaaatacaaataaactacaagcaaattttaaaatacacctaccgaattggaagttaggtgtagcacaagttttagaggaaattatttaa

SEQ ID NO: 52209 - DNA, 1077 bp, Acinetobacter baumannii
atgaaaattttagttacaggtggagcaggttttattggttctgctgttgttcgtcacattatcaaaaatactaataatgatgttcttaatgttgataaattgacatatgcaggaaatttagaatcacttaaagaagttgaccaaaattccagatatcaattttctcaaactgatatctgtgatcgtaaagcattagattttttatttaaagattttcagccagacttagtcatgcatttagctgcagaatcacatgttgatcgatcaattacggggtctgctgcatttattgaaaccaatattatcggaacatatcaattattagaagccgcacgtcattattggaataatttaagtgacgataaaaaaacagcattccgttttcatcatatttcaaccgatgaagtatatggtgatcttgagggaactgatgatttatttcatgaatcgacatcttatgcgccaagttctccatattctgcaagtaaggcaagctcagatcatttagtacgtgcttggaatcgtacttatggtttaccagtagtcattacaaattgttctaataactatggtccatatcacttcccagaaaaattaattcccttagtgatattaaatgcattaaaagggaaagctttaccaatttatggtaaaggtgaccaaattcgtgattggttatatgttgaagatcatgcacgtgcactttataaagttgttactgaagccaaagtaggtgaaacttataatattggtggtcataacgaacaaaaaaatattgatgtcgtaaaatcaatttgccagttacttgaggaacttgcgccaaataaacctgaaggcgtggcccattatgttgatttaattacgtatgtcacagatcgtcctggtcatgatctacgttatgcaattgatgcaacgaaaattaaagaagatctagggtgggtgccagaagaaagttttgaaacaggtcttcgtaaaactgttgaatggtatttgaacaaccaagaatgggttgaaaacgtacaaagcggtgaatacaaaaactgggtacaacaacaatatcaggcaaaaaaagcctaa

SEQ ID NO: 52210 - DNA, 366 bp, Acinetobacter baumannii
atggtaaagaaacgtatccaagttgtaggggcacgtatattaattttaggtttaagttttaaagagaattgtccagatatacgaaataccaaaattgtagatatggtaaaagcactaaaagaatacgatttagatcttgatatctatgatccttgggtagatagtgctgaagttgaagcagagtatggcttagctccaattatggaattaaaacaaggtcggtatgacgccatcataatagcggttgcacatgaccagtttaaacaaatgtctgcacaggaacttgtttccttaggcaaagaaaaacatgttttatatgatttaaaatatgttttaaacaaagaacaaagtgatattcggctgtaa

SEQ ID NO: 52211 - DNA, 741 bp, Acinetobacter baumannii
atgaaccataatttacttaaacaaactgagttccattcatttcattgggataactttagctctgaaattttagcagctcatcaaagagttatgtcgcatttaggtttaaatgttcgatatactcaaaagaacattccacatggtcaatggcttgatgaaatcatggcaacagctcaagctgaagttattgcgattattgagcccgatcttatcccattgaacattgatattgttttgaatgcaattgaatatgttattaaaaatgatacgtttttaggctgtgctcaagtctcaaatcatataggcaatgcaacacatatttttgcatctcctgcttttttctttattactaaaacatgttatgaaaaacttgggcgtccctcttttatgcctaataaacatggagatgttgcagaagctcttgcatttgctgccgaagaaaaaagaattccctatcatactttgtttccaacacgctatgaaaaagcaccaagtgaaggttgttgggccctagcaagttatggttattatggcataggtacagtatttgcagatcaggtttaccatttattccaaagccgcactgctgaaaatatagaacttttcgtgaaacgttgtgatgagctcattaataatacacttgatatttcagcgtttaataactgtataagcctagaaaagccatcttatatttacgaaccaaagaaaaagcgtaaatggtatacgaaaatcttttcataa

SEQ ID NO: 52212 - DNA, 447 bp, Acinetobacter baumannii
atggatttgaccaatcgtattcatcaatacattcgtggggcttggacattcgatgtgattgattcaggccctatagatggtccactcgttgttttattgcatggttttccagaaactgcccatagttgggagcaaacttctgaactattgcatcagcatggatttagaacgcttgcgattcatcaacgtggttatagtttaaatgctaggcctcaaagccgatttcagtattctctgagtgaacttgtagaagatgtggcaagctttattaagcagattggtcaaccagtttatttaattgggcatgactggggttctgtaattgcgtctagtgtaaccatgaagtatccacaatatattcaacatctcactttagtttctgtacctcatcaagccgcatttttaaaagcttgtttaagaggtggtcccacatgtttgaacaactaa

SEQ ID NO: 52213 - DNA, 516 bp, Acinetobacter baumannii; identical to SEQ ID NO: 47803

SEQ ID NO: 52214 - DNA, 294 bp, Acinetobacter baumannii
  misc_feature (255)..(264): n is a, c, g, or t
atgaagattcgcaaggtttctgctgtttttctttcaatggctgcgactcatttagcttatgcggcacctaatcttttaaattctgcaatagattcttctcaagcaaaaggaattattaaaaatcaatatattgtcattttgaataaggatattgggcctgcaaaagattttgcacagaatattgcaaaacagcatggtggcagaattttacaaagctacgacagtgctcttaaaggttttgcaatttatttaccnnnnnnnnnnccgcaggaacagcgttcattgaagcgatga

SEQ ID NO: 52215 - DNA, 315 bp, Acinetobacter baumannii
atgtctgataatgacagtactatggattatgatgaaaatgatttaatcgattctcccttgtctcaaattttacaagaggataatgagcaaattgaagttctaatttatcgattacccggtagtgattggacactggaagtggtaaaccaaaatggtacttctacggtatgggatgaaacattcccgtcagatcaggaagctctatccgttgctttagatggaattaaagccgcaggcggtattcaggccttttcagagctcagtgaccttgaagcaaagaacaatatttttcctgaattccttactcgccattaa

SEQ ID NO: 52216 - DNA, 330 bp, Acinetobacter baumannii
atggccttcagatttcgcaagagtattaaaatattacctggattaaaaatcaatctgacgcataaaggcatcagcagtacaagcattggcaagcctggtgcttctttaaatattggcaaaaaaggtacccgaaccagcgttggtattccaggcacaggcctatcctattccaagcaccaatcctataaaaatagagctagcaacccagaaaatccttctcaggaacaacaaccgttctatacaccagataccgagcaacccaaatcgaatatctggatttgggtaatttttggattattttgttttattgtcggggcaattattttttga

SEQ ID NO: 52217 - DNA, 1200 bp, Acinetobacter baumannii
atgaatcaaacatcaaattattacaatcaacatgctcaagcattttttgaaaatacctatcaggttgagatggaaagtctttacacaccatttctaagatatttgccggaacaggcattgattctggatttgggctgtggctctgggcgtgacactctggcatttaagaaaaaaggctatcaagttgaggcaattgattattctgccgagctggttaaaaaggcgagagagctgacaggcatcgaggtacgtcagcaaagtttttatgagctgaatgaagtagctaagtatgatgggatttgggcttgtgcttctcttttgcactgtgaaagagatcgcctgactgaagtgctggcgcgcatatttaaagcattaaagccaaatggtgtgtgttatatgtcttttaaatatggcgattcagaccgtgagaaagaagggcgcagctttactgatctaaatgagcagcaagctcatgacttactcaaacaaatagatcaggctttactgttacagcaatggattactgtagataaacgtccagaccgtacagaagagtggatcaacgtaatatggaaaaagcaatcacatgcttttgattattacccacagcgtttatacagtcgtgccgagttaatgaaagagccctctttgattcctgcagaacacgggatttatttttggtggttcaaaacaaatccactgggaatcccaacaaaaaactgtataacgtatcaagaatacactttgttgtatgttggcatatcgcctgacaaaaagactaaaccaaatagtaaatcaaacttgagaatacggcttaaaacacactttacaggtaatgcagaaggttcaacactaagacgaacattgggcatacttctggctgagatgagtgggtatccgcttagaagagtagggtcaggtaatcgcatgactttcacgcattcaggtgagcaatggctggatgcatggcttgaagataatgcatatgtgtcctggataatttgtgaagaaccttggaatgttgaggaaaaggtttttgaacaaacgatactgccactcaatttgaaaggtaatcagcacgagtttaaaaaaaccctttcagctatgcgtaaaaaagctattcaaaatgcgaaaatgatggaaatcgctacggaagcaggattacaaagacaggtgaagcttcaacatgtggcaggatga

SEQ ID NO: 52218 - DNA, 216 bp, Acinetobacter baumannii
atgtggcaggatgatcactttatagaaaataataaacctacacccaacgagcagctgaaattcttgaagcatattcagcagatattgcagtcagggacttttacttcgacatataagtttgctttgctgataagtatcacgcgtctggcgattgaacagggtcaagataccggtgctgccttgcatttggaatatcaggatattgcggaaaagtga

SEQ ID NO: 52219 - DNA, 192 bp, Acinetobacter baumannii
gtgaaagataacgattacaacctgaatattccgcgttatgtggatacctttgaggcggaagctgagattgatttagatgcaattgccaaacagcttcaagctttggagcacgacagccaaaagaccgatgccatcattgcagatttttgcaaagagctaggtattgcttctccgtttgcggaggtgaagtaa

SEQ ID NO: 52220 - DNA, 1212 bp, Acinetobacter baumannii
atggcaacgcctaagttaagatttaaagagtttgatggggattggtttcaatctaaaattggagaaatttttcaagttacttctggctctacaccattgcgcagtgataaccgtttttttgaaaatgctgatatcgcttgggttaaaacaactgatttaaataacggtttaatcgaaaaaacagaagagaaaatttctcaaatagctttgaaagaaacatctgtaaaaatattacctaaggggactgtttttgtagccatgtatggtggttttaatcaaatcggtcggactgggcttttagtacatgaggctgcctgtaatcaagcattatcagcgatttatcctaacgaaaaaattgattcgtattttcttctaacctttctaaaccataaggttgatgattggaaaaactttgcagctagtagccgtaaagatccaaatattacgaaaagtgatgtactagcttttccacttaaatatccagtaaaagaagaacaaaccaaaatcgcatcttttctttctaccgtggatgaaaagatcagccaactcacgcaaaaacatgaactgctgaaccaatacaaacaaggcatgatgcaaaagttgtttagtcaacagattcgttttaaagcggatgatgggagtgagtttggggagtgggaaaatggttgtttgggtgatatcactgcaattcaaggtggttatgcatttaaaagtaatagttttgggaaaggagctacaaaggttctaagaattggggatattcgcaacaacatatttttagattgctttaatggcgtgtattcggaggaaattccagatgcacgttacgtagtttcaaaagatgctattgtcatggctttatctggcgctacttttggcaagttaggtaaggtagtaacaggatctgcatatcttaaccaacgagtagcaacttttaaggtaaatgaaaaaactactaatgaatacgtctaccaagtaatgctttctaaagaattttttaattatattcagtcaattccttcagctagtgctcaacctaatatctctaatcaagatgtaatcaattttgaaatacttataccttgcctagaagagcaaaccaaaatcgccaatttcttatctgccatcgatcaaaaaattgaagtggtagcgcagcaaattgaacaagccaaaacttggaaaaaaggcttgttgcagcagatgtttatatag

SEQ ID NO: 52221 - DNA, 663 bp, Acinetobacter baumannii
atgaaaaaatccagagaacttatagctcagtattcttctgaacatcaatggttgcaagatttagaaagattattaaatcaaattgatcaacaaactaatcagtgtggagatacactgattgaatgtagtaaatcatttatagaagcgatagctaaaaatattattttaaaacttagaccgtatgaaaatgccaaggatattaatttattggatttagggcgcttgtttaaaaaagctaaggagtgcatttacgaacattcagcaattgaaaatgtaatgccaaaaagcgacatagaaaattatttttcagcacttaatcaatggatacgttttctgggggagatgagaaataatgttggtgagatatctcacggcaaaattcttccaaagagttattcagttggagtggaattagctcagattattgcacaaacaacagatcgattatcatatatattgcttcttcttctgcttaaaattgatctctcttacacacaaagttaccgttacgaggagtatcctgaatttaataattttcttgatgagcaatttgaattgcctagtggtttaagttatagcaaggcattgtttgagcaagattatgatgcgtactcagaagagttagataattatcttgatgcgcaaggtatcgaagttgcttaa

SEQ ID NO: 52222 - DNA, 390 bp, Acinetobacter baumannii
atggaaaattttttaacattaaatggactagcttctatttttaagctgtatggtacggtcatgatgatcgctttagcagtaagcttagtcgtagcggtggttttaatcatgcgtttcccacgttcgcctcaagaatgggtagtaggtttgatttgtactattgtctcaagcttgactggtggttcattcattatcatgaaatgggacttacatgaatgggtgaccgatatatggggcatgatcactttaggtggattcttctttatttgtggcttacctggttgggcaattgtgaggtggatatttaacttcattaataaacaagaaggaaaaactattgttgaagtaatgaaagacttaaaaaaagcaaaagatgatattcaaagttaa

SEQ ID NO: 52223 - DNA, 546 bp, Acinetobacter baumannii
atgtatgttgaacaatatctagatgcccttataaaacgtgaaggtggttatgtaaatgatacgcttgactctggacatgccaccaaatttggaattactcaaacagttgcacgtagctatggatatcaaggtgaaatggaggatttacctttagaaactgcaagagatatttataaaaagcaatattggcttgagccgcgatttgatcaaattaatttgattagtccgatcatcgctgaagaactgctcgatacaggagtaaattgtggtcttggtttcacaaaaccacttctacaacgtgctttgaatttgttaaacagacaaggaaaagagggatggagcgatcttaaattagatggtgaatatgggccttctaccttacaggctttatcactctatattaaaaagcgcggtcaagaaggggaaagagtgatggtacgtcttctaaatattatgcaaggccaacgctatattgaaattacagagaaaaatccaaagtatgaacaattcttttacggatggcttgctaaccgtgtgagtttttaa

SEQ ID NO: 52224 - DNA, 1584 bp, Acinetobacter baumannii
atgactcagcaggcatgtgtagtatcgcagctcactttagaatttccttcaaaagtgatgtttaaagaattaaatttttcacttgagcatcatcacgtatcagctttaattggccgcaatggtcaaggtaagtctttacttatgcaattgctccaagagatttcgcccaccaaagaaatgcacattagtggtcaaattacttggctgtctaagcatgcatatttagctcaattaacacgcctttcttcatccaccattgcagaagctttagagattgaccatctttataaagctttgcaaagagtagaacaaggcgaagctgaattcgatgattatgatttattagaaggcaattgggatctcccttctgtttgggaagccttattgcgatcggctcacttaccaaccgatttaaactttccggtgaaacagttaagtgaaggacaaaaaaccaagttagcgttagcagcattatttttaaaaaccgaccactatctattgcttgatgaaccaagtaaccatctcgaccaagatgctagacagtggttaattcatcacctcaagaaacatccggcgggtgctcttatcattagccatgatctaactttgttaaatgaagtggaccatatttatcacttaaatgaacatggcttacagcacactacaggaaactatgaaattttttatgagcaatatcaaacacgagttgaggctttagaacagtctgtacatcaacatcaacgtgaagttaagcacatgaagcagaagcaacatgatgttttaatgaaagcacaaaaacgtgagcgtgctggcaacaaacttcgtgattcaaactcacaagctaaaattttactcgactttaaaaaagaacaggctggacaaagtttaggagcaatccagtctcaacatcaccgtcaaattgagcaaagccagcaggatttgaaaaataaaaaatcacttctggaaactgttaaacctcaacaatttatattcccctcttttcaaaaacgttcaggagaaattcttagagttcatgacttaaaactccactatggaacacagcaacccatcaattttgccctcaaagcttctcaaaaaactcacttagttggtcgtaatggtgtcggtaaatcaaccttgcttaaacagattgttcaatctgctgtagcgcatacagatgaaattagcctgtttgtaaattgcttctttctagatcagaacttcagctttttgttagaccatctctctgctgttgagaatttaagaaatattaatcctgatatttctgagttagagtggagaaatctattaggtcagcttaggcttcgtggtgaaaaagggacttatcctttagctcaactgagtggtggtgagaagttaaaagtcgcattgttaggtttaagtcatgcagagactatgcctgaacttttattactggatgaaccagaaaatcatctggatattgaatcaagagagctatttgcaaatgctatttctagctatgaaggtgctgtgttattagtctctcatgatttagcttttgttgaaaagtgcggaattcatgagtcaatttatttaaattaa

SEQ ID NO: 52225 - DNA, 336 bp, Acinetobacter baumannii
atgaaaaaattatcaacaattcttacagctggcgtattggcaatgttaagtgtttcggcatttgcatgtccaaaaggaactcaactccaaggaggaactggaccacatcataaaggcggtaaatgtgttgctgtaagcggcaagactactgctcaaaaagcaaaaaaagaagctgaaaaaacaaaaacagatgttaaaaaagatatgaatgagcagaaacatgctgcaatgactagcgcaactcacgctaaacaagaagcaaatcaagctactcatcaaatgaaacaagatgctgtaaaaactgcgaacactgctaaaaccgcaacaaaaccataa

SEQ ID NO: 52226 - DNA, 1542 bp, Acinetobacter baumannii
ttgcaaagaataattattggtaatcaagatgttaatatctctaagcttatagaaactataggtaatagtgattgggttaaacatggacgtaaacattttgaaaaaagttatccccaatgccctttttgccaacaaataacttcgccaagtctttctgatgaattacttaaattttttagtgaaacatatgagcaggaaataggcattgttgaacaaatatttagtcaatatctagatacatctgaaatggtattaaatgcaattcaattcataagtagtcaaaatataccttttttagaaatagacctttttcaagcagaagctcaaatactcaatgagcgtttggagcggaacaaaggtatcttacaaaggaaattgtcagaaccgagcctaaaagtttctctagaaccattagaacctattattagtaaaatcttaggtatgatccaagatgtaaatcaaaagattatgctccacaatcaagttgtccagaacctctcgactgaaaagcaaaaccttacaaatcaagtttggaaatacattataaatgagttagatagtgacttgagtagttatttaaaaaataagacgagactcgaatctaccattaatggaatgaacaatagcttaaaacaaaaaagagaaattttaggcaatttagaagctcaactaaaagtatttgaaaagaaagctacgtcaacaataccgacagtaaatgaaataaacgatcttctcaaatcattcggctttacctcattctatataagccctgtagatgaacaaggtcattatagaatttgccgagcaaatggagatgatgctagccgatctttgagtgaaggagaaaagacatttataactttcctctatttttattcacttataaaaggctcccattcttcatcaggaattaccgaaaatagaattgtagtctttgatgaccctatttctagtttagatagtgatattctctatattgtaagtagcctcataaagcgtgtatttgatcatgttcgcactaataatgctttgattaaacaagtttttgttttgacccataatgtctattttcataaagaaattacttttaataacagacgaagtcagaatcagatcatgggcgatgaaaccttttggatggtcaagaaaaattctagcggctctactattgaaaaatgctctgagaatcctattcgttcagcctatgagctactctggtcagatattaaaaccaataatcagtcaaacctaactattcagaatacattacgtcgaattcttgaaaactatttcacaatgtggggtagtatgaaaaaagatgaaatttgtgatctttttgaagggaatgagaagctaatttgtcagtcgttatttgcatgggtcaatgatggttcacactcaatccatgatgatttgtatattaaccacggacagcaaactaatgaatcatatttaactgtttttaaagagatttttaataagtctggtcaaataggtcattatcaaatgatgacaggtagtttaacagatagtacatcttga

SEQ ID NO: 52227 - DNA, 282 bp, Acinetobacter baumannii
atgaaatgttcatatcaagatttggatggaagcagtgttgaaataacttgtgaaagttacatacatataccatccggtgcaggagtaaacaaaatagccgggaataatcggtcggcagacctaatacatattaccgaagatttcagtttttttaagaaaacacaagcagattcaatacccatctatcgatttgctgttgatgataattgtaatgtttttaatagtgatgagttaccagctttggcacagattggaacaaattggaaggttttagatgaatag

SEQ ID NO: 52228 - DNA, 384 bp, Acinetobacter baumannii
atgaagcgccttattacattatttttattgccttatgctacgggtacattcgctcaagagcccttcgaagtcagtaaaagctgttttattgtgaatggtaaaaatagtactgagacttgcttactctcttctacgaataacttaagttctaactttgaaagattaacttttccaaatagcaaagtatttataaaagaatcaaatatttgttctcatgaggattcatgtatttctgtgggaagtaatttatcgaatttaaaagatgcgactatttattatcgtgattttaaaactaaaaagattattgaagtccctgaaaaagattcatggacatgctttaagcaacagcatgatcggttagatttttgtgtttcctacaattaa

SEQ ID NO: 52229 - DNA, 702 bp, Acinetobacter baumannii
atgctatttcttaattttaaaaaatctatcgttttttttagcacttgcttggcatttatttgtagctatgctggacgaccaatggtcgttgatgatgcttctttagtcccagcccattcttgtcaacttgactcatggatgcagaataattctaaagataaggaatattgggttattccttcttgcaatattggtggcaattttgagtttggtgtaggtttggggcgtcatttttctgatgaggcaggtaatatcacttatacaactgttcaagggaaaacgcttataaaaccacttgagaccaataactggggaattggtgtttcattttctagccaaattaataacaaccacactagtgaaaaagattggactgtgaatgtgcccttaagtatttctatgttggatgaccatttcttattgcatactaatgtgggctggcttagagaacacaccactcaccgcgagcaaactacttggggtgtgggtacagaaacattcattacgaagcccttaacggttactgctgaagtgtatggaaatgatcgaagtgattcattttatcaaaccggtattaaatatatgttgtacaaagaaaatatacagttcaacgcaagttacggtaaccgtttaaatcagactaaagatgactcatttttttcagtcggtttagtgtttgtgagtaatccattttttaaatga

SEQ ID NO: 52230 - DNA, 597 bp, Acinetobacter baumannii
atgacaactagaatttatgtacgtgccagtactaaagaccaagatgcagaaagggcattagatgatttaagagagtttgctaaatccattaaaggtgatgtgaacgaatatgtagagaatgaatcgggcactaagttggatagacctgtattaaatcagctattagatgaatcaaagaacggcgatactttactagttgagagcgtagaccgcctatctaggctttctcaaactgactttgatgtgttgaaaggacgcataaaagaaaaaggtttgaagttggttgtagcagatctaccaactacacacatgcttattagtttaaacgataccattacaagctctatcctgaaccttgtaaacaatatgcttatagatttattagcaactatggctagattggacaatgacaagcgtagggagcgaattaagcaaggtttagagagaagtggatacaagccaagtggcaagaaagcagatacagctaaacatactagaatcaaagagttagttaataaaggactgacaaaagaagaaatagccaaagccgttggctgtggtatcgctaccgtttatcgagtaactaaaagtatttaa

SEQ ID NO: 52231 - DNA, 390 bp, Acinetobacter baumannii
atgaatccacaactttctcgtattgaagatgaagctcgtatgcatgaattaagagagctatttgcgttattggaagagaaaaatttgcatacaacttcatctaatgaaaaagctcatagcataaatgagacacttgaaagagctttgagtattctttcttgggatgactttgaagatgatactcaagctatagctgtagtaattcatcggaactggttgaaggtattacagtatgtaatgccttacctacgatctgtattatctccaaaagatatatcactgcttagcaaactcaaacaagcactaacgaagtatgcagaaatcaaacatccaaatcatctagtagttattcaaccaaaattgcagttaatcaataccatagaggcttaa

SEQ ID NO: 52232 - DNA, 249 bp, Acinetobacter baumannii
atgactcaactaatccatgcacgaatgactgcaagtattactgaactcaaaaagagtcctatggatactgtattagcaggtaaaggtgaagctgttgctattcttaaccgtaatacccctgctttctactgtattcctgctgatctatatgaaaatatgattgaacagctagaggacttagaactcaataaaattgcagatactcgtgcgaatcaaaagcgtattcgagtaaacataaatgagttataa

SEQ ID NO: 52233 - DNA, 282 bp, Acinetobacter baumannii
atgagttataacttagactttttagaagaagcattagaagaatggaataagcttaatcctagtattaagcaaccaatgaaaaagaaactgatgaaagtcttagagaatcctagaatccctaagaataagctatcagggcatcctaaccgatataaaatcaaacttcgtagtgttggctatcgtttggtttatgagatcatagatgatgaggttgttgtattagtaattgctgtaggcagacgtgaaaataatgctgtctacaatacggcaggctcacgataa

SEQ ID NO: 52234 - DNA, 537 bp, Acinetobacter baumannii
atgtttcaagagtcagagttttccagtttagttgagtttgcaagtcagtgtacagaagggctatttcttccaaaaattatttatagtaatggggaaaatcagtttggtgcacgcctcttacctactccattaaacctttttgctcgaagattttccaaaaaaatggcagggagcttggaccaaaaatatctattgaaaagcttctctattgaaaaaccaatttttgcgccttatctttctggctgctttatgttgttccgttcgaacgtccttttagagctgaatggctttgatgagagatttttcatgtatatggaggatgtagatttatcaagacgttgtgctgagcgttttggaactatgtattatccagatgctcaaatagtacatattcacgaacaagcatcatacaaaaacaaactattacttaaagcccatttgaaaagtgctatacaatacttcaataagtggggatggctttatgatattgaccgtagtaagcttaataaaaaatgcttaaaccagtttcgtacataa

SEQ ID NO: 52235 - DNA, 618 bp, Acinetobacter baumannii
atgttaaagaggcttttagatatttttatttccctatttgccttacttattctaatgcctgtttttctgattgtagtttataaagttcggaaaaatttaggttctcctgtttttttcttacaagaacgtccaggcaaagatggtaaactatttaaaatgattaagtttcgctctatgagggacggagttgatcaggatggcaatattttaccggatgaagaaaggattactccctttggtcaaaaattacgttctactaccttagatgaaatgccacaacttattaatgtattaaaaggtgatatgagtattgtagggcctcgtcctcaacttgctgattttatgcagcactatacttcaagacagatgcgacgtcatgacgttagaccaggtatgactggtcttgctcaagtgagtggtcgtaataacttaagttgggaagagaaattcgaattagatgttgaatatgtagagaaacataatatctggttagattttaaaattatggtaaaaaccgttcaggtcatgttgaaaaaagagggtattaatgcaccagatcagttagttggagcaagccgtttttcagggtcttcaaaaaaagatgaagtacaatattaa

SEQ ID NO: 52236 - DNA, 1299 bp, Acinetobacter baumannii
atggatttcaatacccttgaccaagaaacggtacagaaaaaacagaagtttcaccaaattttgtatgtacaggtcatttttgcaattattttaggcgttttaataggtcatttttaccctgaacttggacaaagcttaaaaccgcttggtgatgcattcatcaagatcgttaaaatgattattgctcccgtaatctttttgaccgtggttactggtattgccagcatgacgaacatgagtcgagttggacgtgtgactggtaaagctatgctatatttcattactttctcaagtcttgcacttgtggttggtatgattgtggcaaacatcattcaacctggtaaaggcctaaatattgatccagcgaccttagtcagcgataaagtaaatacttacgttgagaaggctcatgctaccaatattactgacttcttcatgaatattatcccgcaaaccctagtaagtccgcttgctggtggtgaaatcttgcaggttctatttgtggcggtgttatttggtatttctttagctgctttaggtgatcgtgcgcgtccaatcactgatttcctaaataaccttactgctccagttttctacttggttggcatgttaatgaaacttgcgccaattggtgcttttggggctatggcatttactatcggcgcatatgggatcgaatcaattggtaatctattactgttgattatgactttctatattacagctgtgctgtttgtattaattgttctaggtgctgtggcgcgctataacggcttttcaattattgctttgattcgttatatcaaagacgagctttggttggttttaggtacaagttcatctgaagctgctttaccttccctcatggataaaatgcaaaaagcaggttgtgaaaaatctgtagtgggcttagtcattcctacaggttactcatttaaccttgatggtactaatatttatatgactatggctgctttatttattgcacaagcatgtaatgtagacctatctattagtgaacagcttgcattacttttagtggcaatggtgagttcaaaaggtgcagcaggggtaacgggcgcaggctttattacactggctgctactttgtcggttgttccatctgtaccagtggcaggtatggcgctaattttaggtattgaccgttttatgtctgagtgtcgtgctttaactaatttaattggtaatgcatgtgcaacaattgttgttgctcgttgggacaaggctctggacaaggacgttctagataaagcattaggaaaatctaaaacgaattaa

SEQ ID NO: 52237 - DNA, 804 bp, Acinetobacter baumannii
atgtattactttgcgacagaagccttcgaaatagaaaaaaagccgccgggaactgtttattatacagagactgccgattcacgtaatttatcatttcatcgaaaccatattgaacctgtcacaataaaaccggctgtagaagaccagtttcgtggcattgttcgacaagcctatgattatagttgtggctctgctgcacttacgactttattaaatggctatgtgggaacgagtttaactgaacagcaaacaatgagtggtttgcttcagtatggcgaatatcaacgtattattgagcgccgaagtttctcattacttgatatgaagcgctttgtcacagcaattggtttagacagcggtggttatcgaggtgagttttctgatttagttaaactcggtcagcctgcaattgtgcctatttcttatgcaggttttaaacattttgtcgtatataaagcttataaagatggaagagtatatgtagctgaccctgctttagggaatatcagctttgatgaaagtcgttttaaacaaatttgggataataatactttatttgttatttctgttcctgaatcacagcgtaaagatctattggcattaaaagatgcagatatgcgtcatgtcgaagatgccacggtcaatagatatgcttttgttgatgttcaatatccagcatttaactttgatcgtttagcaaataaagcttcaaccatgagacgtgtgctagataacgataatcattcgccgacatatggacagccgatagaaacctatatgcgtctttattacaaacgcaaatag

SEQ ID NO: 52238 - DNA, 519 bp, Acinetobacter baumannii
ttgaatactattgattttgaaaatatagaacctaccaaggcctttaaaattaaatcaggtaatcctaatgatagattttgtattttatatttatacagtgtacttaaaaatatatgtatggtttatttctataataatagatatgaaaaagcacatgctttttcattaagagagtctgactttcatctatgggatgatgctatatgtccaaattatatggaagagcttaaaactgccgatgatattacttcaatgttagagaagtttaagccaaatcatattaggctttctaaacttttttacggtgatctcgctgagcctggtaaagaattcgtgagtggatttggagtaattttattcaatgaatctggcgaacttttaagtaaagccaattttaaattttatgatctaagtaatgctcctcaaaataccttaagattagatactgccaaaattcgagaatgcttaacgcagccttcaacaaataatctgccgtttcttctctcgcaagatatttaa

SEQ ID NO: 52239 - DNA, 870 bp, Acinetobacter baumannii
atggtaaagtttttagagaaaaatacccaactcaatcaatttgaatcgggtaaagaattcgatattcgcaagtatcgtccagacctaaaagtgattggattacgctttgtggttactgcacaacatgtacgtactctagctcgtttaacctttcaaggtaagaaagcctcaaaaagtttaggtacattttctcatgctgattttgatcaaaacttagagaaactggtctctcaaatgcagggatttcatcaacgaatcgctcaaggcctagcgccattcgaagatgaggtcaaacctacaaatacattgcgtgagtttgctttaacgatctatatgccaagtgctgagatgcgtaaaaagtcttataaggatgatgaggcaaaattacggatgcatattttaccagtcattggagattatccatttgaggatatcaatgctggaatgctcaataagctattgaccgaacttcgttcaaaaggcttaacgaatgcctcgatcaatcgggttcgggcactgctctctgtcatgttcaacatggcaattaatcatgacttgatacatgttaatcctgtaagcaaggtatccaagtttaaagaaaacaatcaaattgagcgttatctcaatgctcaagagatcaagcgtttaatggatgtactgaatgcaccgcatcagcatggcatagacaacttgattattgtcgctatcgtcaagtttttactgcttacaggagtacgtaagcgtgaagcaatggacatgaagtgggctgatattgatctcactacaggggtttggcttttaggtgaaaacaagtctggaaaggctcgacggacaagaaacattacaagcataagaaaattaaattcttaa

SEQ ID NO: 52240 - DNA, 1215 bp, Acinetobacter baumannii
ttgcttgctcatccagtactcacctcggttttatatctctcacatacctttagacagatttatatcacttattccgaacagaatcagagcattggatttttctcttttttagatgatattcaccgtcttgagcatttggttccgtactaccatttttttcaagaaaagtatgtcgaggcaaaaaaatgttcttctcaaacaggcattatcaatattctgggagatacctatttcggtgaaatgtacactgaaaagcgtaagtctagaggacaaacagatgctttacagcagtatggatatcactattcatttgaaaaaatacagccatttttaggtaaaaatgacataaacatagctaactttgaagcagtcttttctttagaaaatcaatcgccgttaaaagataaaaagccattcattctaaaagccgacgctaaaaaaacattagaagagtttaagagcattcatttgaattatttggtgttggcgaacaatcatctgaaggattatggcgatgaagggttggcccatacattacaacagttggatcaggcgagtattgcttatattggcgctggactgaaccaaaaagatgctcacaattactttgaaatagcttttgaagctaagcactatgcgatttttaatggttattggcatagagacagtgcttatctagactatgatttctatgcactaggggcaagaagtggagtagcttgtttaaatggtgttttacttgaacaaataatgcgttataagcagaatcatccagagcgcaaaattactgttatttgtcattggggtatcgactttatgcctattacaaaagaccaaactaaactcgcgactattcttactcaagcaggagctgatcttatagttggtcatggcgctcatactattcagccaatccagatcatcaatcaaaagcctgttgtgtttggtattggtaatgctgtgtttaatagtgatggagaatatgaacagcaaaatgctttgccatttggttgtatagccaaactcgatttggcaaatgacttacttcgtctttatccaatttatacggataacttaaaaactttttggcagccgtatccagtagatattgaagatttctcaaaggccagtacttatatgacatctttactgacccatgagaattacatgacatcccaagataacttggggagatatgttgaaattaaattttaa

SEQ ID NO: 52241 - DNA, 537 bp, Acinetobacter baumannii
atgcgaaaagaagtccgcatcttaaataaatattatttagatgaccaaggcaataaaatttttaatttcaaattaaaccgttatatttcttaccaagatttttcaaaaatgcattgcgaacttggtaatgaaataaaccaagctcgtcctatttctataggctcgatccctgcaagtgtgaatgcatgctttcctaaacgaacagcacgtaaagaggtcatagtctttatatacgatgcgtattcaaaaaacttagaatttgatgatgttactagtcgtacattccgtaatagtggaaaaccctttattttattagactggaatcgattaaattacaatattcaagcgggtagtattcatgaaatgggccatgctttcggcttaaaacatgtatgtgtacctaatgcaactaaaaccacccccaccaatattatggccagtgctgagtgtaaattaggcagtggcggcttaagaaatttggggtttactcaaacacagcttcaaaccatcttatcaacttataaacaatattcttaa

SEQ ID NO: 52242 - DNA, 1674 bp, Acinetobacter baumannii
atggcgagtccagcacaaatcattcgacataaatttctcaatacattcttttcacgccattcactctggttcttgtgtatttttacggcacttagtatcacatggtttagaaccgtatatacgcctcatagtatctattattttatttcagatactctactcaatggtttatgggtcgttactggtgcattaagcttattgggtttatatgacgtcttacaaaatagacactctatcttaagaaattacccaattatgggtcattttcgttttttatttgaagatatacgtccagaaattcgccaatactttattgaagccgatcaagatgctctacctttctcgcgtatgcaaagaagcttagtttatcaacgtgcaaaaaatgaaaatgccgataaacctttcgggtcaatcatagatgtctatcaacaagattatcgctttattgttcactcaattagtccatgcccaccagcagatcctaagagttttcgtattcaaattggtaatgcacaatgccttcaaccctatagtgcatctattatgaatatctctgccatgagctttggtagtttaagtgcaaatgcaatacgtgcattaaataaaggtgcacagttgggtgggttttatcatgacactggtgaaggaagtctcagcccttatcatttagaaaatggtggtgatattgtctggcaaattgccagtggctattttggttgtcgaactttagatggaaaatttgacgaacaaaagtttgctaaacagtctcaattgccacaaatcaaaatgattgagttaaagctttcacaaggtgctaaacccgggcatggcggtattttacctaagcataaaattactgctgaaattgccgaaattcgtggtgtttcacgtgatcatgactgtatttcaccagcaaaacattctagcttctccacaccaattgaaatgatgcactttttgcaaaagttacgcactttatctggcggcaaacctgttggttttaaactatgtattgggcaaccttggcagtttatgagtattgtaaaagcaatgcttgaaacaaaaattgtgcctgattttattgtggtagacggttctgaaggtggtactggtgcagcaccaattgagtttagtgactatattggtactcccttacgtgaaggcttacgttttgtacacaacacgcttgtaggtgctggactaagagaccaagttaaaattggtgcaagcggtaaaattattagcgcatttgatattgctagtacttttgcattaggtgcagattgggttaactcagcacgcggttttatgtttgcagttgggtgtattcaagcgcaaagttgtcataccaaccaatgtcctgtaggtgtagcaactcaagataaagaccgtcaaaaagcactccatgtacctaccaaagcagagcgcgtatttaatttccataaaaatacattacatgctttatcagaaatgattgctgctgccggtttacgtcatccttcagatattaaagcccatcatttggctcaacgagtcaatgaccgtgaaatcaagaactatgctcaattacatttcttcttgaaagaaggagaacttttacaatctgaactaaaaaatgatgatgataatttttattatcgtatgtggaatatggctgatgccaatcatttttaa

SEQ ID NO: 52243 - DNA, 537 bp, Acinetobacter baumannii
atgatcgaaaccgaacgtttaatcttaagacaatggaaggaaaccgatgctgccccctttatcgaaatgggattggataaagatgttatgcgtttttttccaaagcttttatctgctactgaaagtataaatttaattcaaagagcatcggcccttattgatgaaaaaggttggggattttgggctgtagaattaaaagaaagccatgactttattggttttattggcctacatgaccaaccagaacaatttgatttttctccatgcattgaaattggctggaggattgctacaaaacactggaaaaaaggttatgccacagaaggagcaaaagcagcattggactatgccttcaatgtgcttaataaagataaagtggtttcttttacagcaacagtgaataaaccttctcaagctgtaatggaaagactaggaatgcgtaaagttaaacacttcaatcatcccaagcttccagatggacacgcccttcaagaacatgttctttatgaaataaataatcctaattttgagttataa

SEQ ID NO: 52244 - DNA, 270 bp, Acinetobacter baumannii
gtggtttttttacagattgttgatactgatatttctcgtttttatcattgtataggaaatgcatcagacccctaccattctgaatttttaatgacaattgctaaacaacatgatggaaataatcaaattgtagtgactacagaagttgaaacacctctatatccaaatataagtataaaatggacaatgccttatgaatcattaaaagattggaaaaaggtagataaaaatatctggcgtttattaaaagcttggaatgtgcataaatga

SEQ ID NO: 52245 - DNA, 897 bp, Acinetobacter baumannii
gtgactgacattatcggtggtgtgacgggcggtgttactggcggtaatcctcttggtactgtgactgacattatcggtggtttaactggtggcgctactggcggcaacccgcttggtactgtgactgacatcatcggtggtgtaacgggcgggattattggtggtggtacatctcctatttccccagttgttgatgccgttcaaagtggtattgatgttcttcaaggtgtggaaagtttaaaaactagcattattaatacaggcattaatactgttgcggacactgtagttggcgtacttcctcaaactgaacaccctgttactgatattgctcacctcggtacattaacttttgaaacttctcgcgatactgtaaatggtgcgcttgaagttgtatctgatttagtgggcggcaatatccaaggtgcaactgatcatgcgactggtattgtcaacactctcgtttcaaatggcacaactgcggctggcattttaaccgacattcttggtggtgcgactggtgctattggcggtgttactggtggtgtaggcggtgatagtccacttggcactgtgactgacattattgggggtttaactggtggtgctactggaagtaacccacttggcacagttaccgatattattggtggtgtgactgggggtacagctggcagcaaccctatcggtgtcgtaacagatatcgtaggtagcttaactggtggcgtaactggtacaggtggcacagatgttatttctaacttattaggtggagtaactggtaacttaggcggagtatcttatacagtatctaacgtaacagacacggttcatactttagtacctcagtcactgcttactgaccacttcttaaatatctctgtacatactgtttaa

SEQ ID NO: 52246 - DNA, 300 bp, Acinetobacter baumannii
ttggttaatgtggttgttacagttactgctggtgcaaccgcatctactgtaccagttgatggtgctgatgggttacccgctgggtcagttgcaacaactgtaactttgtctccatctttaagatcacctgggtttggtactgtccatttaccatccgggcctgcaactacagtcgctgttgtaccatccgggaaagtgaccttaactgttgaaccagcttctgctgtacctgttacaggattagttgcattgattggatcaattactggtgcatttggcgcagtggtatctactgtataa

SEQ ID NO: 52247 - DNA, 783 bp, Acinetobacter baumannii
atgagctatatcattgcctttgttagttatactgattttaccgataaaaaatatcctgtgcagtgttttcgtacagatcttaaggtgaatgacattgtgctagttcgtcgaacagatggacaattaagatttgctacagttttaaaattagaatatttaaattgggattgtaaaggcttcatcctttgtaaaaaatcagaatgttctattgatgatcatggtaatttatgccctccgtctaactcagctattatatttggagttgcgactcctgaagttttcacaaaaaaattaatagattcaggatggatattactgagacctcatagtgcaacttatagaaaaatcttaacaaaaactaatggatcacagattgcatatatttttattagaaaaaatggaattgatcttcagattcttcctatttcagaagaaaagcttccaataaaatctggtagcttatatagacaatctcttactcaaggtaaagtagtcaggcatacacttgctcatacaacttttaatctttatgaaggagttcttcgcttttctgacagctttattaataatgaacttaatctagagcgttattttattccgcaaggtgaaacagataagagaacggatgctctcaaaaaagatgctcgtttaagaaaaaatttaggagagtacggtatctcagatttatatgaggcttgctctgatgggaatggaggtgcggcatatcttggtgatggaatatggatcacttctgggggaggagtatatgattggggaagataa

SEQ ID NO: 52248 - DNA, 1641 bp, Acinetobacter baumannii
atgttaaaccaaaaaaatgtactaaatactgaaaaaggtttatggcatatccaacttaatgctcaaggtgatttgaaaaaacagagtttcactttaactaaagccgctcttccaacagctgttaaaaattttaataatatctatggtgttgcagaaaaaggaaagatgactggtgttattggattaagctatttaggtcaagatccagagcatatttcacaagtgctcaataacgttctaaatgtttatcatcaacaaaatattgagagaaagtctttagaatctaaacagacattggctttccttgagaaacagttaccagatcttagaaaacagttagaagattctgagattaagtttaatcagttccgtgaaaagtataaaacagtggatgtgaatgctgaatcagagctattacttaaacaaaatattgatttagaaaagcttaagattgagttacaacaaaagcaagctgagctttctgctaaatataccaatgatcatccactaatccgtcaaattgatgcgcaaattgccgagattaataaaaagattgccgatctcaataatcgtttaactcaactccctgaaactcagcgtttatatttacaactctatcgtgatgttaaagtcaatactgagctgtatacatctttacttaactcttatcaacagctcaaaattgctaatgctggtgaaattggtaacgttcgtatcattgatactgctgtagaaccagttaaacccattaaaccaaacaaactaattatcttagctctatctatacttgctggtggatttattggtgtattaattgctttattacgtaatatgatgcgtagcggagttaaagattctacacaaatcgaaactgagcttgatctaccagtttatgcaactgtacctcgctctcctattcaagaaactcgtatgagtattttgaagaagaaaaagagtattcctattttagcagttaagagtagtgatgatattgcgattgaaagtttgcgtagtattcgtactgcgatccacttcgctttaacctcagcaaaaaataatattattatgattgcaggtccttctccagaagttggtaaatcttttatttcaactaacctagcaactatttttgcacaagggaataaacgcgtattactaatcgatgctgatatgcgccgtggttatatgcataaatattttgatattgatgtgaagcctggtctttctgaattgctaagtggccaagctgatttaacacaagttttacataaaactcaagttgcgaatcttgatgtgattactcgtggtaaaagtccaaccaatccttcagaaatgttgagttctactcagttcaaagacttactagaaaagttccagacccaatatgaccatatcattattgatactccaccagtgcttgcagtaaccgacggtattattatttcgcaatatactggcgtaaacttaattgttgcccgttacatcaagtctcatatgaaagagcttgaattaaccgttaatcgttttgaacaagctggtgttaaggtgaatggctttatccttaacgacattcaacgttctagtggcggtggttatggttataactatgcctatgcctataaagcacaaaaagaagactaa

SEQ ID NO: 52249 - DNA, 495 bp, Acinetobacter baumannii
ttggcatttggcccaccaccagctgcaggtgaagaagaccctgaactgattaatgcgggtaaagagtttgtgaccatgcttgaaggcggcagctttttccaccatggtgactcatttgcgatgatgcgtggtggtcaccttgatatagcggtacttggtgcatttcaggttgcagccaatggtgacttggcgaactggcatacaggtgcgccggatgcgattcctgcggtgggtggtgcgatggatttggcagttggtgccaagaaagtatttatcactacagaccatgtcaccaagcaaggcgagccgaaaattgtggctgagctgagctatccggtaacgggtaagcactgtgtggatcgtatttacaccgatctttgtgtaattgatgtgaccaaagatggtttaaaggtgattgagaaagttgaaggtcttagctttgatgagttacaggctttaacgggtgcgactttgattgatgcgactcaagggtaa

SEQ ID NO: 52250 - DNA, 495 bp, Acinetobacter baumannii; identical to SEQ ID NO: 52249

SEQ ID NO: 52251 - DNA, 849 bp, Acinetobacter baumannii
atgaaaatgttcactaaacttgctttagtttcttctttagctatcagtgcaaatgctatggcaatgcaatcaatggatgatgcagcgcttagtgctgctacaggtcaagacggtattaatatcggtattgctttgggttctggtggtatttctatcgataaattatacctacacgataatgatggtttagcaacatcaacaggtattactggatcttcaggtacagcgggtgcaattgcaattagtggtgttacagtaactcaaaaaggtacaggtaatcttttagatttaaaaattgatacaaacggtgcttcaggctcaaacggtgctttcttaaatgttgcggcaacagttggtgcggttgacgtacatgttggttcaattggcgtgggtacttctggttctttaaatgcaactactgctgtacgtggtattactgaaacggctccaactgaaattatttctggtttagatttatctttgggtcaaatttctgcaaatgttcagttaggttcaactccgcaaggcgcaatgatcaaagtgaactctagcttgcaaggtggtttaacactatctaacttcggtattaatgatgctgctggtggtggtaaaattgtcctagacaaagtaatggttcgtggttcaggtaatacaactggtgacttggatgtaaatgcgaatatttctgttgttcctacaggcttacgtattcaaaataacagtacgcaaggtatgaacgtttatgcacagggtgtacacctaggtgcagcgggtaatgcttcaattggtgatttagaaattcaaggtttaaatgtagggacttctacaattactatttctggtcactaa

SEQ ID NO: 52252 - DNA, 495 bp, Acinetobacter baumannii; identical to SEQ ID NO: 52249

SEQ ID NO: 52253 - DNA, 270 bp, Acinetobacter baumannii
atgtctcatttgcatcaagataaaaaaatacttaatcgcatcaagcggattcaaggacaggttacttctgttgaaaagtcattattaacacctgaaagctcttgtcttgaagtattacaacaagttgcagcaattaaaggtgctgttaatgggttaatgcagcaacttcttgaacaacatttaagagaacatgtattgaaaggggatcaaaattttgatgaagaagaaatgaaacagtacttattattattagatcgttattcaaaatga

SEQ ID NO: 52254 - DNA, 936 bp, Acinetobacter baumannii
atgcaacttcatagtaacttagatcgtcgtcattctcatcaattcgatgaaggaaatcctttagcacaaaagaaaatactgattgcgacaattcttacagcaatcatgatggtactagagatattggggggatggatttttaattcgatggccttactcgcagatggctggcatatgagttcacatatggttgctctcggcttagcttatttcgcatatcgaatggcccgacattatgctcatgatcagcgatttagttttggtacttggaaaattgagattctagcagggtacagtagtgctattttacttatggttgtagcacttttaatgggtattcaatctatcgatcgattaatgaatcccgtgaatattcattacaatgaggcaataccaattgcaattgttggtttattggtaaacttggtttgtgcatggttattacatgacggaggccaccaccatcaccacgagcatgatcatcaccatgaacacgaccaccaccacgatcatcatgacttaaatcaaaaggcggcgtttctgcatgtagtagctgatgcggttacttctgtattggcaattgttgcattgtttgcggggaaatattttggttggagtttcttagatgcactattaggtgtagttggagctattcttgtcgctaaatggtcatggggattattaaatgagacaggaaagacactactcgatgcagaaatgtctcaccctgtggttgatgaaatcaaagaggttatagaggaatttcctcaagttaatattactgatttacatgtttggaaagttggtagaggcaagttttcttgcatcttggctttagagagtacaggtgtagatttaacaccagatgtagtgaaacaggcactctctatccatgaagaaattgtgcatgcaagtgttgaaatacattttatttga

SEQ ID NO: 52255 - DNA, 633 bp, Acinetobacter baumannii
atggtaactgaaacttctccagaacttagatggatcaaagacaatgacgatattcaagaaccgtttgaaaatgatttatggaaccggacaaatcttgctgatcaactcgaaaattacatatctcggataaaagttggtgctactgttgcaattgatgctgaatggggcgcaggaaaatcatggtttgtaaaacactggaaagccagattagtacaaaaagaatttaaagtcatttatttaaatgcttttactcaagactatattgaagatcctttcctcacaattgctatggaaatagcaaatgtattggaagcagaacaaaaggatattgaaaagataaaatctactattggcgatgcatatcgagctattttacctaatcttcccttactgatttttcaacttgccatgacctttatgggtgctgggaaaatggcaagacaggttgcagaaacttttgaaaatttaaaagatgatactggtgcatttggtgaagctgctgctgaactcttaaatgaaaagcttaaagagcatttatctgcccaagtagataattatgaaaatgaaaaaaaatcattagaatactttaagtctcaactagctgaaattacaaaagatttaaaaaacctttag

SEQ ID NO: 52256 - DNA, 264 bp, Acinetobacter baumannii
  misc_feature (185)..(194): n is a, c, g, or t
atgatatatattaatgctaaatttacagctagcattactactagatctgaacttttatttttaataattttatctgccttagttttgggtggcggtgtttatattgcatttaaaatactaacctactttatgaagttaaaataccttgaatggttattaaaaatggatcgaattgaaagctctannnnnnnnnnctctataacggcaattgagccttctgagtctccagtagaaattattaataatctagaacaccaaccttaa

SEQ ID NO: 52257 - DNA, 231 bp, Acinetobacter baumannii
atgaaaaagattatctctggtttactcgttggtttaatggcaacctcattcacaatgactacgatggctgctccagtacaggatcataaacagccaccagctcagcaccatattgataaaaaaccacagccaccaaaacatgatatgaaaagagatcccgatcataaagccccttcaaaacatgacatgaagaagcatcatccagagcataaattgccacctaaacactaa

SEQ ID NO: 52258 - DNA, 537 bp, Acinetobacter baumannii
atgaaaaaactgcttttggtatcacttcttgggactgttgcagcaactacagcaaatgctggtagtacaacaattcagccatatgtaggtgctggctatacatttttaaataacgataatgttgatgtacattttctaggtctgaatggtggtttgcaatttaatgaatatgttggtgctgaagtattctggaataaatctgtgaatgacatcgagttcgatggcgatttagaagaacttggtgtaagaactgatgccgatgttcaatactatggtattggcttaacagctaaatatcctttagcaaataacttctatgctaaaggtatagcaggttatgcacgtgttgacctcgatgtagatgctacttatcaaggttatacagtttcagctagcgaagatgattccggtttaatcattcaggctggggctggctataacttcactccaaacttggctgcagaagtagcttacacacacgttaatgcgtttgatggctttaatggtgtaaatgctcaattaaaatataacttctaa

SEQ ID NO: 52259 - DNA, 519 bp, Acinetobacter baumannii
atgcctgtattaataatgctagtttttagactttcgacaccttggagcacgtcaataccgctttgtacgacgttaacaactggtgccagtggagaagttccgcctccgactacaccaccagttacaccgccaataatatcggtcacgttaccaacaggattgctaccagtagcacctcccgttacaccgccgatagcgccagttacaccaccaataacgttagttaatccaccaacagggctaccgccagtcacgccaccagttaaaccacctaccacattggttatggttcctaatggatttgttgagcctgcagtaccagttacggtacccactacatcagaaactaatcctgttgtagcatgcgagactgtattggttacagttgaaagtacattagagagtaagcctgatgttgaaacatttccattagcaatatttatgtcagaaacgtttacattaacaggagaacctgtgtttacaacaggattcaccgatacaacattacccaggtcctga

SEQ ID NO: 52260 - DNA, 825 bp, Acinetobacter baumannii
atgttgaatatagtacaaccaaatatttgcttcatcggtagtagtaatttgtctttagctttaattggaggtttggttttaaaaggatttcaaaaagaaaaaattaatcttatagaggaaggaaagtttgataatgaaatcattctaaagcaaaagcagcatgaggtaaaaaaggctgatatcgttgttctattagtagacccaaaaaatctaaaagtcatcttagcaccattaaaaaaatggttagctgataaaactattgtatcgatgatggctggaattaatatcaaacaactcatgaatattacgggttcaaaaaaggttataagaatcatatctaacccaccggtattaacttatacaggtactcatgtgttgattggttcagaatatctagaacctttagataaagagttagttgagacaatttattcagccacagggcagacctattgggcaaattcagaatcagaaagtgatgccattattgcgttatcgggttcaggcccagcgtacttcttttatatcctcgacagtatggtaaaaactggtgtttctatggggctagataagcagtttgctttagatctggcacttcaagcagcatcaggtgctgtagacatggtgcgtaaaagtaatgttcagccaagtgagttatgtggcaaggtcacattagctaatggcattactgaatctgcattacgaatgtttgagctaggcaatctttccgatgatattcgactggctttaaaagcagcttatcatcgcagtaaagaaataagtctagagattaatgctgaaattgccagacatagcgttaactga

SEQ ID NO: 52261 - DNA, 198 bp, Acinetobacter baumannii
atgcaaaaaaaagtcaagaatctttatttaagaaaaggtgaacactcatttgttctgcaatcacagttcatttttaaagctaagcagcaaaaatggactagtgaagatatccaaaaaattatagaaaagaccttatatcaagataaatatagggtatatgcaattttgagagagtattctagccagaattacgggtaa

SEQ ID NO: 52262 - DNA, 327 bp, Acinetobacter baumannii
atgtccagatctagacgaagtgatggtgacttaacaaagactaaaattattgaggcagcaggaccattaattgcccagtatggttttgcaaaaacagcgaacaaaacaattgctaacgctgctaatgtcgatttagctgcaattaactatcactttgatggtcgagatggtttatatcaagcagttttggtggaagcgtatgcccactatctagatgaacaatacttactagaacttgtcgaaagcacttactctcctgaagaaaaattgagtttactacggctttgttgcacaaacctagcctataaggtttattcagtcctataa

SEQ ID NO: 52263 - DNA, 822 bp, Acinetobacter baumannii
ttgctgacttctctatctgcctcagctacaccattaaagttacctgatgactggacacaaaatactcagccattccaaattactgaaaatatatactatgtaggtactcacggtcttggaacctatttattgacctctgatcatcaagctttattgatagatacaggtcttccggaaaatacagagcaaatagagcagaatattaaaaaattgggttttaagttatcagatgtaaaaattatggttacaagccatgctcattgggaccatgtaggtgcacttgcccgcattaaacaagacactggcgccaaattaattgctatgcagcaggatgttcgagctttagaaataggaaaaccaataggtgaaaacaccttccaaagtattccttttactccagttaaagttgataaagtcattcacgatggagaagtagttaaactagggaaattaaaactaaaagctactcttaccccaggccatactccgggttgtacaacttggtcaactgaagttaaatctaatggtaagaacctaaatgttgttttcccttgcagtctctctgttgctggcaatgttttacaaaataatcatcaatatccaaatattgtagaagattatcgtcagagttttaagcgtttaaaaaatatgaaggcagacattgtgcttactagccatccagaagttgcagatgttatgggaaataaagcgcgcaaagatgcaggtcaagttaatgcatttattcaaccagaaaaactttctgctattgtaaaagatgcagaaatggcatttgaaaaatcattagttagtagtaagccgtaa

SEQ ID NO: 52264 - DNA, 324 bp, Acinetobacter baumannii
atgagatttctggcctcttatcaccatgatctggatcgaatgaatcctgcaaaaatgcaatcgctgatcaatgcacatatttcatatgaagttatcttggctttaaacaaagaaaattctttcaaacctcaccgtactatgagcttagacctgctagcaaaactactctcattcacacaaaatcagctgaattatcgaaataaagttataaaccggcaaagacagaagatttttgatcaactgcaacaaaccagtggaattgtgcaacaacttttaaacaatgtggacttcgttctcacgccagatcagctatggaaagcataa

SEQ ID NO: 52265 - DNA, 768 bp, Acinetobacter baumannii
atgttgaatcaacatgagataaatttaaaacagtatcaaaataaatctttaagttatttgaacagcacagctcactctgaagggattgagtttgataagtttattaaagagattgagaaatattcaaatcctgtcgttttagatttaggttgtggtggtggccatgtggcttataacgttgctaatcatgccgatttagtttttgcttacgacttatctcatgaaatgcttgatactgtctcaaaagctgccaatgatcgaaaaataaaaaatatttttgtacaacaaggcatagccgaagatatgccgtttactgatgaacagtttgatgtagtgattagtcgttattctgcccatcactggcaacatgtaccaacggcgatgaaagaaataaatcgtgttttaaaacctaatggtaccgttatttttgttgatattatcagctcaagttttcccattttagatacgtttttacagactatagaggttattcgagacccaagtcatgtaagaaactatagtattaaagaatgggtttactttatagaagatgctggttttgagttaactaccttagataaacagtcactcatgctagattttgatagctgggtgcagcgtatgaaaactcccgaagaccaaataaaaacacttaagtatctacaagagaatgcatcagatgtggtcaaaaaatattttaatattcaaaaagacgggagttttgaaagcaaagtagggtacttcgtatttaaaaaaatatctttctag

SEQ ID NO: 52266 - DNA, 561 bp, Acinetobacter baumannii
atgtcacctttagtactttctacacgtgctttaaaagttgtaaataagggaattgatttatttcaccatcacggattccaccttgtcggtgtagatagaattgtgaaagagtctgaaattacaaaaatgactttttatcattattttcagtccaaagcgcggtttattgaaatctgtctattagtacaaaaagaacggctacaagacaaagtcgttgcaatggttgaatatgaccacaacacaagcgtgacagataaactcaataaactatataacttacatatcgatttagaagggccgtactatctattatttaaagccatttttgaaactaagaatacttattcaaacgcttaccaaatcgctattaaatacagaacttggctgaccaatgaaatttatagccagcttagaatagttaacactgatgcttcattttatgatgcaaaattgtttttatatatgattgaaggcgccattattcagcttttaagttcagataattcagatgtaagagaaggaagaattgagcgagttttaatacattttagtcagacttaa

SEQ ID NO: 52267 - DNA, 372 bp, Acinetobacter baumannii
atgaatacattaattaaagcaattgttttatcagtatcagcttctgttatgggagcttctgcttttgctgctccacaagaaaatcataatcagcctaaacacgttaatcagcataaaaaacaagttgaccaacataagaaacagcctttagttcaaaaagctcaaactcagaagcatactgtaaaaccttcacgtgattggaaggctggacaagttattccttctcaataccgcaaaggtcactcagtagaccataaaaagtatagcaacctgactaaaccagctaagaaccagcaatgggtgaaagtaaataatgattatgtgctgatcaatacagtgaatcacaaaatcattaaaactatcaaaggttaa

SEQ ID NO: 52268 - DNA, 267 bp, Acinetobacter baumannii
atgttaaagatagattctttaaatcagagtctgagcgtgactcaaaatatgctaagagtgccacttcgcttaacaaaaaaagacgtatgcaccttactgggagtgagtagagataagctaactagaatggaaagagaagatgaaagttttccaaagagtatgaaggagggcgtagcgagacaagctgctgtatattacgattaccaagaaatagtagagtggtatgaaaattggaaaactaatagacagctaaacaggagttcatag

SEQ ID NO: 52269 - DNA, 513 bp, Acinetobacter baumannii
atgattaaaaatatggattctttcaagctgtcctatgtgtatttctttccagtggcctttttcccattttggaatatctatcaatttagaaatgatccagatattaaatcttggttatttagaaatttacttgtcagttttatagttattttgatcccactttttcttactttaagcatgatgattactaaggttttatacaaagatcaggataaaaatacagaatatcgttcaataggtttgggtttgctatgttgtacatttctaacaggaagtaactattaccaatttcaaaaatttacagtaggaacagacctatccattgactattaccgaatggccatgatgatgagttttctaatcgcttgttttatatcaagcctgtatttcacattaaaatataaaaaatacttacaaaaacaatcagttgattttaatgtaaaaacaatgaggtttatggcgagtactgctattcccttctttatatcagtaactactttttttgttgtttaa

SEQ ID NO: 52270 - DNA, 447 bp, Acinetobacter baumannii
gtgcacttggtgctgccgtatctacagttaccacagcattgcctgtacccacattacctgccgggtcggtcgctgtcacagtcacagtatgcggaccgtcagtcaacactggaagtgtattgtctgcaagggtccaggtgccatcaccattgttcaccgctggataatccacaccatctacagtcaccacaactttcgctgtcggatcgttcactgtaccggttaatgcaggtgtactgtcattggttaatgctgttgttactgcaactgttggggcaactgcatctactacacctgtgccaggtaatgacgggttacccgctgggtcagtcgctgtcgctgttactgtttgaccatcagtcaggtcacctgggtttggtactgtccacttaccatccgggcctgcaactactgtcgctgttgtaccatccgggaagctcacggtaa

SEQ ID NO: 52271 - DNA, 147 bp, Acinetobacter baumannii
atggatggtaaaaaaagtatggatgtaaatgggaattatcatccacctggaatatttaactctaatagtccaagttatgatccagttaaaattaatgatgtacatatccctattaaaaaaccaacggtattcccaggaggaaactaa

SEQ ID NO: 52272 - DNA, 465 bp, Acinetobacter baumannii
atggatgtaattaaccaattaaatactatctgtattgtctataaacctaactcaagacagttaatccgtgttttcaataaactagctcttttagataataattttgacagttcaagagtagcctttctttttttaatgcttatatatattgaattagatttaatcgataaatttgatgaaaagagcttagcaaatttcttttataattcgcatttagaagcattaaaggaaagctataataaagctaattccagttatggcagaggctcactttcttttatacaatttctaatgcgaatttataggagctatggtttaaggtattttgttgaatacacagcctatttaaaagtaccccaagatataaatgcagatcaagatggaaaaggacattacgttttaccaaatagaacaaagatagactttgttcagcaatggtatgactatattcatttagttgagtaa

SEQ ID NO: 52273 - DNA, 648 bp, Acinetobacter baumannii
atggctggaattgtttcagcattatgtgtttctttatttttgaaactagttagaaaagataaaacagaaagtatttttatctttgagttgcctacttatcgattgccagatattcgaaacgttgcattaggactttatgatcgagctacgatctttctaaaaagagttggtggtattatcgtagcattatctatattgctttgggtgttggttacgttccctcaaccacctgagcatgccacgatgcctgctatcaactatagtttagctggacaacttggacacattattcagcctatatttgcacctattggctttacttgggaaatctgtatcgcattaattcctgctatggctgcaagggaagttgtcattgctgctttaggtgtaatttatgctatgtctggagatgaagatactgtaactcaaacattgttgagtcaaatctctggtcctgatggttgggggctagctacagggatgtcattattagtttggtacattttcgcaccacattgtcttgcaacattagcgaccattcgtcgtgaaactggtagctggaaacagcctgttattatggcgacttacttatttgggcttgcgtatttctttgccttcattacatatcagcttattagtagactttaa

SEQ ID NO: 52274 - DNA, 312 bp, Acinetobacter baumannii
gtgctcttgggtgtttatagttcttcaagttttgttgtactggtgggtgttgtgttatggggagttacttttggtggggctccaacattattacaaacagctttggcaaatactgcgggacacgaagcagatgtagcgcagtctatgttggtcacggtatttaaccttgctatcgcatttggtggaatgattggcggaggactacttgaaagttttggggcagcttcttttccgtggtttatgctggcttttgccctgatcggattatttactgtttaccatgctcggaaacatggttttatgtcttcttaa

SEQ ID NO: 52275 - DNA, 585 bp, Acinetobacter baumannii
atggttaaactttatcaggaaaaaattaataatacagaacctacatttcttcctattccgaatactatattaaaagatatacatcttaaggatcgtcaatggttcactaagttagttcatcttgaggaagtttatccatatctagaaattatttggaaaaatctagattttttattttcaaaagagattagaactacgcataacaatctattatgtgctatttctgaaaatcagtttactaatgataaagatttactaagaaaaccaagtgaatatataaatttattaaaaaataaagcttattatcaatttttttatactcaatttagccctttatttaagacaattggtagttggcttacaggtatctcctcaatcaattatgcatggaaagaagaaggtggagtattgcttaaaattcatgcagatatggttgggagtggaaatatttctcatggtttgtctcatcaatttgagttagatgccagtacggtagacttaattttccctgatgtatttaataatacttttacacaaaatcttaacattcaggagagaggtggtcccacatgtttgaacaactaa

SEQ ID NO: 52276 - DNA, 558 bp, Acinetobacter baumannii
atggcaaaagttgttactggattacgccctggtggccgtagcgaaagaatacaaaccgcggtacataatgctgtaaaagaattacaaaaagatttcgagcaaagccagattaccattccaatgatcgcttcacaggcgggagtaacaccttcaaccatttatcgtcgatggggagacatcaatcagttattttcagatgtagctttaaatgaacttaaacctgatatggaacccaaagatttaggttcgtttaaacaagatatcacagcatgggttgagcaatattttgaagaatatgcttccggggtgggacaagatttattacgagatgttctgtatacatcaaattcggattctaatgcacgtatgtgcgaaagtttaattattcagcaactcgacattattcaaaatcgtgcaaaattacgaaatgagttcactataccgaaccaagaaattatcgaaactgtaattgcacccatgttatttcggattctatttaccaatcaggaattaaatttagattatgtacgtagtcttttaaaacgcctatttatttaa

SEQ ID NO: 52277 - DNA, 669 bp, Acinetobacter baumannii
atgtcgatcaccaatctttctgttcatcgaattattattcatcaaatttttcaaaagaaatcagatactatggaaacaccagagaaaagtactgaatatacaagattcgatacatctgctcagatggattttgatagtcgtgtaataggagcattaggctcagactctaaagctgtaacaatgcatattgttgatctagagactgatagcttaccaaatatcatagataaagcgattgatgataattctgaagacttcattgagtcttcgtataaaattgcctataaattagctaaagcacaatttgaaaaaggaaggaatattatagggggtattgttgttgtttttacgggtacatatggagtatctaataaaaaaattttaggtgtaatgaaagcagatattcatagtggatatgaaagagttaccacagaaaatggacaaatttcattaaaacatattaaacatcttttactaacaccatcttctaaactctataaaacggtgggtttttgtgagaaagaagattatgacccatcttcaacaaatcttaatgataaatggttggtcttgatttcagataatcaaattagccaagttgatggtaaagcttctgctgagtatttctataatagacctcttgcgaaagtaaaaaccacctcaatctaa

SEQ ID NO: 52278 - DNA, 399 bp, Acinetobacter baumannii
atgttcatcagtatcaatcacaacagcctcacccttacgctgagggatttcaactgtcacgatttctttagaaaaaaagcctttggcttgcgcgcttgcggtgcgttgttggctcaccaaggcaaactggtcctgatctgcacgattaacgttgaactgttcagccacgttttcggcagtctggggcatggtgtctacaccatacaattctttaagttttgggttaatgaaacgccaacccatggtggtgtcttcaatcttctggctacggccaaaagcactgtcagacttacccatcacatagggggcacggctcatactttccacaccacctgcaatcaccaaattcgcttcaccggctttaatagcacgggcagcaatggcaatggcatcgagtga

SEQ ID NO: 52279 - DNA, 441 bp, Acinetobacter baumannii
atgaaaaaatttctatggtggggaatgagcttttacttaagtatgagcttacacacatttgcttttgctcaaagcaacttatcaagtgttacttttaatcagcctttaaaatataagattgatttcatagatccacgctttcatcttactaaagaacaatttatgcaaattggtcaagaagctgctgaaatctggcagaaagaaacaggaaaaacttattttatttatgatgctcaagcagagcttacaattaacttagtatttgatgattatcaagctgttcagaacgaaaagaaaagtaatataaacaatttattagaacaacagaaagaatggcataagaaaaatgaagctattcatttgttaaaacaacaaatagatcaggaaactgtacttttgaatgaagaaaaacttcagcttaataataaattagaccattaa

SEQ ID NO: 52280 - DNA, 291 bp, Acinetobacter baumannii
atgaaaaataatatatttaaaattgtagttttggcggtactttccacttccccactattttgttatgcgaataacacaataatgattaaaggaaatattgttgaagatacttgttctacagtaaatattgaaaaagaatgcgctcaaatcaattctttgaatacaactattgatactcaatatttaaacaaagataatgtattcaacttagcgcgacatactgaaaaaatggatacgagtattgaaactataagtgctaataaaaaagtagtgcttgttaactatcattga

SEQ ID NO: 52281 - DNA, 357 bp, Acinetobacter baumannii
atggagtggattgatccattagggctagaacgtataaaatcacccaaaacaattagatatagccaaaatggttatagtcctaattttggaaatggggaaaatgttaatggtctggcacatagattacaagctgatccatcttatgccgcaaaagttgatcctattagattagtgcgatttaaagatcttccacaaaatgttcaagcaaaattattggagcaaggcgctaaaagtaatatggtatattcgcttgataataggagattagctgctgcgaaacaggctaaagttggagtaaatacaagatgggctactctagaagaaatacaaaaagaagctactttacgtagattctaa

SEQ ID NO: 52282 - DNA, 360 bp, Acinetobacter baumannii
atgtcttttaaaactaaacttcatctttggctaggatcaactgagataaatcaacaagagtattggtattattttgatgattccgaaggattgccaaaattttgtaaagaggtaggtttggattggctagatcaggactttatgggatatcattttgataaagaagtagatgatttaaagtttatcattgaagaaactccagagcctgaacatcatgaaaagatgctaaaagactgtttggaaaaaggcattaataaagctaatgctatgttttattattggggggatgatccaattaaagtaagtaaagataaaaaatataatacgctcacctatattggtgaatatgagtgggattaa

SEQ ID NO: 52283 - DNA, 396 bp, Acinetobacter baumannii
atgaatacagatatagtgctcgatgcattagagcaagcattgcatgatcgaggcatgccaaagaatgtgattcatcattccgacagaggtgtgcaatatctttccattcgttatacccatcgtttagaagcagcaaatttacgagcatcagtcggtacgactggcgattcatacgataatgctttggctgaaacggtgaatggcttatacaaaacagaggtgattgaatatctaaaagcagattggcaaggtttagcagatgtacaacttgcgacactaaactgggtagattggttcaataaaaagcgtgtacacagtgcactgggttatgtatcgccttttgagtttgaagcaatgtactatgataagattaacccgttaggtcaggtggcctaa

SEQ ID NO: 52284 - DNA, 213 bp, Acinetobacter baumannii
gtgaataaattgaatgagaaagtccaaaaaatcaatactaaagaagattttttggaatttgtaaaattgttagtgaatgatctttcaacaaatcaatgggaaaatgataatttagccgattatcttgaggggattaatagttgggtggatgatatggatggatattttgaaaatgtaagagattatgatgctttggaaaaaataatcaattag

SEQ ID NO: 52285 - DNA, 129 bp, Acinetobacter baumannii
atgcttactggagtctatataaataatgttgctacttatagtgtaccaacacaattagatgggttaaagcaaataaattttatatttggggcaaatgggtccggaaaatctacaattgtagaatcatag

SEQ ID NO: 52286 - DNA, 213 bp, Acinetobacter baumannii
atgtctaacaacacagctactggtacagttaagtggttcaacgaaactaaaggtttcggtttcattcaacaagattcaggtccagacgtttttgctcacttcaaagaaatcgcatcttctggcttcaaaactttacatgaaggtcaacgtgtgacttttaatgttgtgcaaggtcaaaaaggccctagcgctactaacattattccacagtaa

SEQ ID NO: 52287 - DNA, 195 bp, Acinetobacter baumannii
atgagagatacaacagaaagaccagaagctgtcaaggctgggacggttaagctagtagggacagataaaaatacattaatcaaagaagcacaaacattaattgataataaagttgaatatgagaaaatggctcaggcccataatccttatggtgatggtagagcttgtgtaagaatactaaagagtttatgttga

SEQ ID NO: 52288 - DNA, 333 bp, Acinetobacter baumannii
ttgcacgataagcaagacctgattcaaaaattcattgaagaaaacatacctaagatgatcaatggacagagcgttcaaacggcttttgctgaattctgggatgctgaaaaagaacaggcctatcagcatctctgtgccgaggaaaacctgaaaccagaagcgatgaagcaggttctggaacattatgagttcaccaaacgcctaccacgtaaagaagagttgaaggacttaccaaactataaggttaagctgtttgagcgggagaacgtgtttagcaatttgctggtcaagacacggcagttgattgaaagattttatactggttttaattaa

SEQ ID NO: 52289 - DNA, 327 bp, Acinetobacter baumannii
atgcagattgaggcatcacaacaacagcagcaacaaattgctattcaaaattttgaaaatattttttttgaattattgaaaacgaaaaatgaggctattcaggggatttactttaaaacccgtagaggatcatattctacgggtaatatagaggttgaaacagtatatggtaaggaagcgattaatttgcatttaaagtatttttcagagcatgtttcaggaagctggaaaaaatattatgagagtatgttaatcagtacttttagtagttattttagagtttgttatcaaatagttagattaatagatagtagacttccttcataa

SEQ ID NO: 52290 - DNA, 264 bp, Acinetobacter baumannii
ttgaacttatttaaagttttatcagcagcggtaaaaattcaggctgaaaaattaccagaacataaaataattgtggcggaaaaggatgctttcccaacagatatttatattattgaaggttttattgatttaattcaaaagggctatcaagttgaattgattgatggagtagaagacttagctcgagttctagaaaaagatgttgctgtagtagttctttctcatgtgaattatagaggtggtcccacatgtttgaacaactaa

SEQ ID NO: 52291 - DNA, 465 bp, Acinetobacter baumannii
atgaaacgcagtttaacattgctactgagcacatttatctcaatacaagcttttgctgaagaaaatgcttgtgaaaaaatttgggatagtttcaaaaataaaaatgaaagtatcaaaattgataaagttaatgtcccctgtaaacaaatttgggaagatagcaataaagcaaagcttgtaaagactattggcttaaacccaaaagatgctcaatggatgtcaacaggggaatgccaagttattgaagtcactaatggtaattatttttcatattatagaaatttaggtcgctatgatatgtttgaagataagttttatccaacaaaaaaagctaataaaaatggtgtggaattaagctgccctggattggggaattttgagaaaatgaaacctattttaagttcatatatcaataataaaaaaattgatattaaacgatttagttttgaggacttaaataaatga

SEQ ID NO: 52292 - DNA, 270 bp, Acinetobacter baumannii
atgttattgactactgatgaagttgagctaatcaaaacatgtgatgaaagccctgaacaatattatgcagtcttccaaggccatcagatcggatatctacgcttaagacatggcgaatttagagttgactatcctgattgtggagatgagacaattttgtattctcaagaaccacaaggcgatgggtgttttgaagaagatgaacgtgagtactttttgatgaaggccaaaaaagcaatcgttaagaagtttaatgagatggaggggtga

SEQ ID NO: 52293 - DNA, 759 bp, Acinetobacter baumannii
atgagtaatattgttttgtcgcaagttagcaagattgcatcagcttttaatatgcaagatgttgatcctgctgagttagcaaatactcttgttaatacagtatttaagaaagcaacaaatgatgaatttctctctctattaattgttgcaaaccagtacaagctaaacccttttacaaaagaaatttatgcattccctgccaaaggtgggggcatcacaccagttgttggtattgatgggtgggcgcgcattattaatgacaatcctgtatgtgatggtatccagtttgaacaagacgacgagtcatgcacatgcaagattttccgtaaagaccgtaaccaccctactgttgtaactgaatacttgtctgaatgtcagggtaattcagaaccttggaaaaaatacccaaaacggatgctacgtcataaggctttaattcaatgtgcccgtgttgcttttggattctcaggtatttatgacgaagacgaagctcgtcgtattgatgattgtcatatccctaccgttcagaccgttagttcagatcttcctcaaggttatgaagcttatgagcagcaacatttagacaacatgcgcgctttggccatggaaggtacagaagccttgcaaactggctacgctgaattgcctcagggcgactgcaaaaaatacttctggactaagcatagcgtttcattaaaagaagcagcacaaaatgctgatcaaccacaagggcaagtgtatgaacattctccagcgtag

SEQ ID NO: 52294 - DNA, 330 bp, Acinetobacter baumannii
atggaagttaaaagcgtacatgctcaccacattccagcaaacaacggtgtagattcaattgatgtattcgttgtgtggtatggcgaacaggcatttcaagtaactatccgttgttgggattgtgcttggactgcttaccgtggaagttgtggcttcaagactatcgaagagtacttcttggaacaatggtacagccaagaatgccatgaacatgtagttcaactcttcactaccacctcaagacatacaacccaaagagaagaaaagtggttgttcaaagttgtcagaagtatgtgccaacacttcaaaaagttagcagaaaagaattag

SEQ ID NO: 52295 - DNA, 381 bp, Acinetobacter baumannii
atgaatatgttagttaacaagcctgagttgctatgcccttctttcccttacttggatatgtctacagacattcaggttgaaggtgaaacggtttatttcgacctaacttacggctgcaatgtacttaactgccagatcaaagctgaaacgacatatgacactcgtgaagtaactgatcagtttagtggctgtgctcgtgaccaagattatgaagtgcttgtagtagatacaaaaactcatgcaatcgttactgataaagacggcattgagtcacctattggtttgcgtttcaagcttacagacgcacaagtacacagcttaaacgagcagcttaaatactatgccgaagaattggcagatgaagaagcgggagtggagtga

SEQ ID NO: 52296 - DNA, 804 bp, Acinetobacter baumannii
atggataactacaaaatcaaagttaatgatgaagctgagagcaaagaggctcaggagttgttttttgagttgggttacagctggctttgttgtggaaaatactataaccgcattggcaactatacgtttattacggcctacccagatgaaatgttattaagaatgggctggggtggagatactgataaagaactcaccctccctcagcttcaagaccttgttgtgttgaagcgtaatgatgtgaaggatgcgactcatcgcgacaagcagcaaaattctatttatttaactagcgatatggtcatttattactggcagggtgaatggtgtaaatcagctattaataaatcaaatgactatgaaaactatattgcgaatagcctgacgcctattactcaaccccaagacccagccttgattagcggtgacgttgctttagcaaatgttcacaagtgcattgttcagtacttacatgatgatgagccatatggtcgttggacaacaattactgaccacctttggtcacaataccacttgggcatgttcttagatccagacacaaagttcaagtttagatttaaacctcaaaccatcaagcttgaacttgagctgccgaagccttttgagccagaagaagattgtcacgtttacatcttagatgacggaaaaacagatggctatcgtcgttattcctacgaagttcatggtgataaaggaaatacatttattggtatttggaaaactgaggacgagatcaagcaagtcgtagcgcaactcagaaagatacgaggtgctaactcatga

SEQ ID NO: 52297 - DNA, 180 bp, Acinetobacter baumannii
atggaaacattaactttacgtgatcagtttgcaattgctgctatgcaaggctttgctgcaaacatgggcttctatctaattgatgaagatgtggctagaaatgcatatcacttagcagacgcaatgcttgctgaacgctcgaaagaagttgatttggacaaggagccctctcatggataa

SEQ ID NO: 52298 - DNA, 642 bp, Acinetobacter baumannii
gtgaatggattaaataaaatatgggaatttggctcgaaagagccaattcagaggataggcatcttatttttaacagtagggattatttctttattatcgtgggtttataaagagaacttagatttaaaccaaatactaaatcctgaatattttcctcaaaaaagagatggctttttctttcatttatttttgtattttctaccgattggctttctgctttcttgggggtatttcttattattaaaaattaaaaggtgggtcttttataaaaaaccatctggggaaaaattaatttttaaggacaatctgtcagccttttcttttgcaactaccatccacaagcctttatttgaaaaaaatcaaatgagttttgggataattcaagaagttattcataataataactctatccaaggttttttagttcaattggcaaatagtgaaggtacaactttagttgctggaattaatgataagtatcaaaactcattaggtaaaaatgacttagtttattgggggtttgtcagtccatcaaaagaacattttaaatttgaggcgtcaggttatattttggctttattagagcctgaatatgatgtagataaaaaagaatggttaattgcaaaagacttaactaaataa

SEQ ID NO: 52299 - DNA, 684 bp, Acinetobacter baumannii
atgtcttcgcttcaagaacgcatgcatcaagccaaaaaacactacgaatcaactcgtaataaaaaactaaaaaacacagaaatggctgaattctgtaaagtaagtaaagcaagtgttggtcagtggtttaatggaccaacaaaagaactggatggcagtaacttgactcttgcagcagaattcttaggtgttaaccataaatggcttgctggcgaacgtgccccaatgctgctagataaaaaatcagatgcgaatgtagtatttaataatgatgaaattagcaaaattcctgtactagattatgtacaagctggcctttttaactctgttggttacgatggggtaaatccaataggtgaaacttatacgacttataagtcagcaaaagaaaaaagtgtatttagtcttaccgttcagggtgacagtatgttgccagactttaaaccaggtgatcttttaacaatcgacacagcattaatgcctcagcccggttcttttgtggtagctcaaaacggtgattacgaggcaactttcaagaagtatcgagtaattggatatgatgattttggaagggaaatttttgagttagttcctttaaatccagactacccaacactttcatcacttaatcacaatatatcaattataggtgtgatggtcttacacatgaggaaatataagtga

SEQ ID NO: 52300 - DNA, 183 bp, Acinetobacter baumannii
gtgcaagtactgatgaagaaaagtgacgccattcaggcgttcaaaaccaaagtcggtgtggcaaaagcaattgggattagtaaacaagcagttagcttatggggcgatatggttcctgaaggttcggcctctaaattattgcttgtaaatcccaacatcccacacacgatcaaagcggcttag

SEQ ID NO: 52301 - DNA, 321 bp, Acinetobacter baumannii
atgactgagaaattaaccgcaagcatcacacataaatgcacagatgaagaaaagattcttttagagcgtatagctaagtcacgaaaaatgacgctttcagaattaatgagagacgctggcatgaagatcatccaagaagtagaggagttgcttagaagtctacaggctgagttcgatctaaccacagttaccgtagatacaagaaatcctgagccattcgaactagaactggcaccaaatccgcataaaacacaggcacaaaaaaggcccaattgtcgcaaccaattgagccttatctgccattccactgcaaagcaatga

SEQ ID NO: 52302 - DNA, 468 bp, Acinetobacter baumannii
atgaatttagcacataagcatgaaattgggaagcatccttctttatcgagagataactcaattttagagaaattatctttaaaggaagtagtgaaaattaatagccaaggccatgtattttcacaggcatttagaaaactactttggttatcaagtgataaagcttgtgcctattgtggcgaccaaataggtacatatgaagaaatgcgagtggatcatttcctaccaaaaaatacgcaaaattgtgaagacattaataactatgtgagttgctgtaaaacctgcaactcaatcaaagggaataaatcagttgaggagtttagatttaggttagctgtttataagtcagagctaagagggattgtatctcccggtcaagctaaacaactagtcgatttaggtgtgagccttcctatttccttacctgaattttacttcgaaaaaatagctgagagggaatgcttatga

SEQ ID NO: 52303 - DNA, 879 bp, Acinetobacter baumannii
atgagcgcattaataaagttccctcggcatcatcaagtcgagaaagaaaaacctatgttcagcgataaatttgacaacggctatatcatgtcaagtcgcttgtatcgcaaagaggttatgccttttttaagtgatgcagcgcgaaacgtgtatgcagagcttgaaaatagaattaatggttttcaaaaggaaactgattttgtcagctacagccaattacaaggcgataaaaacctagaaggttcacgccaattaggtcgagctacagtatcaagtgggctaaaagaactgttagatctaggtgttatttcagttattgaaactgggaaacaggggacaaaatcgtaccggttaaatgagatttctctagtagatcagttcagaaacaaaactagttcaaagaaaagaccagttcagttagtgaaccaatctagttcagttagtgaaccgaaaccagttcagttagtgaaccgaaaccagttcagtaacgaaactaacaatagatatatagagaaaaataaaaatattaagaatacatgtagcgaaaatccagtcgatacagtgctcaaactttggactccagatttggattcgttgaatgcttggttgcaaagatcaggtatcacaaaaatgactcaagccgaggttgatggttggttacttgagatcaacgggtactactcaacaaaacttgaagcgggtttgcttacagatacccaaatgtacacaaacttcgtgaagtggattaaacgcaatttctcaagtcgtaagcctgcacagcctcaaacatcacgcaacgtaaacgatgcttgggctaacaacccagttcaatacaccaagacgcttgaagaagctgaaataccggaggactgggtatga

SEQ ID NO: 52304 - DNA, 735 bp, Acinetobacter baumannii
atgaacgcaatgcttaattcagaagttattcaaggttcaggtatctgcactaaacacaacacgaaagaaatcatcatgggaggctttcaaggctgtccacaatgtgcaattgagtatgtgaatgcagcaaacaagcaacatgattttgaagttcagaagtctgtacgtgaaaaacactttgcgggggcaatgattccagatcgatacaaggatgcggggtttaaaaactatcgtcgtgatcatgacgggcagattgaggcttacaacctaaccacagcatatgcacgtgaaattttaaagggcgaagtaaaaaatctggtcatggtcggaagtaccggaacaggtaaaacacatttggcgtgtgcaactgcaagaacgcttttagcgaaaggcaactatgcacgctacatcacaagcgaagaattggcccaacgcatcatgaaagcgtgggacaaggacacgaaagatcaatcagagcaatcagtaattcatgagttcacaacctatgacttgctcatccttgacgagtacggattgcatgaccgcgataagcgcttagagctagtgcacaaagttctttactcacgctatgacgcatgcaaagcaacgatgctcatttcaaatatgacacttgaacaactcaaaaatgatttgggtgatcgcctctggtcacgtttccaacatggcggactcacaaccattgagtgcaactggaaagatgcgagggcggtatga

SEQ ID NO: 52305 - DNA, 411 bp, Acinetobacter baumannii
atggtagcggaaagattaaatgaagctaatacaagcgaaattagagcggtttacgaagatggcttaaaggttattctggattgtgaaattaaaactgcaccaccttcagtaaatcattactgggtagcttctggaaaaagaagatttttaagcaataaagctcgtgattttcatgaattggttcgtcaagttgtgcctgctcataaatcaactgctcgactcaaacttgaagtgacttttcatttccctacacgtcaatgtcgtgacatcgataactacctaaaagcgactatcgatagcttagtgaaatgcggtctatgtgtggacgatgaacagttcgatgagcttcttgtaaagcgtggaaatgtcatcaaaggtgggcttattaagctcaaggttagcgaggtctag

SEQ ID NO: 52306 - DNA, 162 bp, Acinetobacter baumannii
atgaaaagccctaaaaaactcacacaaaatgagaaagatattctgctcaatgaaataagaaaaatgcgtgatgcgctgtggaaaaagcaaaacggcatatttaagaaaagcaacctaagtatcgcaattgccatgaccagacatgacaaggagggggtatga

SEQ ID NO: 52307 - DNA, 330 bp, Acinetobacter baumannii
atgaaaccagaacagtttattcgtgagtacggggtggagaaggcgagagaggtggttgctaatcagccaaaaatgaatgcaactcactacagggctaaagacaagaaatattcgtctctatttaaaccaagcccagagattgtttatgtagctgacctcaagcgtctggtggagtcggttgaaatcattcagttttggcacggcattgagtggtgtaaaggccttgtagaagattacaaagaagaaccaatccataaagaatcgtatggacacagaataattcaagcaatcgctgattacgaatcaatatacggaggcggggatgagtaa

SEQ ID NO: 52308 - DNA, 303 bp, Acinetobacter baumannii
atgagtgagtttaaagtcggggataaggttgttgttaagaatgcgcctttctgtccagatgatcatttcatccaaacagtaaaagctgaggatgttggtcagtggtacatgcattcatggagattggcggagcctgctgaagtacaagcgggtttccgcaagggatgcaaggcttttgatgattattggtacggacgcagcgaagcagaagaagttaaatctatggacctgctaaatgatatgggcgacgactcccacatagaaaaccacatttcgccgaattgcgaggtcaaaaatggataa

SEQ ID NO: 52309 - DNA, 255 bp, Acinetobacter baumannii
gtgaagctaagaacaatcccgcaagagtatgaatcaatacagtttgaaggaatcacagaggaactagaagatttcctaaaaggtactgattcaaaggtgtatatgcaaggtgaagactttgtattgtctgggtttgttgggaatcggggaatagatataggtgattatctttataaaacagattcacctttaacccttattaatgtcgctcacaacggccctacgttcagtaaatactttgaggtgttgctatga

SEQ ID NO: 52310 - DNA, 558 bp, Acinetobacter baumannii
atgattaatgccctttttgtagttgcagttctggcctttatcgtggctgctgcattcgccctagcgtacaaagccagtaaagaagagtggcaggaaaagtattgggctgagaaccgcttgcacttagatacgcaactaaagcttgaagaagcaaataaacgggcttctgtgttaagtgcggacaaagataggctttgtctgcaactaactagaaataagcaagaccttgaagttgcatacaaagacatagagtggctgacatcgcaaaacaaaaaatctgaaccgcaagaagaacatggcacctatgttgttcaacgcaacttaaaacctgcaacaccagatctatatcgagtcgtatttgagcttgatgttaatgggcaacgagtccttgaagacctaactaaacgctttaaccgtcacgcttttgtgtctgattcacaaggtggagagcgtgagacatgccgacgtttagggcagagcgaaccagtgaatttcattttaagccaaatcaacaaagcaaatgacccaaattacagtgaggtagagaacgatgcttaa

SEQ ID NO: 52311 - DNA, 327 bp, Acinetobacter baumannii
atggaaaaccaacaccgtaagatcaagggctatcgtgagctcagtaaagaagaaattgatttaatgaatcgcatcaaagaaaaaggtgctgaattacttgctttacaagctgagctagttggtcgtcttgatacagattttgaagtaaagaaggttgctgcatttaactcacaacttgcacctaatgattttgccagtgaagaatgtcaagaacttgaacgcttcaaagcagctgaaccattgcgctgggcggctattggaaaaactgatattcaaacaggcatcatggctttagttcgagcggtagctcagcctataggtgtctaa

SEQ ID NO: 52312 - DNA, 2070 bp, Acinetobacter baumannii
atgtcagtaccagaacagacgccatttatagaatatactgcaaacggtgtaactacaagctttgcattagaatttgattgtgaaaacaaggatcatttaattgtcactttggatggcgtagagccaccagtgggtaactggtccttaactggcggtaacgtagtttttagtgctgcacctgcaagtggttctattgtcgctattcagcgtaatactccatttaagcgaaccacggattaccagtcttataacaactcgttcagaccaggaccagtgaatgatgactttgatgctatttggcttaagcttcaagagttgggatatgctgattggttagtcaatcaaaaattagctcaagaaattctagacagaatcgcagcggatgagcaaatgcttgattatattcttaatcaagacaatgccttgaaagctgattacatctcacgtgatgcagcattaaagcaatacattgatcaaatgattgcccttgtgacaggcgacccatcctttagtggattaacttcagattttgttttagacacagctagcaataaaacacaaaaagaaattaatgctgaacaagcaatcattatcagtgatagaaattatcgtgagattcatctcagcgcacttggcgctaagtttgatgggtctgatgaaactgctattttgcaacaggccgtggatttagctgatgaattcacaacaatcgttttcgataaatctggatttaaatttagctctgttaattatggtacaaagtcggttagctggagaggtggtgtaaaatctattagccctagacgtattcctatcacggtttactttacaggcgcaggcattatatctagcggtcaatatactaaattcgattcactagattttaagtcaacaggtaataaagacgatggaaacaatattaacttaattgataatccacataccaatggtacatggattgatattaaaaactgcgcagcaagtggatttagcggtgttgttcttgggtttaaagatgttattgactccaaaataagcgggtttgttccgaacaacaataatcttgtattcaggattaaaaagggcgcatgggttgccagcacaacacttactctagaaaaagtttacgctcaacaaaataatgttttatttgattctgatgattgcgatcattgcacgatgattgattgtatctatgaatataatactgatttaggtcaaattaacgaaggcagttggacgattatcaatctttattcagagggtaatagtgcaaaattaaaagcaaacaacactgctttaacaattcttaaaatgtatacaatgactgctaatgatggttttgataacacatttaccaccagtgatccttattctgtaggcagtacatcgcttatcggtagacaattatctgcatttgatttcagaaaagagtatgagacgtacagattaattcccccgtcatttggaagcgatacatggactaaaattgggaatatacggctagaaacagcaggttcttgcgtaattacaattgtcggtgcaaatgggtatggttcgacaacaggtgctgcaacggagggtaacagtaaatcagtcattatttgccataagcgaagtggtggtgttggagtgccaggaatcgccgcaacttggcacacggtcggtaatacaccgccaattacagatgtgcgcattgttgatactcaaacaagtgctggctatgaagtttatgtattacaaaaaaactatggttaccttggagttgctgtagatgtattcaaagcagagctatttaaatacgatattaaaacatctcaaccaaagccaactggtggcggctcaggtgatgtgaatacagcaacaatgtacatagttccgcagtatgtgaaaattgccgctggtgctggctatgttggctcagatggaactaaccctttacttggtggtgctaccgcaactactgttggcgcagcaggcggtgcaacagcactcccagcaacgccgcttggatatatcactgtcagtattaatggaaccactagaaagattccttactacaacgtttag

SEQ ID NO: 52313 - DNA, 279 bp, Acinetobacter baumannii
atgacagatcatgcacaaacagcaattgaagcaagtgcagcggttacaagtgcttcttcaaaaactgctgtagctggtgggggagtttcatttttggggtgggcatcgggtttagatccgatgacgctgttgggtgtatgcatcggtttaggcggcttgcttgtaagtctatttagtttttttgtcacttggtactacaaatataaagcggatcagcgtgcagatgagcttcatcaaattgcgctacgcaagggcaatggtgaatgcaatgtcgaataa

SEQ ID NO: 52314 - DNA, 555 bp, Acinetobacter baumannii
atgagcttcatcaaattgcgctacgcaagggcaatggtgaatgcaatgtcgaataaaacgaagtatgccgtgactatggcaacagtgattagtttggctggcgttgcatggactcaaaaccgtgaaggaacagtgctaaaaccttaccttgatagcggtaaggtcgccacgattggaacaggcacaacggtttacccaaatggtcagaaagtaaaaatctcagatccagcaattaccaaaaaacaagctgctgaatatctaaaatttcatatgaacaaagatgccaagattttcaataagtctttgcttggcgttccactttcgcaaaatgaatatgacttgtacatggatttcacgtaccagttcggtactggtgcatggtctcaatcgtcaatgcttcgtaacctgaaagctcgtaactatgttcaagcatgtaagtcacttttgaaatggaaatacgttgctaagaaagattgctcaattcgcaagaacggctgttatggcgtttggactcgtcagcaagcacgttatgaaaaatgcatgggagagaactaa

SEQ ID NO: 52315 - DNA, 375 bp, Acinetobacter baumannii
atgccgattctctattggatttgggataacaaacgctggaccttgatcatcattcttttgatttatgcattctttcagacgtggcaatcaaactcactggcttctgatttgaatagtgctgaaatcgcttgtgaagccaaggttcagcaagaagtagcgaaagccatcaaaccatataaagacgcagaagaagcggcaaaagacaaagcacagaaggcaagtgaagattatgaacaaacaaaagaaaccgagcgagtcaaaacagaaacgattacacgtacagtgcaaaagatcgtggatcgtcctatctatatcaacacttgtcttgatgatgacggggtgcgtctcatcaacgaagctggtaataccggctaa

SEQ ID NO: 52316 - DNA, 1188 bp, Acinetobacter baumannii
atgattgaaataagctactatcttttaatctttgcactctgtttgatgccatttttatttaagaataattatttaaattatggtcagatacacataaaaaataataatccaattaacggaataagaggaattttggcatctctggtgatgttcagccatgcctttaaagagttttatatctatcttggcaatcaatggatttatgataaatcctatttcgatctaattggttttggcaatcaggcgagcaatacaggaaaaataggtgttgcgatcttttttatgatatctggataccttttctatagattactgaatgcatctacctttaatcttagtaaatttataaagaatcgttttcttagaattttcccgctttatgcattcgttgtctcattctgcgttgttgtagggctaatttttgctgattatgtacttgattgggacttagttattggaattaccaagtggtatatgctttttggtagttatgatgttctaaatatggttgagatgactaagggcgtagaatggactctaaagctcgaaatcctcctatatgccagtattcctgttcttttttatctattcaaaaaaatagataataaagttattaggcatctcttgatactcggttcaatcttatcaatttttgttttaggcttcttgctgcgtatttacggaaaagtctatatagatccacgtgctgctttatgtttctatgttggctatatcgcacttgaaataaaagaatttaaatctttgaccattttcttacaatcaaaatttgcaacaatattagccatattgcttttcatatcctcattctttgtatctagccataatttattttatctatacttaattggctcttgcgggttcctcttcctatgcctaacttcagggaatagtatttttggtctcttaaacattgagcccttacaaaaactcggcgagatcagttacagtatttatttgattcatggttgtgtactttatggctttatgcaattcatcaaatatttttcaatagaaaatcatttagttttagttttgcttttaatgatgtttttcttcgccacctatacgctttcaactttatcattcatccatattgagcagagattcttaaattttagttttaacaagaaacctaagctagacgacaaagctatcttagagaagtaa

SEQ ID NO: 52317 - DNA, 810 bp, Acinetobacter baumannii
atgacactgaatagtgatttccagaaactttatgtagatgggttaatcaccctatatgaattagatgccagcgctttaggagctggcattttgcgtttccatgggcatatttcttatgaagattgggaaaagatttatgtctcagcagacttaacaagttggaaggctgacacagcaacaatcaaggccgataaagtttttaatattggcgatcagaaagtatggatgcgaaatattatttggcaaggtcaagtatttgagccaatggcgcttgaggtctctggccttgaaatgcgttcggatggtaaagcttctgcaccgaccttatcaatggcaaacaacattaacggcattcaaaatgccgtatctgcctattgtttgcaatttaaagactttgccggggctaaacttaaagtcattaccacgcttgctaaatatttagatgccgaaaacttctcggcaggcaatccaactacttcaaatgagttcaaagagcagctttggtatatcgagcaaaaaacatctgaaaatgcccagcaagtaacttttgagctttcaaacccaattgattttgaagggttgaaaattcctgtacgtcaaattacctcgttatgccactggtgcatgatgggcaattaccgtggtgaggaatgtggatataccggagcggcaatgttcaccgataaagatgagcctaccaatgatccagctttagatcgatgcagtgggagtttgcgttcatgccgtttgcgttttggagaaaacaagccattaccttttggcgggttccctgcatcaagtttattgtga

SEQ ID NO: 52318 - DNA, 756 bp, Acinetobacter baumannii
atgaaacttacagcaaaaaccaaaaaagcaatcatggcccatgccgatgaatgctatccgcatgaatgctgtggggtaattgttggaaaagaatatatccgctgccgcaatgtttcagctctgtctgatcagtttgaaatccatccagaagatttagctatagcagaagaccaaggcgaaatcttagcttatgtgcattcacaccctgacggaactacaagagcctcagaactagacttaattcagattgagttacatcaaaagccgtgggtaatttgttcatatccggatctggattttcaagtttatgaaccttgtggttatcgcgcccctttagtggggcgtaattattttcatggctggcaagattgctatgcgcttgtacgtgatttttatagtcgtgaattgggcgtagaactgatggattttaagcgggatgatgcatggtgggaagataaagatcattcttcactttaccttgaaaattatgaaaaagcaggcttctatgaagtagatacaccacgatatggcgatatgcttgtttgccgtgttgggcgtactgaacatcccaatcatgcggttgtttggctaggcgataatggacagcttaaatctgaacaaacagaacaatgcataggttcaagcttaattctgcatcatccgtataatcgaaagtctgtacgtgaagtttacggccagcaatggaaagatcgtacggtaaaaatcttgaggcatagagatgttaaaaacaattaa

SEQ ID NO: 52319 - DNA, 657 bp, Acinetobacter baumannii
atgttaaaaacaattaagttgtacggcatcttggggcaaaagttcggtcgtgaatttaagctcgatgttgccaatacgcgcgaagctatgcgggctttatcggttcagattgcaggttttgagcaatatatgttgactgctcataagcaaggcttagcatttgcaatttttcttaagagtaaaaatacaagtaataagcggggcaagaaacgcccagcaatttatgatcatgaaactaagcgtctaatcactggtgaaaatattggtgaagaacagcttgatatgaatactgaagcagaaactattcatatcgtcccgcgtgtaatgggggcagggggtaatggtggagtcttgcagttagtgcttggagtagttctgattgttgcaggtgtaatgactgggggtacgtcttcagtttacggtattgcattgattggcgctggggcaggtatggcgatgggtggtgttgcttcaatgcttatgccaaaagtagcaacaactcaagatcaaaaccaagatggtaacagagccaatgaaggctttggcagtgcggtaactacggtagcacaaggcaaccctgtgcccattctatatgggcaacgtgaagtaggtggattcattgtcagtgctggtcagtatccagaagatcagatgtag

SEQ ID NO: 52320 - DNA, 501 bp, Acinetobacter baumannii
atgccaggcttgcagccaagcgagcttcgcgtaggtcgtgccggggcaggactcggccatcttggtcaggcccaggttgatcgcgtcggccaggatcgtggtcaacaacaggttcttgtccttggccagatcgcccgatttcaagtgcgtgaagtgccgggtgaagcccgtccactcatcgacttcgagcagcagttcggtgatcttgacgtgcggcaggaccatggctgtctggtctatcagcgcctgcgcggtgtcgggcaccgccgcatccagcggcgtgatcttcaagcccgactcggtgatgatggcatccggcaggtcgttggctgccgccatgcggttgacggtggcaagttgtgcttccagcagcgtcagccgctcatgcagatattgttcgcagtcggtggccacggccagcggcaattcgctggactgcttgaggctggtgaacttctcgggcggtaccaggtagtcctcgaagtccttgaactggcgtga

SEQ ID NO: 52321 - DNA, 411 bp, Acinetobacter baumannii
ttgcagccagtcgaggatgaacagcgtgcgctcgatgcggcccaactcgcgcagcgcgacggccaagccgttctggcgcgggtagctgccgagtttcctgagcatcagcgaggccgtcaccgtgccctgcttgatcgaggtggccagccgcaggatttcgtcccaatgggcgcggacgtgcttgatgttgagcgtgccgccgatcatcggcttgagcgcgtcataggcggcatcgcccttcgggatgtagagcttggtgtcgcccaggtcgcggatgcgcggcgcgaagcggaagcccaagaggtgcatcagggcgaagacgtgatcggtgaagcccgccgtgtcggtgtagtgctcctcgatccgcaggtcggattcgtggtacagcaggccgtcgagcacgtaggttga

SEQ ID NO: 52322 - DNA, 216 bp, Acinetobacter baumannii
atgaccattgccgcgcaacgcatgcgccgcacgctccaggtagaccgtgttccacagcacgatggccgccgtcaccaggttgaggccgctggcccggtagcgctgctgctcgaaactgcggtcacggatttcaccaaggcggttgaagaacacggcacgggccagcgcattgcgcgcctcgcccttgttcagcccggcatgcacgcggcggcgtag

SEQ ID NO: 52323 - DNA, 1005 bp, Acinetobacter baumannii; identical to SEQ ID NO: 31749

SEQ ID NO: 52324 - DNA, 660 bp, Acinetobacter baumannii
atggagaaaaaaatcactggatataccaccgttgatatatcccaatggcatcgtaaagaacattttgaggcatttcagtcagttgctcaatgtacctataaccagaccgttcagctggatattacggcctttttaaagaccgtaaagaaaaataagcacaagttttatccggcctttattcacattcttgcccgcctgatgaatgctcatccggaattccgtatggcaatgaaagacggtgagctggtgatatgggatagtgttcacccttgttacaccgttttccatgagcaaactgaaacgttttcatcgctctggagtgaataccacgacgatttccggcagtttctacacatatattcgcaagatgtggcgtgttacggtgaaaacctggcctatttccctaaagggtttattgagaatatgtttttcgtctcagccaatccctgggtgagtttcaccagttttgatttaaacgtggccaatatggacaacttcttcgcccccgttttcaccatgggcaaatattatacgcaaggcgacaaggtgctgatgccgctggcgattcaggttcatcatgccgtttgtgatggcttccatgtcggcagaatgcttaatgaattacaacagtactgcgatgagtggcagggcggggcgtaa

SEQ ID NO: 52325 - DNA, 504 bp, Acinetobacter baumannii
atgccgggcaaccgcccgcattatgggcgttggcctcaacacgattttccgccatttaaaaaactcaggccgcagtcggtaacctcgcgcatacagccgggcagtgacgtcatcgtctgcgcggaaatggacgaacagtggggatacgtcggggctaaatcgcgccagcgctggctgttttacgcgtatgacaggctccggaagacggttgttgcgcacgtattcggtgaacgcactatggcgacgctggggcgtcttatgagcctgctgtcaccctttgacgtggtgatatggatgacggatggctggccgctgtatgaatcccgcctgaagggaaagctgcacgtaatcagcaagcgatatacgcagcgaattgagcggcataacctgaatctgaggcagcacctggcacggctgggacggaagtcgctgtcgttctcaaaatcggtggagctgcatgacaaagtcatcgggcattatctgaacataaaacactatcaataa

SEQ ID NO: 52326 - DNA, 1278 bp, Acinetobacter baumannii
atgactaaagtgaaccatctacaaagcctctgtgttatccacgttgactttgacatttggagtggacaaacccgtttgtctgcatctgatctcaagctgggcgagggtggtgaaattccaccggagaaagtagctcaactggggagtaagaagatctgtgatccggcgaagctgaaaggctttcaccgcctgaaaacagaaacccgtcgtctcctgttgaaattcggtatgccgttcatgaacggatttgccgtcccagtcagcaagaccgatgaaatctgtaacaagctgaatgagatcagctttcagttcaaccaactgaaacaggacttcatcaacggttacaacaacgccgtggatgaatggtgtcaggaaaaccctgagtacgaacgagctatccgtgccgggtctcttccaaaggaaacggtcgaggagcggattggctttgagttccaggtgttcatgatccagccggtgaacgatgatgaggccaacgccaaaagccttaaccgtaaggttgagcgcttgggtgacgatctcatctccgaagtggttcaggaagcgaataagttctatatggaacgtttggccggtcgagaccaatgtgctgtcacgactcggctgactctccgtaatatccgcgacaaggtggatggacttagcttcttgaacagcgcttttaaccctctggtaaagctgctcgaccaaaccctccggggatatgagcaacatgccgatggtcgaaacatcgttgcgcctttcttctatcaggtcgtggccgctgtgctgatcatgagcgagagagaccgcatcgagcagtatgccaatggctcaattactgtagagagcatggctaataacattggcggttcggaagcccaaatgggggactgttccaaagatgaaaagcctgaacggaaaagcgatacatccggtgagcccactcttgcatttgaggggggcgaaaccaagacgcaacaggtaggcggaaacgactctgttctatccgaacagactaacagcaatggtaacgttgttgacctggatgaagacatcgacaacttcttcaagagttttgcagagcgaggcgagggtgaatcggaagatgaatccaaggccggtgatgcgattcaagaagagcgagttgaagttgaggatgagcctgttttgcctggggatactccggtagagcaagaacctatccaagagctacccactgaggaacccctcatccaggtgccgcctaaaactgatgatgatgacgactgtttcttctaa

SEQ ID NO: 52327 - DNA, 996 bp, Acinetobacter baumannii
atgtcaactgatagcaaatcccttataacccgcattgcctctcggtacggtgttgatagcaccaagttttttgaaaccttgaaagcaactgcgtttaagcaacgtgatggctccgctccaaccaacgaccaaatgatggttcttctggttgtggcagagcaatacaaccttaatccgtttactcgggagatctatgcgtttcctgatagacaaaacgggatcatcccggtagtgggtgttgacggttggagccgcatcatcaacgagcatccccagcatgatggtgtcgagttcgtgtatgcggacaagatggtcagaatggagggagcaaacgttgattgccctgagtggatagaatgcgtgatttaccgtaaggacagatcacgccctatccggatcaaggagttcattgacgaagtttaccgagggccagcgcataaaaatgggcaaaacggcccttatgttgtcaatggcccttggcaaacacacaccaagcgtcaactccggcacaagtcactgatccagtgttctcgtgtcgcgttcggtttcagtggtatttacgaccaagatgaagcagaacgtatccgtgaaatggagcaggcatcagccattaacccggccattgcaagcctcccttcaccggcacaagttcatagccaggagcctttggctattgagcacaaagagcttgacccgatcctgatcaaactcgcaaatcgcgctattgctgaaaacgcatggtctgcggcgcatgagtatttgaagggacggtatgagggttcggaactgcaatatgcgactcaattccttcgtgagaaggagatggatcaaatggagcctccgaaacctgactaccaggaagcgcacgagcaagcctccactgctggtggttctgcgaatgccgaacctgttgccgccgaagtcgtgccacctttgagtgacgaggacatgatccttgttgcagaagaggagggtgcgcaaggctgttattactaa

SEQ ID NO: 52328 - DNA, 186 bp, Acinetobacter baumannii
atgcaacagaatattcatgtttacgacgatcacgctggcatcatctatctatctgatggacgcgaggtgaaatttgatccgaaactgtactccagctcctaccaggcgcacagcgaagcagtgaagtgggccaaagaaaccggggtcattggtcaagacgacgatgtggcgatgttcgtccattga

SEQ ID NO: 52329 - DNA, 2739 bp, Acinetobacter baumannii
atgcgaagtcacaccctagtcatgagaaccgtcgcctcattgctttccataaccatttccgcgttgccggtacatggttatgccagtagttcgagtgcggcggatatagccactgtaggcaaagatgctcaatcatttggacagagcttatctaactcattcaagtcaaactctggaactgttcaggatggcactatttcaatgcccacgttgaaagatggtcagttccaaatgaatggtggtgaacaagttaatgttaatgatctgttcccagggacaagtagtaaaaataacaaaccagacagctattattttcccgacgccaataagccaaacgttgataacctacagggcatgtatgattctggtagcgacatggataatgttggcaactcttctcaggggacactctggtccgatgctaatagctctaatccatcaatttcgggtgctgcatataaagtcctgcttgatgcaacaaatcgttctcgcccggacttttctaatgatccagttttgaatctaagtaaaaaaacatatgaaaatatggatcttattgctggtggttttggtgattgttctgctgaaacaactattaatgaaggaaccataaatgctcacgtccctgagtatgagcgttgtcagcgagtagtaaaacctgctggtgattgcgatattatccattccttgggaataacaagtgatgttcaatatgtatatgtcggttctgtaggtcgaacttgggtcactgttaaatttgaccttaaaaatggtacgtgggaaccaattgcaccctctgatggtgctcaaaaagtcgcgcaaataccaaaagtagatttcaatgccatgtgcagtggtgccgttaattttaagaccgatcttgttggttcttgggattgggctgagcatggcctacccggaaagatcgactcgactgttatctatagagttaaccaatatccaacttgtgagaatggtttggttggggttgtacagatccaggacactacggaatcagatgacctagagtggattcttggtgggaagtttgcttttcgattcaccaagcaagttgaggaccaatggactccgcagacttgtattgatgatgcaaagaaattgaatgatgggttttgtaagggaacgataagtgttactgagggggccagaaatgaaaacgactgtattacagttaatggctccagcatttgccctggtgatccattcttcaattcactgaaaccatcgccgttgccaggtattccaaggctcgcacagaaagtcagggtatcaaaactccagtgcgactttaatgtggggcaaatggaatgctggactgaccctcaaggggtaaaacattgccctaacaatgatggtggaaatgtaaacagttgcgcggcactagaaggcaatcctaaatgtggcttcatcagctctgagtgtattggtggtgcccaaggcccatcgggccaatgttatgtatttaaggatacttacgattgtggtgtggatgtcaaagtcccaactctcgataagaacactgagtacaagtgtggtggtccgatccgttgcatgggggatgattgcttagcaataaataaatctcagagtaccgatttcgccagagcaacagccttacttaatgctgctcagtttttgacacaagatatgaagtgtaccgatagcgcaaccgaagaggggggggatggaaatattgatcaaggatgtacggtttttggcggcgaatccggtgaatgtaaaatagctgtaggtggtgtatcggattgctgtgaaaagccttcaaatatatctctagctgattacctaaacttgatcatggctgttcccaagctagatggtgcggtaatggggttacaagatggtaatgccatgaagggcgcttatcaggttcttcgagatcctgtaatggaaggttggactgaggtaacaaagccatttacgagctatattgaaaatatatccggttctgtggactcatttatggaaccagtgaaccaggtgatggatcaacttattgagcagctaaaagagcaggttaaagaagtcatgatggacgtctttaaatctgctgggcaagatgccgcgacagagcaagctgctgctgccgcatcggaacaagccgcagaacagatgatgcagaccgcaacgacatggctcagtacagcgatgacaatctatacggtctatgttgtcacaatggtaatgatccaaatgatttataaatgtgaggagtctgagttcacaatgaacgccaaaagggcgttgaagaattgcacttatgttggttcttattgcaaatccaaagtattgggcgcttgcatagaggagcgtgaggcttattgctgctttaactctcctctttccagaataattcaagagcaaattcggccacaactcggccaatcttttggtgatcccaaaagtccccagtgtggtggtatttctctggagaaaattgcagacatagattggaacaaagttaatttggatgagtggttggggattttgcagcaaaatggcaagttccctacgcctggatcaataaatattgactcgctaactggcgccggtagtgacttcaatattaatggggatcgaaagaatgcccaagagagagcgttgcagaggcttgatggaatagacatcgacgccaagaggaaagaggcaacaaatcgcgttaatcctcaaacaggcgcgccaaataataatggtggataa

SEQ ID NO: 52330 - DNA, 1005 bp, Acinetobacter baumannii
atgctgaaattcatgaaattaactgtgtttgcacttgcactgtttagtggggtagtgaaagcagagccaggttgccagaatgccgaggtgattggtgggaagctgataacagatatatgttggagttgcctattccctataaaaattgcaggggtgtcaattagtggtggaggcggtgttgtgcctagtgatgcggttacatcacccctatgtgcctgcaatgataatctgggtgttccaaggccaggggtaactacgtctatgtgggagcctgcaaggcttattgagttccaaagagtcccaggatgctcctctgtgttgaatggcactcgtttcccatttgatcgaacaaatcaaggtcatcatggaatgggggatatggatgggggtgatggctcttttatgcactaccactattatgcgttccccctgcttattatgctcgatatgttcataaaagagagctgtaatgcggatgggtacatggatctagacatcatgtatctttctgaggtggacccgacttggaacaatgacgagctcgctttttttactaacccagaggctgcggcagtagcaaatccaatcgccgcaacagcctgcactgctgatgctatttcttctacggcaggaaaaccactcaagcagcttttttggtgcgctggttcatggggggcgctataccccctaagtggaaaccaaaatggcggtaagggggttatacgtgacagcagccttctaactactcgtgttttggccgcgttgcaccggagagggttggcgtggaagactatgggctcagatgcaatgtgtcgtggagtgataagcccgacacttccaaaaacacaatacaagttcacgttgctacatccagttcctgagacaaactcatctcatgtgataggggagtcggccttgacttgggggctatcgaggacaattccatcaataggccaagaccctatctataccatttggaggtggaacgactgctgcaataattga

SEQ ID NO: 52331 - DNA, 678 bp, Acinetobacter baumannii
atgattttttccccggctttacagcaaattaaggacgtcggaacaggctcgtttgttgcggctgaggttttggctcgttggtgctgcgaaggccagatgcttactccatcggagttgtcatcacctcctaattggggcttggtagatattgagattgccaggttcattcaagataacctttgccattgcagtgaggaatatcaggctctttttgttaatgtgtcagagcagactttgaaatctgacatcatctttcatacgtgggctcagataattagggcaatcacgaagaattatccattaaggcttgtcatcgagatcactgagggggttcaagacaaatctctagcatttagatggagctctcttactgcgatgggggttaatctagctcttgatgattatggagacaaaaactcttcaatggttcgcttgcttagctacgactggaattattgcaaattcgatgcgagaaaactgagttcatttgaagattattcagccattcttcattgccgacgtaaaggcatccatcttattgcggaacaggttgagacaccaccattggaagagaatgccaaattacttggtttggtatggcaacaaggtttccttcatgggaagccgactgttatagagaaaagtttgaatcgagcaaaggtcttaccattatgctga

SEQ ID NO: 52332 - DNA, 918 bp, Acinetobacter baumannii
atgaagagcaacgctaaactttcgctcctggcgctgtccttggcgctcggaacatcactggcttatgcctcggatgatattcctattgttccggcaagcgttatgaaaaaagacgtcccagcatatgtttcgtcagggcaagtcacaaatgaagtaatggggagtgtgaatgaaaaccccgtgctgaccatgaagcctggagtgaaccaaataatcccgattgcaattggtcatccgaatcgtgtggtcacaccgtttggcaatccggagattgtatccacttcactgactggaggaaccgatgccggtcaatgtggggaagtctgtatcaaagaaaacgtggtctatgtcgctacggataagcaatatcccgtgacaatgttcattacagaaaaaggctcagaagctcaggcgctaagcctaacgatggttcctcgtcggattccaccgcgagaagtatttctcagactcgatgggaatgtaggaatcagcggcgcattagctaactccaaggcggagagttgggaacagagtcagccttatgttgaaacgattcgctcggtgtttcgtaaggttgcccttggtgaaatcccccaaggttacacgatgaaccgtatccctactggagccgctgtgcctagctgttctcatccggggattaaggtggatttcagcaaggggcaatacatgatgggccaccacctgaacgtcttcattggcgtggcccagaacgtttctagtcagcccatcgagttcaaggaggccttgtgcggaagctgggatgtggctgcggtgactacatggccgcttaacgtacttgaaccaggccagaagacagaactgtatgtagcgaagaagcaaatgcgtggcatctcgtctacttctaagcgcccatcgctgctggggggtgcccaatga

SEQ ID NO: 52333 - DNA, 348 bp, Acinetobacter baumannii
gtgaacgtaaataaacagtttttttggttcctgatgaatgcggtactgatgtgcatcttcatcattcctgtagctgtcgcgttttggttgtcagcttttgcggcaggttttgactggggtcagtgggttaacctggctgcggatgcagccagccgagctgctagtgacccggccaaggctttgggaacggttcagacctactggggtatcctcagtttcttcctattggctgcgtacagtctgctgttcaagtttagagccaatgccaacgagtcagtcgagcttgctgctgtggttggcgtttcggcttcgagaaaagactcggaagcagctcctcaaaatcaataa

SEQ ID NO: 52334 - DNA, 663 bp, Acinetobacter baumannii
atgagcaaaagcgatttcttttttggcaaagtgtataacggaagcgatggagccactctaggacttagtgatttggagcctctggcgcgaaaggtgtcagcagcgttcttcaccgcacaactgaatagaatgttgaaagagcatggtggccggttaacgatcagcgatggaacctcatatccccgcttttggagcttcatcgacaaggttgatccggagcaggttggtttcgtcgagatctacgctcgtcaggatgtgaacgatagtgttgaagcaacactggcgtgtgacatcgttttggtaaatggtgtgataaccgttaaatctcactggtgtgcctacaaagacatccgagctggcgaagtgatctccacattactcgtccctttgcatctgaaagccctacaggacaaggcttatatccgttgggataatggcgaaacggaaccgctgcttcaagatgacgatcaccaggctgagcttgagagggtatttaaggtttccaagtacccatcggctatgacctggggcgatacggttgaccaaaatgccaaggcgtacatgatggaccttgagtgcgctacggacgttggtcgtcgcggtgtctcgtcagaacaagcatgggatgcttatcaggaactccgacacaacaaaacaatgtga

SEQ ID NO: 52335 - DNA, 378 bp, Acinetobacter baumannii
atgaaagtaaccaataaattccaactgctggcactggggctgtttatggccggtagtgccatagcatctcccgatgtactgaatgacgacgcaaagctcaagaaccttgagaaggtgtgtcctgactgtgagatggttgcaagagatgtactcaaccttcgggttgaaaactgccagctaaaaaacacctccagtgcaatgatgatagccactatgcaaagtgatcccatgttttcgtttatgctggcggtacacacggcggctggtggagatgcctataaaacagtgctgggggctgctgccgcccatgttgactgcgaaaacccgttgagctgggtcaagttgacccaacaagcaattaaaggaggcaaagcctaa

SEQ ID NO: 52336 - DNA, 447 bp, Acinetobacter baumannii
atgagctactccgttatgaatcaagatggggtgcatatgtgcgacatcccattgagcgtctaccaggtgatacgtcgccaatccctatctgcggggtggctttactgggagcagggcttgaatttggtgaaggtgctcattgcttgcgtcgtcaaaatgttctttgtgatgccggtgatctggttctgggtgctggtggcgtgccgcctaattgaacctgaacgcatctctgacgtgtcaggacttttatctccggacgtgatcgggtgggccgctggcgcggccatcaccctcattatcttttccgtttttacacgccctgctatgtacggataccacaactatttcaagcagcatatttgctcaagaataaagcaagtaacgccggaactcaggacagtcactgggccactgttcttctaccgaaacgaaattggaacgatatag

SEQ ID NO: 52337 - DNA, 2964 bp, Acinetobacter baumannii
atgctgaaagccctgcacaaattatttggtgggcgaagtggagcgatcgaaaccgcgccaagcgccagagtgttgccgcttaaagacgtggaagatgaagaaatccctcgatacccgcctttcgccaagggcctgccagtggccccattagacaagatactggcaacccaagccgaactgattgagaaagtgcggaactcgctcggtttcacagtggacgacttcaacaggcttgttttgccggtgattcagcggtatgccgcgtttgttcacctgctacctgcttccgaatcacaccaccaccgtggtgctggtggcctattccggcatgggcttgaagtagccttttgggcaactcaggcatctgagtcggtaattttttcaatcgaagggacgcctcgggaacgccgcgacaatgaacctcgttggcgactggcgagctgtttctccgggctgctgcatgacgtgggtaaacctctctcagatgtgtccattacagataaagacggttcgatcacatggaatccttattcagaatcacttcatgactgggcgtaccgtcacggaatagatcgttactttatccggtggcgcgataagagacacaaaaggcatgagcaattttccctgctggcttggcatcgaattattccggctgagacgcaagagtttctttccaagtcaggtccttccatcatcgaggcaatgctggaggcgatctcgggaaccagcgttaatcagcctgtgaccaagctgatgcttcgtgctgaccaagagagcgtctctcgggaccttcgccagagtcgtctcgatgtaaacgagttctcctatggtgtgcctgtcgaacggtacgttttcgatgccatccgccgcttggttaaaaccggaaaatggaaggtcaatgagccaggtgcgaaagtttggcacctgaaccaaggtgttttcatcgcctggaaacaacttggcgacctctacgacttgatcagccaagacaagatccccggtattccacgagaccctgacacgctggctgacattctcatcgagcgtggttttgctgtaccaaacacggtgcaggagaagggggagcgtgcgtattaccgctactgggaagttttgcctgagatgctccaggaagctgctggtccggtgaagatcttgatgctccgtctcgaatcaaacgacctggtgtttacgactgagcctcctgcggctgttactggggaagttgttggcgatgttgaagacgctgagattgagttcgttgacccagaggaagctgacgaggaccaagcagaaggtgacgctggtctgaacaatgacatgttggccgcagagcttgaagctgagaaggctttagctggccttggctttggtgatgcgatggcgatgctgaaaagcacctcagacatagccgaggaaacgccagagcaagaggatacagaatcaactgaattgcctaagcctgacgcaagcaagaagggcaagcagcagagtaaaccgggtaaagcaagagcggagaaacaaccccagaaacctgaggtaaaagaagatttgtcccctcaggacattgccaaaaacgcacctccgttggcgaatgacgatccgttgcaagcactcaaggatgttgggggcgggctgggagacatcgacttcccatttgacgtattcaacgcatcggcagaaacagcctgcactgacgcaacaaaccttgaaatcccagatataacagagcccgaaaagcaagaggaacaaccaaaaccggacttcgttccacaagaacaaaactccctgcagaacggtgacttcccaatattcagtgattctgatgaaccgccatcgtgggcaattgagccgctcccgatgctgactgatacaccagaacaaacaatacccgcgccagatatgcaacatgcgggcaaacctaaggagcttgagaaagacgcaaagaccttgctctctgagatgttggctgggtacggggaagcatcgacgttgcttgaacaggcgatcatgcctgttctggaaggcaaaacgacgttgggagaagtcctatgcctgatgaaggggcaggcagttattttgtacccagaaggtgctcggtcgctgggggctccgtcagaggttctctctaagctgtcccacgccaatgcgattgttcctgacccgattatgccaggtcgcaaagttcgtgatttcagcggggtgaaagcaattgtgctggtggatcagctttcagatgcggtcgtggcggccattaaggatgctgaggcttcaatggggggataccaggaggcctttgagcttgtctctccccctggctcgggcgtaagcaagaacaaatctgccccgaaacagcagagcagaaaaaagacgcagcaacagaagccagaggttgatgccggagccgggtctgaacaaaagacgaaagacaagagcctccagcaacagccgaaagaaaagcagggcaacgttgcttctttagttgaagagcagaagcgcaaaccggtccaagaccaagaaaaacagaacgtggctcgccttcctaagcgggaagctcagccagtggctcctaagccaaaagttgagcacgagagggaattggggcacgtcgaggtgcgagaaagggacgagcccgaggttagggagtttgagccgccgaaggtgaaaacaaacccgaaagacatcaacgaggaagatttcttgccgtctggtgttacccctgaaaaagcgctcctgatgctcaaggatatgatccaaaaacgctctggaagatggctcgttactccggtcttggaagaagacggctgcttggtcactagcgtcaaagcctttgacatgattgccggggaaaacgtcgggatcagtaaacacatcctctatggattgctgagcagggcacaaagacgccctttgctcaagaaacgtcaagggaaattgtatttagaggtagataaagcatga

SEQ ID NO: 52338 - DNA, 618 bp, Acinetobacter baumannii
atgagacaactgatagcagttctgggagtggcacttatggccgggtgtgcctctaacacttccgagccaaaaactcagccccagatcgcctctgccgaaaatgacaaaccggcccgagttagccgtgaactgtctatgtcatgggacaacatggggcgcggtggcgctgcattacgccaacctggttatatccatgtgctgggcgacggtaatgtcagcgcaatggtgaacaaggtcaaagatgactccactggttcagataaggctccagtgtggatcaaccagaacgaggatgtgaacgaagccatcaataccttcaagtccatgaataaaggcaaaggctattcgctgtacgagttgtcacgctgggaacgctattgcaatggcggcaaaggtatggatgagcacgactggcgttttgtagaagccgagggggccacaaacatccccaaggatgttgtgaccggctgcattccacccacccatacctatcaaggttatctgaatgcctggacgcatttttgcaccagccagtctgtaaccgacgcagaccgccgcattgtgcgcgaatcagtgcgtccctattcagtggtgaacccatgcaaagctctgaaataa

SEQ ID NO: 52339 - DNA, 402 bp, Acinetobacter baumannii
atgtttggatcaatattattggcctccatattaacaacctcagccattacccaaaataccagtagcggtatttcatctggattaatggctacgtcagcaagttatttggcacaaaacataatgcctcttaccctgggactgaaaagtatccatagctatcagaccacggaagcagttgagatggctaaggccttgggaagcctaaaagatcttcctgaatatatttatgtcattactgatgtgaatgcccgtatggccgatatgtgtaatcgtgtttgggagccacaatcattggccctaaccccattcattgttgaaatggcagagctgcggaaggcaaatgaaaaaagcgcctatgaaaaggcgctatccgatctcgactgctcgcttttagaaaattaa

SEQ ID NO: 52340 - DNA, 417 bp, Acinetobacter baumannii
atgagtaaagatctttctctggcggcggagaacggggcagaagtgagcgaactccctaatggactatcctttaatgcctcaacaggccagtggcgggcgcagtacaagggtcagaggatcacttacagcactgcccgctatggggacatggctaaggatttggcgcatagtgcgctgaaacggatgctggccgggaattttgacccagtagctgatgatctacttctcaagtattcatggcgcatggacgatgcggctacgcagttgggcctatcgcttggtcagcttagacagtggatgctgacggggatagtcaacggtaaggagattcgctcccccaaacgtgatgttcagggggtagaccggatcagcgggcatgagctaatgatggcacaagagcgtttgcggcttgagtaa

SEQ ID NO: 52341 - DNA, 291 bp, Acinetobacter baumannii
atggccgctcatatagaggtaatcaagacgctcaccatcccagactatgacgttgaaatgtgcattgtgtctgtgagtggcgagctgttcatcatgtcacctgattttgatacacgcatcccctattgcgggacactggatcttgatgatggcgtcattgcggtgatcatggctgaggcatacgaaaaggttcttgaactgtctatggctgagtttgaactccagcgcacttccattttcggggcgctagaaaacgcactcgggtctgctgaccagtgcatcaagcactga

SEQ ID NO: 52342 - DNA, 234 bp, Acinetobacter baumannii
atgaggcagtcagatctggaatacctaggcaagctcgatggtcggcattcgtggtcgtgtggagatgactgcttctattggactgatggggccaacattgtgaccagtgatcttgctggtacaattccgttttgtcgtgtcactctcgccccacgacagagctttagacccagaactattaaagccttgactagggcagacgcaaaacgggcgattgtcgaggcgctgtgttga

SEQ ID NO: 52343 - DNA, 252 bp, Acinetobacter baumannii
atgagcgagttttttttcaaggaaccactagccggtagtgcggccatagctgctgttatttgtctaattctcaggatatacataggtcgaaaacagatggatccgcttaaaccaaaacaatctgaacctgagtgggcggaaatgttaaataaaaatatgggagataaacagcaacgcaaagaaactttctggcgcaatgctgttatcttttttgtgttgctggggattgttctgcatttttttgggaaatga

SEQ ID NO: 52344 - DNA, 279 bp, Acinetobacter baumannii
atgaaaaaacgaatacttcatctgccagtaaaaaagatttattttgatcagattaagtctggaaagaaattagatgagtatcgcctcgttaccgagtattggaagaagaggcttgaaggtcgtgactatgatgaagtccatgttaagtgtggttatccaaagactggggatgtgtccagaatagaagttaggccttggcgaggtttttctaatattgttattacgcatcctcactttgggtctgccccggttgaagtattcgcaattcatgtgaattag

SEQ ID NO: 52345 - DNA, 618 bp, Acinetobacter baumannii
atgctttttgataaaaatgtagaatgtcactcgttcgtaatgggagccagtggtaagggtaagtctgtcttctccgaacaagtacggaagaatgcgagactacgcggagatctgctggtggatactgatatgctccgggaagggcgggggttgagaccatacgagcatgagtacgctcgccgcttagttctggggctaagtggacccttgccgcgtgaactgcgtgggaagctggtgacgcttatctctgatgtatccaggcctaagaaggtaaaacgtcagtcaaatcaatttgttaagactgcgaatggagtcgcccttgaccgccaattggtggctgatgcaagagaacagttggaaatgcaaacaggcatctggctcaaacagccggagctcatcgcgctgatggaagaatctggcatagatgaaacattggccgagtttggtgaggctgagacgcagatcagagaaatgttggcggatgcgttggctatgaaactggtgggccgctcctggcctatgtgtggcgctctttgtaatgcagcagataagtccaacgtcagtttctccgccgaacttgatgttgctgccaaaaaagctggatacatggttcgttaa

SEQ ID NO: 52346 - DNA, 318 bp, Acinetobacter baumannii
atgaccgacaagacaaccgacacaaccaagaatcgccgaacctttgatccagcgttcaagttacaggtggcgcgcatggtgcgcgagcaaggcgtcagcgtcagccaagtctgccgcgaaatgaagctgaccgaaagtgtggtccgacgctgggtacaccaactggatgacgagtcagccggcaggccggggattggtaaaccgttaacggctgagcagcaacgtattcgagaactggaagccgaagtcaggcgactaaaatcagacaatgaattattaaaaaaagcttcggccttcttcgcacgggaaataaagtga

SEQ ID NO: 52347 - DNA, 879 bp, Acinetobacter baumannii
gtgatccacgatgttgtcactgagttagcgaagcaggccccgatcaagcaggtctgtcaggcgttggacatcagtcgctctggttactacgcagcgcgtcgcagagtcaatacacccaaacctatttgccaggacagcgtgcatgctcaggcggtttttcttgccagtggtcgcacctatggcagtcgtcgtttgagtgcagccctgcgtgcccagggccatgatgttggacgtcatcgctgtcgtaccttgatgaaagcctgtggactcaaggcctgttggcgtcgcaagttcgctcataccaccgatagcaaacaccatttgccggtggcagagaacgtgctcaaccgtcagtttgagcctgaagcacccaatacggcctgggtgtgcgatgtgacgtacattcggaccgacagcggttggctatatctggccgctgtgctggatctgtattcacgtcgcatcgtgggttggtccatggcaccgaccatgcctgcacagctggtgtgcgatgcgttgagcatggctatttcggttcgccaaccggcaccgggtttattggttcattcggaccggggcagtcaatatgccagtgctgaacaccggcaattacttgaaaaccatggtctggtactcagcatgagccgcaagggtaattgctgggacaatgccgtgatggagcggttctttctgaatttgaaaatggagcgtgtctggcagactcggtatgccaaccatacagaagccaaacaagacatcaccgactacatcgttaacttttataacagtacccgattgcattcaaaacttggctaccgatcacccgcacagtacgaaacgctggccagccctgccgcccagttgcccgcctgtgcataa

SEQ ID NO: 52348 - DNA, 675 bp, Acinetobacter baumannii
atggacgagaacaagctcaacattgagacggtcgatgggcacaacgagctggtagtcagcattctgtccagaatggtaggcctgagtgacgaggagaagcagacaatgttgtcctgccttccggacaccggcaaacaaacaatcacccaactctatgagacgctgcgttctcaagggcacctggagctggctgagaaaatcgaaccatgcgtccagcagggtgcctatgggccgatcttcgataacgctaacgcgaaggtgttcgttcgggacgaagcgccttttttctgtatggatgaaaatccgctgagctggaatgacgctaaagcaatccatcgcttacggatgagcgtgacatgtgtctcaggggcaggcggctggatcatcggtgagcgctttgatgaccgctttgataccgaagtaggcggaacacagcttatcgtcacccagtcgctcaatgaaaaaggtgagatcgaaggcggccttccctcctcgatgtcgctgaatggccttgccgcgttccctaaacggccaaggactcctcaaatcgtcgattaccaagaagacaagcgatacacgcttgaggaagcggaggctatccctgagctcgctccagttgttcagcggctgaaagagcgtgttgcagagtatgaagagagacgcgcccatgattga

SEQ ID NO: 52349 - DNA, 450 bp, Acinetobacter baumannii
atgagtttaagttttatagcaagagtcttgcgccaattggcaattatgtttgtcttcaccgtgctggtgggggccggttttatctactatgtcggtaaacagcatcagcaggcagcaattgacttttggggggagcaataccagcctgatgccatctctacccaaattgattgggggtttatcggtaacttggttattcctcgcggggggccaattatttctccgagcattgctggagtgtgccctaatacaccacttcccgtagtgcctcttaaaatcggtcctgatggccggagctacgttctttgcggcattggaagtgaggccgtagctaccagctttgatgtcaatgccatcgaagatgaagagatgcggaaaacattaagaacgatgtttgaggaagaattagagaacggcgttaagggggatagatggacgtccaagagctga

SEQ ID NO: 52350 - DNA, 369 bp, Acinetobacter baumannii
gtggaacacacagaaggcacttgggtcgtcaacgaaaagcaccctgctcgtagcaacgacgctgaggttatcatcgagcagaagggggggagcgcccctatcgcgatctgcccacctatttatggtagccagcagaaagctaacgcccggcgcatcgtggtctgtcagaaaatctgccgaggttactcgacagatgaactcgaacagagagggctcgttgccctcgtcggtgacgagctgctgaaacaggaaggattgctcaagagcatcagggagagaatccgcgactggtcttcgatgaccccagcggacatgaaagccgctctgtctgacattgaggacgagatctccgcagccgaactgctgtga

SEQ ID NO: 52351 - DNA, 237 bp, Acinetobacter baumannii
atggaaatcaaagcaaccgctctgatcatgtccctatgtgacgagatgtttgagcgtaaatcaggatatggtggtcgcaattggccgccgcactggaagaagaaaacccgcgaaaagttggtagctgctggactggttgaatcaaagggtcatgagcccaaggtcggggaggtttactacttcactgaggttggtttgtcctggtatttggggctgcggccagagcgtaaacgttag

SEQ ID NO: 52352 - DNA, 231 bp, Acinetobacter baumannii
atgacgaaacgttgctttacctatggctcggatggcggccttgaaaccttcgccaccgagatcgccgctcgttttgagcgtctgacccctgcgcagcaggagcaggcccgccagctattcgaggatgcccaccctggggatgggtatcgctaccagaactacaacgatcaccgggtagacccggatggtcagataatcgtccggcatatcgtcggcaacgcccactactga

SEQ ID NO: 52353 - DNA, 393 bp, Acinetobacter baumannii
atgactccagatagagaaagcaggcttgaggctgccctcgcggcgctgctggcagaggtagtgaacatgcgggaagactaccccgccgaagcgtggcgctttagcgacgaggctatcgccaatgctgaatctgcgatggagctacctcagtcggtggcgaatagagcctcaatcttggggacggtcgagtttagttacagtgacagcgatacaaagtgcgcttgttgccctgatggtcgccatgcctatggccgatgcgttcgcctggatgattgggagagccctgcgccagcacatttacctcgtgatccagaccgcttcgttcgtgacttcgcggccaagcatgagtacgtagggaagcgcgtaaaaatcagcgttgaaattctggactga

SEQ ID NO: 52354 - DNA, 198 bp, Acinetobacter baumannii
atggggcaccgtactgttgaggatgccatccagttgctgaaagggggaaccattgttgctgtcgtacctgcctcatctgggccagatatgctggtggtttcctctatcaggcttgaatccggactgacagtacatttttcccctccagcggcagcaagtgtcagtgttcagctcgcagagatcgatgatgaacagtga

SEQ ID NO: 52355 - DNA, 480 bp, Acinetobacter baumannii
atgatagcccagcgtgttggccgctcggctgagcacgttcgtatcgcccgtgcccttctggagatgcctctggaactgaaacggatgattcaggaaggttctgtggctgccacctacgctcaggagctctacaacgagcatggcaccaatgctgttgagatcctgaaaagggcgaaggaagaacaggacaatggtaatgaaggcaagaagatcccgaaaaaactgaccaaaaagtctgtcgagaaaggtccacgtctgggtaaaaaagtggttgaagccatgcaccggggcgtgagctctatcaccagtcgcctggacaacatcaagccgaacgatgacggtgaaaccttcacccttaccctgagcagggaagatgtcgatgcgttccaagagctgaaagccaagctggctgaactggagcccaaggcccaagagaccaatgaagaccagcaagagctggatctggcgggtaatcagtaa

SEQ ID NO: 52356 - DNA, 906 bp, Acinetobacter baumannii
atgtgcgaactcgatattttacacgactctctttaccaattctgccccgaattacacttaaaacgactcaacagcttaacgttggcttgccacgccttacttgactgtaaaactctcactcttaccgaacttggccgtaacctgccaaccaaagcgagaacaaaacataacatcaaacgaatcgaccgattgttaggtaatcgtcacctccacaaagagcgactcgctgtataccgttggcatgctagctttatctgttcgggcaatacgatgcccattgtacttgttgactggtctgatatccgtgagcaaaaacggcttatggtattgcgagcttcagtcgcactacacggtcgttctgttactctttatgagaaagcgttcccgctttcagagcaatgttcaaagaaagctcatgaccaatttctagccgaccttgcgagcattctaccgagtaacaccacaccgctcattgtcagtgatgctggctttaaagtgccatggtataaatccgttgagaagctgggttggtactggttaagtcgagtaagaggaaaagtacaatatgcagacctaggagcggaaaactggaaacctatcagcaacttacatgatatgtcatctagtcactcaaagactttaggctataagaggctgactaaaagcaatccaatctcatgccaaattctattgtataaatctcgctctaaaggccgaaaaaatcagcgctcgacacggactcattgtcaccacccgtcacctaaaatctactcagcgtcggcaaaggagccatggattctagcaactaacttacctgttgaaattcgaacacccaaacaacttgttaatatctattcgaagcgaatgcagattgaagaaaccttccgagggcactgttgcaaatag

SEQ ID NO: 52357 - DNA, 765 bp, Acinetobacter baumannii
atgactccacaacaaattgaactcgttaaatctactgtacctgtattgcgtgaacatggtgttactctaactacatacttctataagcgtatgttgaataacaacccagaattaaaaaatgtttttaatcttgatgatcagaccagcctgcgccaacctcgtgctcttgcagcagctgtactcgcgtatgctgaaaatattgagaatcctacggtgcttgccaaagcggttgaacgtattaccactaaacacgtgagcttagatattcaaccagatcaatatgcaattgtgggcgacaacttgcttcattcaattagtgaagttttaaatgttccatttgaatcagaactcattgaagcgtggaaacaagcttatttacagttggcagatatcttaattggtgttgaaaaacaaaaatatgaacaacttgaaagcttgaaaggtggatgggctggctggcgttcatttgaaattacgcaaattgacccacttgagtctggcaaacgctttactttaaaggcaactgatcatgaagatgtactcaccagcccagcaaatgcttttatttctgtaaaggttcaagtacctaaccaacagcttgaacaaccaaaagcatttaagttcacagaggctcaagaggacaatacttatcattttgatgttcaaccagaagaagaccatacagagttctctgtttcaaacattttgcttgagcactatagagttggtgatcaagtacaagtttcagctcctttaacgctgtaa

SEQ ID NO: 52358 - DNA, 213 bp, Acinetobacter baumannii
atgaatatcgccgttgatacattaaaagcatctactcgtggtgcacattggtttaaagcactcacacagggctttaaaacagttgaaggttttccaacttcgatttgggtggctgatggtcagcttgaccagcaagcggtacgtgtgattgccgttgttcaagacagcaataatctgttccctcgggcaaaacaagggaagttggattattag

SEQ ID NO: 52359 - DNA, 300 bp, Acinetobacter baumannii
atggctggtgatttaccacctaactcaagtgtaacaggtgttaagttttcagctgctgctcgcatgacgactttgccaatcgctggcgagccagtaaagacaatatggttaaatggtaaagaggtaaatcttgctgggtctgtaatttcttcaccaaaaaccgccacttcatcttcattaaagacttcagcaagcatgcgtcttagcattgcattggtattcggtgtaatttcagggagtttaatcatgactcgattgcccgcagccaaagctgcaatgagcgggccaagtgctaaataa

SEQ ID NO: 52360 - DNA, 1179 bp, Acinetobacter baumannii
atgggctatatcacgacacttaaatcaaagtctaaaggcactagatataaggccgtaatcaatgttcggaaagcaaaggaagggattaattactttgacaccgaaactttcagcaccaaatcattagcagaaaaatggttgaaggaccaagagcgcaaattagaaaagaatcctgagcttttgtcaatcaaacccggtcaagtatccgaatcaatgacttttggtgcagccatacaaaagtatatggaagaagtgacaaactatggccgatctaaaaagtttactcttgagatgcttcaaaaatttgatatagcacaaatcaacatttgctcattgaagcgtacgcattttggcgaccatgcccgccgccgtggagatggttatactaacgctttagtttctttggatcctgtaaaaccgcaaacggtaaattttgaccttcaatgcatgaagtcggttctagattatgctgagtttgtctggggattgcccattgagtcaattgagtttgaaaaagctattaaagggcttagaaaggctaggatggttggtgattctgatgagcgcgatagattgccaacagatgaagaacttcagcgaatcacgacaatcagttatatggatttttacttaagcgaaaatcctaatactccaatatttttaatcatgtggttagctatttacacatctagacgcttaaatgaaattgtccgtttaaaaatagataactatgatcgagaaaataagaaatggttcgttgaaggaattaaacacccggatggctcttatgggaatgacaagtggttcattgttgatgagagagcagaaaaagtaattgatatgcttcttgatccagttatgagaaaaaggatgcttgcgcgtggtggtgatccagaaatgctcataccttgttcaagaaaaggacttgctgataattggcgcaagtatcgggataaagcaggtgttgtagatttaaagtttcatgaccttcgccatgaggctgcaactagacttgcagaaggtggggcaagtattgcaaccatcatgcaatacaccttacacgatgatttgaatagccttaaacgctatatcaatcttgatattatccgtaaaaaaccgcttgaatttcctgaagctttaaagacagctcaaaatgcaaaattaatagatatattataa

SEQ ID NO: 52361 - DNA, 282 bp, Acinetobacter baumannii
atgaaacaaaatgcaaaatctcctttgaataccgctactcttttggctctacagtaccaatcaccagtagttaagctagaggatctgatagatgattacttgcctcatttatcgctaccagtagctaagaaaatggcaagagaacaaaagttaccttttccagtttttaagtctggtgaatcaaacaaagctccatggatggtaagtatttttgatttagcgacttatattgataaacaaagatccattgcctcacatgatcacacggcaatgtctggataa

SEQ ID NO: 52362 - DNA, 372 bp, Acinetobacter baumannii
atgaataaacatggaaataattttgatcgtgaagcttttgacacttggcactttaaagactggaacgacaactgcggaaatgagctagatgaagtggaagcaagacacttatataaccgtgtctatagcagtccagcaaatagtagagagcgcgaacgtagttttatagcttggcaagcagctacagaacaggtaaacaagaaacttgatggctgcatattggtaccgatcacaaatgaagtggtcatggttattgagaatgtaatacagcagcaatgtgatgccagtggagtacaagagccacttcaccgattagacggatggcgggttcttgaggaaatctctgattcattgaaggtaggtagcaaatga

SEQ ID NO: 52363 - DNA, 561 bp, Acinetobacter baumannii
atgaaaaagaatattactcgtgaaaatgtaaactcatttgaaagcaatgttgaggatgtggttgcttatctgacagatctattaactactggcgaagagccaactgtatttgaaacttttgcaatgggatggattggcactatcagcccgcgctttgaaaagttatttaatgaggcgaaaattactcacacaaaacgcccaacattccctgctgaattctcagcagcaatggaagagtatgaggcactcattaaaaccaaaggagaagactcagaagaggccagaaatcaatttatgaaagcaatgcttttagctcctgattggtttaatgacatggctagagataaggctaaagaaatgggcttattgcctaatgcagtttattgtcttgaagacggaactcaagtttttacgcctgagcaggtagcagagcatctgggcgtgccagttgaggatgtcattaaaagcattgaagaaatgaaatccttgcaagaggagcatgggttgaaaggatctgaacgcctaattatcgatccatctaaccttcagaagattcattga

SEQ ID NO: 52364 - DNA, 237 bp, Acinetobacter baumannii
atgacggacggcgttaattacgccgacctctctagggaggtgctttttaaggcgtttttattgtggcttacaaagattgggtatcgcggaattgttagaccatgtgggcgtatggagttttattgcgccacagtcagcaaactttttccaagaaatgtgcatatcacatatgacggaaaaatgaataaagcagcgactcaactttataaagaatttgaaaatcatttaaaggcgtaa

SEQ ID NO: 52365 - DNA, 273 bp, Acinetobacter baumannii
atggataatttacaagttgacttggtcgacctatttgatgcggtttgcttagcaaaaaatgatcttgattggactttatacacccttcacgaaatcaaggaaaaagtaaaagccttaaagcaagaagctgctaagcatggtgtgcatgaggatcactttcgcagcttagagcaattcactgaaattcttgagtacacaatgacacttcgatctaatcactgggaaggtgaggaaatgcgtattaaaaaacaattagatggtaatggggaataa

SEQ ID NO: 52366 - DNA, 453 bp, Acinetobacter baumannii
atgggtcgaattatgaaccaaatcacagatattagtcaacaaaaagttgattggcatgagttttgtaatttcacatttgaaattcaatgtcaccttagccagattggtgcatttgctttgcaagcctctagtgttgcagatcatgaaaatcatgattcagcaagaaaaagtgctcaatcaatttttaagttggctcagtacctcttaactaaaatcttcacaattcttgaaatcttggagccgattttcaaacatgaccttcttaacaagttcagtaactctatgacagatgtctctgttgcctttgatgctgtgtctgaaacagatatgactgcaaagtatcaatgtgagtttttttatggaatgtttcacgtcatcaaagaactcgaaaaggaactggatgcagtggaaatcgaagctgagcaacaattcaaggggaagatcaatggataa

SEQ ID NO: 52367 - DNA, 705 bp, Acinetobacter baumannii
atggaactcaaagatcgattaaaattagctcgtaaaaatgcgcatatgactcaaaaggatttgtctatcaaagctggagtaagtcaggcgactattagtcaacttgagtccgggttaatgaattcatcaacccatcttccagctattgctaaagcattagatgtagatgctttttggctccagacaggaaaagaagactcaaaacaagaaactttatccagattattgattcccgttgacacttgggatgaagagacacctttaaatcttgatgaagtagaaattgctttttataaaaatttgcgtcttgcctgtgggaatggaactattgcagaagtacgtgaacaggataaaagtgttttgagagtgccaagacaacttgttgataaactaggggtttacagagacaaggctttttcagcacttgctgaagatgattcaatgaaaccaacaattaatgacggcgatattgtctttgttgatgaaaatagaaactatataaaagatggaaaagtatttgctattgagcatggcgggctattcagatgtaagcgcctatataacctaccagatggtggagtaaggattgtaagtgacaataaagaagaatatggtgaagagcgactcactaaagaacagattattgctcaaggttttagagttattgggtggatatggaaaattgacagaatagaaatctggtaa

SEQ ID NO: 52368 - DNA, 234 bp, Acinetobacter baumannii
atggagaaaaatattttccaacaacttgctgaccattttggctcacaagaggcggctggtaaggcaattggcgtttctcaatgcactatgagtggttatatcaataagcgttgggggatgtctgaaacggtagccatgagagcgcaaagagtgactaagggtaagtttaaggcttctgacttatgcccttcattaaaagagtttgatgaggaagatgcatcaagcccaaattaa

SEQ ID NO: 52369 - DNA, 249 bp, Acinetobacter baumannii
atgaccttaagtggtgttatcaaaatgagcaatgattcaaatttgcaagatgtggtgcttaagctaatagagcagacaaacaagcttatagaccataacaataagttgactgaacaaaacaataagcttatcgaacagaatagcttaatcattcaaatcaatgctgaacagtctgcacaactatcagaagtcttggcaatgtttgaagatgatgaaccagcgacaaagtctaaatcattggatgggtga

SEQ ID NO: 52370 - DNA, 294 bp, Acinetobacter baumannii
atgattccaaagaacattattaataatcgattgggtttttatggattgggtgatgagtctaaacaacctcacattgtacttgagctcgaaaccccggaagttttgcgtaaacaattggagctccgtttagttaagttggtccaagagtatcaacataaaggtttagatattgattggatatccattgacctacttaatggtgtagatgcgcgagtaaacttaaatgaaactccaaacattcaagaacaagttgcagacgctacaggcacccgcacaaagccagaagaactctaa

SEQ ID NO: 52371 - DNA, 477 bp, Acinetobacter baumannii
atggctaatgttaaaactcaaggtacacaggcatatgctgtcattgatggacaagtatatcgctttgtctgtgtgaaaaaaattggattcggtcaagactcatttgggaaaattgatgtgacttgcctagaggatgaatcaaaaaaatatttgcgaggtatacgtgatccgggtgaaggctcatttgacattgattatgacgatgaaaacgcaagtcatgacaaactcgctgaattagcagaaacaggtattgaattggattggtatattggttcaagccactctaaaacacctccaacttataatgccacaactaaagaaattgatctgccagatgatcgtatgtggctatcgtttaaaggttatgtgaatgatgcagccccgaacgatattgaagttgatgcagcgcttggttattcatataccttagtccgaacttcaaaagtgactaagactaaacgtacggtgacttcataa

SEQ ID NO: 52372 - DNA, 207 bp, Acinetobacter baumannii
atggaatggagagcctatcgtcaaaaatatggctctcttttcttcggtcgccgtttagagcaaagctttggtagctggatggctctctacacaggctttaaagtgagagagggcactaaagtggatccttatatttatatgcctcatgagcaaccacctgaagaagagtcagttttcgattctcttgaaaaaattgccagtgattaa

SEQ ID NO: 52373 - DNA, 3684 bp, Acinetobacter baumannii
atggctacaaattcacttggcagattaactttggacttggttgttcagactgcaagcttttccgagccattaagcaaagctgaacgacaagcacgagcatcaagtcaagggattgccaattctttaaatattgcggctatagctgttagtgctttaggtggagcagtgtctggtctttcagtggctcagcttgttaattttagtgatcaagttattcagactggaaatgatattcaaaagttttcaaaacttgcgaatgcttcagtgcgtgaatttcagtattacgccaaaggggcagaaactgctggaatttcaatggaatctttcgcagataaaatgaaagatatgcaagatcgaattggcgattttcagcagacaggtggtggaccattagccgacttttttgagaatattgcaccacgtgttggtgttacaattcaacaatttcaaaagctgtctggcccagaagcgcttcaattattttataactcattagaaaaagctggtgcttcaactaatgacatgaagttttacatggaagcgattatttctgattcttctttgttaattccactattagaaaaaggtggtaaaggttttaaagaatggggcgatgcagctgaaaaagctggcgcaattatgactgatgaattggccgcgaatctttcggaagctaaaaaacagttaatgctgatggatttacaatggcagggcttagaaaatcgactaataaataatgtagttccagcagtcaaaatggttattgataattggggcgaaataaaagccattgcgattgctgtttctgctggtatagcaacccgatttgttccggctttagttcttgcatcttatcaacttggtcaaacggcattatttgccgctcgtgctggtataggtctttatagtttttctaaatcggcaggtgtagctagaagtgctatagctttacttggtggtcccgctggattggcaatgttagcaacacaaattgctgtagctggtggtgcatattatctaatgactcaacagactaaggatgctacagaggctctgagtgaccaaggtcttacaattgatgagttaaaggaaaaatataaaagctttaccgcagcacagttagctataaaaggtattgaggcaagtgaggaggttgaaaaacaaaccaaagaactaaaaagtctttttacagctttagaacaatttgagaacgacttgaaagttcaaggtgatattaagcaatttacagcgattcaagcgtaccttgctagcttaaaacaaggtggggatgaagctaagaatgcttttgctcagctacaaaagcaaggcttggttagtgagagtacacttaagtttgttgctgaattagatacaaaaattaatgctgctaataacactatagatcgtcaaaaagagatccaaaaattagttaaagatgccaccaatgatgcaacaaaggcacagcaagaccaagcaaaagccttaaacatttcaacggaggcatataagaatttaactaaagctcaacgagattacattacccaagctaaacaagatgtacttagggaagggtatataaagacacttgtaagagagggggtaagtgtagataaagcgaatgtttatgcagatgcacaagtcgcaacaaatggagaaaatgcttttaaagcaccattgtcaaaggatgtgctacttgctgcccgcgagaacttcaatctaaaaaactatacttttgggaaagctgagttagaggcaattgctcgtgcgcaaggtattgctaaggcaaataattttgctcagattgaaagtttgtatggtttgcctgctggaacattagcagccttgattcttcaagagtctggagctaatgccggggcaagaagccataccggggcaataggtcttttccaaacaacgagtgtgtttagaaagcaatatagacttaatgccaaaagttctactgaagaaattgcaacagcagcagctaaagacttgcaaaaacactaccaagaatttggtgatcgtgcaaaagccttaatggcctacaatgcaggtgcagatggcttaagaacctatttgaaaggtggtctatcagatagcaagcgcaaagaggttgctggttatgtaccgggtttccagaaatggtttgcaggtgtgaatggtaaatcaagtgttgataattcaattttaatgcctacacaggcagatcaacttgaattaatcaacaaagctgccgagtctcaacaggctattgatgatgcaagaaaagaagttaacgcacggtattacactgaagctcaacgatttgcaagggagcatcaagataatattgataaggtcacacttgcgtacgctggtacaccacagttaaaagaaaagcttgctcaagaggatgcattatatgctgcgcaaatcgcaaaacttgagtccgataaaaaggaagagtataaccaatactttgcttttgaaactgatcgaatcaagcagattgaacaaaactttgatcgacaaaaagagttaattgacactaatgccgaatatgagtacgggaaatcgaaaaaagctttagagattaaagctgctcttgagcgtcaaaaacaagttgaaattgctgccgtaaaacgcgaagaagatgcacaaattcagtcggcgtttgagggttatctaaaccagaccgaaattgttgtgaagcgttaccaacgtgaacgtgaagaaatacttcaaacttatagtttaagtaaacgtgttcgcgaagagttggcaaaatctaaggattatgcaatttttgaaactttaaaccaagcctctgacagcgtgtttcaatctgggttaatctcgagacaatctatgttggaacgagaggacccgataaatgctcaaaaatgggctttacaaaatcaatattcatctgattttagtagcttgaatcaatcatataatgatgaagtgtctggcattaaattgattgaaaatgagagtgagcgtaacgctcaattgttggctgctcgtgaacagtttttgaaagcaaaagcagacttagataaaaagtatgctcaagatgaaatggatctaaataggtcactttacgactcacaattaagtcaattaagcagtttaacgggtcaattatctagttattggtctaatatgacaggcattgttaaagatgcagcaggcgaacagtctggcatctataaggcaatgtatcttgctcaacagtcatttgcaattgcttctgccactattaatgcttttcaggcatacaaccagattcttgcaagcccatggtatcttgatgtgattagcaagcagacggctgccactttggtgctaggcatgggtatggcaaatgtcggaatgattgcaggtcagactattgcaggtatggctcataacggtatagacaatatcccgcgtgaaggtacatggcttttagatggtggtgaacgtgtactaaaccctcaacagaacaaagatttgacgaattatttaaataatcgtcaaaacgggtctagtgagggcaatgtgcaaatcagtcaacagattacgtttgctgatggatccgcaagcgtcaacacacaagggcaaaagcaaattgctgaatctctgaataatgcaatggatgcttgggctagacgagaaagtcgtcaaggtggggtcttgtttaatcttgtgagacgttaa

SEQ ID NO: 52374 - DNA, 2106 bp, Acinetobacter baumannii
atgccaggcgaagaggtcagccaagccaagcaacagctcaaattaattatcgacccttacttatcggtaagtgaagtcgaaaaagtgcttgctgcctgcgattttggagatctggcacacactggtattacccgtaaaagtggtgaaccttatattctgcatcctatcgcggttagctgtattttagcgaatatgcgcctggatcctgaaacattaatggctgcacttttacatgatgtcattgaagacactcaatatacaaaagacgatattattgagcgatttggacaaacagttgcagagcttgttgatggcgtaaccaaactaagccagtcgagcgataaagaatataataaagctgcttcttttagaaaaattctacaagctactttgcaagatccacgcgtcattattattaaactagctgatcgctaccataatatgaccacattgggcgccttacgtcccgataaacgtgctcgtattgctcaagaaacctttgatattttcgtaccgatggcaagattagtcggcatgaatgaaatggccgataaccttgaaaatttatgttatcaaaatcttgatttagatatgtttgataacgttcaaaatgcgttgcttcaaaccaaaccagagcgatgtaaataccaaagtatctgggaacaaaatcttgcggagcttctccacaattatcatattcaaggtcgaattaaaaagaaaaataataatattgagctcttacgccatttcgtaaaaaatgaaatggatttacaagaacttactcatagccatgcctttgaaatcgttttgcagtccattgcagactgcgaccgtttagtagcagccttaaaagaaaattttcaggtcatccaatatcaagatcatatccgccgaccattaccaggtggtaatcagtcattaatgatcaagcttaagggtgaaaaaaccacgttatcactcactattcaaactgagttgatgcgtaaagctgcacgtttcggtgtcgtactcggcgaaaatgctccacaaacttgccgctctgccattcaagcttccatgcagaacctaaatacactcattgatggtgaatgcgctaaaacgacttttaatgacttacttgattatttgcatcaagaaaaaatttgggtttacacaccacacggccagttacatgaattaccacaaggtgccacagtagttgattttgcctattcagctagtcttttcttaggcaaccatgcggtaggtgcgaaagttgatggtgaaattaagccactttctacaccattagttagtgggcaggttattgagattattactgacgttttagcaacgccaaatccagattggttgagcttcattaacactcaaaaagctcgccgtgctttacagcacgtactcaaagaccaagatattgaagaacaacgtttagttggtgcccaagcactttcacgagctttgaaactctttaatcgttctattaacgacctttcagatgcagattggttggatctcttacaatggcgtcatattgataataaagatgcattatttgagcaaattgctgttggagatttacttcctcaacttgtagctaaccatttatttgcaaatgacaagcatcctcgagcagaaaattcagatcgactaattcaaggaactgaaggcattgatgttaaatatgcccactgttgtaatcctattttaggcgatccaattcaaggccatttaacacgacgtggtttaattgtgcaccgtattcgttgtcataatttgcttcatgaacaacatttacacccagaaaacattatgccgcttcaatggaaagcagatgacgtagatgatgtacgttttactgcttaccttgcgatttatatggcaatgaatgatgaacaggtatcagacctcatctaccaatgtcgtaaaaataatgctggggtagaaatggtacattccaacgaacagcgtactttcgtcaatattgtagtaaacaaccgtaaacatattgcaaaagtcattcgtgatttacgaatgcactatggcttcccacgtattgagcgtctagacgcccctgctccacaaatggaaatttccaaagtcagctaa

SEQ ID NO: 52375 - DNA, 195 bp, Acinetobacter baumannii
atgcaagtcatgatcatggtttcggaagcggggagaatggagaatacttgcaatctacccgctgatttagataagaacggggatgttcttaaaatttatgactactcattaaaagagttgccgattaatttggacggcaccgtgacttacaatggcaaaagatggacctttgataagaagcaaaattacctctaa

SEQ ID NO: 52376 - DNA, 417 bp, Acinetobacter baumannii
atgaaaacttatcatgctactagcaatcaagaattaaaagaaatcatcaaaggtcatggtgattatgctggtattttcacttctgaaaacattgcacttacagctaatggtgactacggtgattacatctacactgtagagtttgattctatttgcgaaaaatcagacattgaagaatatttagaaaataatcctgagtttttagagaatcatccaaattttgttgttgattgtgatgatgctgaacaagatgacacttattttgaaaaccaaaagttacgcgccttaattgctatagaactaggttttgatgcagttgaagaaaatgacggctggctagttgttaatggcaaagttgattttttaggccatcgtaaaagtgaagtagttgaaactgagattgaggaaaactggtaa

SEQ ID NO: 52377 - DNA, 183 bp, Acinetobacter baumannii
atggcacaatcagcagcagaacgaaaaaaagcggaacgagacaagaaaaaagaacaaggaatgaaggctaaagaagtttggtttctgccagaaacactaaagataattgaggactttagagaaaagaatgagtctcttacttttgaagatgcagtaaatgaaataataaaaggctctaaatag

SEQ ID NO: 52378 - DNA, 396 bp, Acinetobacter baumannii
atggaaccagtttctacaagcggtttaacagcaattttaaaattttatggtgcagcaattatggtgactctagctgtcgcattggttgccgccgttgtattgatgacacgtatgccgcgctcacctcaagagtgggctgtaggcttgatctgtactgttgtatcaagtcttgctggcggctcattcattattgtgaagtgggggcttcatgaatgggttactgatgtatgggggatgattgcacttggtggattcttctttgtatgtggattacccggttgggctttggtccgttggatttttaatttcatagataaacaggaagggaaaacgattgttgaagtgattaaagaaattaagaaggctaagaatgatattacaggtggtggaccatga

SEQ ID NO: 52379 - DNA, 858 bp, Acinetobacter baumannii
atgagacaggcctctccaaaacttatagccttgttagatgctgatcagttcatcatggccgatctttatactattacgaccatacaaggtattgagtatcgctataccaactatgacgttcatttgacggtgcaaggcaaagagtttcgtgctgatggaccaatcataagtcgagaaggaataagcctttccttgggtattgaagttgataatctctctatcaaaatagaaaccaatgaaagtactaaatttggtgacgtacctgtagctcaggcatttcataacggcgttttagatggtgctcgtttcaagcttgaacgtatttttatggatataaatactcctactgatacgagtgccggcacgttagttttatttgaaggtcgcattgttgagccggaactcgatcgttatgaaattaacgctagcgtggtttcagaagtggatgacttaaaacttcagatgccaaggaacttatacacaccaggttgtttaaatactttgtttgatagtgcgtgtggactatttagtgctgattttgccgtgaatacgactatcgggccgaatagtacacctagccgcatcctttgtgacttaagtcagccgcaggggtggtttacacagggggttgtagaattcttggaaggtgcaaacattggtattaagcgtacagtccgtttgcatgaatcgggcgcaatgcttctaactctaccacttctcgacatgccagcaattggtgaagctattcgggtttatccgggttgtgataaacgtctcgatacttgtactaaccgttttaacaaccgtgctcgctttcgaggcgcgccgtttgttccagttccagaaacttctatttaa

SEQ ID NO: 52380 - DNA, 1548 bp, Acinetobacter baumannii
atgggtacaccgattgttattgcaaaaaatattaacaacacatcaaaagaaattgttttactttcccaatttgccaaccggcacggcctgattgcaggtgcgaccggtacaggtaaaacagtcaccctaaaggtgctcgcagagagtttttctcgaatcggcgttcccgtctttcttgccgacgcaaaaggtgatgtttcaagcctcgcaaaagctggtgaagcttcggataaatttaatgaacgcttaaagcttttacagatcgacagtgttccatttgcagccaatccagttgttttctgggatttatttggtcagcaaggccaccctattcgaaccactatttctgaaattggaccaattttattagcacgtatactcaacttaaatgacacccaagaaggtgttttatctgccgtattccgtattgcagacgaccaagggttacttctggtcgactttaaagatttaaaagccatgatcacttttgtaagtgaacatgcagctgagtttaaagccgaatatggcaacttatctccagccagcttaggcgctattcaacgtaatctccttgctcttgccgaccaaggtggagaacagtttttcggagagccagctttaaatattctggactttatacaaaccgacgcaaatgggcatggttatatcaatattcttgcggctgacaagctcatgaatacacctaagctatatgctactttcctgttatggatgctttcagaattatttgaacagcttccagaagttggtgatatggataaacctaaactcgtgtttttctttgatgaagctcacctgttattcgacaacgccagtcaagctttacaagaaaaaattgaacaagttgtacgtttaattcgttctaaaggtgtgggaatttattttattacccaaaacccgctcgacttaccagaaagtgttttagggcaactcggcaaccgtgtacaacatgctttacgtgcctttactcctaaagatcaaaaagcagtaaaaacagcagcagacacattccgctctaatcccgattttaaagtagatgaagcaattaccgagctcggtgtaggtgaagcactgattagttgtctagatgaacaaggtacacctcaaattgtagaacgtggttgggttatgcctccttactcttcatttacgcctatcactccagaagagcgtcagaccttaatttcgcaaagtattattgccggggtttatgaacaagctgtagatcgtgatagtgcctatgaaatgctccaaaacaaagtggctgaacgggaacagcaaaaacaagatgcagaactcgcaaaacagcaagcgaaagaacaggaaaccttagcgaaacaacaagccaaagaacaagagcgtctagcacgtgaacagcaaaaagaagaggaacgtgcggcgcgtgaaagagctaaacttactcaagatattgtcggaacttttgcaaaaagtgctgctcgcagcttaggtggtagtactggccaaaaattagtacgggggctactcggctcattatttggaaaataa

SEQ ID NO: 52381 - DNA, 237 bp, Acinetobacter baumannii
atgataagacccatacctttttgtccatcattagaaccatgtgcaaaactcacacctgtacaggtaaagataagaattgcacgaatgattgctggtggtggcttattcccttcaggtggctggaataattctaattggcgtttgaaaatagttttaaccaacaagaatacaattgccgcaaaagcaaaaccaattaaaggagaaaataataatgccttacctactttaatcacctga

SEQ ID NO: 52382 - DNA, 1047 bp, Acinetobacter baumannii
atggattacaagtattatgtttatgtacatgaaacattatcaggtaaagtattttatgttggcaagggatgtggttatagagcgtggcgtaaaggtcgagatttaaattgggatttttatgttgaaaaatatctaaataatcaatacaacattagaatcgtacttgatcaattatcagaaacccaggcattagaagaagaggaaaagctattttcaaaatatggcgatcagttggttaatcgtcaaaatatgagccgaagcttaaatatggaagctttaagtcaccgaaatgagattgagtccaagttaaagaaagctgagttagatgctgagttagcgacggaggtgaatgaaaaagcggatctatttatagaagcgttgaagtatcataaattatttgcaaacactattattgaaaatggtttactggctgagcttcttgctctacgccctctgggttctatccaactattagataaagcagtccgagcattggttgctgctaatagacaagaacaggctcaaattgtttttgaccaatattttgttgactatcctcatgaaaaagaactgactaaggttactttaattgccaaagtcattgagcgtggaacagtacgattaacagagcaacaagattttgtaccgcccgaacccctgccactaggatggcaatacgccaaagagcgaaatgagcaagtcttacgtttagatcacaagatgtacgaaacagataaatcagaaaattatgatctagatgtacttaaaaatctgatggatcaggatatgtcggctgcaatgctgtatgtgaaaaagtggattgttcaggatgaaagagttagacgcaaagatcctttggataatgcattatggttgtattcagaagcacgtaaaattgccaataagcagaagaatctgcttgaggagtgtttatttcaacaacgattgactaatttgcttaaggggcgaaataaacattatgaaaagaatttaataacattaagaaaacttgcagcaaaactttccaagcaaaaaatggtgaaatga

SEQ ID NO: 52383 - DNA, 420 bp, Acinetobacter baumannii
atgaagattgtcaaacagcgtaagagtcaaggcattcaagataaggaagggaagcctaacacaccattaccagacaattatcaggctttagagcaaggcacaaaaaatagagaacaattaacagggtatcctcttgaaggtgaattgtttgaattctctccagatattgccgagtatttaaagagccatttatttggagatattttttcaagagatgcggtgagttggcaggatcgtgagatcgcaacgattagtatgctgtcagtaatgactggaacggatggacaattaaaatcccatatacagatgtgtttgaatctgggtatctcatctgaaaagttagtggaagtaaaaactgttttaacagagtttgtgtctaaagaatcgggcaataaactcaatcagtttttaagtcattaa

SEQ ID NO: 52384 - DNA, 1191 bp, Acinetobacter baumannii
atgatgaagaccttaaattttttatcaaatccattatcattttttgtagcaagcctttcattagtcgcagtatttattacagcaggcgcacctattccattatttaatatctaccagatggattatggtattactaattcagatctgggtatgatttcagttgcctattttgtatcagcagcgatctctcttctaattttaggacgtttatctaattattggggaagaaaacttttatctctcatctcactatttgctgcattattgtcatgcttattactttttagtattcatacattttgggcaatttttgacgcaagaatattgcaaggattagcctgtgggataggtgcaagtactttaacagcttatgtcgttgatacatcccctgcaaaactccgttggttagcgacagtgatcaccagtagtgcaccgatgattggcataccgctaggagccattggttgtggatttcttatcttagctggaactgaaactagatttatgatgtatgaaattatatcaatacttcttgttgttttgattggtcttacttttatcagtacagaaacagttgtatttaagaaaggtgctatacgatctctagttcctcaactctatattccaaagcattctgttaaacttctcgttgagttaatgattgctagtgctatttttattgctacgtggtctttacagggtttctatcaagcttatggcccagcgattgctcataattatttacataccgataatccgatacttgctgcattggtttttgctgctgtaatgattcttacccctctgggtagcccattaagtagatttttctcttcaacaaattctataaagatgggaatgtctctatttattatagcgttgcttgcaatactcttgtgtttatataaaggtctcattgttgcgttcattattgctagtttatgtgtaggtattgcacaaggtttatctgttacaggggctatgggaaatttacttaaggatactgagcagcaacatcgagcgggtttactggcaaccctctatctaatcgcctattgcggagccgctatacctgcattggttgcaagtcattttgctaaaaatgttgagttattgcatattggttatggctatggtgtcttaggtacatttgctgctatatgtgctttatatttggtggtaaaaaaataa

SEQ ID NO: 52385 - DNA, 768 bp, Acinetobacter baumannii
atgataatatctgatgaaaaatatactgttgaaacagtcctatctgtgaaacgctggacaaaagatctatttagtttcactttgactcgaccagcccatttccgttttactgctggtcaatttgcccgtatagggattcaggttagtgatgaactcatctttagagcatattctgtgatttcctcaccatttgaggatactctggaatttttttccattgttgtacctaatggtgcattcacctcaaacctacaaaaccttcaagttggcacacaaatttatttggaaaagataccttatggctttttaacattagcacgttatcagcaacctattccacaggacttatggctactggctactggtactggtgtcgcaccttttatttcaattttacaagattttgatacatggcaaaaatatcaaaccattattttggcatatagtgttcgctcacaagaagagattgcctatgcagagaaaatcaaaaggattccagagcttttttcagagggtaataccacattccattttctaccgattattactcgtgatccatctgctgagtttaatcagcgtttaccagaattaattacctctggaaaattagagcagtctgttcatctaaacctaaatatagaaactagccatgtcatgttatgtggtaatccacaaatgattgaggataccaaagaggtcttgaaatcgagaggtctagtgatgaatcgtcgtggtgtaggaaatattgctgtagaaaactattggtaa

SEQ ID NO: 52386 - DNA, 459 bp, Acinetobacter baumannii
atgcaagaggcagccaagaagtttaattttacatcctctatttataatctcgccaatttaggtcactcatttctaatagcccaatccccagatgatttagatattaaagctaaaactatcattcagcatatcgttgatgctgatattttaattatcggtgttccaacatggaatgctggctatccaggtaggttcaagcatctatttgatcttatcgctccagatgctttaattggtaagcctattattctttctgcgacaggtggctctgaacgtcataccctcatgatagattatcaattacgccctttacttaattactatcgaactattcctgttagcacatctatttatgcgacatcaaatgatgaaattgaaggatataccacttcatttctaaaagaacgtattcagcgagccattgaagagctggaaaagcttgtaccatattctacgtag

SEQ ID NO: 52387 - DNA, 1203 bp, Acinetobacter baumannii
atgctgaccgataccaagctgcgcaatctcaagcccagggacaaactctacaaagtgaatgaccgggaaggtctctatgtggcagtgactccagccggctccatctcgttccgttacaactactcaatcaacggtcggcaggagaccatcacctttgggcgttatggtgtcggtggcatcaccctggccgaagcccgcgagctgttgggtgacgccaagaagatggttgcggcgggcaagtcgccggccaaggagaaagcccgagacaaggcgcgggtgaaagatgcagagacgttcggtgcctgggcggagaagtggctgcgtggctaccagatggccgactccacccgcgatatgcgccgctcggtttatgagcgtgagctgaagccgaaattcagcaatcagaagctggtggagatcacccacgaagacttgcgggcgctggctgatgccattgttgagcgaggcgcaccggccaccgccgttcatgtgcgtgaaatcgtgttgcaggtatttcgctgggccatcgagcgtgggcagaaggtcgaaaacccggcagaactggtgcgcccaacaagcatcgctcgattcgagccacgtgaccgagcgttgacgccagaagaaattgggctgatgtaccagtacatggagcgagtgggcacaagcccaacaaaccgtgcggcggccaagctgttattgctgacgatggtgcgcaagagcgagctgaccaatgcgacctggagcgagatcaatttcagcgaagcgttgtggacgattccaaaggagcggatgaaacgccgtaacccgcacctggtatttctgtcccagcaggctctggatattttcattgccatgaaaacctttgccggtggttccgacttcgttttgccatcacggtacgactcggatgcgccgatgagcgctgccacacttaaccaggtgctgacgctgacttacaaggcggcgcagaaagatgggaagtcacttaccaagttcggaccgcatgatttgcggcgcacagccagcacgctgttgcatgaggccggctacaacaccgactggatcgagaagtgcctggcgcacgagcagaagggcgtgagggctgtctacaacaaggctgagtaccgcgagcagcgggcggcgatgttgcaggattgggccgatatgattgatgagtggacttcgggaggcagtaagggttga

SEQ ID NO: 52388 - DNA, 222 bp, Acinetobacter baumannii; identical to SEQ ID NO: 13641

SEQ ID NO: 52389 - DNA, 828 bp, Acinetobacter baumannii; identical to SEQ ID NO: 13642

SEQ ID NO: 52390 - DNA, 738 bp, Acinetobacter baumannii
atgcgtttcgtcggattcgaacctctcggggccgatgatatgcgtcttttgcaaggcatcgtggcccttggcggcccgaacggcatcttgctaaccccggaaccgaccagtgagacggggcgacagctacggctattccttgaaccccgtttcgaagccattgagcaagacggcttggtggttcgtgagagcctgaccaaactgctctcagaaacgggcatgacggatagcggcgacaacatcaaggcgctcaaagccagcctgctgcgcatgtcgaacgtcaccatccttgtgacgaagggacggcggcaagccgcgttccacctgatgagtcatgcttttgacgagacggacggcaggctatgggttgccctgaatccgcgtattgccgaagcgatcctggggcatcgtccatatgcccgtatcgacatggcggaagtgcgggtgctacagactgatccggcacggctgatgcaccaacggctatgcggctggatcgaccccggcaaatccgggcgcgtggaactggacacgctttgcggctatgtctggccagatgaagccaatgccgaagctatgaaaaaacgccgtcagactgcccggaaggcactggccgaacttgccgccgtgggttgggtagtgaacgaatacgccaagggaaaatgggagatcaagaggcctggccccacggcaactgcacccgtttaccgtcgtaacgttcccttgttaccgtcgtaa

SEQ ID NO: 52391 - DNA, 189 bp, Acinetobacter baumannii; identical to SEQ ID NO: 13644

SEQ ID NO: 52392 - DNA, 780 bp, Acinetobacter baumannii
atgaagtccaaaattttagcggctaaaaaaaccgctctagccgttgcactcgcaaccggctttatcaccactaccaccgcccctgtgcaagctggtatccccgtcatcgacggcggcaacctggcccagaacatcatgacggccatcgagtcggtggcgcagacgctcaagcagattgagcagtaccagacccagttgcagcagtacgaaaatcagctccagaacacgatggccccagccgcgtatatctgggatcaggcgcagactacgatcaaccggctgattgccgcgcaaaacacgctggcctattacgagaaccagctaggcagcctggatcgttacctggccaagtttcaggacgtggcctattaccgcagctcgccatgcttcaacggcagcggcggatgcacgccggccgaaaaggcagcgatggaagagaaccgccgcctggcgtcagagtcgcaaaagaaggccaacgatgccctgttccagaccgttgccgaccagcaaaaggctttgaaggatgacgcccgtaccctggagcggctgcaaggcgcggcccagggtgcaactggccagctacaggccatcggctacgccaaccagctcgccagccagcaggccaatcagctcttgcagattcgcaccatgttgaccgcccaacacaacgcggaggcagcccggattgcagcagaactcgatgccgaggcgcgaggtgatgccagggccgagcaaatgcgtacctggacgtttcgcccgagtccggcagacaactactag

SEQ ID NO: 52393 - DNA, 237 bp, Acinetobacter baumannii; identical to SEQ ID NO: 13646

SEQ ID NO: 52394 - DNA, 1428 bp, Acinetobacter baumannii; identical to SEQ ID NO: 13647

SEQ ID NO: 52395 - DNA, 249 bp, Acinetobacter baumannii; identical to SEQ ID NO: 13648

SEQ ID NO: 52396 - DNA, 225 bp, Acinetobacter baumannii; identical to SEQ ID NO: 19405

SEQ ID NO: 52397 - DNA, 204 bp, Acinetobacter baumannii; identical to SEQ ID NO: 13698

SEQ ID NO: 52398 - DNA, 1068 bp, Acinetobacter baumannii; identical to SEQ ID NO: 13699

SEQ ID NO: 52399 - DNA, 507 bp, Acinetobacter baumannii
atgaccgaaagaatctataacgtcctcatcctctgcaccggcaattcggcgcgcagcatcatggccgaagctctcatcaacacgatggggcaagggcgcttccgcgcctacagcgccggcagtcacccaaccggcaaggtcaatcccttcgccgtcgaaaaggtggagtcggtgaattacccgaccgagaatctgcgcagcaagagctgggacgagtacgccacgcccgacgcaccgaagatggacttcatcatcaccgtctgcgacaacgcggccggcgaaatgtgtccggtgtggcctggtcagccgatctcggcgcattggggatttgaagacccggccgccgtcgaaggcactgacgccgagaagcgccgggccttcgaacaaaccttccggcacatgatgaaccgcgtccgcctgttcgtgaatctggctctcaaaatgcttgaccagacggccatcaagcgcgagctggcgaacatcggcaagaccgagcaggaagcatga

SEQ ID NO: 52400 - DNA, 768 bp, Acinetobacter baumannii; identical to SEQ ID NO: 13701

SEQ ID NO: 52401 - DNA, 738 bp, Acinetobacter baumannii; identical to SEQ ID NO: 13703

SEQ ID NO: 52402 - DNA, 627 bp, Acinetobacter baumannii
atgaccaaactggacaagggcaccgtgatcgcggcggcgctagagctgttgaacgaggttggcatggacagcctgacgacgcggaagctcgctgaacgcctcaaggttcagcagcctgcgctttattggcatttccagaacaagcgagcgctgcttgatgcgctcgccgaggcgatgctggcggaacgccatacccgctcgctacccgaagagaatgaggactggcgggtgttcctgaaagagaatgccctgagcttcagaacggcgttgctctcttatcgggacggcgcgcgtatccatgccggcactcgaccgacagaaccgaattttggcaccgccgagacgcaaatacgctttctctgcgcggagggcttttgtccgaagcgcgccgtttgggcgctccgggcggtcagtcactatgtggtcggttccgttctcgagcagcaggcatctgatgccgatgagagagttccggacaggccagatgtgtccgagcaagcaccgtcgtccttcctgcacgatctgtttcacgagttggaaacagacggcatggatgctgcgttcaacttcggactcgacagcctcatcgctggtttcgagcggctgcgttcatctacaacagattag

SEQ ID NO: 52403 - DNA, 1176 bp, Acinetobacter baumannii
gtgcgcagctctgccatcattgccctgctgatcgtgggtcttgacgccatgggtctcggcctcatcatgcccgtccttccgacgcttctgcgtgagcttgtgccagcagagcaggtcgctggacactatggtgccttgctgtcgctctatgcattgatgcaggtcgtcttcgcgcccatgcttggacagctttcggattcttacggtcggcgtccggtacttctggcttctcttgcaggagccgcagtcgattacacgattatggcatcagcgccggtcttatgggtgctctatatcggccgactcgtgtccggcgtcacgggcgcaaccggagctgtagcagcctcaaccattgccgattcgacgggggaaggttctcgcgcacgctggttcggctacatgggggcctgttatggggcgggcatgattgccgggccagcacttggtggcatgctcggtggtatctctgctcatgccccgtttatcgccgccgcccttctcaacgggttcgcgttcctgcttgcctgcattttcctcaaggagactcatcacagccatggcgggaccggaaagccggttcgcatcaaaccattcgttctgttacggctggatgatgcattgcgcgggctaggtgcgcttttcgcagttttcttcattattcaactgatcggccaagtgcctgcagccctatgggtcatatatggcgaggaccgttttcagtggaacaccgcgaccgttggtttgtcgctcgcggcgtttggggcaacacatgcgatcttccaagcgtttgttaccggcccgctttcaagccggcttggagagcggcgcacgctgctgtttggcatggctgcggatgcgactggcttcgttcttctggcttttgccacgcagggatggatggtgttcccgattctgttgctgcttgccgccgggggtgttggcatgccggccttgcaggcaatgctctcaaacaatgtcagcagtaacaagcaaggggctttgcaaggaacgctaacgagcctcaccaatctaagctctatcgcaggaccgcttggcttcacagcactctattctgccaccgccggggcatggaacggttgggtttggattgtcggcgcgatcctctatttaatatgtctgccaatactacgcagaccattcgcaacttcattgtga

SEQ ID NO: 52404 - DNA, 924 bp, Acinetobacter baumannii
atgatgaccttagttcacactctcgctgtcgccgaatatctcaacttccgtcacgccgccaacgcgctcggcgttgcacagtccagcgtcagcgcccgcgtgaaggcactggaagaagacctcggcatcctcttgttcgagcgtcatgcgcgcggcgttcggctgaccgaggccggacgccatttcgtcgagcggatagccgtaggtattgaccaactcgaccatgcggtgaaaaccgccggcatggcggcagccggagaaagcggccggcttcgtatcggtatccatgccctgattccgcatagcttcctcgcaaagctgatcggccaataccgcaaggattaccccgatgttgaagtcgagatcgccgaaggcccggcccgtgaagcggtggtgcagcttcgcgccggcaggttggacgtggcgttcgtcgcgggcacgccccaaccacccgactgccattcccgtcgcacatggaccgaaccgctcttggcggtgctaccggaacggcatccgctcgccaagcggtcagccgtcacatggcccgatttggcaggcgagacgttccttgtccggcatggcggcactggaccgcaggttcatagccatatcgtgctacgccatgccgagcgctggcctgcgccgtcgatcctgcgcttcgacgtggggcgtggcacccttttgtctttggtcggacagggctttggcatcaccatcgtcggcgcggccacggcgctgttgccgacaaacggcattgtctttttgcccttcaccgacgagccggagccggtcgccttctcggctgtctggtcgccgtccaatcgcagcgcggcgcttcgcaacctgctcagcctcgccaacgacatgggccggaaggtctgcacggactaccgttcgatactaccacggatagcgaaggcgtga

SEQ ID NO: 52405 - DNA, 651 bp, Acinetobacter baumannii
atgggtcttggggcatttgctgccgcgcgagcactatccaccggctacaatactaccccggaactggcgtcgaggccgttcgacaccgggcgcgatggtttcgtaatgtctgaaggggcgggtctgatcgtcatagaggaattagaacatgccctcgctcggggtgccaagcccatagcggaattggtgggatacggcacaagcgccgatgcacatcatatgactgccggtccagatgacggccgaggcgcggcccgtgcgatgggaattgcactccacagtgctgggttgaaaccaatcgatattcaacatttgaacgcacattccacctccacccccgtaggagatcgaggagaaattgccgcgatacaatccgtgttcggcaatcatgatgtggtcgtaagcgccacgaaatcggctacggggcacctacttggtgccgcaggcggtattgaggcaatcttcacggtgctcgctttgcgcgatcaaattgctcccccaacgagaaatttagaaacccccgatcctgttgccgctggtatcgacctcgttcgccaatctgcgcggcccattctcatggaacatgccatttccaacggattcggctttggcggtgttaatgcaagtgtcgctttccggcgatggcagtaa

SEQ ID NO: 52406 - DNA, 561 bp, Acinetobacter baumannii
atgtctaattctaatattgcggttgtatatttctcgggttatggccacactaaagtagtggctgaaacttttgctaatgaaattaatgctcaacttatccagattaatcaggaaggtaatatcactgaccaagattgggaaacattgaataatgcaaaaggtattgtgtttggtgcgccgacttatatgggtacagcaccatggcaatttaaaaaatttgctgatgcaacttcaaaggtttggttcacacgtggttggcaagataaagtttttgcaggctttacgaatagtgcaagtttaaatggggataaacaagttacgcttatccaactgcaaactttagcatcacagcatggtggtatttgggtgagtctgggcttattgccagcgaataccaaagatgcaacacgtgaagatgtaaataatttaggcggttcggtagggcttttagttcaatcgccttcggatgcaagtgtagatgaaattccaacaggagatttggaaacagctaaagtttatgcaaaacgtgtgcaagccattgtaaataaaatatatggttaa

SEQ ID NO: 52407 - DNA, 225 bp, Acinetobacter baumannii
atgggagtcgcaatcgatttaaccaatacagagcgtagggtttcaactgctgagtttgcccttcgcatgaatcttacagaaagagaaatctacgaacgaattaaagacggaagaattaagcccccaacaaaagatggacggaaaaacttctggttaaatagttatgttctaagctgcattcgagaaggtgcagatgaaaatgaaattcaggaactgagagcatga

SEQ ID NO: 52408 - DNA, 339 bp, Acinetobacter baumannii
atgtcatatcaaattcaaccaattgaactgccagatgatttaaatagctgctggttccatcctgatatcgagctgcatgacactattggagagcacgctgagttttataccaaagaacaatgggcacaactgcaaaagaatcttggtgtttctataaaaatcgaaaactttgattattgggatattgaagacatcccggaagacgacactagtgattggtccaattggaacccccaaccacccgaacaaggtctatttttaattgcagcatttgattcagaaaatggccctatcctttggtgggctaatcctaaagcggaaagtaaggaggcagaatag

SEQ ID NO: 52409 - DNA, 285 bp, Acinetobacter baumannii
atgagtaaagttattggcgaagttaatttaaatcctaaccgtattgaaggcaccccggatcaggtagctgttcatatttttaaagaagttatttgcccaagtaccgaggagctgcttaaaaatagtccagaggcggcaaaagtatttgcttatcacatttttgggttggctctgtcacagcttgcagaatttcattcaactaaaagtttagacaaagctgtaaccgttactcttcacaaccttctgcgtcaattgaagaaagaacgtaatgaattgaggagctaa

SEQ ID NO: 52410 - DNA, 369 bp, Acinetobacter baumannii
atgattaatgaagatgaagaaaagctggctcatgaaaattggtacaaaaatattgacccaattgcatacaaattttatagagatctaaatccagaatttgagacagatttctacacaagtgaaattgcttggttagcaagagcaaaagttcagttgttgtcaacttggatcagcgtaaaagacgaagagccaccattagacaaaatggtacttgtttgctggtctgacgcgccagatgttgatcctgaaattgactacatgactgtagatgaggatctaaatcatatttgggcgaattatgacaatgaccctccttcacattggatgtatttccataaagtgccacaagaattgggagccgaacaatga

SEQ ID NO: 52411 - DNA, 1053 bp, Acinetobacter baumannii
atgaaaaatatactaacagcatctgaagcatttgcagctcttcaaaagggtaaaactgttctttgtcgttatgctggggacggaacacttaaagctgataagtcattcagcaccttagatcaaatgccagcaacggtatttggtctaccccattacgagttctgcataaagattgaaacgacagtattagcagaaattacatttactaagccggttgaaccgcatgatttagaagatggccaagttatctatattgttatgccttcacatatcttgcgcacaatttatagttcagataacggcgaaatttgtctaagtgttgcgaatggttttgctcaactagatgaagaaaatgcaaagttacaacttcaagctatcggtaaaacctttggcaatatgattaccgatatagaagttaaaatcggcagcaataataaaccaaggcaacaacgaggcaagaaaactcaacctgccaaagatgaaacatccatcgaaattatagaacaaaccaatgtaactacttctgaagactcattggtacatgccaaagatattccagaaaatgtggaagctgctttagatactgcggttgttattactgaacaaccttatgtttcttcatctgaagattttttacctcagccaacaactgagcaagaaaaaaacaatgagtatcaacaaaccttagacacccttttgcagcgcgtaagtgagtctaaaacacctgcggaagtaaatgctgtttatcgatatacccgcacttggtctgataaacaaatggatcctttgctcaaagctactcataagcgtttaacagaacttgcggatgaaaagcccgctgtcagtgagccgccttctctgatggttcagatccagactgcaccagaccttaccacacttgatgctcttgaaattgatgtagctgcacgagatgagttaattcaaccgaagcttatgggctacataagaaaacgccgcttcgagttagagaatcctacatctaaggcaactcaagagcctgaccctgattatctattgggagatggtttctaa

SEQ ID NO: 52412 - DNA, 1122 bp, Acinetobacter baumannii
atggctctacctattattacagctgatcaaacactattggttcaagcaattattgtttacctatacgccgatccaggcttaggtaaaacgtctatgggttttactgcggacaaagctatttccttcgactttgatcgtggtgctcaccgtactggtgaattacggcgcggtgcggttgtacaggttcagcaatggagtgatgtagcaaacctaactccacaggatttagcaccttataacactgtagttatcgacactgtaggcgcaatgcttgagtgcattaaaacccacctacttttaacagctaataaccgtcaaaaagatggctcattaaaattaaaagctcaaggtttagcgaaccaaacgtttaagcagtacatcaatacgttaatcagtcttggcaaagacgttgttttcattgctcatgcttctgaagatcaaaacggcgatcaaataatttatcgtccagatctaggtggtaaaaaccgtaatgagctttatcgcattgccgacatcatgggttatctaaccactgtaaccactggtgaaggtaaaaatgcccgtgttatcagtttcaaaccatcccctacacaccatgcaaaaaactctggtgcactgggtggtgaaactggtgaggtatgggttcctgatcttaaatctaatccaacgttcttagctgatcttattactcaagcaaaggaccacatcaacactttaacaccagcacaacttgcagccgcaaaagcccaagaagagttagagaactggaagcaaagctgtgaagaggctgaacatgctggcgatcttaatcaattaactgagtcgcttgataaagaacacatgtactaccagaacatgcgccaagcaatgttgatgcgggctaaagctctgaattgtacatttgataaacaacgtggcacttggattagtccaccagaatttaacggcatatctgatcaacaaagagatgagcttcaaaactttattgctgagcgcggcctcgatgtgaaaacagtttgtgagcatttcggtattgatgcccttattcaaattgaagcggcaaaactaccagcagttaaacaagacattgaaacattggctaaaacggggatgacagcatga

SEQ ID NO: 52413 - DNA, 327 bp, Acinetobacter baumannii
atgacaaatttcaaaaagcaccctgacggctataagtcttttttaggtcttgaccgttcaacgagcctctactctgtccgcattggctggcaagtgtacgcctctaatgctaatggctcagttctttaccaagtaaagggtgaagttaagacacctttggacgttgaaaagttcaaaaccgaatatccaaaagtttggaatgaactcacacaagaaatcgattttcaacgcagaaagcagctcgctataaaactgcgtgaaacaaacatcccttttcgtgaccgcaaagcttataaaactaagcgcggcttcactggctctagatga

SEQ ID NO: 52414 - DNA, 261 bp, Acinetobacter baumannii
atgactaattcatctttaaatctctctgatcgccaacaactagttctgcaaactgtcatcgaaataaataaagaaggcaaccaacccaacacatggcaagttgtgcgccgtatggattctaaaggccacaaagttactgaaaaacagtgtgcctatgatctaggtgtaattattcgcacgaaaggcactggtgtattttctgcaaagtttgatagcaaccctaaagtctggatctatgaagaacctaagggagtggcttaa

SEQ ID NO: 52415 - DNA, 441 bp, Acinetobacter baumannii
atgaaagtaaaaaccttttctaacaagcataaggtaactggcattacagcaattgctgtacttgtagccttaggttcttgtgaatatcgaactgctaattcaagcgtcccttctaattattcatatgaaagcgagcaagtagttgcttctgaatatgaacttctagctgttaagaaaacaggtgaaaactctggtgaagctgttatccgcatagacggctttaaattaaacgtaagctttgattttgacggcgtagcagatagctacggtgtagcaggttcagattttacagcagctgaaattaccaacttggccattgagtcggtaacagacttaagcggcaagcctttcaatgactttaccaatcgtgacgaccacagaaacattaatacccttctggttggctacatcgatcgtaaccgttggatcgaggaggcttaa

SEQ ID NO: 52416 - DNA, 792 bp, Acinetobacter baumannii
atgacaccaaaaaacctacttaaagtagaaagcaatatactaccaaaaatagaattggtgcaactaaaaattgatagtaaaattctacccacagtagaaaagaagcctattttgatggaagacgctaaatacaaagactttgcggatcgactcaacgcattgatgaaggcaaaagactctccaattaaaactatcaatgagttaaaaaaggctattggtgtttcttatgagatggctcgtaggtatacgcttggtactgcaaaaccgagagtcgagaaattgcaaacccttgctgatatttttggagtcgaaattagctacttagatcatggtactaagttagacaataatattgatttatcagaaaaagtgggctttgaagggcgcagagttccagtgatttcttgggttgccgctggatcatttacaccgattgagacagttttgaaagatacggaaattgaagaatatttaccgccaaaccgtagatgcggtaagaatggatatgctttaaaagttgtagggtattctatggccccaacgtttttaccgggtgatagaatttatgttaacccagacattcaaacattcgaccttaaaacagatgatcttgttattgttgcctgtgctggtgattcagaagccacctttaaaaagttgataattgagggcgaaggcactagtaaattcttggagccattaaatcccgactggcctgataaaattattaaactctcagaagattgccgcttagttggtaaagttgttggtctatatagggatatttactag

SEQ ID NO: 52417 - DNA, 249 bp, Acinetobacter baumannii
atgactactccacatgaagcattcaacaatgctgtgacttttgcagggagcatttcagctttagctcgaaaaataggggttacaccttgggctgctagcaaatggaaccctgagaaaattccagaagatcgctgtttaaaaattgaggaaattactcagggtcaagttaaggcagaacaactacgaccagatatcaactgggaatatgttcgcaagaaccttaagaagcaaaaccaatccgtgagctaa

SEQ ID NO: 52418 - DNA, 501 bp, Acinetobacter baumannii
atgagtgaaattaacttaagcccagaggctaaaacggcaatttacaaaatggttcaccagtcacagggaattacgccgcaagagattgcaaacgtacttggtgattcatacaagagcgtactcaattacgcaaatccaaacatggaaacccatttaccaagcattaaaaagcttgaagcaatcattcagtttacccgcaacccggcattagttaaggcgtgggcacacatgcttggttttgtattggttcctgctaatcaagctgatgaaaaatcgcatgaagtgagcatcgttgaaaccttgctgcatatcaatatcaacaatggtcaagctaatcagcaagttcataacgttttagaagacggtgtggtaacgccatcggaattggcagatacggaagcaattttagaagaaatggaaaatcacattcatcaacttagacaagctcttaaggcggcagcttccaattacatttctaaatcacaaaaagaaaaagcttga

SEQ ID NO: 52419 - DNA, 288 bp, Acinetobacter baumannii
atgcaaactaatttatcaaatcaagagcaaataatccagagctggtttgaaccggctctccacacacttaaagcattaatcaaaaagtgtgaagagaacctagagcgaatcaaagctgacactaaaaatgcagctgtaaagcgagatgactttaaagaaaatttagtccttcagcatcgcattacatataaccatgctgaggaaattatcaaaagccttggtcgtgctgggcgtattcgtttcttgggtagtacttacattcagttgaatgttcaggagaccaaatga

SEQ ID NO: 52420 - DNA, 918 bp, Acinetobacter baumannii
atgaatgagttggctcttttcgcaggcgctggtggcggagtactcgcatcttatctcttgggatggcgaacagtgtgcgcagttgaacgtgatgcctacgccgcacaagttttggcgcaacgacagaatgatggaattctcgaagctttcccaatttggtctgacattacaacttttgacggaaaaccatggcaaggaattgttgacgttatatctggcggctttccgtgccaagacatctcatccgcggggaaaggtgctggaatcgaaggtgaacgttctgggctttggtcagaaatggcacgaattattggtgaagtacgacctagatacgtgttcgtggaaaactcaccaatgcttgtttccagaggacttacaagagtcatcagtgaccttgccaaaatggggtatgacgcacaatgggcacgtttttcagcatctaactttggagcgccccatatccgtgatcgaatctggattgttgcccactcccaaagcatcggatgcaaaacgaatggattgtctatcggaacgcaacaggaaaagtccttgtctggaatcaacggtaaagatgtggccaaccccaaaagcatccgattggaacaaacgagggaatgtaagtcctcatccgagaaatggcttgccgggtgcggtcatgaactttccgacaccaactgcgagcgatgcaaacaagtggagcaacgagtctttagccgaacgcaaagagaaggggcgtcagatccgtctcaatacagcagtttcgccagagggtgggaatggtgggcgattgaacccgaactgggtcgagtggctgatggggtggccaatcgggtggaccgacttaaagccattggaaatggacaagtttcaatcgtggctaaatgcgcattcgaatatttagggggaattgatgagtaa

SEQ ID NO: 52421 - DNA, 900 bp, Acinetobacter baumannii
atgaaatacaacattgtctcggtttctggcggtaaggattcaactgctactttgttgttagcaatggcatgggatgttgaaaatctacaagcagtctttgctgacactggtcatgaacacccagcgacttatgaatatgtcgaatatttagagcaaatcttagaaattcagattcaaagagttaaagctgattttagttatgaaatcgaatgtaagcgcgactatgtgaaaactatgtggcgtgagaagggcgtatctgaatcagttgtagaaaatgctttaacagtacttaagcctactggtaatccatttttagatttgtgcctttggaaaaatagattcccttcaacacgtgctcgcttctgtacttcggaattgaaagttaagccgatccaacaattgttttatccaattttagaagatggccacatgattttgtcatggcaaggggtacgtgcagatgagtctttagatcgtagatacctacctgaatgtaatgaagttgttcaaggactttacaactacagaccgattttgaagtggtctgcaaaagatgtatttaaagcacattcagatatgggtatagaccctaatcctttatacaaaaaaggcatggggcgtgttggttgtatgccatgcattaactgcaataaagacgaacttaaagagatagctaaacgcttcccggaagagattgagcgtgtagctgaatgggaacgaatagtaagtttggtttcaaagcgccaatcagcaacattctttacttctgactatcgagggcatggaattcaccagctggtggaatggtccaaaactgtgagaggtggtaagcaatacgacttagtagagcaaatgacaggtatcgaagcttgttcatctgcttacggtttatgtgaatag

SEQ ID NO: 52422 - DNA, 126 bp, Acinetobacter baumannii
atgaacaaatacgggattttagcgtggggtttactcatttcttttttcacagccgctatttgcggggcggtggttttgtggtggttggtgcgtaaagaacatattaagaaaggaattcgccaatga

SEQ ID NO: 52423 - DNA, 237 bp, Acinetobacter baumannii
atgagtgagtttaaagtcggggatcgagtgcttagacattttaataaaaaggtctatttcattaatcatcgggttggtgatgaagagtatttaatctcttatgaaaaagatactccagtatcaaaatgccagatatgtgaacacgtgagcaatttgaagttagttgctgaaccagacctaggcgacgacttccctatagaaaaccacatttcgccaaactgcaaagtgagtgattga

SEQ ID NO: 52424 - DNA, 552 bp, Acinetobacter baumannii
atggataagaaaaccagaaatctagaacttgaagcgtggctaattgaaacaactggcgaagagatgatggctaatcatctcggccctaattggaatagatttaatgaagagatgggcttttatccaaacataagcatgactattgcagatcaagtatggcagcaccagcaagcgaaagtggaggagctgcaaaagcaactcattgatcaaggacaaagatttaatgatcagtcacaacggttgaaagatttagagcataagaatggagagctgcaaaagcgagtggattatttagagcgtcagctatcaatcaaaacacgtcactgtgagttctttgaaagaagccgcataggtcatagatcacttgcaatcacacgtaagttgcagatcgataaagccttaaatcaaatagaagcgctctacacggaagctgaaaaggattatgagaaagaccacaatccttactatgacggcatgttgtcagctttggatttggcagagcaagcaattcgaggcgaattgggagagcaagcgctcaagggggaggtatga

SEQ ID NO: 52425 - DNA, 261 bp, Acinetobacter baumannii
atgaaactaaaactaagaacaatcccacaagaatatgaggcaattctatttgaaggagttacagacgagctaaacgattttctaaaaggcactggctcattagtttatatacaaggtgaagactttatattgtctggatttattgggaatcaaggcatagacataggcgactatctgtacaaaacagattctccattaacccttgttcatgttgcacataacgataaaacattcggtaagtactttgaggtgttgccatga

SEQ ID NO: 52426 - DNA, 354 bp, Acinetobacter baumannii
atgtacgagattcaatttattagagataacaacctagaagcagcaaaaaatattgctgatgcagcaattgctggcgcaactttttggaatgtttctacacagacttataaagacaaaagtattgaagaagagagtgccgacgacctcaatttagccattcttagacggctagtactttccgttgaaactataagtgaagaaggtgggtatgaggcggccaaaaagaaacttcgatttgcttcatgggaaggaagtgtagacccagattatgtttttacccctttaactcaagatgaatacttaaagcttgagcaggctattaaagattatgacgcactttatgagggtgtttga

SEQ ID NO: 52427 - DNA, 393 bp, Acinetobacter baumannii
atgtcatcaataagtcttgctgaatatcatgaattatttcctattcaaaaaaataaaaagcgccgttcagcaaagcaaacacgggaacccagtataggtgaggttttattagccacgcatcttaaagtctgcaagattgattttgagcaggaatataaattccacccgaaacgaaagtggcgggcggattttttaattacaggtacaaacattttagtagaggtggaaggtggtatttggaatggtggaagacatacacggggtaaaggttatctaggggatatggagaaatacaacgaagcggcaatgatgggttttacagttttacggttcagtacagagcaagttaagtcaggtttagcggttcagcaaatagaaaaaatggtggggtga

SEQ ID NO: 52428 - DNA, 492 bp, Acinetobacter baumannii
atgaatatgccggtacaacacattttacaagcagtcgattggtctaagtatagttttgaagaatggtgccgccagcttggcgcttggctaaacggcgatagtgaaacaatggttaaaattgtgaaaacaacgccaacaaaacgcatcactcaaaagcaacgtgaaaagcttatggctatgtacatgagtgatgaaactttaaaagatcgtttatgtactcgccgtaaaggtacttgttgtcagttaaacgataatgaagctcgtggtgtacatagattgtttatagatatacagttaattgaagatcatattttacaagaatggatctcggcaatttggtcgcatcatgtcatgggtaattctttaagagatattgctcagagtaatgacacttcagttaatcaaattagacaagatctaaaatgtggactggcttatattaaaagtcgtaatcctcaatttgcatttgaaactttcgaaaaaaccacttga

SEQ ID NO: 52429 - DNA, 231 bp, Acinetobacter baumannii
atgtatatttgtattggcggtgatttggatggtgaagttgtaaataaccgtgaaggtacatactttgaagctagtgaaatagatcctggcaagcaatcaacatacaaccgccagagttacatagttggtgaaaatacatatcggttttggctttgtgcagaattatcttattttgaaacaactaaaatcgctggtaagcatctagcagaaaaatacacttatctttcttaa

SEQ ID NO: 52430 - DNA, 783 bp, Acinetobacter baumannii
atgtcagctcaatcaaaagtacttattacaggggcttcgtcaggaattggttctgtttatgcagatcgatttgctcaacgtggctatcacttaatcttggttgcacgagacaccaaccgtttagataaaatttcaaaagatcttcaagaaaaatacggcgtacaggtggagttcattcaagccgatttatcaaacgatcaagacattcgcaaaattgaagatgtactcaaaaacgatgctgatattgaaattttggtaaataatgctgggattgcactgaacggaaactttttaactcaagatcgtaatgagattgaaaaacttctaactttaaatatgactgcggtggtgcggttgtctcatgcaatgtcgcaatcccttatacgcaaaggtaaaggcgccattattaatttaggctctgtgcttggcttagcgcctgaatttggttctaccatttatggcgcaagtaaatctttcatccaattttttagccaaggcttacatttagagctaaaagatcatggggtacacgttcaagctgtattaccttctgccactaaaaccgaaatttgggaacgttcaggtatagatttaagccaagttccgccattaatggacgtcaatgatttggtcgatgcagccctgattggttttgaccgtaaagaaacaattacaattcctgtgctgaaagatgaaaatcaatggaataattttgaaaaatcgcgtatgacattattaccaaacttctcttcggctgaagtagcccaacgttataaaaactaa

SEQ ID NO: 52431 - DNA, 1167 bp, Acinetobacter baumannii
atgaaggttgtgatcgcccctgattcatttaaagatagcttatcggctttaaaggtagctcaagccattgcccaaggatggcaagcggtttttcccgatgcagaaacgattttatgcccaatggcagatggcggtgaaggaaccattgaagctgttttagaagtctgcgagggtcaatggcgtgaaaaaactgtagtcgggccattaggtcagcctgttcaggccaaatggggatggttagaaaaacaaaaaattgccatgattgaaatggctcaagcgagcggcatacagttagttccaccgtctgagcgtgatgcctgccacagcacaacatttggcacaggtcagcttattttggatgccttagacgcgggtgcaaaagatattattttaactgtgggcggtagtgcgaccaatgatggcggcacaggcttacttagtgctttgggtgcagttttactcgatgctaaccaaaacgttttacccgctggcggccttgcccttagccacctatctaaagttgatttaacacatttcgactcacgtattcagcacacacggtttttactggctgccgatgtgaccaatccactttgtggcccaaacggcgcatcacatatttttggcccacaaaaaggcgcttctcctgctcaagtccagttactcgatgcagcccttgcccattttgccgatgtcacggcacaacttttaggtttcgacaaacgagatgaagcgggttctggtgccgctggtggtttgggctttgccgccaaaagttatttaaatgcagactttaaagctggagttaaagttgttgctgaactgaatcagcttgagcataaaatctctaacgcagattgggtgatgacgggtgaaggtaaatttgaccaacaaaccttaagcggtaaaaccgtttttggggtaagccaaattgccaaagcccacaatgttccggtcattgtgattgctgggactttaggggaagaataccaagcactttatgagcacggtgtaagcgctgctttctcactagccaatggtcccattaccctagaacacgcctgcgaacatgcagcagaactcatttatgagcgaacagtcgatatagcgagattaattcagtttagtcaaactagcttaaaagataaaaaaaacttaatcggttaa

SEQ ID NO: 52432 - DNA, 2409 bp, Acinetobacter baumannii
gtggataattcagaagaacaaaagcacatacaggaaaataacggttttgcgcgaattgagccatatactcatcctgctggcgggtggggcgcactgctcagtgttgctcgaaacttaaagcgacaagatattttaggtaaaggttcaattaccttactcaacattaaccagcctacaggttttgactgtcccggctgtgcatggccagaaaagaaagatgctcacgcatttaacttctgtgaaaatggtgcaaaggcggttgcttttgaagcgactagtaaaaccgtcactcctgaatattttgcaggtcataccgtcagttggttatcagaacaaagtgacttttttctagaagacctaggccgcttaacagacccagttcgttatgatgctgcaaccgataaatatgtgcctatttcatgggacgatgcctttaagctcatcgctcaacatttgcatgcgctagatcatccagaccaagcggcattttatacctcgggccgtgccagtaacgaagcagcatttttatatcaattatttgtacgaagctttggtacaaataactttcccgactgctcaaacatgtgtcatgaaaccacaagtgttggtttgctcgactcgattggtttaggaaaaggcacagtcaccttagaagattttgatttagccgacgccatttttagttttgggcacaacccgggaaccaaccatccacgtatgttaggtactttgcgtgaagtgtctaaacgcggcggcaacattattgcgattaaccctattaaagagcgaggcctcgagcgtttccaagacccgcaagcaccgcttgaaatgatgaccaatggcagtacaccaattagccgctattatttccaacctaaaattggcggcgactatgcactgatgttaggtattttaaagcacttacatgagtgggataaaaaggcgcttgcctcaggtaaaccaagcgtttttgaccgaaactttattgcagtcaataccgttggtttcgacgaaatgattgccgaggtagaaagaacggagtgggcggatctttataagcactcaggtctgtcacctgaacatttggaaaaactggctaaactctttttagagtcagagcgttcaattttctgttggggtatggggattacccagcatcgtcacggaactgctaacgtacatatgctggcaaatttattgttggcgcgtggtcaaattggcagaccgggtgcagggctttgtccggttcgtgggcacagtaacgtgcaaggcgaccgcactatgggcattaatgaactcccaagcccgaaacttctcgacaatattgaccgtgtgttcggtattaaatcaccaagaaaaaatggatatggtgtggttgaaaccattaaagccatggccgaaggtgatatcaaagtctttattggtttgggcggaaactttgctgttgcaacacctgacaccgcttatacacaagaagcgcttagaaaatgtaatttaaccgtacatgtggcaaccaagttaaatcgtagccacttggtgtgtggtaaagatgcgcttattttgccatgtttaggccgtaccgaaattgatgagcagcttcatggaccacaagctattacagttgaagactcaatgagtaatgtccacttgtcggcagggcgtaatactccaatttctaaaaatattttgtctgaacccgatattgtggcaagaatggctgaggccgtgctgccagagagtcagattaaatggaaatggtacatcgaaagctatgaccgcattcgtgactcaattgccgatgtgtttgatgaattccatgattttaatttacgcgtttataaacccggcggtttccatttagaacatccagctaatcagcacatctggaatacaaagagtggtaaagcgcaatttctgattacgccacttgaagaagtctatgcggataaagaaaatcagtacgctgccgcatataccgaaagtaaggtttataccttaatgaccacccgatctcacgaccaatacaacaccactttatatggtctggatgatcgttaccgtggggtgtttggtcagcgccgtgtgttgtttatgaaccaagccgatattgatgaagcgggctttgaagcaaatcagtgggttgatattgaaagtgttttctccgacggtgtgaagcgtattgtgcatagtttccgtattgtgccgtacaacattccacgcggcagcttagcggcttactatccggaaaccaatcctttggtggccttaagcagtcatgataaatatgccaagattccggcttctaaaagtgttcctgtgattttacatcccggaaatgcgccagagcattttaacttggcaacagccgttgaccctgaagatgccaataagaaagttagcagtctttaa

SEQ ID NO: 52433 - DNA, 1272 bp, Acinetobacter baumannii
atgatcgaccctaagttactcagaaataatattgaagtcgttaatgcagctttggcaaaacgtggtgttcagttagatgttcaagaatgggcatctttagagactcgtcgtaaagacttgcaatcaaaaactgaaaagttacaggcagagcgaaatgccggtgctaaacaagtgggtcagattaaaaaatccggtggtgatgcttctgaaatcatggcacgtatgcaagccattggtgatgaaattaaagctgccgaagttgctttatcagagctacaaaacgagattgagcaaaaagcgcttagcattcctaacttgccggacgaatctgtaccagctggtaaagatgaaaatgataacgttgaaatctcaaaatggggtacacctcgtcagttcgattttgaaatcaaagatcatactgatttaggtgagtggatgggcggactagagtttgaaactgccactaaactcacaggctcacgttttagtgtgttgaagggacctttagctcgtctacaacgtgctttaactcagttcatgctcgatacccatactttaaagaatggttataccgaagcttatgtgccttatttggtaaatgctgattcattacgtgggacaggtcagttaccaaaatttgaagaagatctatttaaacttcaaggtgaaaaagaatactacctcatccctacagcagaagttccagtcactaactttgtccgtgatgaaattattgatgcagaccgtttaccattaaaatatgcggctcatacaccatgtttccgtagtgaagcgggttcttatggtcgtgacacacgtggtttaattcgtcagcaccaatttgacaaagttgaaatggtgcaaatcgttaagcctgaaacatctatgcaggcacttgaagagcttactgcacatgctgagggcattttacaggcgcttggtttgccttaccgcaaaattttgctctgtggtggtgatatgggcttcggtgcgactaaaacttatgatttagaagtttgggttccaagtcaaaatacttaccgtgaaatttcaagctgctctaatatgggtgatttccaggcacgtcgtatgaaagcacgctaccgtatggatcagaagaagaccgaattggtgcacactctaaatggttcaggccttgctgtagggcgtactttacttgcagtaatggaaaactaccaacgcgaagacggttcaattgagattccagaagtattacgcccatatatgggtggtgcaacgtttattgattaa

SEQ ID NO: 52434 - DNA, 2190 bp, Acinetobacter baumannii
atgttaagaatttctatatcatctccccaaattaagggttcattcccgctcagcttactcagtttaatgattttaaatattcaaggtgctaatgctgaggaattgattgactcctcatcaaaagccgcagccaccatgccaactataaaaatcgaggccatgagtgagctcgacccgattaaaagctatatcgattatgacaaggccaatgtcactcgtaatggtttagataaaaaagatatccctcaaaccgttgataccattgatgttcagaaatataaaatttatggctcgaatgacttaagcgtcatgctgcaaggtacaccaggggtatcaaccagttacgatatgcgcggcgatgggatcacgattcgtggttttggtgccgacacaggcgatatttaccgtgatggcatacgtgaaagcggacaagtacgccgcagtacagccaatatcgaacgtatagaaattttaaaaggccctgcttcggttttatatggccgtagtgctggcggcggggttgtaaatatggtgagtaaattcgccaattttgactctaaaagttcagttggcgcatatgcgggttcatacgataactacggaacaaccgctgacatcaaccaagtacttaatgacaatttagcagtgcgtttgactggagaatatggcgaggcaggcagcttccgctctggtattgaaaataagattgagatgttttccccaagctttacctataaaaatgacgatggaaaactgacttggaccacacaatatacctatgacaaattaggtcgagttcctgaccgtggaccaacacgtaacaacttgcctgcgggaacttcaattaaaatgggatttgctcaagacggtgattatgtggatgatattttgcaagtcgttcgtactgatgtgaattatgaatatgcgcctgattggaacttccactgggcggcgagttaccgacaagcagaacagaactttgaccacttttattttggaacttattgtggtttagatggaaaaaactcaaagaatgaggcgtgtacaaaaaaaggttacatcgatcaaatttactactggcaacaaaccagcaacaagaccacaaccaatacattcgatattaaaggaaagttcaagacaggccagcttgaacaccaaattatggtcggtacagactggacttatgaacaacgagaaccacgtctagccaataaaactcaaaatgggtcagctatttatggttacgttaatccaatcactggtgaacgagagtacagtcgtggcaatggcccattaaagattagtcagcataactataatgaaggcacaacttacggcgtatttatgcaagatttaattggtctaaatgaccaacttaaacttatgatgggactccgctacgattacttcgacttttcaactactaacaaaattaagaatgaacatcgtaatgtaaaagacagtacttttagcccaaatgttggcttggtatggcaaccagttcctgaacatagcttttatacgtcttactctaaaagcttcgcaccgtttggtggacaaatgggtgtcaaccaagttactggaagtaccgatgtcgcgaaaatggataaagagcctcaatataacgagcaatatgaagttggggtaaaaagtgaatggttagataatcggttaaatactcaattttctgtctttgatattcgtaaaaataatattcgctataaaccaaaccctgacagtgaaccagaggtatgggcaactgctggtcaacatcaatctcgtggtctcgaatttagttttattggccgtgtacttgataatgtctttgttcgcggtgggtatggctataccgatgcaaaagtaaaagaagacaagcaaaatcctgaacgtgaaggcaactatttagcaaacacttctaagaacacaggtaatttatttgttcgttatttaccaaccgagcagtggtataccgaagtgggcgtgacctatgtgggttcttattatccaaatattaataatcaagtaaaaatggaaggctttaaccgtatcgatgcagcaattggctacagtgccgacccttggaatgtcacacttgcggtaaataacttaaccaataaagagtactggcgttcagacagcatgccaggcacaccacgtaatgtgttattgcgtttgaattatcagttttaa

SEQ ID NO: 52435 - DNA, 1431 bp, Acinetobacter baumannii
atgtctcagtgtgatgaatgtggtaatgcggttgaaaagatacaccgacgctataaacagcgtaactattgccataaatgctatgtgcgagtttttaaaaaaagagattgcccatcatgtggtaaaagctcaagattacacaaaactgatcaattggctgtttgtcaaaaatgtgaaactaatcgcccctgtattcgatgtcaacgtattgattaccctgtaggcaaaataacggaacaaggacctgtttgtaatagctgctcagtttattttagagagtttcaagcttgtgaacgatgtggcgtggcatcacaacgtttgtctcgtatcagccgttttgaggataatttaagagtttgcacaaagtgtgcaacccgtgattaccagacatgccaaagttgtagaagatataggtcggttgaacaggatgctgtgtcaggcaaaatgctttgtaaaaaatgttcaagctgtccaccacttcaatgtttaacctgtcagcaacaaattcctgctggatatggaaaatattgtgaatcatgttcatggcgaagaatattgggcaataggattaaggaactagttaatacattagtgaatccaagtcttaaaggttactttgaagaatatatgaattggcttgatcatgaggtaggaccgcataaggctgcattgctaattcgtaaacacattcagttttttgaaaggaccaatgatctttggagggataagatcccagattatgagcttttattacacagactaagagcaagcggtctacgcaaatatgagctgccaatgcgatggttagcttcaatgtataaactagaaatcaatattgaatcaaaagatcattgttcagaattggatcaattggagaggttggtaaagtcatctccagaattaactttttcaacccaagtgcttcaggaatatgatcaatatttaaaaaataaaatgaaactgggtaataccactcttcgctcgatccgtttagctatgaaaccagcctcagctttaatgcaattggttaatcactcacgattagacttacctacgatgtggcatgtgaaacattacttatgtcaatcaccaggacaagcatcagcattaacaggctttctcaactttttaaataaaaattatgatactcagttgaactcaaaaaaaatgttggataaagagtcgaaaaataaaagtaatttgaagaagctagaaaaagatttactaacaatgatgaggaatccagcagaaaattttgatgagttaacctgggtgaaactgagtttgggatattttcatgggctggataaaaatatttgtaatcatatagatagagtagatattaaagttgagctagatggttttaacgtcttgattaatagtcaacagtattggataccgaatttagggttttcctcaataagattctaa

SEQ ID NO: 52436 - DNA, 1092 bp, Acinetobacter baumannii
atgataggtacaacagaagtctattcatggtttatccccacgactttacagaaagatgaggcattgtcttcatggttgatacgtgctgcactcgatagtggttgtgacccattaagtctaactggggtactctggcctaaatggcgaatttggtcagtagatgtagatcgaggtttaagctcagagcatttacgggccttggtcaatacaacaaaaattgatgaaagccaatttgattcggctacgcttcgcaatttcttatttaaatataacttggataatggaacccttgatccatggtatctggtattaggtacaagaaaccgcaagcatcgaggtggctggcaatattgtcctaagtgtttgtctgaggatgatgttgcttatttccgtttgccctggcgctttgcctggcatacaggctgtatgaaacataatcagcgtttacatgatcaatgtccacactgccataatgccattcaacctaggcgacttgaagcccctgatcaggttatgacttgctgttcaatatgtaaaaaaagcttattggaggttaatgaacgttttatggattgtcatgccttggcattccaaaaaatctttgatcaattcttggaacaaggccgtgcaacctatcaggatgatttgatttcactaaatgattggttaacggtgattaagttattttcacaatttattagaaaagttctagctagttcatcaaatggaaaaggatgggcttttcttgaacaacttaagattcaggtccctcatgctgagcttatctcgaatggattggttattagccaacttcaagttatcgagagggaacggctattttcctgtatttatcaattactcatcattcccctagaaaaatttattgaaacagcacaatctttaaatatgaacagatcttcattttgggataagagaaaccaggtgccagccatattaagacctattgaagaacagttgggctcggtttataggaactaccctccaaaaagagcattagttgatacccgtaaacctaaaagtaaggaggctgtaatacgaaagttcttgagattaaaaagaaaattaggatag

SEQ ID NO: 52437 - DNA, 699 bp, Acinetobacter baumannii
atgaacaatcaatcatgcgacaccgttaacatcgtaccagctcgaagaaaaattggtaatacacgcattagtgtatctggtttatacccttttaaaaaagattccgcagtggcctttgaatcaacactggaacgagatttccttattcgattagaggttgaccctaatgttcttgctgttgagtctcaaccgtttaccattgagtattttgataatggacagaaacgggtctacacccctgactttctcgtaacatacaagcatgatgattgtcttccatttattacacctaagttggtcgaagtaaaacctaaagatgaattgcaacttaatttacatctatggaaagctagatatcgtgctgccatgaggctatgtaaagaagagggttggaaatttcatatcgcacatgaggggcgtattcgggatcagttatggtcgaatgccatgttcttgcaaaagtatcgaaaaatggaatttcctcctgctgattcaaagtacttattggattatgtgagagatcgagaatcagtaacttttgagactctattagccagacattttcttggaaaatgggacagagccaatggaattagtcaaatctggtatttagttgctcatggttatctggtttgcgatctaagtatgcctttacagccatctactgaactttgggtaaatgggggttgtcatgaatga

SEQ ID NO: 52438 - DNA, 789 bp, Acinetobacter baumannii
ttggacttacaaagaaaaaagcttgctgttctaattgatgcagataactcttcagtcaactctattgacctgattctcgaagaaattgccaaatatggaatagcaagcgttaaacgagtatatggtgactggagcagtgaaaccctaaacaaatggcgtgatattttattgccacatgctatcacacccgttcaacaatttgcctataccgttggtaaagatgcaacagatatggggctcattattgatgccatggatttactctatagtggttctctagatggattttgcattatttccagtgacagtgactttacaccgctcgcttcacgtattcgggaaagtgggttagttgtttatggcgtaggccgaaaacaaactcccgaagcattccgcaaagcatgtgacaaatttatctatgttgaaaatctgattgaggaagataaaacctctagtgaaaataaggttctcgctgaaataaaagattctgccaaagaaccaataagcaaaccaacagaaaaagaaacagctccgaacattgacagaacgacattgaatctaatttataaagcagtcaaagacaattctgatgaaagtggatgggcaaatctttccgtggtgggacaatatatcaatatggttcgcccagacttcgattcacgtaattatggacgtgctaagttatctggcttgattaaaatgctcaatctatttgaaactaaaatagaaggtagtcaaatgtatctgaagaaagcaaaaaacaataagcaaatgaatcaagtatgctga

SEQ ID NO: 52439 - DNA, 186 bp, Acinetobacter baumannii
atggcacatcaaatagaaactatggcttttgttggtcaaaccccttggcatggtctgggcaatcaactccctcaaaatcaaccaatagaaatctgggcacagcaagcaggtatggactggcgaatagaatcatctaatgtcagttatatggcaaagaatgaacggagacaaaatatcccaaaataa

SEQ ID NO: 52440 - DNA, 867 bp, Acinetobacter baumannii
atgacgacagataagtatgaagtatttctcagaatgcgagccattgagctactggcgtattgggaaggacgtttagtcaccacgcgtttaatgaactggtttggactcagtcgccagcaagcctctgcggatatcaaacgctacaatacgttatataaccctgatgccttgtttcatgatccttctgtcaagggctatgtacctaaagccagtttccaaccagtgctgaccacaactcatatcaatgaatatctcaatatgctttcaggtttggtgagtgaatcacatgccctaatagccactccagaagcccacctttcagcggtgcagttacccgatcgtagtgttcgcccagaagtgctccgcgaagtgctccgtgcctgccgaacacaaagcactttaaaaattatttatgcctccatgaataatccggtttggcatgaaagggtgatttctccacatactctagtgtataccgggttccgttggcatgtccgcgcctattgccatcagagcaagcagtttaaggactttttactctccagaattgatcgcacacctgttgtgatggcgattgagccagtagacccagctcaggatcagcaatggcatgaagaagttgtactgacgctgatcccgaatccaaaattgaatgcagctcaaaaagctcttgtcgaaaaagactttggcatgccagatggcagattacagattccggtgaaaaaagccctggctcactataccttgcagcgctatcaggccgcaatcacgctggctgaggcggaagatgccttgaaatatccactggttttacaacgttcagatatcgaaaagctgtcgtcttatctgtttgatcagacctcatag

SEQ ID NO: 52441 - DNA, 612 bp, Acinetobacter baumannii
atgttagagcaatttcattatgacagtgacctgattggtggttcattgatggtgcgtgaaagtcggttaatcgcggatctgttattgcgtgaagccacaacagagcaatggcatcaggcgattcaggtggacaatattctgcaaaaaagaactgcggcttcggcgcaacgtaatgccaccgctattcgcaagcgtctggagcgtttagaacctgatttctggaaagctttgcgtgatggcgatgatgagctggcgacccaggtggctttttgtggtgcattggaacgcaacctgttgctgcttgagtttatggaaacggtgatgagagaagcttatatctctcaggctcaatacttggacagttatatctggtccgactttttggaggaacgtacacaacgagatctggatatctgtgaatggaaagagtccagcaagaaaaaaatggggcaggtggtctttcgcatgctgacagaagctggttacttaaaaagtacccgtaagctggagttgcagcgtgtgatcgtcagagcagagctacgtagcctgttggaagaacattataaacaacgcattaaaagatctatggaagtgtcgctatggatgcggtag

SEQ ID NO: 52442 - DNA, 576 bp, Acinetobacter baumannii
atgagtcaagcaatacatgagcgtctgaaccagattccagagcgaattctttcaaccgaatttctgaccggtcaaggactgggtaatgaaattggcttctggatttttgattatgcacctgaagatgagttgaaagtgcgcgaatatctgcattttctagacgggatgctggagaaaaaacacagtcagctgaaggtggtgaatatcaacctgctgcaagccgtggtggattatctggctgagcgtaacttcatcgataaagccattcaaatgcaaaaagccaaaggcgatgaagcgctgctcaaagccttaaagggcccactgcatatggataagttcgcgccgtatctggtgagtaaatatgccaccaatgcgcaagatattgtgttgatgactggggtagggtcggtttggccactgttacgtgcccatcacttattgaatagtttgcattcgttactgggacataagccagtggtgctgttttacccaggctattacgacggtcaagcgatgagtttatttggaaaaattccaagcaacaattactacagagcattcagattagtgccttaa

SEQ ID NO: 52443 - DNA, 3681 bp, Acinetobacter baumannii
atgaacattaaagaacttttttacaagccattagatcgtgcgataaacggggtggtcaaggcagaccagaatgacaataccacggtatatcaggaacttgatgagtatgtggtcacgaatgagctggaaaagcattttcgggactttttccaggcttatggcacagacctgagcgatccttcgattgccaatcgtgtcggcgtatggatttcaggcttctttggttcaggtaaatcacacttcctgaaaaccttgtcatatattctggccaataaagtggcacgtgacgcggaaggtaacgaacgcagtgctgcagaattctttgatgaaagcaaaatccgtgatgcgtttatccgtgcggatattggcaaggccgttagccatcatgccgatgtcatcctatttaacatcgacagtaaagccagctccaatgatgacggcaatccgattctgaatgtgtttttacgcgtgtttaacgaatatcagggttttagtgctgaccatccacatattgcccatatggaacgtcacctgggccagaagggggtgtatgagcgctttaaacaggcttttgaagaatctagcggcatgtcttggctagaagaacgtgacggctatcagttctatcaggatgatgtcgaaaccgcaatttcccaagccctcaacttatctgctgaagcggcacacaagtggtttgaggattctgagcagacttttagtgtttcggtcgaaaacttctgtcagtgggtgaaagaatacctggacagcaaaggaccccagcaacgcatgttgtttctggtggatgaagtggggcagtttattggcagcgatacccgcttgatgctgacactgcaaaccattactgaaaacctgggtacgatctgtaaaggccgcgcttggattatcgtcacctcacaggcagacatcgatgctgttttaggtgagatgtcttcttccaaagccaatgacttctccaagattgctggacgttttaaaacccgtttatcactgtccagttccaataccgatgaagtcatccagaaacgtttattacgtaaaaccccagaagcagaagcattgctcagatcggtgtttgagcaaaagggcgatatcttaaaaaatcagattacctttgaccgttcaggcccaaccctcaagaactatgaggggccagacagctttattaataactatccttttgcgccgtaccatttccagctggtgcaaaaagtttttgaagaaatccgtaaggttggtgcgaccggtgcacacctggcctatggtgagcgatccatgctggatgcgttccagatggccgcgaatgcgattgctacagatgaagtcggtgccctggttccttttcaccgcttctatacttcagtggaaggatttctggatacagcagtgaagcgtaccatcgaccaggcagggcaaaataagaccctggatggttttgatgtgcagatgctgcgtaccctgttcatgatccgctatgtcgatatcatcaaaggtacgctggataacttggtgactttgtcgattgagaaaattgatgaagacaagctggcattgcgcaagcggattgaagaaagcctactgcgtctggaaaaagagagcctgattactaggaatggcgatgagttcctgttcctgaccaatgaagaaagggatattactaaaaaaattaaggatgttaatttagctagctcggaagaaaacaaagaactcagtactctaatttttaaagatttactgcgggatcagaataaatatcgtcatcagaccaataagatggattatcagattggacgtttcctcgatggtcatagtattgatggtaaatatgaaaatgatttaaaagttgaagtcatttcgccactggatgttgattatagtctgtatacggaagcgggttgtatcaacaagagcagtgaagctgaaggacaagtgttgtttaaactagcagacgataaacagttctttaatgaactacgcacctggctgaaaaccaataaatttattcggttaaatgatgatggcactcagtccgatatcacccgtatcctggcagaccgtggtcgtgagaaccaagagcgtaaaaaacgcctgcgtgcccgggtcgaagaaatgctgctggacgcggaaagttatgccttgggtcaacacctgcaactttcatcttcaagtccaaccaccaagctggatgaggcttgtcgttatttgctggaaaacacttataccaaactgagctatctgcaggtctatcagcaggatgcctggcgtgaactgaacgccgtcttgactgtggatgatatggcgcagctcggattgtctctggatggtggtcaaacgaatccgaaagccctacaagaagtggaacagtacattgcgctgcgggcaacaggtacagaacgtattctggtctcggatgtggtggatcgttttgccaaacgtccttatggctggccagataccgagattttactgttggtgggtcagctggctgcgatggggcggatttcactgcagttaaatggtggcaccttacagttgaaagaggcctttgagcctttacaaaacagccgccgtcgccgtgatgtgtcgatcattaaaaaacgccagactgatgatcaggtattgaaacaggcacgccaactcacccaagacctattctcggccatgggaccagcgactgagaaagagctatttgaattctatttgcagcattttaagacttggttagccaactttaagtcgtacaaaagcaaaacagatgtcgggcagttcccgggcaagaaagtgattgaaaagtcgattctgactttggaacgcttgctggcgaatagcgacagcttcgatttctttaaggccgtggtcgagaacaaggacgactatctagatctggaagaagattatcgtgacattcatgaattctttagtaatcagatgccaagctggcaacaactgcaacaggccttacgtcattttgagaagaacaaacaggcgctgggcagtgatgagctggcgaaaaaagccctgtctgaattacatcgtatttcgaccactgaatcaccctacggcctgttaaataaagtggctgatttggttcgcacagtggaaagcgtcaatgagcaattgctgactgagaaacgcaatcaggcgatagaacacattgatgacaaaatcaagcagctggaagccgagattaaaaacagtggcatcgctaccgctgaattgagtaacaagctattacgcccactacaactgctgaaaacggatattgaagtggaaactagcctgtccactatctatatgttgcaaacccaaaccgccgtggagcgttttgatgaagccttgtatgagttggaaagcgaagttcaggcggaaatccagcgtcaggccaaagcggcacaactggctcagagcaaagcagagagtgtaaccaacactgcaaccatctccagcccagcaacatcaacacctgctgtgagttcggcacagcctgcgaccgccgtagtgccaccgaaaccagtggtagaagttgatgttgctagcatttacagcaaaagctcaagtagtgtctatctggaaacagaagaatcagtggatcagtttgtagacgcactcaaagctgaattgaaaaaaatcgtgggtgacaaaaagcgtgtgcgtatccgctaa

SEQ ID NO: 52444 - DNA, 3501 bp, Acinetobacter baumannii
atgaataccagtaatattaaaaaatacgcaccgcaagcacgtaacgattttatcgcagccatgcgcaagcaagccgccaaatatggcatcacggcaaaggctattcttcctgtagaacagaaaggcgacttgctgctgattggcgatcaggtttttccgctatcagtcatgaaaccacgtgacaagctgatcaaacgcattcaaaccagcagttttgagcagacgattgattatatcgcttacagttggtttaaccgtctctgtgccattcgttacatggaatgcaaaggcttactggagcatggtcgtcgtgtactgagcagtgccgatggcagtgcaggcttgccacagattttggaagaatgtctggatattgacttaccgggtttaaatgccagtcgtgtggctgaactcaaactggatggcaataaagacgaagagctgtatcgggaactgttactggctcagtgtcatgcgttgaatcaggtgatgccactcctgttcgaacaggtgtctgatgagacagaactgttattaccggataacctgaccaaaaccgactccttgattcgtgatctggtcagcagcattcctgaagaagactggtcggatgtacagattattggctggctgtatcagttctatatttctgaaaagaaagatcaggtgattggtaaggttgttaaaagtgaagacattcctgcagcgacgcaactcttcactccaaactggattgtaaaatacctggtacagaacagtgtcggtcgtttatggctgatggcacagcctgatagtacgcttgccagtgagtgggaatactatattcagccagctgagcaaagcgacgaagtcaatgcacaactgaaacaactgattgatgtgcggatcagtgaagatggcgatactttaaaccctgaaagcattaccgtgctggatccggcatgtggttcggggcatattctggtggaagcctatgattgcttaaaagcgatttatttagaacgtggttaccgtagccgtgatattccacgtttgattctggaaaacaacctgtacggcattgatattgatacccgtgctgcacagctcgccagttttgcgctgttgatgaaagcacgtgaggatgaccgccgtttatttagcaatccaccaaagctgaatattattgcgttgcgggatagtcagcctgagcgtttagatgcattcagtcaggatttggcaaatactggtgttgcacaggcagatttaaaagagttgcttgacttgtttgaacatgcttcgacctttggttctttgattcaaattcctgcagcatttgcgaagaaactacctgatttagaaataaagctcacaactgcatcagagtcaggcgatatttttagtcagcagtcagcccaagagttattacctttagtccagcaagctaaattactcgctaaacaatacgatgctgtaattgctaatccgccgtatatgggaggatctaaaatgaatagatctttaaaggaattcgctaaattacattttctaaatagtaatacagatctttttgcaatgtttattaagagagggtttgattatgctaagaatactggttttaatagtatggtcacaatgcagggttggctatttagttcatctttcgaagtgtttagagagcaattattagctgaaagctctatttatacattagctcaatttggagcaaaagcattctctgaaatttctggtgaagtagtacaaacagtagcctttattattcataaaggctttatagatggtcttaaaccaatctgctttagattagttgatgttgaacaaaatgaaaaaaacatttatttaaagaagcaattaaacagattcgatagcttgacacaaagtgattataaaaatatttcaggcagtccaattgcttattggtcaacccttaaaatacataaaattttccttgaagcaactccattatctgactatgccttattaaaagcaggaacttctactggggataatcctacttttcaacgtatgtggtatgaggtcgagataaataatattgaatttaaaagatatgaaaaagattttaattcattgaaaaaatggtacccatgtaatagtgggggtgggtttagaaagtggtatggtaacaatgaagttgtaattaattgggaaaatgatggagaagcaataaaatcacatagtagctctgctgtaagaaaccaatcatatttttttaaatcagggttaacatacaataaaattagttctggtatatttgctatacgattacgtgaaaaaggatttttatttgatgatactggtagatgtctttttacaaaagatcctaaacaacagaatatattaatgggatttctttgttctaaattagcaaataaaattttaaagattcttactccatcaatgagttttacaagtaatgaaattagtaaactaccgatactaattactgaaaataatacgatcaataataatgttataaaaactattgcatctgctaagttagattgggactcttacgaaacttcttggagctttactcaaaatccaattattcgtactcaacaaccagacttagaacaagcctttgctacatggcaacagcaaaatgctgacgccgtggctgagatgaaacgtctagaagaagaaaacaataagctgtttattgatgcttatggtttacaggatgaattaacgccagatattcctgatgagcaaatcacgctcacccgtgccgaccgtgaaaaagacagccagcgcttagtttcttatgcacttggttgcatgatgggacgttatagtctggacgaaccaggtctgatctatgcccatgcaggcaatcaagactttgatgccagccgttatcaaacattcccagctgatgctgacggcattattccattaaccgaaatgcactggtttgaagatgatgctacacatcgtatccaagagttcttaactgcggtttggggtaaagataagctagatgccaatatgcaatggcttgcagaaagcttagataaaaaagcaagtgaaacagcggaagataccattcgccgttacttagccagtaagttctataaagaccacatgcagacctataaaaagcgtccaatctattggttatttagcagtggtaaacagggggctttccaagcattggtgtatttgcatcgttataacgaaagtaccttggcgcgtatgcgtaccgaatacgtcatgccgctgatttccaaaatggctgcttatgctaattctctagaaacagcaaaagaaaatagcgactctgcggctgaaatcaaacgtatagagaaaaaactgcaagacttgcataagcaacaggctgaactcagtagttttgaagaaaaattacgtcactatgccgatcagcgtattagcttagatctcgatgatggggtgaaagtgaactacggcaagtttggggacttgctggctgaagtgaaagccgtgactggggaaaaataa

SEQ ID NO: 52445 - DNA, 1938 bp, Acinetobacter baumannii
atgcaattaagaagcctaaatgaaatttttgaaaatcgactgattcggatccctgactatcaaaggggatatgcctggcgtaaacaacaacttaaagatttctgggaagacttaaccttacttgaagcagatcgcgttcattacacgggggttattaccttagaagcagtagaccgtaaaacttggtcgaagtgggaagacgatgaatggctgattgatgatcttgattataagccctactttgtcgtagatggtcagcagcgattaacgacagcgattattttaatacaggcgattattgaaactgttcctgaaggaaaaagtatcgcaaatcagtttgtttctgatttaaaagccaaatttgttcaaagaaaaccaactgatgggattcgtgaaagctatatctttggctatgaaaaagataatccaagtgatgagtttttaagaactaaaatttttggtttgcagtctcatactaatcaattgcaggaaacgctgtatacacgcaatttattcaatgcaaagaaattctttaaagaaaaattagcggaactgagctttgaagaaatcacggttttatataaaaaattgacgcaaaaactgcgttttaacttgtatgaaattgatgatgagatcgatgtatttgttacttttgaaaccatgaataatcgtggcaaatccttaaccaatttggaattgctgaaaaaccgattgatttatctgtcgacattatatcgtgacaatcaggggcgttctaagcttcgaaaaaatatcaatgatgcatggaaaaccatttatgagtatctaggtaaaaatcctgaaaaacctttgccagatgatgagttcttaaaaaatcattggattatgtatttcaaatacagtcgtgataaaggggatgattataaaaaattcctgctggatgaaaaatttaatgcccgttgtatcacgcatccaaaaaatgcccaggacaccttgaaaattgaagagattcaggattatgtagcaagtcttcaacagtctgttatgaattggttctatttacataatccttatttcccagtagcaaataatctttctgatgatgagcaattatggctagatcgactaggacgtttgggttttaatgcatttagacctctaatcttagctgcttataataccaatactcctgcaaccaagatctctgaattgctgaaagttgcagagcggtttgcttttactttatttagtttgagtcaacgacgtgccaatacaggagactcagcaatttatggtttagcacgtgagcttttaacggggagaaacacaatcgatgcaacgattaattcaatagagggattaatcacacgattctttgatccacataactatttcacttatatcgaagacaaatacaagtttagggatggattctactcatggaagggtattcgttatttcctttatgaatatgaacattatctcaaagagaaaggaaagaatcctacaaccaaattaatgtggaatgagtttactgaaagcttggagggttatgtaactttagagcatatctatccacaaaaagatacagatccatactgggttagtaaatttggccatcttgatgggcaacaacgaaaatggcttacacattctttaggtaacttattgccattatctcgttcaaaaaattcttcattacaaaatgacagttttgatttaaagaaaaataatgacgaaggtattggatattacaatggatctgtttcggaaaatgaagtcaatcttaagaatgattggacaccacaagaaatcttagaacgaggtctagagctacttcgttttatggaggaaagatgggacgttcaattaggagatgaagcatttaaacgaaaactacttcaccttgatagtatccagatatttgttcctcaagatcaaaaagaggtagttgcatga

SEQ ID NO: 52446 - DNA, 2625 bp, Acinetobacter baumannii
atgaatctggatcaattacaaaaaggtctggaacaggctttctacactgaaaaacatcgaattgtcttctggtacgatgcggaacagtcatttactgaagaaatcaaagccctagagctaaatgatgtccagattctgaatatggcagaagagtcgagtctggcgatcaagctcaaactggaactgcaagatcagcagggcaaatacctgctgtatttcccaagtgctgagcttgaaaccgaaaaagactggttactggacatcaagctctattcacgcagtttctatgccgatcgtttctcgattattttcaatgagctgggtttacagcagcagagtctaagagaacatctggccaaacgtgaagaattcctcaaagccaaagctcgtctgagtacattgaaacgctatatccagcctgatgcagatgaacagaatctggatatggccatgattgcagctgtggtcaaggctgacagtgccgaactcatgcatatcgttctggcactggcagatgaaatggtacagcagaacctggctctggaagtcaatccagaatcctttgctgaactggaaaagttccaactagtgccggctttggtcacggcattacaggcggaaattggttatccggcatcggttgaagaattgaatggggaagcaccatttaagctcggtacgttctttatccgtttgatgaccacaggtttctgtgaaagcttgggcgatataccgctatgggctcaggaactggtgatgtcatcagtcagctcccgtgcaacagccagagcctttttgtcgcgctggagagacagttctaaatactacccaaccttcgatacactctcccagaccgtggccaatgcactgcggatccaggagaaggtcgggacttttgatctggagcagctgctcgatgtcatgacctttgaagtgattgaacaaaagatcattgttgatttggccagtcatatccccgcagtagccaaagctgaactggaacatttcagaacgattatttctacccgtctggatggctattgggcttccaaacataaggacgatgcaacccgccgtaaatatcgcactgtctatacagcgttgcagtcagcgattgagctcttcagcctgcgactgcagtttgattctgggttttatttcgactctagcgaagccttgtataaagcctacgagcaggagttgtatcgctttgatatggcttatcgccactacagtgctgcttctcaacgcgctcatgtcgatatcctgaaaaaactcgatgaagaagtggaaaattgctattcctactggtttattgaccacttggcacgcaactggggagagcggattgaagctgagcaacgcttgaatgtctggaaaatggcggatatcccaaatcagcagaacttctacgatacccacgtcagacccttgctgaattctgcaactaaacgccgtattgtagtgatcatcagtgatgcttttcgctatgaagctgcggtagagctgcgtgatcgtatcaatgaaaagcgttattctgaagcgaccttgtcttcacagctgggcgttgtcccaagttacaccacacttggcatggcctcgttgttgccgcatcagactttggagtacaaagaggccgcaggggatgatgttttagtagatgggcagtccagcaaagggactgcagcacgatccaaaattctggcagcctataatggtctagccgtgaccgctgaaacggtaaaaggctggtcgcgtgatgaaggccgtgaagcacttaaagaccatgatctgatttatgtttatcacaacgtcattgatgcacgcggtgacagcgcctcgacagaatcagaaacttttatggccgtggaacatgccattgaagagctgaccgagctaagccgtaaaatcttactgcatttcaatatttctaccctgttgatcacagctgaccatgggttcttgttccagcaaagtaaactggaatctgcggatcgttcaatcttgactgaaaaacctgccaatgtattgaagagcaagaagcgttatgtgatcggacatggtttgccagagagcaaagaagcctggaaaggttcaacccaagctacggcaggtacattatctacgactgatttctggattccaaaaggggcaaaccgtttccattttgtaggaggttcacgtttcgtgcatggcggcatcatgcctcaggaaattgtggtgccggtactgacagtgaaacagctacgtggtgaaaaggctggacagcgaaccaagcgtaaagttgaggtcatttctaccaaatctacgctgaagatggtcaataacatccagaagtttgatttgatgcaaactgaagctgtcggtgaactggtcatgccagtaaccctgtcgattgccatttatgatggcgatgtcaaagtttccagtgaagaaactctgacctttgatagcagtaccgactctgttgcggaacgggtaaaacaggtcagactgtcattgtctggcactgattttgaccgtaagaaagattacttcttggtgctgaaggacaaagacctgaatatcgaaatgcagcgctataaggtcagcattgatctggcatttaccgatgacttcttctga

SEQ ID NO: 52447 - DNA, 2040 bp, Acinetobacter baumannii
atggaatctgctaacgataaagaactggatcagctgctgaatgaacactttgctgggcgggtggtacgtaaggatctgacgaaactgatcaaagaaggggccaatgtccctgtctatgtgctcgagtacctattggggatgtactgtgcctcggatgaccctgagatcattgaacaggggctgcgtaacgtaaagaccgttctggcagagaattatgtccgcccggatgaagcggagaaagtaaaatccctggttcgtgaacgtggcagttataaggtcattgaccgagttaccgtgaagctgaatgagcgtaaggacaaatacgaagcctctttcagtaatctaggtattaaagatgctgagatttcggcaggcatcgtcaaagagtatgaaaaattactcgttggtggtatctgggtgattgcaacactcagttattattttgatgaaggacagtcaaattctccatttggtgtgagcctactcaagccgattcaaatgccgaatatgaatatggatgaactcttcagcggcagagcagcattaagcactgatcagtggtgcgagagtttaatccgttcgattggcatggaaccagcttctttaaaagaggacgttcaatggcacctattagcgcgtatggttccgttcgttgaaaataactataacgtttgtgaactgggaccacgcggtactgggaaaagtcatatttataaagaatgttcaccgaatagcattttagtctctggtgggcaaaccactgtggccaacctgttctataacatgagtagtcgccgtattggtctggttggcttatgggatgtggtggcctttgatgaagtcgctggtatttcctttaaggataaagatggcgtacagatcatgaaagactacatggcctcaggatcttttgcacgtggtcgtgaacagatggaagcctcagcttcgatggtttttgtgggtaatatcaaccaaagcgtggaatctctggttaaaaccagccatctcttggcgccgttccctgaagccatgattgattcggcattcttcgatcgttttcatgcttacatccccggctgggaaattcccaagatgcgcccggagttcttcaccaaccgttatggcctgattgttgattatctggctgaattcttccgggaaatgcgcaagcgtagctttgcagattccattgagaagtacttcaaactcggaaataacctgaatcagcgcgatgtgattgccgttcgcaagacggtttctggattgatgaagttgctctacccacacggtcagtttaataaagaagatgtacgccagtgtctggaatatgcgctacaggtacgccgtcgtgtcaaagagcagctgaagaaaattggtggcatggaattctatgatgtgcatttcagctatatcgataatgataccttagaagaacattttgtctcagtcaaagagcagggtggtggcggactgattcccgaaggtccagccaagccaggtttcttatataccatcgggctcagtaataagggcatgccggggttataccgcttagaacttcaagtgaccaaaggttcaggaaaattggcgacatcaggcttatggaattcaagcagtgccaaggagcaggtcaagatcgcatttgactacttcaaggccaatgcatccagaatatcgggtggcagtaaggtgctggaacatgacttccacttacatgtggtggaattacagaatactggcccactcagccatcttgctctgccaagtttagtggcttttgcttctggcctgttaggacgatcggtacaaagtcagatggtggtactgggtgatatgagcttgggtggttctgtgacaccggtggaaagtattgctgaatgccttcaagtagcttttgatgcaggtgctaagaaggttgctttgccaatgagtagcgcggcagatatccccacgattcctgtggaactgtttaccaagttccagaccagtttctatgcagatccggtggatgcggtgtttaaagggctgggtgtggattaa

SEQ ID NO: 52448 - DNA, 390 bp, Acinetobacter baumannii
atggcatgtgatttgattcttaaaattgatatacttcagaagctgtttaaagagttaaaaatctatcaaaatatttgggaagattggaaacagaataatgatgagtttaaaaaatctattgttgtttatgacaaattattctcatggaatacagcgattaatttaggtggaacaggtaatggtgaagagatcgttgcaggctttggcttagttgattgggtgcttccaacgactcaaaaaacttattcatatcctcttattactatcccattagaagtgaagatagaaaaaaatggattaatacgtgtggatgccaaagacacacgtgccaatatagaaatggatgccatcttatgggtaaatttatcaggattttttaataccatctga

SEQ ID NO: 52449 - DNA, 978 bp, Acinetobacter baumannii
atggaagtacaccagcgtggcttgattaccggtattttaatggctgctttagcaatttctccgcttgctgaagctaaacgtgcaggtggtggtaaaagccacggtatggcacgttctactacttcaagccagtcttatcaacaacctcgtcaagtgactccagttcaacaacctgctacagcacctcagagatctggtccgggtgttggttcaatggttgccgctggtgtggctggtgctgccgtaggtgctgttgcagcaaatgctttagcagatgacaaatcaacatcagctgaacaccaagtaactcaaccgggtaatgaacaagctgttcaagcccaagaagagaaaaaaggtggtatccctggctggctttgggtattacttgcagccgctgtagctttctttgtattccgtaaattgggatcaaaaaaaaaattagcagctaataacccttatgcaccaaacaatggcggtcaaaacccatttggccgctcggcagctccaaccaatacaggtgacaataccaatatctttggccaatctgtaggtggtggtgcagcaacacaagctccttttggtagcgcaacgacgaatagcggtaaccaattaccagatggtagtgagcctgcttctttcttacgcgttgcccgtcagcgttttaaccacattcagtcaatcaatagtgcaagtaacattgaagaaattcgtcgttacttaacccctgaactttataactctatgtataacgacatcatggagaaccaagatcaggacgttgctgagtttagtaacttaaatgcaatggttgtagacagtgcgactgaaaatggtcaatacattgtgagcgtacgtttcacaggtacagtaagtgaagatttaaacagcttgccacagccatttactgaaatctggcactttgtaaaacctgttggttcacagcaagattgggttgttgcaggtattcaacaagcctaa

SEQ ID NO: 52450 - DNA, 1212 bp, Acinetobacter baumannii
atgttaaacgatctaaaaatcaaacgattaaaaccaactgaaaaagtctttcgagttgcagatcattcagggttatgtttagaagtccgcccatctggtggaaagttctggcgcttccgttaccgctatctaactaaagcaaacatgctgacaattggccagtatccggaagtaagtttagcagaagctcgcttaaaaactctagaatttagaaaacaattggccaacggcgtagatccttcaagctaccaacaagaagaattattaaaagccattcaagcaaacacaggtacatttagtttagttgcagctgagtttctcgaatcgaaaacaggccagcaatctgaagaatggtttacacgccgcaaaagctattataaaaaagatatcttccccattctcggcaatatgccaattcatgaagtagattcaattgatattaaaaatgtgcttgatagtactatgtccagaattaggaaatcaggtaaaggtactggagaagtacgtggaattttcgtaagacaaattattggtgaggttatgacttatgccattattactaaacgaatatctattgaccctacatatgctttaagagggtatattaaacttccagaagttacccatgctaggccattaactgaaactgagaaaaaggagttattccccaagctaaatgcctatggtggttcgataagcacacgtaacgcaattaaagcggcaacttattcttggctcagatctattgaaatcagacgaggaagaaaagaatttattaattttgaagatgaaacttggactattccagctgtatcaagagctgaaattcttgctggcaaacgtaatatgaaaaaaaataggatgcatattgtccctttatcaaaacaacttattgaaattataaaagagcaatttgagctgtatccaaatagtgaatatatctttccgggtgaagatggcgacatgattggaaaaactactctaaatacagcattagataatctggatattgatttcactatgcatagcttaagagctactgcctcaactattgctaatgaaaatggatttaatcaagattgggtggagctgcaacttgcgcacgtctcagataacaaaacacgtgcatcatacaaccatgcccaatggttaaatgaccgtagaaatatgatgcaatggtgggcaaatcatgtagatagttgggctggttaa

SEQ ID NO: 52451 - DNA, 666 bp, Acinetobacter baumannii
atgaataaaaatgttgttgcttacagtatctcagtatcagtcattcttttaattatcctgatctggagtatcttagggattttatttaaatattggggtgatgtaacagcaattaaagatagtctatcaactatctcaggaatcttcggcggcttgaccacgttgggagccgccataatagctgcccatctctacacaaattggagggagcagttaacctccactgtccagcaagaacaagctaagagtattcagttagccgtcaacaaaattcttattaccttagacagttatgcaacctttattcttatgcacactggtatggggcatgaacctgaatatataaaggaagccacagaaaaagctcagcaattaattaaagaatatccaagtttggcttttaatctgaaactaaatttagttagttatgaagaaacttttcttaatggtaaatctatcttaactactgaggaaatggagaatattacatggtggtactattatggaataataaatgcattaaatcgaatcataaaaaaagaacatttacagaaaatagataatttccaaatttatataacagcattaaaaagagatagggaaatttttcaaagtttaaaaaagaaaataaatgatgaaatgattcctaagataaacatccaataa

SEQ ID NO: 52452 - DNA, 1884 bp, Acinetobacter baumannii
atgcttaatcgaaaaccaattaatattttggtcacctatattaaaaaacctaatattaatggttttcgttctttggttgagcaggcgattagtgaagtagagtcgaatgaaattgatttggtggaatgccatatttccgatgtgcaagacgttgctcaaagcttggtagaaaatggctgccagattcttctatgtactggtgcaacagcaagttttctacaaaagaaattaaacattgatatacaggttattcgaactggtacttttgatgtcattcaggccatatcaaacttaaaacaatataagcgcattgctttggttgggaatacatctacagttgaccttgagaactactcagatatttttgctttagatatacaacaatttaactatgactcatatttagatgccaagaaaacaattcatttaattaaaaatcaaggttttgatgccattattggttcacctgttgcagtggagttagccctaaatgaaaatctagtcggatatttggcgattagtgtgccgtctttaaaagacctgctacaaaatgccttgcgtactcttgaaaagattcgtagagaacagtactcaaccttacgtttaacagagatctttaatcacttaaatgaaggtatttgttttatcactaagcaaaaaaagatttctttaataaataactcaatgagttcgttacttgaaaaggactcttcagatgttttgaacaaatcagcactcgaaatttttgacggtttaaactttgatatcgaccaagaaaatagtcatcaactcgttcaatttaaaaatttaaaactggctgtatatatttccaaactaaaaaatgactacatagatggctatatcttaagagtgcaggaactaaatgcattagagcagtctaatagtcagtttagaaaggtttcatcaaagaattttaatacgcgatatacctttgaccagattttgacgcagaacactaattttcaacaaattatcaagttatcaaaagcatacgcaaaaacggatagtacgattctcattactggtgaaagtggtacaggtaaagaagttttagcacaaagtattcataaccatagcagtcgttataaagcaccatttgttgcaatcaactgtgcatcttttccagaaagcttgttagaaagcgaactatttggttatgaagaaggtgcctttactggagcgaagaaaaatgggcgtattggcctcattgaagctgctcatacgggtacgctttttttagatgaaattggagatatgccattacatctacaaactagatttttacgagtcttacaagaaagacaaattaaccgcttaggctcagtggtaagtcatcatttagatatacgtgtgattgctgcaactcatgcgaatttagaagagttagtacgaaatggaacttttcgggcagatctctactatcgtttaaatattttaagagtgtatacgccgtctttaaaagaacgaaaagaagatatcttgtatttagcaaattcctttctagagaaatatagaaaatcattggatgatttgccaaatattttacagaaggcttttttacactattcttggccgggcaatatccgcgaacttgaaaatattgttgaaagaatcaatgtgctgttacagcttgatcatgaaattttaactccagaatttttaaagcaacagttacctgagctatttcaatcccaaaatcagcccacggcgcaacctttattaaaagaggtaaaggttaatcaagagttgagtttgattgagcaaacacttgcagaagtagatggtgatttagaccttgctgcacaaaaactcgggattagtcgaacgaccttatggcgtagaatgaaactcataaatcactaa

SEQ ID NO: 52453 - DNA, 1635 bp, Acinetobacter baumannii; identical to SEQ ID NO: 48856

SEQ ID NO: 52454 - DNA, 204 bp, Acinetobacter baumannii
gtgctgccacaggttgaggttgcgcttttacttcagctaactgtacttgctgttgctgctgtacttgttgctgttgttgctgtacttgacgttgttcttgaactaatgcttttaatgcttcaacttcttgacgaagctttcgaatttcctctttatcagaagttgccgcatttgccccactcatcattaaagctgttactgtaa

SEQ ID NO: 52455 - DNA, 177 bp, Acinetobacter baumannii
atggacgttgaacatgaccacggtcgagtactttttgcattgcaagctcaccaaagaactcaaatgcagttaagtcgatatctttttggaaagcatgtaacacaggcattactgcatcaaaatctggcacacctaaaactaaaacttgtaggttttgtggttgacgctcaagtttaa

SEQ ID NO: 52456 - DNA, 1002 bp, Acinetobacter baumannii
atggctcaatcatttatttctaataaagaacaaggttttaccttgattgaacttatagtcgccttagctttaggcctaatattagtggctgctgcaacacagctatttattggagggcttttatccagccgattgcaaaaggccaatgctgaaatccaggacagcggtatttttggtttggaatatatgacacgtgatatacggcttctaaattatggaaatgttgtaaatccgcaattaacagatacaacgccttggggaggtattgtattaacaggttcaacagcaacaaatgccaacaatgttaattttattccaaaagttgatacaaatacttatattccggaagcgttattaagccgtggtgcaggtgatacggtaagtacagtgaataaccactggaaaggtctttcaaatatacagaatagttcaaatgctgaagtacaaagcgatcagctgactattcaattcattgccccgaccaatatgactaattgtgaaggtatgaatgtgttagcgggggacctaatagttcaacggtattttttacgtgttgataataatggtagctctcaacaggattatgcacttgcatgtgatgcgaatacccctgcggttagtgctacagctcaacctgatatcgttaatggattaggagatgcagggcaaattatactgcctcgtattgaccattttcatgtcttattaggtgcgaaaaacgcagctggtaattttgcttattacacaattcctcagtatcgggtggctgcacaagctgctcgagatgcgagtccagctgtggctgctccaagaattctgtcaatacaaatatcggtattagcccgttctacaaataatgctcaaaataaggcaatagaccctaatcagtcttttcttatgctagatcagactgtgcatgctgccgataacagaactcgctttttgcgacgcgtatatagcgtgacaattgctttacgcaatgcaatgggggaaacactatga

SEQ ID NO: 52457 - DNA, 555 bp, Acinetobacter baumannii
atgcatcactataagcaaaaagcccaagctggggtgggcttactcgaagttttggttgccttaattttacttgctattggagttttaggttatgttgccttgcagctaagagctatggatgcatcttcagaagcattaagtaaatctcaagccattctagtgatgaggggattagcagaaaatatccgtacaaatagtactctagctagccagtatcctacatttgtgcgtagttatagcaactatacatctgatactcctgcacccacgtcatgtttttattctctatgtactgcctcccaacttgctcaatttgatgcctatcaagcagctagaaatgctaatcaactgggtatgagaattacgatgtcaaattgccctggcgttacaaatacaatggtgcaacaacgccagtgcctatttgtcttttggggtaaaactgcgccagtgattactacaaatggaacaaatactagtgtggatgtttcaagttgtatgagtaataacggtgtttacgtgaataattcaacttgcttaatgatggaggcatattaa

SEQ ID NO: 52458 - DNA, 375 bp, Acinetobacter baumannii
atgcgtaaggcacaacagggtacttcgtatttagcaattttatttggggtggttatatttgcaattgcggcgaaagctgtacttgcagtttggccagcatattgggatgatcgtgtgattaataatcagattacagagctaatgcaacaaagctcagctgatatcacaccccaaaagtttatgacacagatggaccaacggctggaaatgaacaatattcgtgatctccattttaaggaaattgctgaagtgtttaacgagtctggtctaatcgtcaaaaagaaatatgaagtaagaaaacctttcttactaaatattgatttagttttaacatttgagaaaagttttgacaaaacatcagttcaaactaagtga

SEQ ID NO: 52459 - DNA, 1542 bp, Acinetobacter baumannii
atgaatagaaaaacggattttactcaatctttggatgcagaagttcttattattggcgctgggattgctggtatcagcgcagcctaccatttaaagaaatatagacccaattcaacctttattattcttgaaggtcgtgatgatattggcgggacttggagtctatttcgctatccagggattcgctcagattcagatatgcagtcttttgcctttggctttaagccatggacgcaaaaaaagactttcggtagcgcacaaatgatctgtgattatttgcatgaaactgttacagaaaatggtattgaccagtatattcaatttggcagctatgtaaccagtgcagaattctcatcgaatgaaggaatctggaccgttaaagtcaaacagaaagatcaaaaaagtttagttaccttacgttctcgcttcttactcatgggtacaggttattatgactataacaatggatatacccctgactttaagggcacagaagaattcaaaggacaaattgtccacccacaacattggccggaaaatctagattattcaggtaaaaaagtagtcgtcattggtagtggtgctacagcagtgacattaatcccagctatggcaaaagacgttgagcatattactatgcttcaaagatcacctggctatgtcgttgctatgccgagtgtcgatcctattgcagttgctttaaatacagttttatcaccgcaacgagcgtatgaaattatacgacgtaaaaatattgccattagccgcgggatttacaaactatgccaccgctttccaaaggtaatgcgtcatctactcattgcagatgtacggcgcagattacctaaagattttgatgtatcaacgcatttctcacccaaatataatccttgggatgagcgtttgtgtgtggtaccagatggagatatgtttaaagcgatttcatctggtaaagcatcagtagtgactgatcatattgaccgttttatcaaagaaggcatattgctgaagtcaggaaaagtactagaagcagatattattattaccgcaaccggcttaaacatgctggcatttagtaagattcaactcaccgttgacggtaagaaaattaattatccagacacgacaatatttaaatctatgatgctgtcagatatacctaattttgcctttgcatttggttataccaatattgcatggaccttaaaagtagatctggtatggcaacatttctgtcgtctccttgactatatggatgagaataaatacggaacatttataccggttattcataataaaaccatgaaacgggttccttttgttgatttgagcccaggttatgttcaacgtggtttggcacaattcccaatggcagggaccgaaggtccttggacactacaacatgattataaggttgactttgagcggctcaataaagggcctgtgtgtgataaggaattaaagttcactgcattggttcccaagaaaaagttagctgtcgttacggaaccatcttcagaagaattgatggtcaacgcttaa

SEQ ID NO: 52460 - DNA, 279 bp, Acinetobacter baumannii
atgtctaaatcgacaatcgtatctcgtggactcattctttctacactctcaattgcactcgttgcatgtgtcaatatgcaagcgccacagcctgcaattacatctcatattcctcaaaattttagtcaaaatcattctggaaaaacgattgcagaaaaaagttataaagaatttatttctgatccgaaattagtacaggtcattgaaatcagtttaaataacaaccgtgatttacggactgctacgcttaatattgaacgtgtacagcaagaatactaa

SEQ ID NO: 52461 - DNA, 864 bp, Acinetobacter baumannii
atggtgaataatagaaatatattagttcaaaacatccaaatatctgtttcaacagtaaataatgatgattttataagcttaactgatatggtgtcgggttttgagggtggatcatcacttatagaatcatggttaagaaataaggatactgtagaatttttaggtgtttgggagagaataaataactcaaattttaattccctcgaattcgagggaattagaaatcaagctggttccaatcgttttaccatgtcagccaagcgttggattgattcggtaaatgcaattggtatagttgccaaagctggtcgttatggcggaacgtatgctcacaaagatattgcttttgagtttggtgcatggttaagccccgagttcaaattatatctgattaaggaattccagagactaaaagaacaagaagctcaaagagattccatagaatggcaagttaaacgtgaattatcaaaaatcaactatcgcatccatacagatgcgattcagcaacatttaatacagaccgtacctcaaaataaacaaggcattgtttacgcgagtgaagccgatatgttaaacacgattgtatttggaaaaaccgccaagaattggaagcaagacaacccaaatctaaaggatggcaatcaacgggattatgccacagcacttgataaccttctgatggcaaacttggagtcatacaatagcatcctaataacccagggtttagatatgtcttctcgcttcaaagcattgaccgatacagctaatcaatttagacaatcaatgcaaaaatccacggcaatgggaaggcttgaggatcaatcaaagccgttattaagtgaacataaaactaaaaagaaatag

SEQ ID NO: 52462 - DNA, 213 bp, Acinetobacter baumannii
atgagtcaaaaccatgcagaacctaaatgccccgagtgtaaaattcaaggcaggaaatacattgtttcaagtgatagtgttgaagagtcaaaaggtggtgatacatggtttaatatcgcccattgctctgaatgtggacatgtttatggggtatttgccaaagttgttagatcaccatcaatcacaccaatgcctatctctagacctttttag

SEQ ID NO: 52463 - DNA, 276 bp, Acinetobacter baumannii
atgatttgtaagcttattgatgcgggtgtgaccaatcccgaagaaatcgaaagttcagttgatagattatataattttcttgtgtcaccaacgaaaaatgatattgctaatagtattcaaccagagggattggatctaaccttacccgagcgaagaataaatggtattaatacattacataaattaatagaccaagctgaccttacaaaggatcagcttgatgacattaagttatatttaaatccttattcattcttagactctaaaaaggtctag

SEQ ID NO: 52464 - DNA, 1209 bp, Acinetobacter baumannii
atgtctaacttactaactgcagctgaagcatttgcagctcttcaaaacggtaaaactgttctatgtcgtccagccggagacatgttggactttgccgatttagatcaattccccgcttctgtttttggcaaaccgggttttgaattctgcatcaaaatcgaaactattgaactggctggcattacattcacaaagccattaactattgatgagtatgaagacggtcaggaagtttttgtaatcagtacatattcacctacggtctatgttttagatttcaaaactaacgcattaattgattctattaacagtggcttcgttcaacgtgatgcagaaaacgccaagcttcaattaaaagcactgtccaaagcgttaggttttgaagttaatgatgacttaagtgttattcgcttaggtgatgaaaaaaagaaacagcgtggcaagaaatcaaaagctgagccagtggcaaaagtaataccttctgaagttttccctgcagataaacagccagcgattgttattacagaacaaactaatgtcacagcttccgaagacctattaactccagttactaacgaacttaatattaagccgaatgttaatgcccaatttgaaattttgcttgatgcaatccgtatttgccagtcagaaaaagagctagattcaacttgtgcgaatcttgaaaaagaaggctttactcaagagcaaattgaccaaataaatctggctaagcaagaacgattaattgaactcgattttattgaaatggatgctgctgatacagctagtgaacaagttttttctgatttagatgcgcaagaagatgatgaagtggcaaccatttcaatgcctgtaaattatgaatcattagttcaaagcatccagaactttcatacccctgaagaagttaatagtgttatccgttacaccactaaatggacggaggaacaacgtaagccactattaaatgaaatgcacaaacgccttgcagagttaaagcaaacaaaacaagaagatgatggattatcacctttaatcgtccgcctccaatatgcggcagatctaaaaacgcttgaagaattagagttagaaattccttcacgccatcaagacgttcataaaaccttatggaatatggccaaaaagcgccgtagtcaactcaatgcggccgctcatgaaccagcatatcttttagaggatggcctctaa

SEQ ID NO: 52465 - DNA, 285 bp, Acinetobacter baumannii
atgagcaaagttattggtgaagttaatttgagccctagccgtattgaaggtactccggatcaggtggctcttcatatttttgaagaaatcatttgtccaagtactgaggagcttatcaaaaacaatccggaagctgcaaaagtttttgcatatcacatttttggtttagcactgtctcagcttgcagaattccattcaactaaaagtttagataaagctgtaaccgttacccttcacaaccttttgcgtcaattgaagaaagaacgtaatgagttgaggaactaa

SEQ ID NO: 52466 - DNA, 663 bp, Acinetobacter baumannii
atgtctggctttgaagtaagtaatgataaaggtgaaattattgttagcgacacttacagacatttaggtgtaaattctgtacaagtgttagatggtggtacacctagttcaataggtgcatcttctggttgggcacctagttttattcaaacccctagtttggtatatccttcttttcgtaatgatttaccaaaagagactctttatattttaaacctatctgaaggaacagagttttgtgggaaatattggcatagtgtgcataacaataatatttcatttttaagttatgactacactaaaatctctggttatttagatgtatatgatgagcaaggtaatttaatctggtctgctatatctgctaaaaatgttccaaggattgtgcaaacatatcaattaacagcagataatttattaaacggtattacgctgagcattggttctaatgtaggtatcttattaaatactttaccttcgtggtttagaccgggacctatgaataacttaaatagagggggcttatttggtaggtactctaacggtcagttacaattacagtttgcggctgctgctaaattaaatgatatctcttcaaggattattgaaaatttagggcctaatggcactcttcctgttcatattacctcttttgcatcataa

SEQ ID NO: 52467 - DNA, 321 bp, Acinetobacter baumannii
atgccacaaggcttacaatgttttgatgaaactgggaagattgttgttgatgttacagatcgtcaaatgcacttaatacatacttttgaaatctctttaggttctaatgagtattataaggattatgtttatgacggtattacatctgaaactcatatagcaattgttagagaaaactgcttaggtaatatgactcagcaataccctacacttgcttaccatggtgggccttttgcgtctatttatacacctaatgtagtaagagtgagtgcattatctggtttggcccttcttactgttgatatttataggtatggataa

SEQ ID NO: 52468 - DNA, 894 bp, Acinetobacter baumannii
atgcaaatcaccattgtatctgcgggtaaaattattccagcatctgagctgattagtgcaactttaagaactgatctcgtacctattcccgcatccattgagttcacagttcaatctactactgaattagactcccttttaaaagaaggggagcaacttactgttaatgacatatctcatcctttcgaacttatcaaagttacccctctaaaaactcagactgttaaacaagatcggcgagtaggtggcatctcatgtattggtattttggctggttgtaaaagacttatcgaatattcaaagcaagcaattattagtaatgaaacttcttttaattcaataattcgagcttgtggtgcaacgatcagtctgggcagtgatttacctttgcctaaatttgtttgtttaaagggtagtatgcctacacagcgcttggctcattatctgcaacaagaagcagctgtaatttgctttcaaaataataaagtgtctgctcaaaaaattgattctttcttcaaaaaggaacctatcacaaaactagatcctagcagtgtcgtttggatatccagtaaacctttggaactgatgcaaaaatcatcttttgtcacagttgagaataacggttcaacggttgttggtgatgactcaataaccccaggccacactgtgacgcaaagagctggtttagatgcccgacaagtcaaaaacttggaaaaagttttgatcatgcgtgggaccattattagaccactaaatttgaactggaatgcaggcgatatattcgaaatagatagtaagaagtatgtcgttttaactgctgcacatcatatagatacaggcgcaatcgggggatcaatggggacttcatcaaagttctggattgctaatttgtag

SEQ ID NO: 52469 - DNA, 261 bp, Acinetobacter baumannii
atgcccttacaagaaatgatatcaaatattgaacatatttctgatgaacacaccatctatgctgaacaaccttgggatattacatccaaagcaattgctctatcaaacgatgaaaagatggaagtttttatcaaggatacgtgctacagctattttcttgaagtatttattatcaaagagttaatagaagacttagatgactctttaagtaatcaagacgttatatttaagatcattcaatacgcaataaatgatgcatga

SEQ ID NO: 52470 - DNA, 1746 bp, Acinetobacter baumannii; identical to SEQ ID NO: 48921

SEQ ID NO: 52471 - DNA, 6546 bp, Acinetobacter baumannii
atgaacaagaatagttatcgcattatttatagcaaagcacgtcaaatgtttgtggctgtggctgaaaatgtacgaagccaaaccaagacttctggtcaaagtgaagcaagtactcggaacaatattgataacaatgaatctcaggcatttcatcaactttggcaagtgaaagcactggttgcaagtataagtttgtggatgcctttagcacctgtctatgcgggtattgtggcggacagtgccgcaaatgctgcgaatagagcagtcatcggtgctggtaagaactcggcaggtacagttgttccggtagttaatattcaaactccaaaaaatggtatatcccataatatttataaacagtttgatgtgttggctgaaggtactgttttaaataacagccgaacaggagctaccactaaaacggtaggagccgtgggggcaaacccgtttttagcgactggtgaagcccgtgtcatcctcaacgaagtaaattccagcgctgcctcacgttttgaagggaacttggaagttgccgggcaaatggcagatgtgattattgccaacccatccggtattaatattaaaggtggtggttttattaatgccaataaggcaatttttaccacaggtaaacctcagttaaatgccgatggcagcatcaaacagtttacggttgaccaaggaaaaattacggtttcagcaaaccctaattctaaatttggcttgggtggaaataataacgatgcaaattatgtggatctctatgcgcgtgcattagaactcagtgcggaactacgtgccaaaaatgatattcaggtgattgccggggcaaataatatcagtgcagatttacaggatgttacagctaaaacaggtactggaacagcaccaacattggctgtggatgttaaagcactgggtgggatgtatgccaacaatatttatttgatgggaactgaaaaaggcttaggcgtgacaaacgcagggactattcaggcagtaaacaacctggtgattaccagtgccgggaaaattgaaaataaggggactttagaatcaaccagcccgacagagagttggttaaatatagaaacaataggagtagctacagatggcgatattctaaacagtggggcaattgttagcaaaggacctttaagtattaaatcatccaataatattaaccttaatggtggtattaaccttaatggtgggcgaattcaaagtaccgctataaaacctgtgcctgtaataatagaggctaaaggagatatcaaactttcagaaagggcatctatatctaatttaaaattaggttcaaatatgtatttgaatgctaataatattgaattagagaataaatcaagtattagcagtaatggtgctaattctgttattgcaaaaaatggtataatacttaaaaataattcaagtattacatcaatttatgatttagatgtttctgcacaaaaaattgattcttcatattctagcttagttgcaaataaaggaaatattaatattgtaggcaatagtgatgatggaaatttaggtaatattaatctttctgaaacaatattaaatgcggtaggtaatgtaagtttatatagctcggggaatactttattaaaaaatttggatattacaactttaaatgatggtaatagtaaaattaaaaactttaaactgtatagcaagaataacttactttgggattatttaacgaaagccccgcctcaattcgtgggtaaaatacaagcagaagctggtgagaaattaacattaagtggaaagaaattaattgcattagatggcattgatttacaagcaagtcagcttaaattagattctgagttagatagtcaaaaaaatattaatattacctctaaaaaagatgatctaattttagaaaaaaatttaaatacacaaaatgatattaatattacagcacttgctggtggagttactgcaaatagcttaaaggccacatcttcggctggaaagatttctatactcgcgaataaaaatctgaatttaaactcgacccaaacaaccaaggcgatgccttcagctgataaagatgaattagcaactgatcagacggttattagtggtttaaaaggcgtaacacttggctcgattggtgatggcactgttaacttgcaatcggtacaagttaatgcgaatcagggtgatatattagtttcgagtaataatggaatcaatctaaaggctaatagtgatgtttctgtgaaaggagacactggttataccaaaatagtcaataatgttctaaagggacaaaccgtttcgatagaaaatagcaaatccgatattaaaatccaaaatacagatctaggctctacggttggtaaacttgcgatcaatagtagagcaggcatgagtacaattatcgatagcgtattaacgtcaaaaggtaatactgaactctttgcaaaagatttactgactttacagggcgtgaatgctacttcagaccagcatctggcagtaagctctggccgtacggtttatagcaatgctgagtatacgccagcgaccaaatggattgcgaataaagtaacaaacttaacatctaagggtgtcacctctgtaacggctacaggaaaccaagtattacaaaatacaaatttaaccggcggagctgttctattagaagcgggtggttttattacaggccagactggattgaacttaaatgcagtcggaagtgatttacttaagaatgatacaaagttaaatagtttaaatggtgacctaactattcaaacaaattctaacttaacgattgacccaaaagtttacagcttaaaggctgttggtgatatcgagctcgtttctaaagctggtactttgactttaaaaggctatgaaggagctaaaggaaatggatcggaacaagttgttaagctggatacagcaaatggtggtattaatttagagggtactaaagttgatattcaaggttcacaactaatagcaaaaaaagatattcaagtggtatcaactaaggatgatcttttaattgatggtgtaagaaattctttctctaatataaaatttccagataaggccaatagagaaaaaatagtacaaactgattttattcaagaacttaatgtgctgaaagcaacccaagaatatctaaattatcagcaagcactaaaagatgcaaatgatcagataaaagctggtgaagattggatgagaacagcacaaggatcaattgcattaacagcaaaaagactgaaagatgagggtgagagaaaattagctcaggttaacgagacatataaaactttaattacaaacttgaatggattgcaacgaaatattgatcagtcaggggcaaatattagtttttacgagcaaaacttaaaaggacaacaacatgcttcggtaaatataaaatcaattgatggaaatattaatttagtttcggccaaaggtttgagtttaagtggttcaaaagtcaatgctcaacaaggagaagtccggatagaagcggcaggaacattaacaaataatatttataatattcaaggtcaatatgatagcgccactgaaaatagtgttaaacaaggcgctatagctagcagtattattattgatgccaatcaagattcatacgaatttggaaatgaaacagatacaacatatgcttggagaagtcctgtagatgctccaagcatatatgggaaaaagggtgtaaagattaaagctacaggaaccaatactacagacaacttagtattacaaggagtagatattcgttcggaaggtgatgttaatatcgaagcccataaaaatatcatttttgatgtggctgtggaaagtggttacgataagagtacaacgacggaaactaaaaagaaatggtatggtaaaaaaaccaccacaactacggtaaatacttcaaataaaagtgaaggggtttctgtaaacattaatgcaaagaatattaatattaagagtaaagaacagaatacaaaagaaatgacggggaaaaaccgtacaagtattgatatgtattctagtcaatttacagcaactggtggaaaaattagcattcaagctggaggagatttaaattttcttactgcacttgatgttgaacaaaacaccgatgatataacaaaaaagtcatcttttttaggggtgaaacttaataaatcaaagactacagctacacgtaatattaaggctgagttacctgcgacgttgaaagcagactatattggtactaaatcaggtttagacacacgtttaaaaggtcctgaatttgaatatttaagtggagcaactattgaagctggtggtgtaatttctcttgaaagtgcttctaatatagttgaacaaactttaaaaagagataaaaactctgtagtttggcagtcaatgcaagataaaggctcaattactgaaactgctcagctaccaagttttaatgggccagttttacctacctttaaagcggcaggtggtttgagtgtgcaagttccaatcagtgaaaaagatgttaataaagttgaattgagagatgaaatcctaaaactggcaaatcagccaggtaatgcttatctcaaagaattagttaatagaaaagatgttgattggcagaaagtacttcttgctcaaaaggattgggattataagtcacaagggttaacagctgcgggtgctgctcttattgtcattattgtaacgattgctacgatgggttcaggaactgctgcagccgcaggagctgctggtggaacagcagcaagtggaactactgtaggcttgggtgcaagtatgattggctcagctggtgttacaacagcaacagttggaggtgttacaacaattacaggcgtttctacgcttggggctatggcaaatgctgctattacaagtttagcaactcaagcaagtgtaggattgattaacaacggtggagatatcggtaaaacactaaaagatttagggagtaaagactcagttaagaatttagcagcttcagtagtcactgctggattgttgaacggggtggcgacaaacttaaatattagtagtaatgctattgtgaatgacattgccaataatatggcaactggaatgatacaaggcgttggcagtacgttgatagattctgcggttaatggtagagacctaagcgaaggcctggaaaaagctttattagcaggattagcaaactcattgcaagcaccattagcaggcgcaattggtgacacattagggatgagtagtaatgcctttgtgagtaaagttgttgctattgctgcgcatgctgcagcgggttgtgcaacaggagtggttgataatgaatgtaaatcacgggctcttggagctgctttaggggaagttattgcggaaaatatgttcaaaccagcgaatggcattgaatatacggaagcggaaaaatcaaaaattctcaacatcactaaacttaccactggagttgttgctgcctatgcggggtataatgtgactgctgctgcaaatgcagcggatatagccgtaagcaataattatttgaaccatgtgcaagagaagcaaaaaagtcaagaacttaaagattgtaatgttcttacttgtggtggagtcgttgttaaatgggctgcaattagtgcaggacaagatgcaaattatgcagcaggctttgcagtaggtattccgacctctgttgctgagtcggtagtaggtttggcaaaaatggctcttagcccaatacaaacctataaagcgatcaaagaagttatcaatagtgaaaacgctctaggtaatattagtgatgctattaaacaagattatacgaaccgtattaataagcttgaatcagaatatgaaaaagctggtattaaaggttcatataatgcaggtttagaagcaggcaaacttacagctgatgtagcgagtttatttgctggtggggctagtattgctaaaggtggagtgattctaacagaaaaagtagccgcaaaagtaggctataaagtcttgaaagatcctatcataatttccgataagggtattccagttactttagatggtcataaaatctatgaccctcaatttactccattgagtacaaatcctggagcaacttatagattctctgatcctacgcatagaaaaactgggggggatgtctattttggtgaaaatattgcgacctcttatttcgaagttagacaggctgtcaatggtaagtctttatttgtgggacaggtagaggttaagaacatgttggatttaactgaccctaaaatattaaaacaaatgggtattgatcagaagaagttgactcaaattgtgaatacctctactgaacaagattttgtatatgcgtatacaaacaagatagctaatcaagcttacgataaaggttactctggtattatttataatagcagtcgtaatactggatccagcaataatcgagcagtgattctatttggtggacgttatgatgctgaaaagattaaaccagtactagataaaccgattttaaagaaataa

SEQ ID NO: 52472 - DNA, 897 bp, Acinetobacter baumannii
atggatcggttgcagcaattttatatttttacagaagtcgctaaacgacaaagctttagtgaggtagcaaatcagcttgatttacctcgctcgacagtgacgagtgccattcaacagttagaaactcactatggagtacgcttatttcatcgtactacccgtaaagtcagtcttactcaagatggccaacgaatattgccagaatgccaaaacctgttgtttgattatgaacaattagaacagttgatccagacacaaaaacagcattataggggcacattaaagatttcgatgcctagccggattgtgcatcaagtgattattcctgagctgcctgatttttatcatcgttatccggatattcatttacagctcaatagttctgatgacctgactgacttaattgaaaagggaattgactgtgttgttcgggtaggagagctagataacagcagtttaattgcaagatttattggtcatttagtgatggtgaattgtgccagtccgcaatatttacaagattatggtgttcctgagcagttaaatgatcttgaacagcataaattaattaattacgcaggagctgtaggagaaaagcagggagaatttatatatcaaggtggaattgtgatgatggatagtgctttaagtgtgaacaataccgaggcctatatcgccgctgcttgtgcaggtttgggaattattcaacttccttattatgatgttcaggataaaattgaacaggggattttagttgaggtgctgagtgcttacagtgcaccatcgcttccacttaatattttgtatcccaacaggagttatattccaaagcgactagaagtttttatgaattgggtgggggaagttttaaatcgcaaatgtatcgtcatcttttag

SEQ ID NO: 52473 - DNA, 207 bp, Acinetobacter baumannii
gtgttaaattcaaatataaaatattcaagtttatatacgctcaatagccaaattgaagaatatctaaatacatcccatggctttattaatgccatgttacgtaaatcgggtggagaatattcagaaattcaaaaggaatcaaaacttctatttgatagtttaaatgaatcaattgaattagcccgtaagaacaatttaaaaacctaa

SEQ ID NO: 52474 - DNA, 468 bp, Acinetobacter baumannii
atggatcctaaaaaatattttatgctcaccagaaaaaaagaacgaaaacctaaaccaaagagtacgccactacctaaggcgacagaaaaatacttaaaagctgaagaagacttcactaaagccttagatgttctggaatttaaatatgaaaagaaatttcagtttaaatctacgaaacattggcgttttgatttccatttaattgagcatcgaattttagttgagattgctggtgggccttggtctggtggtcgcaaaggtaagcttaaatataaagcttggagccttgatcgatacgatgttgctgaagaaataggctatacagtagttcgtctggagtcgtcaacaagatttaaggttaatgagtcaggccctttacagttaagagttgactacgcaagccaatggttaaaaaacttgaagaggcacatattcaatggaacagatcagaccatttccaccaactga

SEQ ID NO: 52475 - DNA, 552 bp, Acinetobacter baumannii
atgaatcatcttaattatttatgggcattaatcggagctaattcaggccaattacaaacacttcttgctgtgataggtttaatttttgcagttattgcagctttatatgcgaaaaaacaaattaagctctctcaggatcaaagactttttgagttaaaactttcaatactaagtgccgcttatgaatgtaaggatttaatttatgagattaaacacaagaataacgctcttaaatctgaattttcgaaaatgctacaagctcaaaatttaactctcgaagataaactggatggcttcgactacaactatcacgaatactttaaaaaacaattagatctattaacaacacccgagcaagttattaatgaactaattacagggttaagtgatgaaaaacaaaatccttctttagaggaattggagcgatacctaaaacatttaacaacttctaaaggaagaatttattatgcccacaatggatatttaagaagaatagaagaactaaagcaaaaaaacgatatctttagtcaattaaaatatcctcatagttag

SEQ ID NO: 52476 - DNA, 198 bp, Acinetobacter baumannii
atgtcagaaaagatacgccgtgacgtcaaagttgattttgtaaaggggactaatttacttcagttggtagatgttgagaccggcatcccatttagtcgccagcaaagaactaccgttgagtcttatgaagataagggacttcggtatacgaaaattacagtcgagttcttaatacctcagaaggtacctaatgactaa

SEQ ID NO: 52477 - DNA, 1545 bp, Acinetobacter baumannii; identical to SEQ ID NO: 23311

SEQ ID NO: 52478 - DNA, 1515 bp, Acinetobacter baumannii
gtggcgatattgagcgcaattcgacgctggcattttcgcgatggtgcgtcgattcgggaaatagcccgacgaagcggcctgtccaggaacaccgttcgcaagtatttgcaaagcaaggtggttgaaccgcagtacccagcgcgagacagcgttggcaagttaagtccttttgagcccaagttaaggcagtggctctccaccgagcacaaaaagacaaagaagctgcgcagaaacctgcgcagcatgtaccgggatttggtcgctttgggctttaccgggtcttatgaccgagtgtgtgcctttgcccgacagtggaaagattccgaacagttcaaggcgcaaacctcgggcaagggttgtttcatccccttgcgctttgcttgtggcgaagccttccaattcgattggagtgaggactttgcccgcatagcgggcaaacaggtcaaacttcagattgcccagtttaagttggcccacagccgggcctttgtgcttcgggcttactaccagcaaaaacatgaaatgctgtttgatgcccactggcatgcctttcaaatcttcggtggcattcccaagcgcggcatctacgacaacatgaagaccgctgtggattcggtggggcgtggcaaagagcgcagggtcaatcagcggttcactgccatggtcagccactacctgtttgatgcgcagttctgtaatccagcatcgggttgggagaaaggccagattgagaagaacgtgcaggattcccgccaacgcctgtggcaaggggcaccagactttcaaagccttgctgatttgaatgtgtggcttgagcatcgctgcaaagcgctgtggtctgagctgcgccaccccgaattggaccaaaccgtgcaagaggcctttgccgatgaacaaggcgagttgatggcgctacccaatgcctttgatgcattcgtggagcaaaccaagcgagtcacttcaacctgccttgttcaccacgagggcaatcgctacagcgttcctgccagttacgccaacagggccatcagccttcggatttatgcagacaagctggtgatggctgccgaaggccaacacattgccgagcatccaagattgtttggcagtggccacgctcggcgtggccacacacaatacgactggcaccattacttgtctgtgcttcagaagaaacctggggcgttgcgcaatggtgcgccatttgctgaattgccacccgcgttcaagaagcttcaatccatcttgctgcaacgccccggcggtgaccgtgacatggtggaaattctggcccttgtattgcaccacgatgaaggtgcggtactcagtgctgtggaattggcattggagtgtggcaagccatcgaaggagcatgtgcttaatctgttgggacgtttgaccgaagaacctccacccaaaccgattccaattcccaaggggttaaggctgacattggaaccacaggccaacgtgaaccgctatgacagtttaaggagagcccatgatgcagcatga

SEQ ID NO: 52479 - DNA, 786 bp, Acinetobacter baumannii; identical to SEQ ID NO: 16905

SEQ ID NO: 52480 - DNA, 828 bp, Acinetobacter baumannii; identical to SEQ ID NO: 28366

SEQ ID NO: 52481 - DNA, 789 bp, Acinetobacter baumannii
atgggtgaatttttccctgcacaagttttcaagcagctgtcccacgctcgcgcggtggtcgagcgccatctggctgcgacactggacacaatccacctgttcggatctgcgatcgatggagggctgaagccggatagcgacatagacttgctcgtgaccgtcagcgccgcacctaacgattcgctccggcaggcgctaatgctcgatttgctgaaagtctcatcaccgccaggcgatggcggaacatggcgaccgctggagctaactgttgtcgctcgaagcgaagtagtgccttggcgctatccggcgcggcgtgagcttcagttcggtgagtggctccgccacgacatcctttccggaacgttcgagcctgccgttctggatcacgatcttgcgattttgctgaccaaggcgaggcaacacagccttgcgcttctaggcccatccgcagccacgtttttcgagccggtgccgaaggagcatttctccaaggcgcttttcgacactattgcccagtggaatgcagagtcggattggaagggtgacgagcggaacgtcgttcttgctcttgctcgcatttggtacagcgcttcaactggtctcattgctcctaaggacgttgctgccgcatgggtatcggagcgtttgcctgccgagcatcggcccctcatctgcaaggcacgtgcggcgtacctgggtagcgaggacgacgacctagcaatgcgcgtcgaagagacggccgcgttcgttcgatatgccaaagcaacgattgagagaatcttgcgttga

SEQ ID NO: 52482 - DNA, 861 bp, Acinetobacter baumannii
atgagtattcaacattttcgtgtcgcccttattcccttttttgcggcattttgccttcctgtttttgctcacccagaaacgctggtgaaagtaaaagatgctgaagatcagttgggtgcacgagtgggttacatcgaactggatctcaacagcggtaagatccttgagagttttcgccccgaagaacgttttccaatgatgagcacttttaaagttctgctatgtggtgcggtattatcccgtgttgacgccgggcaagagcaactcggtcgccgcatacactattctcagaatgacttggttgagtactcaccagtcacagaaaagcatcttacggatggcatgacagtaagagaattatgcagtgctgccataaccatgagtgataacactgctgccaacttacttctgacaacgatcggaggaccgaaggagctaaccgcttttttgcacaacatgggggatcatgtaactcgccttgatagttgggaaccggagctgaatgaagccataccaaacgacgagcgtgacaccacgatgcctgcagcaatggcaacaacgttgcgcaaactattaactggcgaactacttactctagcttcccggcaacaattaatagactggatggaggcggataaagttgcaggaccacttctgcgctcggcccttccggctggctggtttattgctgataaatctggagccggtaagcgtgggtctcgcggtatcattgcagcactggggccagatggtaagccctcccgtatcgtagttatctacacgacggggagtcaggcaactatggatgaacgaaatagacagatcgctgagataggtgcctcactgattaagcattggtaa

SEQ ID NO: 52483 - DNA, 1029 bp, Acinetobacter baumannii
atgaagctgctcaataaacacgggcaagcgatggcatcccagaatgtaaggatgatgctaccagaatctgtaccaaggatgccattacctatcgacacaccaattcctacaattggtgatttctatgccagttgcgaatactttgcaaaatgtaaaacgactaaagcaatcaaatttgaccattactatggatatcatcctaaggccagtttaacaaaactcggcaagaatattcatgaagccatcatgttctctttatactcacccattgcttcactacatactcaagggcttatatttcttccccctctaggtagtattgttctgagcaaaattcaagagcatgctctacctcaaattaatttatatgatccgtcaaatgaacctcggttcaataattttattgccgatattcactataccgcaatgcaaggtaacatccaaaaacaactgagaaactgggagactcgacaaaaggttgcatctttaaattttaatctttggctcaagtcggtatttgaacaatgtccaggtttcctaatcgaaacatatgacattaaagaacctgatgagatgcatccaaaatcgcccaaagatagtcttctttttgaagcccacattaagtctatcgtaaaagaacataaatgtcggccaaaggtaatctcaatcctctcaaaatggaccatcatgccatctggtcagttaattttgaaaatttttgttttggttgagtgcaacgattctgatcacttatttagtgagcctaacgaagtatctggaaaactacatactaatccccagaatcagggcttcgttatcattgagcgggttcctttacctgagcaacttcaacccaatttttttcatcgtaatgcacccaacttcggtaatcatatgcaacgtttggaatcttacttactccatacggattattacctaagaattggtgatatgaaaccaacaatgaaagtcctttatacccgcaatgacgataaattacctggcatgggtaaggagcactcaaaatga

SEQ ID NO: 52484 - DNA, 1116 bp, Acinetobacter baumannii; identical to SEQ ID NO: 45635

SEQ ID NO: 52485 - DNA, 1911 bp, Acinetobacter baumannii
atgattgaatctaatgctgtcaatatcgatcgtagtcgtatcattctaaaacccaatgtggttgtcggttatgaggggcaaccctataaaattgtgaatgttttaaatgccaatgacattgttatatcaagtcttgattcggtacgtagtctacaggtcaatgctagaagtttgaccatttttaatggggaaaatacgctaactgagcgtttgaataagggtgatcaggatattagtaatgaagcttggcagattgctttacaacgttatgagattattaagcctttgattgagtattcaacgactgaactggtcgaaaatagggcgaatgaatatgatgtgaatcgctcaacattgtggaaatggcttaaagattatcgggaaaataattctctaatggcattgattcccaaaaaacgaggttggacaactgaaaaatcaaggttgtcacctcaagtgagcaatatcattaaacaagctatcaatgatgaatatttgaatgcgaagaaacccagtatttccaaaacgattgaaattgtaaaagcagagtgttctcggcttcagcttgaagcaccgcatgaaaactctattcgtagaagaatcgaggctttaaatgattaccaagtaacgaaagcacgtcttggatctaaagctgcaatagataaatttaaggctgctgctggttcatttccaaatgctgattaccctttggcatatgtgcagattgatcatacacctctagatattgaaatcgtggatgacgagtttagagaagcgattggaaaacctcatttaaccttggcaatcgatgttttcagtcggatgatcgtagggtattacctatcactagaagcgccaagtacgacttcagtggcgatgtgtatcgcatcttgtattttgtcaaaaaaacgtaagttgatcgaactcgatattgatgctgaatggcaggtcgaagggattatggactcggtgcatacagataatggccccgattttagaaccaatcacatcagtaaagcttgtctaaagtatgggattcattgggaataccgaccaattggtggggcaagatttggcggtcatatcgagcgtatgcttggtatcgtcaatcttgaaatgcatgtcttggatggtacaactttttcaaatgtacagcagcgtgggacttatgattccgctaaacaagcctgtatgacattaaaagagcttgaatactatatcgtgtattggattactaaagtttatcaccagaagaaacattccgctttaggaacatccccaatcgttaaatgggaagaaggtgtttgggggacgaagacgacagcaggtacaggtttgaaagaacgtgtatcagatgaagataccttgtttattgattttctacctgaatttgaagcgactattcagcgtacaggggtgcaaaaagataacttattctattttgccgactgtttaagacaatgggttaattctattgatccagaggacaataatcgaaagcgcaaaagaaaattcttgtttaaacgtgatccgagggatatttcacagatttggttttatgagccatattctaatacctattttaaagtacctaccgcaaagcgagagataccaccgattagcttatttgaatataagcaggttcagaactatctcaaaagtgaacgtcaggatgttcagaatcaggatgagatttacaaggcgattttgcatctacgtgatcaacttaatcaggctagaagcttgactcgaaagcaacgtcgctcaaaccaaagaaaaaaggaaaatgcaaaagccattactcagctttccgaacagaatcagtctaaaaaggctgtagtttctgaaagtcttcagacaagtgatgatttgtggagtactcctttaactgcatttgacgatttaaggtga

SEQ ID NO: 52486 - DNA, 711 bp, Acinetobacter baumannii
atgaaaaaattgagtgacgaatacttacctgttagaaaagctcaaactgtttatgggagtatttcgggaaattatgcctttagaggtgagaaaaccatttggtttgaatcgacccttgagcgtgatttcatacttaagcaagaatttaataacaatgtgattgatgttatcggtcaacctgtagttatcccctacatcactgaattgggtaaccaatcaacctacactcctgactttttagtgcagttttcaagctcgaattgtgatgattttgaggattttcctgtaccaatgctcatcgaaattaagcctaagaaaaagcttgttgaggactgggataagttaaaaccaaaattcagagcagcccatcgttttgctgctgataaaggatggaagttcaaaattatcagtgaaacaagattatatgatcagtattgggaaaatattaatttcttaaaaaaatttagacgctctcatgtaggtgccgttgatcaacaactattactcgataccctacaaaagttaggtcaatcaacaattaatcaattacctgcccatatttttaaagataaaaccaatgttttaaaaggaattcaccaagtttgggcattagtggcaaagcgcatgattgcttgtgacttgtattgccctttaacggctgaaacagtgatatgggtgaaccaaaatgatgcatttgcgaggaatatctaa

SEQ ID NO: 52487 - DNA, 987 bp, Acinetobacter baumannii
atgaaatgtatcacttttaacggtgctggcggccctgaagttattacggttagtgaaagacctatgcctgagttaacagatgatgggatattaattgaagttgttgcagcaggtattaacggtccagatgtaatgcaacgaaaaggtttgtatgcaccaccgcctggtgtaactgacattcctggccttgaagtttccggaattgttaaacaagtaggcaagcaagttactaagtttaaagctggagatgaagtctgtgcattagttccgggcggtggctatgctgaatatgtagttgcccatcaagataatgtactcttcattcctgaaggtctgacattaattgaaggtggaattttactagaaacttttatgacagtttggtcacatctttttcaacatgcaaaattccgtccaaacagttcaattttaatacatggcggtacttcaggaattggtactaccgcaacgatgttaactcgagcttttggagcaacccaaatttttacaacagtttcgagcaaagaacatcaagaagcgagtttaaaaattggtgctgatgtagccataaattataatgaagatgactttgttgaggttgtaaaaaaacatactgatggtaaaggtgtagattttgttttggatattattgctggagattacatccagcgaaattatgaagtcgctgcaatgaacggcacaatattgcaaataggtgtgcttaaagggttagcggataaagtcaatatttttccgatgcttgctaaacgcctaactcatacaggcgctaccctacgctctcaatctgcagaagcgaaagcagaagtgatggcagcattgcaagaaaaggtatggcctttaatttcaaaaggacagataaaacccttgttatataaaacatttgatcttgaagaagctcgccaagctcatgaatttcttgatcaaggacaacatgttggtaagttagccttaatcgtcaaaaaataa

SEQ ID NO: 52488 - DNA, 384 bp, Acinetobacter baumannii
atggcggtcagcattgcaagtttttgtttaacctcaggcgtggtttccgtcattgcaatacaactgttttttggtctatctgccaacgcaatttggcctattttctatgcgacagcatcagattatgcgccagccggagcaattggaactgcaaatagtttaattacagttgctcagtatgtaggtggggcagtcgcaccgattattatgggatatttgcttacgagctttggtggctggcatagtcatcaggggtatatctggtgttttctcttaatgtcatgttgcgcgtttattggcgtgattttacaaattatattgggttatctcattaaaaaagaaaaatcagaacaagttgataatttaagtttgagtgcaaattaa

SEQ ID NO: 52489 - DNA, 834 bp, Acinetobacter baumannii
atgacgattcagttcaaacagcataagccttggttactcggaattacgattttaatcgtagttctgggccttgtcggttaccgttatattaaaaataaacaagccgacgatgttttaacgattggcattagcccgccttatgctgagctattacaaagcgttgccaatgaagtagaaaagcaaggcgttcatgtcaaactcgttgaattttctgattggcgagcacccaatgttgccgtacaaaacggtgatattgatgcaaactttttccagcaaagcgtatttctacgtaatgctgttaaagaaacgggttatgacttacatgcatttggtgtgggttcaggaagtcatgtgggtttatattcaaaaaaatataaatcacttgaagatttacctttaaatgcacgtgttgccattccaaatgatccggttaatttagcccgtgctttaattttattgcatcgtgctggcttaattcagcttaaagatattaataatgaactttcaactactcaagacattatagctaatcctaaacaactgagctttgttgaagttgaaggcccacagacagcacatgcctataacgatgtcgatttaattttcggcttcccccactacttaaaaatggcaaaggtaaccgacccacatagcgcattatttttagatccaatcgataaaaaatatgcaattttgtttgtgacccgtcgcgattaccaagacaaaaaccaaaaacttgcaacctttgttaaagcattccagaactcaaaacaagcacaagatattctggataaagactttggtaaaggtatgtggtttcaaggctggaaataa

SEQ ID NO: 52490 - DNA, 408 bp, Acinetobacter baumannii
gtgacttgtgtaggtttaatatttgcagtctttgtaccctttagtttgaacttctgtacagctttaagcaaaacattgagtagccaagcgatactcattgctttcgctggatctgccaaagccattaaatatgaaggtgcttttctaccaaaaacacgaatagaagtgattgcattctggatcggttgtgttgcactagcaggcacaacagcagatacacctttggcaacggtatttatttgctcttttacacctgctttccaaatatttacgagcccatcaacagcatttgatatcgttgctttaggattgcgttgtaaattatttaagttaactttatttaattgtttctgcgcgttttttaaattaccagcagagctatatacttttccattaagtactttttga

SEQ ID NO: 52491 - DNA, 465 bp, Acinetobacter baumannii
atgagtaaagaaaaaattgatgtgaaccggatgctcactgttggagagattgcaaaacgaagtggcgttgcagtttcggctatacatttctatgaatctaaagggctgataaaaagcactcgtaccaatggcaaccaaagacgcttttcagcgattactttacgatatattggtttgattaaagtggcacagcgagttggtattccattagaagaaattaaggatgcattaagtatgtatccaattggatctaaattaacagttgagcaatggggtgagctttccacaagatggcgtgcaaaacttgatgagcgtattcagaaccttatacgtttaagagatgaaatggatagttgtattggttgtggctgtctatctttagatcaatgtccattacggaatcccgaagatattttaggattagagggaactggtgctcgtattttagaaaggattgagagatag

SEQ ID NO: 52492 - DNA, 366 bp, Acinetobacter baumannii
atggcatctctatttcttggttcgagccttatcaaattgcttgatgtgaacggtagttttaaagaaatggaagacttaggtttagagcctgtctggtttttcagttacgtatctgcatttattttagcttcaggagcctattgtattttgtttgatcaatatatgtggctcggtgtcgtcacactatctacctatttactgctctctatcctcattacacatactttttggaacatatcaggtctggaaatcaggcataccctgaattttgtacttgaacactttgccatgattggagggctgatgagtatcgcaattgccagccatttccgccagaaatcaaaacaacatgaggtactcccatga

SEQ ID NO: 52493 - DNA, 1107 bp, Acinetobacter baumannii
atgaatatcaaaaagaaatggttagctattatctgtgttttcatacttattattggaataattgtttatttttatcttagatcaaaagatgattcatccgcacagtcttatgcttatccgcctgtaaaagttgcgttagtaaaagcacaaacacaggttacaccccgtcttctgtcgggtataggtgaattagaagcaattagacaggtacaagttgccagtgaggttgctggtagagttgataaaattctttttcaatctgggcaatatgtaaaacaaggtcaattactagttcaactcaatagtgcagttgaacaaggtgaacttgcacgtttacaggcaaaacttaaacaagcagaacgtatttatcaacgcactcaacagcttattgacgttaatgcaatctctcgtgaagaagtagacaatgctttggctgatcgagatatgactcgggctgaaattcaacaactacaagcaagaattgagcagaaatctattcttgcaccattttcaggtacgattggcatacgtcaaattcaccaggggcaatatttacggtcaggtgatgtgattgcaaacctagttgatacacaacaactgcatgtcaattttacccttgatgaacaactggcttcaaaactacatatggggcaacaagttcaacttaaagttgatgcttatccagaacaatcttttaatgcagttattcaggcaattgacccattaatcagtaagtcccgaacaattcaggtacaggcgaagttaagtcaaacacaaaaacttaaatctggtatgtatgctcaattacaggtgaaagaagcgaccgatacactgaatttagttgtacctgaaacagcaattacctatacagcctatggcaatactgtctttattgcaaaatctgcaaataaccaactgattgctcatcgtgtctctgttgaagttggtgaaagacaaaatggtcaggttgagatcctttctggcttgcgagatggtgatcaagttgtggtatctggtcaattaaaactcagtgatggaatgccaatagaagcaacggccaatacactgaaacagccagcatctccagaccaagcatcaaagtcttaa

SEQ ID NO: 52494 - DNA, 3093 bp, Acinetobacter baumannii
atgaaatttactgatctttttgtgaaacgtcccgtattggcattagttgtcagtatgctcattctattattaggttttttttcattagataaacttcctattcgccagtatccactattggaaagctcaaccattacggtaagtacagaatatccaggtgcttccgccgagctaatgcagggctttgtcactcaacctatttctcaatccgtctcttccgtagaaggtattgactacatgagttcatcatcagtacagggacgtagtgttgtcactttgcgaatggaacttaatcgtgattcaacacaggctctcactgaagtgatggcaaaggtaaatcaggtacgttataaactgcctgaacaagcctttgacccagtaattgagcgttcgtcaggtgaatcaaccgatgttgcttatgtgggattttccagtgaaacattgtctttatcagaactcactgattatttgtctagagtcgttgaaccaactttttccacaattgatggtgttgccaaagtacaaatttatggtggacaacgactatctatgcgtatttggctagatgcaaatcgtttggcaagccgtggggttactgcatctgatgttgcttatgcgatccgacaaaataactatcaagcagccccaggtcaggttaaaggtgaatatgttgtctccaatgttaatgtttcaacagatttaacaagtattgaggattttaaaaatctagtcattcgtaatgatggacaaagtttaattcgtttacatgatgttgctacggttgaactaggtgctgcatcaacagaaaccagtgccattatggatagtaaacctgccgtttttgttggcttacaggcaacaccaacaggaaatccattaatcattgttaagggaattaaggataagattcctgaaattaagaaaacattaccaccgggcgttaaagtcaatctagcgtatgaaacagcacgttttattgaagcctcaatagatgaagttttacatacatttattgaagcattgattattgttattgcagtcatttttttatgcctagggacattgagaagtgtcattattcccgtagtcacaattccattatccatgcttggtgcaatgggattaatgctggcatttggttttagtattaatttacttacccttttggcaatggttttggcaattggcttagtcgttgatgatgcaattgtagtagtagaaaacgtccatcgacatattgaagaaggacgctctcccattgaggctgcaattattggcgctagagaagttgctggcccagtcattgccatgaccattactcttgcggcagtctatgctccaatcggtttaatgggtggattaacaggttcattatttaaagaatttgcttttacgctagctggtgctgtattggtatcaggagtaattgctttaactttatctcctgttatgagttcttttttgttgaagcctaaacagcaagaaggaaaaatggaaaaagcagcagaatggtttttcgggaatttaacacgtacctatcaaaaggttcttaggttctctctaaaacatcgctggattacggttattttatctatcgctatctttatcagcttaccttttctctatgtactgccacaaaaggaacttgcaccatctgaagatcaggcaagcgtactcacagcaattaaatccccacaacatgccaatctcaattatgttgagcgttttaacctgaaattagatgaggttttttggacaattcctgaaacagtgaatacttggattatcaacggtacagatgggcctgcaaatagtattggtggcacaaccttgtctacatggtcagaacgcacacgctctgccaatgaaattcagcaagaattacagggtaaagttggtgatgtagaaggtaatagtatttttgttttccaagttcctgctttgccaggctcaactggtggtttacctatacaaatggtcttgcgaagttcacagggttatgctgatgtttatcaagcaatggaaaatattaaacagcaagctcgtgaaagtggtttatttatcgtcgttgatagtgatcttgactataacaatcccgtagtaaaaattgaggttgatcgtgctaaagcaaatagtctgggcattcgtatgcaggatattggtgaagcattagcaacactggtcggtgaaaattatgtcaatcgttttggtatgcagggacgagcttatgatgttattccacaaagtctgtctcaacaacgtttaactgctcaggcattaacacaacaatttgtaaggacagatcaaggttcattaataccgctatcaactgtggtgaagttgtcagaacaagtcgagccaaataagttaacacaatttaaccagcaaaactctgcaacattccaagctatacctgtacccggtgtttcattaggacaagctcttacttttcttgaacaagctgtctctgatttgcctgcgggctatagttatgactggcaagcagatgcacgccaatatatgcaggaaggaaacactctattatttgcctttatggcagccttaatagtgatttatcttgtccttgctgcacaatatgaaagcttggttgatccattgattattttaatcactgtaccactgtcgatttgtggagctttactgccactcgcctttggtttggcaacaataaatatttatacccaaattgggctagttacactcatcggcttaattagtaaacatggtattttaatggttgagtttgccaatgaattgcaggtgcatgaaggcttaaaccgtcgtgatgcgattctaaaagcagcacaaatccgcttacgacctatcctaatgacaaccgcagcaatggtatttggtcttgttccattattattcgcaactggtgcaggtgcttacagccgatttggtttaggtgttgttatcgtcagtggcatgttaattggaacattctttaccttattcgttttgccgacaatctatagcctattggcgagacaacatggtttaaccaccgattctcaacgttatcaagatttaaagatgcttgaagcaaaggagcatcatcatgaataa

SEQ ID NO: 52495 - DNA, 1410 bp, Acinetobacter baumannii
atgaataaaatgtctcaaatagtttatgccttgtgttgtatcagtatgggtctatcaggttgtcaagtcatacagccttatcagcctccgacacaggaaacgcccattactttagttagtccagaagcaaatttattgcaaaacagtaatctgctttatgcagaaacagcatggtgggagatttttaatgataaacaactcaatggactcattgaattatcactaaagaataaccatgatatacaggctgcttatcaacgtttattggcagctagagcagttgttagagagcaagagttaaatgagcttccacaagtgacaactggagttaattatcagcaatccaaacaacaacagctcaataatcaaggtaataccgagcgtagaaccagtcgcagtacgcaaattggttttgatatgcaatgggagttggacttgtttggcagattgcaacacctaacccaatctgctattgctcaaagtcaggctcgtgctgcttacctccgacaaattcaactcagtgtcattgccgaaactgcacgaaactattttgaactctgttcagttcaacagcaaattgaacttatacaggaagaaattgactcatggcagaaaacactagacatacagcagtcaaagttagcattaggacgaggaaatcctgaagaaattgaaacaactcaatcttatctatatcaggctcaagctcaactgccaactcttgatgctgaacgacagcgattacgttatcgcctagatattctgacaggtcaagatattggtcaaaatcaacaattattagctgctgataaacaacctgtcttattccagcaaatttcactgggagatattaatcacctgattatgcaacgtccagatgtagtagaagctgaacgtctgtatgcagcccaatatgaacaaatcggcgcagtaaaagctgagctatatcccaaagttcagcttggtggttttcttggattttttgccctacgtggaggtgatttaggtacgaatagccaaagttatcgtttaatgccaagtttatcatggccagccctacacttaggttcagtaaaagccagagtgaatgcgacccaagcagaaacacaacatgccgaaatcctatatcgtcaaaaagttttactggcacaagaggaagtagaaaatgccattacagcgtttattcatagccaaaatcagcaaaaactactggttcaggcaggtcattctgctcaaactgcattaaatatcatccaaaagaaatatcagataggtactgttagttatataaatgtattggataatcaacgtcagttgaataatctcaagcaacaaatcaaccactcagagaatgatagttttttgcagctgattaaaatttataaagctttaggggttgggataacctga

SEQ ID NO: 52496 - DNA, 621 bp, Acinetobacter baumannii
atggcacacttttctttaccagatttaccatacaatcacgatgctcttgaacctcatatttctaaagaaacattagagtttcatcacgataagcaccatcaaacctatgtcaccaatttaaataatctagttaaagatactgttttagccgatcaatccttagaagatatcattatcacaactgccaatgactcagcaaaagcaggcatattcaataatgcggctcaaatctggaatcatactttttattggcactgtatgaaaccacaaggtggcggcaaacctgaaggtactttagccgccaaaatcgaagcagattttggttcatatgaaactttcttaaaagagtttaccaacgcagccattacgcaatttggttctggttgggcatggttagtcacagatcaaatcaatggtaagttatctattgctaaaacttcaaatgctgataccccccttgcacatggtcagattgccttactgaccattgatgtttgggaacatgcttactacattgatttccgcaatgctcgaccaaaatatatcgaaactttcctagaacacctgatcaactgggaatttgtcaatgctcgttatataggtgaagttacatctctataa

SEQ ID NO: 52497 - DNA, 276 bp, Acinetobacter baumannii; identical to SEQ ID NO: 48683

SEQ ID NO: 52498 - DNA, 792 bp, Acinetobacter baumannii
atgactaatatttttccggacatttattttttacataaattggctgatgtggcagatgcagagacattacctagattcaggtctcatatagatttagaaattcaaacaaagctaaaaaagaatgtgagttttgatcctgtaactattgcggataaagctgccgaatatgccatgagaaaaatgattacagaatattatcctgatcattcaatcatgggagaagaatttggagcgattgaaaacggagaaataagatggattttggatcccattgatggtactagaccctacctacttggtattccagtttggggaactttaattggattagagcataatgataaaatgtgcttaggtatgttaagccaaccttttaccaatgagcggttttggtctgatggagaaagttcatttcaccaatacaataaagtgcaaaaaaaattaaaaattcaaaggaataaaaaaataagtgaagcgatattacatatcaatcatcctcgttcatcaaatctatacccgcatatcaacttcactgaattatctgaacaggttttaatgacacgttatggcgctgaatgttatgcctttgcaatgttggcagctgggtatattgatatttgttttgagtttagtttacagccatacgatatagccgcattgataccaattatagaaaatgctggaggagtgatttcaacacttgatggatcttcagcacacaaaggtggaacaatcgtcgctgctagttctcagttgctacatgaacaagcattaaagatattgaatagttaa

SEQ ID NO: 52499 - DNA, 198 bp, Acinetobacter baumannii
atgaaaatttatttaaatgggcaaattacgcctactgattgtaaaaatttacttgaactaattcaatatcttgcattggaaaataaacgttacgctattgaatttaattcaagaattattccaaaaagtaaattggaatgtacaaatatatctgaatttgaccgtattgaaattattcatgctgtcggtggtggctaa

SEQ ID NO: 52500 - DNA, 534 bp, Acinetobacter baumannii
atgatctatgaactaagacattataaattcacacctgaaaattggtcgaaatacttaaaactatttaatgataaatgcttaccaatccgtttagataattatgggattcttaaaggtaaatggaatattgagcaagatggatatattcacttttatcatttatggcaatatgaatcattagaacatagacacctattaaggcaagaattggctaaaatacagagctggcaagaagatttcattcaatatgctgcaccacttattcacgaacaagatttaaaagttttaaaccttactgatcgaaataataactttaatttccaaagaaatctcaacatttatgaaatcgactgcaaagtaagtacattaaaaaatgtaattaacagtgttgcagaaaacaacaaggataatattcaattgaatatagttgagtttcctaatccgaatgagattattttattttcagaaagccaaaaaaatatagaaaatttaaatataaagaatattaaacatacaacattaaaaatgatataa

SEQ ID NO: 52501 - DNA, 387 bp, Acinetobacter baumannii
atgaatatgttagccaatatctcgtttgatgctgctgtattcacaagccttgaagtgatgaatgtaggtgttgaggatggcgttgttcagttctctttgtcggttcaaaacgctgagcacatctacattgttgcaagtgtcaaaggaattgagaaaaacgactctttcgaatatggcgaaggcttggactatcaagactggaaagatgtggattacaccatgatgacagttgattcatctagtcgaccacatgtcgaagactttgattatgtcgatgcagtcgaaggtatgccctttgcccttacttcttctcaaattcaaaagttgaatgagtatttagaagaactggcaagagaagaaaagatcaatgagttgcgaggtgggtga

SEQ ID NO: 52502 - DNA, 228 bp, Acinetobacter baumannii
atgtctaaacgcgccctactccataagtcaaaactagaagcattcaagtcttggcttattgaaaaccaaattcagtatcgagaaggcaaaggagattttcaggttctacaggttgaagtaaaagacaggttttacccgatatacgacaggcttcaaggcgaccacttcacaactcaaagagaactcatccctttaattaaaagatacatagcaagtgaaaagaattag

SEQ ID NO: 52503 - DNA, 309 bp, Acinetobacter baumannii
atgaaagtttcagaaaccttttatgttattcgcaatcaagtgggtagtaagttcatatgcaaccacaaatacggcacggaaaccaagtttttaacatcagctgagcgccatgaaactttgcttgaagctaatgaggcgcttaccgttataaaaaaagttttctcagacaggttggttaaatttaaaaatgaaaaccctgattacctagaaagcaaatggcttttacgggatgttaatagccgcttggaatcgattgaaaagttaaaagttttcaaatgtgagcgtacatatttaatggttgatgggtga

SEQ ID NO: 52504 - DNA, 408 bp, Acinetobacter baumannii
atgacagatttgaataaggaaagagaggcttttgaaagattgcctttggctgaattagcaatcaaaagtgaatttgtttattacaacgaagaaacaaattcatattggcctaatgaggatttttgccctagcgatgctcctgaaacaatgaactttgcttgggaagcatggcaagaaaaagccaaagctcaggcggtgccagagaaaaagatttacttaacctgtgagcaattatatgcagcagcaaactttggtgcaccaaacaaagatccagaacttttagaaactgaattaacaattgcttggtttgatgaagctcatagcggcagtggttactacgtttatataagtgagtatccagaagaaggtgcaatgaagctggaaagagaatcgggagctgaaaaatga

SEQ ID NO: 52505 - DNA, 213 bp, Acinetobacter baumannii
atgagtgaatttaattctatcaaagttcgtttaaagctctctattggctttgttatagggaaccaagaagaggatttattgctaagtgactacatttcagaagaagaatggaatgcgctaggcttctttgaaaagcaagaatttgttgaaaaggaaatcttaaacgaatgggctaatgggtacattgaaaaaagcgccgaggtgttggaatga

SEQ ID NO: 52506 - DNA, 936 bp, Acinetobacter baumannii
atgaagaatggattagtagtgaaagataatgccttgataaacgctagttataatttagaagtaacagagcagcgtttaatacttttagcaattatcaatgcacgtgaaacccagcaaggaattacatcagatagcaaactagagatacatgctagtgactatgccaaccaatttaatgtgaagaaagaaacagcttatgaagcattaaaaaatgctgtaaataatttatttgaacgccagttttcttttagagaaacaacaaaaaaagggattggtattgttcgatctcgctgggtaagtcgaatcaaatatattgatgattcagccatattagaaattacttttgcaccagatgtagtgccattaattacaaggcttgagcaacactttactagctatcagttaaagcaggtttctcagcttaccagtaagtacgctatacgtttatatgagcttcttattgcgtggcgtgaaattggcaaagtaccaaaaatagaactctcagaattcagggaaaaactaggtattgcagctgatgaatacaaagcaatgaatcacttcaaaagccgtgtattagaaccatctattaaacaaattaatgagcataccgacattacagtaagttatgagcaacataaaactggacgtactattactggcttttcattcagatttaagcagaaacaagctcttaagattgcaaaaccaatagatgctaaaagagatccaaacacccctgacttttttatcaaattgactgattctcaacgtcatttatttgccaataaattgtccgaaatgccagaaatgggtagatattctcaaggcacagaaagctatcagcagtttgctcttcgtattgctgatatgcttttagagcctgaaaaatttagagagctttatcctgtattagaaaaagcaggattttctgtataa

SEQ ID NO: 52507 - DNA, 768 bp, Acinetobacter baumannii
atgaaagataggatttatgacttaagttttgaagaagctaataagtttttaaactttaaatttccagatagggaaagttttataaagttagaaaaggacttctacagcctacagaaaagactaaaaaaacataattgggaagaattagttggaaataggtttagctggctttttattaaagaattaactgagcttcactttgaagaaagacttagcataattaatgaaattgaatatctagaaaatccagagcaatttaaatcccattcaaaagatacacaagtttcaacaaaagggcttaagggtttgcattataaacactatatacaaggtggatttataactctgcaaaaactctatttccaaaaatattcagaagataaaggttatagggaaaaaataaatgaaatcattttattagaagctgaaaataatgatcaaaaacccttacatatcctaggaaaagtttttaaagagtacttttatgatcattttctaatgcgcctaggggtagaggatgaggcaacacttaaattaagaagacgactggaagcagagggaaaacccataaggaaattaacaggagaatatattgtatttcataaatatgagaataaaaattactatcttgccctatggaaacataaagacaaaaagcaagatagctctttatatgatatagaggagctaaaaaaagctagggaaattaaggcgtcttgtaaaaatgagtttcctgaattttcagaccaaattcttcttcatatttga

SEQ ID NO: 52508 - DNA, 279 bp, Acinetobacter baumannii
atgacaaaagctgctgaaactcttgaaaagaaaatcgaagcccagttagaaaagctgaaacagttaaaggctcgcaaacaagctatcgaagctagagaaaaatcaaagaaaaaagagcaggaaagaaaggacgatactcggcgtaaaattttgctcggttcttatttgattaaaaagatgaatgccaatgaagcaaacaaagaaaaaatactcgctgaactcaacgagtatttaactgaagaacgggatagacagctttttggtttgtctaagctgtaa

SEQ ID NO: 52509 - DNA, 954 bp, Acinetobacter baumannii
atggcaatctatcattgttcaactaaaacagttaaccgaagttcaggacgaactgcggttgcatcaagtgcctatcgtgcaggtgaaaaactagaagatgaacgcacagggctgacccatgactttacgagaaaagaaggtgtggcttataccgaaattatctcaaacttagatactcaaattgatcgtgccgaactctggaatctggcggaaaaaaccgaaaacaggaaagatgccagaaccgctagagaatgggtgattgccttgcctgatgaattggatgaagaacaacggaaggaactcgctaaagaatttgccaagtccttagtagatcgctatggggtagttgcagatttagcgattcatgcacctagcaaaggtggtgatgataaaaaccatcatgcacatatcttgctgacaactcgcaaagcagaattagaccctgaaaataaattggtccttactcaaaaagcagaaattgagctaagtaataccaaaaggaaaagcctaagcatgggaacaagtcaggaagaaatcaaacagattcgagccacctgggcaaaccttgcaaattacgccctagacaaagcagggtataaagaaaaaatagatcatcgcagttatgccgaacaaggtaacggtctacaagctactatccatgagggcagtaaagtcacccagatgcgcagaaaaggcatagatactgaaattagctgtttcaacgatacgatcaaacagcaaaacagccagcagcttcaatataaacaacagcacaaggaaaaaaccttagaacaagggtttaaccgtgttgagcaaggttttgagcaatggaagaaagatcaggcagctaaacgcttagaactggaacataaaaagcagttaaagctacagcaagaacaagcgatgaagcagaaacaacgcaaaagcatgaatagaagtggaccttctctatga

SEQ ID NO: 52510 - DNA, 471 bp, Acinetobacter baumannii
atgagcaatcaaaatgatttagacgaccagttatatattttattagcctctatgaaggaatacagagaggctatagcagacgataagaagcgattagagacgttttacacccaagtagctagtggggttctagataaggctgaaaagtcgctgcaggagacaaataagcaggctataggggcattaaagagtcgtattcaggaattagacaaagcaacaaaccgtcttaactatcaattcattgctgtgtttgccagtgcctttatagcgttggtaatggtgctgttcttggcaatatttttatttataccaagtatggatgaaatccagcagcgcagatcggaagtgaataacctaaaaaaatacagcttagacctatcaaattgtgatgggaaaacatgcgttagaattataaaaaaacagtgtggctatggaaaaaatgccgattattgtgtaattgaccccaaataa

SEQ ID NO: 52511 - DNA, 960 bp, Acinetobacter baumannii
ttgaaaagttatttactgcttgttgtaacattaagtatgagtatctctgggcttgccgctattgatatttaccctaatccaaacttaacagatccatccttggcaacaactttcgcaacacaactaagaaatatgaaagtaaaggaaatggatcaagtcataaaaggtgagtgtaatcaatttaaagaatatgcatatttgtctattcaaaactggaaaagctttaaaaatcaaacgaaatctgctgatgaagctcaacaatactcccaaaatttagtacgagagatgccgtacagattatcttttcaatatacatttccacttggcattcaaatgtattctataactgaagaacacttaaaacagactacattaaatggcaatatttcaaatcaatacaagctcttagaccaagtatatagtgtttgtttgacaatgaataattccaaatactttgaattgctttcatctaaaaagtacttagtagggaatcaaagcccctttagttctgaacatgatgtattgaagatgtttgattcttctaattctctatttagatccatctctccaataccatccaaagaagataaattaactccacctaatatgactaaatctataaatttcacacctactgaatttggcatagcctataccttgattgatcaagatataaaaaatagttttatacaaagtgacatccgttggatcgactataaaaaagtctctagggatatgcaggacaactttactaaatttatgaaggacggtggacggaataagaattttgctcaaattgctagtttaatcaaaactgttagcccaaaaattacgaataataatgaaaaatatattaccactcagactgaaatagattctttttttaattctcttaacttagatgatgatcccgttttaactaaaaaattaaaagataatttaaagaagtttaattattaa

SEQ ID NO: 52512 - DNA, 900 bp, Acinetobacter baumannii
atgcgttggagagatcgtcgagtcagtaccaatgttgaagaccgtcgaggcggaggcggtgttagggcaggtggtattagtattattggtttggttgtagcatttgttgcatggaaattttttggcgttgacccccaacaagcatatcaggcaacgcagcaggttaccgcttcgcaacaatcaaatgcaactgcacccgaaagtttaacagccgagcaaaaagaagcttctgattttgttggaacagtattagccgatacagaggatacgtggacacctatttttaaacagttaggtaaaacttatacgccaccaaaattagtcttgtttagtgggatgattcagtcaggctgtggtacagctcagtctgcaatgggtcccttttattgcccagcagatcagaaggtttatatagatacagaattcttcaaagatatgcgtgagcagatgggaatatctggcgaacaaaatcagacagaattatcgagacaagatcaggcaggggactttgcccaagcttatgtagttgcccatgaagtaggacatcatgttcaaactttgcttggtatctcatctcaagtacaacaggctcgtgcacaagtcagtcaaagagaaggtaatcagttatctgtacgtcaagaattacaagctgactgtttagcgggtatctgggccaatcataatcaacaacgtactcagtttttagagcagggggacgttgaggaggcaatggatgccgcgcaaaaaattggagatgactacttacaaaaacgggcaactggacaggtcgttccggatagctttactcatggtagtagtgaacagcgaatgcactggttccaagtcggtttaaaaactggtgatattagccaatgcgatacttttaataattctatctaa

SEQ ID NO: 52513 - DNA, 1014 bp, Acinetobacter baumannii
atgagtaatgttgatcagcgtccaattattttgacaggcgaccgcccaaccggacaacttcacctcgggcattttgtcggttctttgcgttctcgtgtaggtctacaggatagccatcatcaacatctcttattagcagatgcacaagcgttaacagacaatgccgataacccagataaagtacgccgtaacattttagaagttgctctagactatttagcggtaggcattgatccaactaaaaccacaatttgtgtacagtcatgcttgcctgcactgaatgagcttacaatgttatatcttaactttgtaactgtagctcgattggaacgtaacccaaccatcaaatctgaaattcaaatgcgtggttttgaacgagacattcctgccggtttcctttgctatcctgtagcacaggcagctgatattacggcttttaaagcgactgtagtaccagtaggcgaagatcaaattccaatgattgagcaaactaacgaaatcgtgcgtcgtgtaaaccgtcaaattggtcaagaccttttacctgaatgtaaagcattgctttctaatatggctcgtttaccgggttttgatggtaaagcgaaaatgtctaagtcattaggcaatactattgttttaaatgcttctgacaaagacatcaaaaaagctgtaaatgcgatgtataccgatccaaatcatcttcgcatcgaagatccgggtcaagttgaaggaaacattgtatttacttatttagatgcatttgatccaaataaagaagaagttgaagagctaaaagaacactaccgccgtggtggtcttggtgatggtactgttaaaaaacgtcttgaaggtgtactaaaagaattaattacacctatacgtgaacgtcgtgaagaacttgctaaagatcctgactacattatggatgttttacgccaaggtactgataaatgtcgaatcattactcagcagactttggacgaagttaaagatggattaggcttatttaagttctaa

SEQ ID NO: 52514 - DNA, 237 bp, Acinetobacter baumannii; identical to SEQ ID NO: 51554

SEQ ID NO: 52515 - DNA, 975 bp, Acinetobacter baumannii
atgaaaagaataggtatagttgcagttagtgcagtgacattatgttgggcaatgtatgaggtatcttctgaaaataccaatacagtaatgcgtggcgaatctaaccaaaaagttgtatctaaaagcattccatccactacaaagaatgaaaagttagcgtctcaaactctcttgactcaaactacctcccttaattcctctgccccagtctgtaaatataattttgatgcgactcaagaagattatgatctttggaacaatgaacatactgactattggccaattaaaatattcccattaataattggccaaaaatttagtcttaaagtagagcctatgccagaaaatgagtatggtactgtagagtatgtagctagaagtaaagctagtcttaattctactaatgatattggtgatttaataatacctcacacaggtattattgcatttgaaatagagcttaagatcccaacctcagctcttgggagctcatcacttggaaattctacttattactcctctggcattggttttaatggtgtaacaaataatggctataccgtcagatccaattttaggtttaatatgggtacttatgatccagattttggtgagaatcctgctagattaagctattctgtagcttaccgacttagtgatgagactggccctgacagtcgatattctaaaggtcaaaacatgacaaataatgcaaatggataccaaagattaggtatttatattaatcagaacactaagcaagttggctttattataaatggtgttgatcaaggatataaatctactttgcctgcgccacttgagaatatacgcttttttgtttcaagtgatatatcaatagatgccgaacaattatttggacaagagttgtcgaacgaactcattactgaccgtaatgcgctacagtttaactaccctcagggcacaacagacatgtgtggtaatgccatctaa

SEQ ID NO: 52516 - DNA, 378 bp, Acinetobacter baumannii
atggtgagtgtggttgcaagtactgctaacccaatttctttagtaccatctaaagccgcggtgacatggtctttgccgagctctgtatgtctaacaatgttttcccgaaccacaatcgcatcatcaattaatagaccaatactcagtgacagggccagcagtgtcatcatgttaatgctaaacccaaatgcccagatgaatgttaatgtgccaagtagggtaatcggtaaggttaaaccggtaataactgtagagcggaaagaacctaaaaagagtaaaacgattaaaactgctaagactgctccttcaataatggtacgaacaacgtctttaattgaagcacgaatacctttagagctgtcagcgacgactttataa

SEQ ID NO: 52517 - DNA, 315 bp, Acinetobacter baumannii
atgacatttgatgaagcaatacagcagcacaaagacaacttaacaaagaacctttcggagtttggtgaagggcatcgccttaatcgcttgcacaaggaaattgatagcaatgcggctgattatgaatattacttcaatgctggtcagcaggcacagcaagcgaaagtggaggagttaaaaaaaacaataagtgaaatggctcaaaggtacagagttgaggcacacgaattaagtcgtattagagattttgaaaagtctcagatgtatagccattttgctaatcagttggaacatttgcttaaaggtggtgcttga

SEQ ID NO: 52518 - DNA, 312 bp, Acinetobacter baumannii
atgagtgagtttaaagttggtcaaatactggttaagcgaaatacttttaaccagcctagcaagtcaacttcattgtggaaagtagtttacgtatatgcagacgcagtcgaggttgttccattgaaagatggcaaagaattaaaaatgctacagggtatttatggttctgcaatgttcaatcccgcatctactgaagaaatagcagcaggccaccgcattgataaaccctcggattcgagggaattagaaaccctagacaaactagaaaaccacatcagccagctgtgtaaaacgataggtgatcaatcatga

SEQ ID NO: 52519 - DNA, 183 bp, Acinetobacter baumannii
atgatctataagcacaataaaacagggaatctatattgccttattactactgcaaacaagtgtgataacgagaagtttccaaagatggttgtctatcaaagtttggctgacgggaatatttacgcaagaccttacaaagactttttcaatgcgttttcagttcaaggagccagccatgagtga

SEQ ID NO: 52520 - DNA, 171 bp, Acinetobacter baumannii
atgagcatgatcgtatttccattaaagaaggcggaaaagttagatcgactttgcttgtgtattaattgcggaaagctatttgttgatgctgttgatagtaaagaccttggcatttgttcactttcttgtggctatgcattccgcggaattagttggagtgacttcctatga

SEQ ID NO: 52521 - DNA, 1374 bp, Acinetobacter baumannii
atgatcgaactatattctattccggttgagcaaagcattctgtctacgctcatgacgattgaccaagctgctgatgagtttatctcacagatcgatgctcaagatttctttgcatcacaacaccagatcatctttgcccacatcaagagccaattgaataagggtgaagcgtttgatgaggtaactgtattcgagttgattaaagctaatccgcttgaagcaaaccaaatcgatgagcagtttcttgtgaacctcatgaaccgcgcaagcaatgtgagcttgttagtaacacacatcaaaaagctaaaagatttctctactcgcagaaagcttcaagagactagcaagttgattagttcgatcgctaacgacatggcaactcacactgctgaatctgctgtgaacaaagcacaatcgttagttcaaaacttggattttggtgctggtgaggaaaagcttaaacatgctcatgagttttcaaaagaagctgtaaaagagttccttgatcgccacatggcaattcataaccaaatgccttatgagggcggtatcaagactggctttactgctctggacaacaaactaggtgaaatcagcaaaggcgatctagtcatcattggtgcgcgtccttcaatgggtaaaacaacgtttgctcaaaacattgcagcagacatgatgattaaccagtctttaccagttctgtttatctcaatcgaaatgaagggcagacagattgcacagcgtttaattagtggcattggtggggtagagctacgcaaagtattaacaggacatattgatccaaatagcgacgatacacagaaggtgaataacgctgctctggtacttgagaaagcacctttgatgatcgacgacaacaaccgcgcaactgtggcaactatccgcagatcagctaagaaggttcaagccaaatacggaaagattggcgcaatctttgttgattacatccagaaagtaacaccactcactaaaaacaactttggtcgttctgacaaagatatcggtgaaatatctaatgagcttaagcgtatggcaggtgactttgattgtcctgtgatcgcactagcacagcttaaccgtaacttagagaaccgcccaaacaaacgccctgtaaacgcagatctaaaagaatcaggcgacttagagcaagacgcagacatcatcatgtttatttatcgcgatgaagtctacaacaaggattctaaagaagcaggtacagcagaaatcatcattggtaaagctcgtaacggctcaattggcacagttcgattagctacagacttgtcacgcgcaactttcgctgacttaagccctgagtattaccagtctatggaagagagaggtgcagcgtga

SEQ ID NO: 52522 - DNA, 420 bp, Acinetobacter baumannii
atggggtggtattgttctggcttttatggggatcattcttacattttacccaacaaccacagctacaaatgcgccagctctagcacaagttttgttaggcgatttatatgcacttatggctgggcttgcatgggcactcagtacaattattgttcgtttatctcctttagctcaagcgccggcaactcaaacattgttttatcaactatttggctgttttgttctactcttattaattgcttttttaacaaatcaaacaacaattcatttcaccactttaacgatcttaagcttaagctttcaaactttaatcgtatcttttgcaagtttactattatggttttggttattaagaaattatcttgcatcacgattaggggtattttcttttttaaccccgttatttggtgtgttatttag

SEQ ID NO: 52523 - DNA, 642 bp, Acinetobacter baumannii
atgaaaacacgtccttcaaaaatcgtttgtgtgggcagaagttatgctgatcatgtaaaagaactgaacaatgcaatgccaggacgtccggtgttatttatcaaaccaccaagtagtttgattggtttagatgaaggcatttcatggaatcctgcatggggtagttgtcatttcgaatgtgaatttgttttacgcattgatcagccactaaaaggagaaactgatccgcaaaaagtattgcaggctattggtgcagtgactttagggttggatttaacattacgtgacttacaaaatgagttaaaagataaaggccaaccttgggaaagagcaaaggcttttgatggttcgtgtgtgcttgcagactgggtagatgtaagtgaaatcacgaactgggaagagactagatttactttccatattaatgatgaattacgtcaagacggtaatactgctttgctcatgtttaatattgcttatcttttagtagatattaatcaggtgttctcacttgagccaggcgatatcattatgacgggtacacccgcaggtgtagggccattaaatgctggcgatcagctaaaaatgactttgaaaggtgctactcaagattttgtttgggaaacatttgttaaagcataa

SEQ ID NO: 52524 - DNA, 138 bp, Acinetobacter baumannii
atgggaaaaaatgagaagacagcaattgcgatcgtaatctttgtggttattttcttagtagcaataagagatcgacatactttagataatacaaatgataatgttcagcagccaaatgtaagtaatacaagtaaataa

SEQ ID NO: 52525 - DNA, 651 bp, Acinetobacter baumannii
atgtttaaattaaccgaaagcagagttgctgttttaattgcagtctctgctttttttataattctaattcctaaagttcctattttcattgattttgcaaatttcaatggttggcaaagatcggatgtctttgtgtttattcaaacaatagtaattgcgatttctgctgtaattgctttcatgacaattaatgcttccaaaaagacagccaaggaaagggcaaccttagacattattattgacgactatcgagacacgaatttatttgaagccaaaacagatatatacgatttcattgataatactgtcgagtataagtcgagaaataaagatgtatctaaagatgcattagctgaaatatgtaggtcccatgattccgacttacaggctggggataaaagattaaaaaagaatctcatgttggttctgaacagaaatgagttctatgcaagtgctcttaacacgggattgttggatgagggactttttaaaagggttcattgtgccaacattgtaaagttatgggacaagctatatccaactgttaatcaaattagacaagtagcaaaaaaagataccttgtttatggatttagagttattagctgccagatggaaagctaatccattaaaaacagatgatattaagtga

SEQ ID NO: 52526 - DNA, 516 bp, Acinetobacter baumannii
atggctttaaaagtcggaattattaaaagctcggatgtatcaaaatggtgtgaatacaaaggggctgatggcgaggtacaggcagagttcaaagtccgtggtatcgcttataagccttttcaggttgctattgaacgggcaggaaaccagatctcgtctaaaggctatgatgtgatggtaaaagatgaagatgccaagctataccacgaattattaatggatgcatgcgcggcccacttaatcgaagactggaaaggtgtggtatttgccgaaatcgtagacggtaaaactgttgagtccgaaaagccatatacacctgagaatgcctcaaagcttcttaatcttggtgatattggtatttcaatctggctattcattaaagaacaggcccagaagattcaggaagaagccgacaaggacaaggctttaattctgggaaagtcatcgagctctacaaataccaaaaaacgtatgcgtcgaaaacgccgcacgaaatcgagcaaatcaaattcttag

SEQ ID NO: 52527 - DNA, 147 bp, Acinetobacter baumannii
atgaagacacctgaagatcaaataaaaacgcttaggtatctccaagaaaatgcagcagatgttgttaaaaagtattttaatattcaaaaagatggaagttttgaaagtaaggtcgggtactttgtatttaaaaaactatccttctaa

SEQ ID NO: 52528 - DNA, 408 bp, Acinetobacter baumannii
atgaattactacgaatccaactatgaaaagttgtttgtttatcttttagaaacgatcagggattcttatgggatttatgcgtcactaggcataattccacatttagaagatcctggtgttgcaggcaataatgttttttctgcggttacagcagatgagttcaaaactttttatgaaaaggtagaagaacaagctgttattgcacgaaacgccttaaatgaaacagatgatgataaagcattagccctatggcggcaggttctgggtaatcgttttccacgttcggcatcacacaaaagtgcaaactctgctgatatggccagctctttaatccgttctgctctaggtgcgggattaacctttccatcaacccctgtttatccaaataaaccaggaggctttgcgtaa

SEQ ID NO: 52529 - DNA, 489 bp, Acinetobacter baumannii
  misc_feature (474)..(483): n is a, c, g, or t
atgacaactcaacagcagtttcttgacctactttccgatattgaaccatctacaacaacggttaatgattgttcaagcgcacataatacgcttcgtgatgctttaaaagtgcataatgaattcagcaaagtacatgtgcatacattcttatcaggttcttataaaagaaatacggcagtacgtccgactaccataggcggaatcacacaaaggccagatgtagatattattgcccttacaaatcacacaattaatgatgatcctcaaattgtccttgatgcagtacatactgcattaaaggatattggatataccgatcttaccgttaaccgtcgttcagtaaatgttaagttgaaaaaagttgatatggatgttgtccctatcatttcagatggatatggcggctatctgattccagacattcatcttgaagaatggctagttaccaaccctccagcccataccgagtggacnnnnnnnnnngaataa

SEQ ID NO: 52530 - DNA, 180 bp, Acinetobacter baumannii
atgcctaccgaaaatcaagacttcgtgttttgtaaatcttatcgccataaatctggaaaaattattgtccatccaactggatattttaaatttcccagaactcggccattgaaagaagaaaaggatgctatccgtaataaaaaatcggatgatcctgataactcaaactcaatatcgtaa

SEQ ID NO: 52531 - DNA, 1083 bp, Acinetobacter baumannii
atgactcatttcaatcctgacatgcttagtattgcacgaaactttcgtggtcttagtcaaactgaactaattgctgaaatgggacagtctattacccaggcttcattatctaaaattgaaagtggggacttaaaaccctccgatgaagttatccataatctatccaatgccctacatttccctatacgatttttcgaacatattgaaaagctaaatgcactgccaattagtttgcatgcatacagaaaaaaaagctctaccacagctaaagcattgagccgcatgaatgctgaaatgatgttaaaaatgggccatgtacaaacattagaattattcacaaatgtgccaaaaagaaaaaattccttaccaacttttaaaattggcctagatataaacactcctcaagaagctgctaaaaaacttaggtcattgtgggcattagggaatgaacctcttgaaaacctaactgccactgtggaagatgcaggggttttagtctttttatgcgactttaaagataacaatgttgatggcgtatccttaaaaatgcatggtgtgtctccatgtgtatttctaaatgcaaaccagccaaatgacagaatacgcttcacactagcacatgaacttgggcatttggtcctccatgaagagccatctgagttcatggaaaaagaagcaaatgactttgctgccgaattcttaatgccagaagaaaaaattattgatcaattaggttcaactaatttagctcactatctaagacttaaaaaggaatggaaaacctcaatggcagccttaatctatagggcgtcagagttaggaactataacttcaagtcaaagtgccaatttatggcggcagatggctatgcgtggttatcgtaaagttgaaccaaatgaattggatcgagaaccgacatatagagtagcttcaatgctctttgactacgcaatagatgcaaaaaaaacatcaacatctgtcattagtgagttatctcaattatttgacttatatgaagatgactttaaaaaactatattattttgacctagattcaatggagactattgagatggtttcataa

SEQ ID NO: 52532 - DNA, 351 bp, Acinetobacter baumannii
atgccgacaacaacgtacggaatgagttttgccaacacaatttcaaatggccgtactggtgtgacaaataaggcttctaatgttccccgttccctttcacgggcaataagcagacccgttaaaaatgcgccaattaaagttaaaatgagtaccattaaacccggcactaaaaaccaagtactgttaccagattcgttaaaccatattctttgttcaattttaacggcgcttgcagatgctaatatgaggctacgatcaatttgtattgatggcgcggtagccaaagcacccgcgacatacccctctaaagcagttgctatggtggtcgatctaccatttaatagcaattga

SEQ ID NO: 52533 - DNA, 474 bp, Acinetobacter baumannii
gtgttggaaaacttaaagttctttggtggagcctatggtttatcgggcaaaaaactagatcaacaaattgataaagctttacaacaatatgattttaagccgcaaattaaaagcggtgatttacctggtggttataaacagcgcttatctatggcggctgcattattacatgaaccagaaattttatttttagacgaacctacgagtggaatagacccgcttgcacggcgtttattttggtacagcattggtaaactcgcaaatcaaggcattaccatcattattaccacccattttatggaggaagcagaatattgtgaccgcattgccatacaagatgcaggaaagttactagccctaggttctcctcaacaggtccgcgaattggcaagtaaagataaacatattgttgatatgaatgaggcttttattgcaattgtggaacaagcacgtgcattaaggcatgcgggttag

SEQ ID NO: 52534 - DNA, 357 bp, Acinetobacter baumannii
  misc_feature (294)..(303): n is a, c, g, or t
atgactgatattaccctagctccagtacaacctgatcaaccaacacatttaatggctacttatggtcgccaagcgatcagttttgttcgaggccgaggggcgtatctttatacacaagatggtacagaatatttagatgcactcactggtattgctgtatgtggtttagggcatgctcatccagctattacagaagccattgcagagcaagcagcttcactcgtgcatacgagcaatttatttgaaattccttggcaaactgcggctgctcagaagcttgctgaagtttcaggnnnnnnnnnnagtttcaggtatggaagaaattttcatttcaaacagtggcgccgagtcaaatga

SEQ ID NO: 52535 - DNA, 264 bp, Acinetobacter baumannii
atgtcacgtttaactaaattagatcgtatgacacatgcagaaaaagaggctgctaagaaggaattttgggaagctgctgataatcaaacttttccacctgaaacagtagcaattgttatgcacgtatccttaccgtggttgcaaaagaaaagatgtgaaggtggaggcattcccttttcaaagcctcataaacgccaagtaaattatgtgaaggcagatgttttagcttatattgaacaaaacaaaatggcacacacagcataa

SEQ ID NO: 52536 - DNA, 498 bp, Acinetobacter baumannii
atggaagtaatttttaaaaacgcaaaaattttagatccatgttgtggctcacgcatgttctggtttgatcgtcaaaatccaaatgttgtgtttggtgatattcgtaaagaagaacataaattgtgtgatggtcgtaccttagtgattgaaccagatgtattaatggactttcgcaaaatgccctttaacgatgagcaattttctttagtcgtttttgaccctccccatcttgtgcaagctggaaagaaaagttggttagctgccaaatatggaaaattgtcacaggattggcgtgaggatatacaaaaaggtttttcggaatgcttccgtgttttagtgaaaggtggaattttaattttcaaatggaatgaaacacatatcaaagttaaagaaatattagcactcactgatcaaaggcctttatttggacacatcagtggaaagcgaagtaacacacattggattacttttatgaaagcggaaagtaaggagaaataa

SEQ ID NO: 52537 - DNA, 297 bp, Acinetobacter baumannii
atgtcgaaacaaactactccagagtttcttttcgagccaaagctgctaccaatgcagcttttcgaaaagttcatagtgttcaacgtaaatgccgggtatcgcggtaaaggtacaccgcacggcgtgaacttgattaaaggtaataaagccaccctttcagtaagcaacgaaggtgtgatgaacaaagcagctcaagagcgatacaagctaatgcttttgaaatatttcaaagaaggtcgctctgcaatggatgagctggatcatgaagttaaacgtatttatagaatggtggcgtga

SEQ ID NO: 52538 - DNA, 1122 bp, Acinetobacter baumannii
atggctctaccgattattactgctgaccaaactttattggttcaagcaattattgtgtacctatacgctgatccgggtttaggtaaatcatcgatgggttttactgcggaaaaagcaatttcttttgactttgaccgtggtgctcaccgtactggtgaattacgtcgtggtgcagttgtacaggttcaacaatggagtgatgttgcaaaccttactccgcaggacttagcaccatataaaaccgttgtcattgataccgtgggtgcaatgcttgaatgcattaaaacccacctgttacttacggcaaataaccgtcaaaaagatggttctttaaagttaaaggctcaaggtttagcgaaccaaacgttcaagcaatacatcaatactttgatcagtttaggtaaagatgttgttttcattgcacacgcatcagaagatcaaaacggtgatcaaattatttaccgaccagatctaggtggtaaaaaccgtaatgagctttaccgtatcgcagatgtcatgggttatctaacaactgttactactggtgaaggtaaaaatgcccgcgttattaatttcaaaccttcgcctacacatcatgcgaaaaactcaggtgctttaggcggtgaaaccggtgaagtatgggtacctgatcttaaagcacaccctactttcttggctgacctgattactcaagctaaagatcacattaacaccttaacacctgcacaacttgcagcagctaaagcccaagaagagctagaaaactggaaacaaagctgtgaggaagctgagcatgcaggtgaccttaatcaattaacagagtcccttgataaagaacacatgtattaccagaacatgcgccaagcaatgttaatgagagctaaagcattgaattgcacgtttgataagcaacgtggcacttggattagtccaccagaatttaacggtatctcagatcaacaaagagatgaacttcaaaactttattgctgaacgtggcctcgatgtaaaaacagtttgtgagcacttcggcatagatgcccttattcaaattgaagcggcaaaacttcaagcagtaaaacaagaaattgaaatattgtctaaaacagggattagagcatga

SEQ ID NO: 52539 - DNA, 1725 bp, Acinetobacter baumannii
atgagttaccctctatttgaaattaagctgctagctgctcttgatcatgctcaatttgaagaggcaatttgggcatttgaaattgatggagacatttctacattattactgattgattatgcattagaacaattccatcaaaaaaaagttcaagctgatgaagtctatcgggttcctgaacaaaaaattaagaaaattggtgaacaaaatttaggtctagaaaaaaatgaatcatatacatttgccgagctcttacaattcttaatttttactcaggcaaatgatgttaaagatgccttaagcaatatgctgtttggctctattgagcaaacacaattgatcttgtctaaaagagcagaagatcaccagttagctttaagaacacctaatcaattaaaaaatctatttttattggtaaaacacatttatagctatccagctgagctgaaaaaacttttctttattagaagactttcttttaaaaataaagtatatcaaccgattacgcctttgcttgctcatccggtactcacttcggttttatatatctcacatacctttagacagatttatatcacttattccgaacataaccggagcattggttttttctcttttctggatgatattcaccgtctggagcatttggttccttactaccattattttcaagaaaagcaggtcgaggcaaaaaaatattcttctcaaacaggcattatcaatattcttggagatacctattttggtgaaatgtataccgaaaagcgtaagtctagaggacaaacagatgccttacagcaatatggatatcattattcatttgaaaaaatacagccctttttaggtaaaaatgacatcaacatagctaactttgaagcagtattttctttagaaagtcaatcgccgttaaaagataaaaagccatttgttttaaaagcagatgctaaaaaaacattagaagaatttaagagtattcatctaaattatttggttttggcaaataatcatttgaaagattacggtgagcaaggattagcctatacattacagcagttggatcaggcgagtatttcttatattggcgctggactgaaccagaaagatgctcacaattactttgaaatcacttttgagactaagcactatgcgatttttaatggttattggcatagagacacggcctatctggattatgacttttatgcattaggatcaagaagtggagtagcttgtttaaatggcgttttacttgaacaaataatgcgttataagcaggctcatccagaacgcaaaattattgttatttgtcattggggtgtcgactttaagcctattacaaaagaccaaactaaactcgcgactattcttactcaagcaggagcggatctgatcgttggtcatggtgctcatactattcagccaatccagatcatcaatcaaaagcctgttgtttttaatataggcaatgcagtgtttaatagtgacggtgaatatgaacagcaaaatgctttgccatttggctgtatagctagacttgatgtggcaaaagatatcattcgcctttaccccatttacaccaataatttacaaacattttggcagccttatcctgtagatgctgaagacttctcaaaggccagtatttatatgacatctttactgacccctgagaattacatggcatcccaagataaattagggagatatcttgaagttaaattttaa

SEQ ID NO: 52540 - DNA, 1431 bp, Acinetobacter baumannii
atggatattttcagcatcagtattaacccaggccaacgtgagaattgtatttctttttatttaaaggatcaggaatataaggagcttctcgtaccttgttttgaatttctggtgagaggatatggtctctctacagaacttcctagaattctgacaacatatgatgaggccgaaagacatgaacggctctacacacctcatccagaagaagaaaatatctggacgatccttatcggtgatagcctcacatcagatgatcatgtatttattgcctactataaatacagcgaatatacccaggatgccgtaaggatcttatttagcagtattgcaaaacatgatgattttactcaaagaaaccatatataccctaaagtaatgccatggcatgaggaaacgagaaaaattagggtttcaggtttctgtctccctaacaccaatgcctttttagccttgactattcttggaatagaattacccgatcaaacactcatcagacgcgttccaaaagtaattcaccgcattaagaaacctgtagatgttaactcacctaatcctcctcaattgcaactaggtcctggtcagattaacgtatctgaagatcaaggggggcgcaaaccattatcacaatcagttattttaggtcatgaattcacctggttaggaacaggaccagtaggagagaaaagtaaaacaaaacatgaaaaaaccatcacccaaccacaaagaaagaaaaatacaaaggaaacaaatacaattggtacagggcaaccagatagctctaaagatgttcttaactcccaaatcaagccgactactgatgaagataaggcaacggagtttgaagctccagatcatggaagaattatgggcctttggaatgcttgcttaaaagcacgcagattaaatcccggtattgtcaatgcagtacactattacacttttgaggaagaatttgattacgatgataaaccaactcttatggcctttattacaagttcagaagaacaagctcatataacctggtgttacgctgattcatccaagaaagcactccgtggggcattggtcattcgattatctcttgtaaattccccaccagtttatattttcgatatacaaccagcgacttatgtttcaactgtagagggagaaagcattctcaaggagcgtgggcatgctggagtaatatttaggtcaaggaccttagaacaatttgaacagtatatttctgatctcatggagaggttacctttatctgaaggctcttatacaacaactctcttaggttccaatatggttacccaattatttgtttttagacattcaaaatctgctggtttgtcagagggtgaatcaacattactaaacgctcttagaaaatttagaagcgtgatcctagacagaattgtgaacagtcgatccctctaa

SEQ ID NO: 52541 - DNA, 855 bp, Acinetobacter baumannii
atgaaaaaggcaatcactatatcttccgcctgtaaatacttagccgttagcccttctggttattatgcttggcgtaagcgacgagttgatactgctcagaaatataaggatttaaaagcagtgtattggtaccatcatgctcgcttaggtgcaccatcactcgttcatgatatgcatgatctaggctatagcctgagtgaacgtacgataggaagaatgctcaagcatctcgggttacgcagtaagatttcacgtaaatataagcatacgacagattcaaatcatcgtttgcctacagctcccaatctattggatcgccaatttaccgtcacaaagccgaatcgggtatggacgacagacattacatacattcgaaccaaagaaggctggttatatttatgcgtgatgttagatctatttagccgtcgtattgtgggttggcaaaccagctatcgaatagaccgtcaattggtgtgtgacgcatttaattatgcaatggcacgtcagggttatccaaagggggtgatggttcactcagatcaaggtagtcagtattgtagtcgtgattttagagcgatactattgacgaatgggtgtattcaaagcatgtctcgcaaggggaactgttgggataatgctgttacagaaagcttctttcatacattgaaaggtcatgtggtacacggtagtgtgtttactactagaaaagaagccaatgctgtcttgtttgaatatattgagatttactacaatcgaatgaggcgacattctgccaatggttggttaagcccagaagcttttgagcagaaatattttagagctttagagggatcgactgttcacaattctgtctag

SEQ ID NO: 52542 - DNA, 750 bp, Acinetobacter baumannii
atggcgggtcattctaaatgggccaatattaagcatcgtaaagcgaaacaagatgccagtcgcggtaaagtttttactaaatatattcgtgaaattgtcactgctgcaaaacttggtggtgcagatcctgccagtaaccctcgccttcgtgctgttgtcgaaaaagcgctttctgtcaacatgacacgagataccattaaccgtgcaattcaacgtggtgtgggtggtgaagataatgatgatttaaaagaagtaacctacgaaggttatggtgtaggtggtgttgctgttcttgttgaaacaatgacagacaacctgaaccgtacagttccagatgttcgccattgtttcagcaaaactaatggtaacttaggtaccgcaggttctgttgcttacctatttaccaaacgtggtgagattacttttgacgatgtttctttagaagataagatcatggacgttgctttagaagctggtgcagaagatattgaagtttcagaagatgaaattttagtaatcacttctccagagacttttggtgaggttcaagatgctcttgcagctgctggtttaaaatcagacaatgctgaagtagtgatgagcccttctactaaagcagaaatcactgatattgatcaagctaaacaagtgatgaaactcattgatatgcttgaagatttagacgatgtacaaaacgtttatacaaacgttgagtttagtgatgaagttttagcgcaacttgatgcctaa

SEQ ID NO: 52543 - DNA, 285 bp, Acinetobacter baumannii
atgagtagagagaagcaagatgattggaaacgcacacaagtgcgaatgccccaagatcaatatgatgatgttgtgaattatgcagaacaaaacaacttatcactaaattctgcaatgcttgagctcattgacaagggactaactcaagagcaacaaggtgttggaatggggcttcctccatactccgaatatttaaagtctattgaaaaaacggtatcaattactgatgacagcatcgaaaaaatcgccgagaagattgttaaccgccttaaaaaagcaccctag

SEQ ID NO: 52544 - DNA, 894 bp, Acinetobacter baumannii
atgagtgctggattttttgggttaacaagcgttcacgcaagtgaatgtggttatgagaaattgcaaggaagtgaattttctttaacagatatgtcaaaaaaatatgtgcttaactctttttttgttgatccgaataaggatatttttgctggaattcaacgcaatgaaaagaattatgaatcgttgaaaaataataaattcaaagtagtagaaacaggcgtgctcaccagcacaaatgaaaagagattacttccaactagatattcagaatttgttattaataataaatcgtatgtgcatgatagggctttagcctcaaaattattaacatctgactgtaaaacttattatttaagtggaggtttaactttaagaccagaatctacgcaatttatgtttttaaaagccgatggtagtaaggctgatgaggggagctatattgaattatttggaagtgctctgaagcaaaaagacacttctgcatctgtaatttttgatcgttttgaaaaaatagttaatataaaaactaaagatttcgataatatgttactgcgagggacatacaacccaacaacaaagaaacttttaacaagtcaattgtatttgaatacatcattcataggtaaatgggggaatattcaaattgcctatgataccgatggaaatactcatgaagttgtgaaaattgatcgagatgcagactgctctaataggtatatggactgtaaattaagtgagatagttggagtatcattgtcagaaccatttctaagaaaaaataaaaatggctttgagctaaaacttaaaggtcaacaagatcggattatcaaagtaccttccgatatggtagtttcattcttagatggattggatgctgcgaaaaagaaatattaa

SEQ ID NO: 52545 - DNA, 531 bp, Acinetobacter baumannii
atgcggaccatctgccaacactggaagtatattgtctgcaagcgtccaggtaccgtcaccattgttcaccgctgggtaatccacgccatccacagtcactacaactgtcgcagtaggatcatcaatcgtaccggtcaatgcaggagttgtatcgttagtcgatacatccgcgaaagttactaccggtgctacaaggtcaacgataaagccgtctgtaccgtcaagtacatcgcctgtacccaggttacccacaacatctgtgtagctgccatcagccacggcaatgcttggtgctgtgcctgtaccatctggtgtgaacactgctgtccaggtgatgttgtccgttgtagtcaggccagtcaatgtaccgcctacaaccgtgatgtcacttacatcaaagccggcaaccgcctcactgaacgtgaaggtaatgttggcatcttcacctgccgcaagtgcaaggtcatctgtcgtgatcgcaagtgttggtgctgtcgcatcaacagtcactgtacctgttaccggagttga

SEQ ID NO: 52546 - DNA, 903 bp, Acinetobacter baumannii
atgattactaattcaattcgagtgaatttggcaaaagagtgtcatcgtggcgaaatttcttatcgtttatggcacagtgatttaggtaaaaaaatattaaaacagtgcccaacattgaaagcagttaatgatccagcctggatagctctgcaaatagacggcgagattattaacgagacaatttgtattttccgtgatcaaccatttgcagtacagcaacaagtcacttgtattgcatctttatgtcaagaccatccaaataaagagttaaatcgttttaatgctttatttggccaaattgctcagaaaaatcaacaaatgaattttaaagaaattgctttggattggtttgatcatttcttgaagattggcttggctccgttaatgtatgtttatcataaatacggtatggcttttgaatcgcatcaacaaaatgtattgcttgagctagaagatggtttaccgaaaaatctctggttacgtgacaaccaaggcttttattatattgaagagtttgcaactgaaattgtagaagcattacctgatttactagaaaaagctcatgcggttggtcctaaagattttgtggatgaacgctttagttattatttctttggcaacactttatttggtttgattaatgcaattggagcaactggctatatctctgaagatgaactgttaatccatttgcaacaaaatttacttcaattattagagcaatatccagatagcacattattacagggtttattgtttaacgattctttaccgtataaaggcaatttacttacacgtttacatgaattagatgagcttattgcaccattagaacatcagtccgtgtatgtgcagctaccaaatccactgtacgttgaacagaaggatgtgagttatgcttga

SEQ ID NO: 52547 - DNA, 891 bp, Acinetobacter baumannii
  misc_feature (850)..(859): n is a, c, g, or t
atgcaagaacttgccaaccgattggcgatacaaaatttcgtcaacgcttatatgcaagagaccggcaaaggatatttactttcttttgaccaacaaagttcaactcaacaagcgtttagctctggtttgacgctgttaactcttcctcttccttctatacaagcagaatgttctgtacctttatcttatgtgagtcgtgtaggacgccatcgtctcgctgctttaccgaaaatgtgtattgatggtcaatggcaaaaaatcagtgcaggaaccattgttagtcttttacttgaagagttggttattgaatctcaattcaaattagatgctgcttcattgttagagaaatggatacaaagccgggacgcgctactacaattcttaaaacaacgccacaatgatttcgatgatttagtaaaggctggacagaattttattgaaagtgaacaggcattaattttgggtcatagtatgcacccagcgcctaaaagccggaatggttttgttcatgaagattggttgaagttttcacctgaacatgctggaaaaactcagttacattattggcttgttcatcagaattatattgctgaaggttgtgcaactgagcagccaatttcagatcaagttaaagacgcaatccgttggtatttgtccgaaagcgatttaaacctgttaaagactcatgttgaatttaaattattgccactacatccttggcaagctcgttatttacaaggtaaaccttggtttgagcaattaaaacaaacaggacagttaattgatatcggtttacgtggatggcaattttcaccgactacatcaattcggaccttggcaagttttaacnnnnnnnnnnttggatggttaaaacctcactatcagtcatga

SEQ ID NO: 52548 - DNA, 1125 bp, Acinetobacter baumannii
ttgccaagcacgttcggtagcttagttgtagcagttgttgccttaattctattaattagtttaatcacaggtgtgattacgcataagaaaattattaaagagttttttacctttagggcttttaaaggacagcgttctttattagatcttcatcacataacaggagttatcacttttcctttttatttggtgatggcctttactggactgttgattttattttatctagttttaccatgggggttatcggaacaatatggtaaagctggtatacctaagttctataatgaaatgcagtttaccgaggtggcaaaacctcgagaaccttccttaacagaagcgatgcaaccttttaatcaattcatggcacaaatgcctaagcgaacagaatctggagctattttagataaatttgaagttcaaaagcctaatacagccgatggcgtgattacatttgactataactataaaaatattattaccttaaatactcctcaatatatttttgcaacaaatacggctgaacgactcaatcagccacgaaatttaagtgcaatagcacaattaggttcatcaagttatgggattcatttaggttactttgcttctatctggatgcgttttatttttgcttgtttaggaataatcggatgtgtcatgttggttgcaggcgcattactatggcaaaaaaagcgcatcaaagaacaaaagaaatttggatatagattagtaagacatttgaacttttttactttcttagggctgccttttgcctcagccttttatttaatggttagtcggattatacctgcttcatttgagccgagggaactatacgaggtttcagcattttatatagcatggctattaagcttattgattagctttagctgctcaataaggaagggaataatcatcatgctatatagtacggctgctgttttattccttattccagttattagtgtcgttctggtaccagaagcttctttattaaatagtttaaagtctgtgcattggtctcttgctggtgtcgatctggcgctcatactgctcgggctattctatttaatagtactacgcttctaccaaaccaaatttattacgttaggagaggctaaatga

SEQ ID NO: 52549 - DNA, 432 bp, Acinetobacter baumannii
  misc_feature (398)..(407): n is a, c, g, or t
atgaattttcgtcaaattcaggcaatactacatagttggtttggaattattgttctttgggttatctttttcattttttttacaggctctattgcttattttcggacggaaattaatgtttgggcacagccagaagcaatcagccatattcaaacaatcccttctgcacaacattctgcgcaaactgcttttaactatctcaaccaacatgcaccaaatgccaaaagatggcgagtcacagtagccaatgagcggatgcctgtgaacctacttcaatggcaggataaagaggggaaacatcaagagctacaaaaccctaataccggagagctattggggcctatacggaagactttgggtggagatttctttttcaaactacattacacgctttatcnnnnnnnnnnatcctttgccaagcacgttcggtag

SEQ ID NO: 52550 - DNA, 1623 bp, Acinetobacter baumannii; identical to SEQ ID NO: 49098

SEQ ID NO: 52551 - DNA, 888 bp, Acinetobacter baumannii
  misc_feature (800)..(809): n is a, c, g, or t
atgagtgcaagtctgttagaaaaacaatcaactggtggtgcaattgcacgagtaggatttgaatatcaggatgtttttgtattaaagaacttgccactatggctatctgaaagtgcttttagtcacattgtgagtgaatcaataggtgacgttgaggtttgctacttctctttagagaaagatttccagcgtgtcatgtatgaagctaaaaatcattcgctgacttctacagacttctggaaagaaattaagcgcttcaaggaggcatttgatattccctcaagtgaatttactcgctttggtttagtatgcccactctatacctctacacttcacccatttcttgcccagattgaaagaattagaggcgttggctcttcatacagtgcagattctgtgattttacaaaaaagtcgtcaggatattattcagtggtgtagcgataagggattcgaaacctcacttgctgagtttgcacttgatcatgttgatttcctgtctttcaatgcggaagatagcgactctgtatttataggcgaaatagaagagaaattatccaatatcgaactcactacacgtaaagccaaacagttaagagatcagtttaaaaacctgatttctcgttcttcttttggcccaatacatcgcaaagactttgaaaattttatttgccatgctcttgaagaagatagaacccagtggctatcagatcctattaaaattaatctttcagcgtcatccagtcagcaccaagacttaaacttagatattagtgatttcaatggtcctgatcgtgctcnnnnnnnnnnaaaacatagccaagcatacatgcagtatcgattggggatttcattcataacagtggtgaccgtagaaccctccttatag

SEQ ID NO: 52552 - DNA, 471 bp, Acinetobacter baumannii
atgcttggctatgtttttagtgccacacgtaatttcctactcgaaatagaacataatggcctcatttatcgcactgatgaccataaacagaaagagggacaattttttactaaaatcgactctgttgagctacagaatgaaactgaagccatagtcactattggatttcctacagctataggtaaagacattgactctacgattaatgaagtaaagagcttacctagactgaatttagaaagctctaatgccattgataatatggaaactctaaatcttgctgtcagagaggtaaaatctgctttagtttcatttaaatccgaaaataagttatctaaattacacctctttattaaagcaccctcagtttttgcaatggtcttgggacatcgcttgaatggcgtttgcgatatccaactttacgattgggtagatgggcaatatatccctacagccgaactgaacttataa

SEQ ID NO: 52553 - DNA, 693 bp, Acinetobacter baumannii
atgaaaatattaaaactgtcttttttagtactcgggatgggtcttagcggattcgcacaagcagattttataggcgtaaaaggagacgttggctactggttttatgacggcaaagctaatatgtcttcacaatctcctgaagatcaagatctagaccgaaaaggtagtgctcaactttcattagcttttgagcacccaatcccatttattccaaatgcaaaaattcgttatgttaatttaaatactcaaactaaatcagaaactttgggtcaagctaactataacgttgatttagatcatagtgattttattctctactatgagttactagataatattgtcagtgtagatgcaggtcttggtgcaactgtactaaatggagatattactgcctataccggtaaacgtgtagatattgataagacatatccaattgcttatttatcaggtgaagtaaaacttccatttacagggttaagcgctaaaggtgaagcaacatatacaaactttgatgatgcaaaaattacagatgcgttagtagaagcaaagtataagtttgccgataatttattaatcgatttaggcttaacagctggttatcgtatcctcaatatcgatttagatgattacgataacaatgaccttaaatttgaatttaaagggccttatgtgggcttagaagcacatttctaa

SEQ ID NO: 52554 - DNA, 1005 bp, Acinetobacter baumannii
  misc_feature (567)..(576): n is a, c, g, or t
atgagtaagacagttgtaaaagacaaaaccgtacactacaaaaaagtagactttctaaaaggcgcgaaccttggaaacttacttaaagcccaactattagataaagactctttttatcataaagctattaataggcagcaatttgtatcggctactaaagatgattttatccttataaatcacgcaagttcacatcaaagtatgttctttggagagctaatcatagtggagtctggtaaagctcaagctgttttaaaaatagacaatgatagtgctaccgaattcccaatcaaaacttacttaacggaagatttacctgatgatgaggatgaatctgttgaagtagtgcgcaaagaatttattgatagtgttttatattttggagtgattgataatcatgttgcaattattcaatccagatcattaacagcaagaactcttgagtcttatttaggttggcttttgggtgaagcagctaaagccttaccagcgaatagtgccttaatcttaaaagatgctccgaacccggcaattaaagaaaaattggaatcaacgccagccaagacnnnnnnnnnnatctcatctggaattggatcaacagaattgcaaccgattcacaaaatagagtcgaacgtaccagctaagattgattacaaaatcgaagaaaatgtggttgatgttttaaaaactgcatttggtgtcgatttggatgatttaaaacttgaagatggccttgatgacgctaatttaaagcttaaattaacactcacctataatcgaaaaacatccaaaagcgggcaaaaagtaattgatactgttgcatcatctatgagacataatgatgattatgttataactcttgaagatggtactaaggtcacagcggataacttaaagatgagtggaaaaatatctgttgaaacaatcaataataaagtttataacgacggccttaaagttcaattgtacaattggatgactaccaatattaattttggtgattaa

SEQ ID NO: 52555 - DNA, 462 bp, Acinetobacter baumannii
atggctgaacaaaatgtcatcacttctatgctagacgatttatcaaacgaacagcctattcatactgcactttgtattggccagaaaattgaccagaataacgcaattcaatggcactattttaccgtaactgagctgttaagtctgccttttactcagcgttatgatttgggttttgtattgtttgatactgatgaaatgcaggacatcagcgatgtgcaaaaatcacaattattagtaaagctaagagatttattagcaaaacgaattgttgtcgtgagcaaacgcagtgatgaacagcttctgcgttctttaggttttacccaacttattgataagacttcacatgatagtgattttgctttatggcaatttaatattttgacctataagcatgtcccagactggtttaattccaaattttgggcaaatccagaaaattggaataaattccgttggtaa

SEQ ID NO: 52556 - DNA, 1245 bp, Acinetobacter baumannii
atgttacgtcacatactcttgggtagtgattctgagaaaatggactttaagattgccatctcaagctttcgagacaaaaccgttattgttccaacaaatattcagaacaaacctctacctgacatcgtaccatcattttctaatgaaagatttgaattgtctggatgggcgatacgaattgattctgttcctcaattaaaggaatccgtaaatgaccgagtttcattagaatcctttttaggcaatttatggcctgctcaagaggaattcacaaattccatacagcctatattgttatatgacttaaagggtaacttggaactattcttgattaataatacagcaccacttttcgtaagttatcctgctattaatctacatgatgatcagaatcaaagattgccagcacaatttagccatctcaataatacaaggatagcaattgtaggtcttggatcgttaggaagtaaaattgcaatttcactggcacggtcgggctgtaaaaactttctacttattgatgatgatattctggccccacacaatcttgtccgtaatgaactcagctggttagatgttggctttgctaaaacccatgctgttgaaagagcattaaaacgaacagtattagacatagaagttgaaacgtatgaaatgcaaattggtggacaggaaaatcctcatttaaattccaatatcgctaatgccattgccacatgtaatctgattattgatgcgacagcaaatacacatactttcttaacattagctgcaattgctaaaagaaaacatattgcaatggtatggggtgaaatctttggtggcggtggtggagcaatgatggcccgtagtcgcccaacgttagatgcctcccccttagaacttcgcaatcatatttatggtgtcttacaaacgttggaaccaattccagagggcaaggttaataattacggctttcaaacacaaaaccaaacatatattgcatcagatgcagatgtaacggctcttgcagcgtctatgacgcagttcacattagatactttatgtacaatagatgagcaatcctcttatccctattcagcatatttaatagggttccgtaaatattggatatttcaatgtccttttgatactcatcctatcgattgttcaggtgcgttagtaacagaatctcctacagataaacaaatatctgaaagtgaaaatggcaattctattgaagagcctgaaccgataaaaggttaa

SEQ ID NO: 52557 - DNA, 681 bp, Acinetobacter baumannii
atgattttacgagtggtggatcaagcaaaaaaagttgagggtttcgatgacctatgtgtagcaacggacgatgaacgtatcgctgaaatatgtcgtgcagagggcgttgatgttgttttaacaagtgcagaccatccatcaggaacagatcgtttaagtgaagttgctcgtattaaagggtgggatgctgatgacattattgtaaatgtacaaggcgatgagccattactgccagcccagcttgttcagcaagttgcaaagcttttggttgataagccaaactgttcaatgtctacattatgtgagcctattcatgcgttggatgaatttcagcgtgatagtatcgtaaaagtagtcatgtctaaacaaaatgaagcattatattttagtcgtgcaactattccttatgatcgagatagtgctaaacaagctgaaccaactttacatagccaagcatttcgtcatttaggtttatatgcttatcgtgtgagcttattacaagaatatgttacatgggaaatgggtaaacttgaaaagctcgagagtcttgagcaattgcgtgttttagaaaatggacaccgtattgctattgctgtagcagaagcgaatttaccaccaggtgttgacactcaagcagatcttgatcgtttaaataatatgcctgttgagtcttttgagtaa

SEQ ID NO: 52558 - DNA, 1119 bp, Acinetobacter baumannii; identical to SEQ ID NO: 48996

SEQ ID NO: 52559 - DNA, 606 bp, Acinetobacter baumannii
ttgattggagcagatgcaacaagcccttttgttatggtcatgaagattgtcggtatcccgtatgcggatagcattttaaactttattgtaattgtagctgccttatcagccatgaatagcatgctttatatttcaactcgtatgctgtttagcttgtcacgtgcaggtgatgccccaaaagtctttggtcgaattagtagtaatggtgtaccggtaaatgcgctgttgttatctgcggtagggattggtattgctagtattgtttatacgattaatccagcttccgcatttccaattatgattgcgctatccatgtttggtgcgttgttcacgtggggaagtatatttgtgactcatatgttttttagaagacatatggttcagcaaaatatacaactaaaatttaaaattcctgctagtcgatttatctctttgtttgggtttattgcgattttaagcattacagtgactacctggtttaccagtgaatttaagtctactttacaatttggcgtacctttagtgcttgttcttatatttttctattatttgaaacgttctaccgtaaagttaaatctcaactctagtgaagaaacattgaagtga

SEQ ID NO: 52560 - DNA, 195 bp, Acinetobacter baumannii
atgaagggttactaccttgaccgaacagcttttttcaaagcttacaacttaattaaagatccagctgaacaaaaagaatggcgtaagcagtggttagatgaaagacgctcttcttttaataatatctgtgaacgtgcttggaattatgctgaacaagtgagcttgtataaaccagctcaggaaggtgcagcatga

SEQ ID NO: 52561 - DNA, 201 bp, Acinetobacter baumannii; identical to SEQ ID NO: 51448

SEQ ID NO: 52562 - DNA, 234 bp, Acinetobacter baumannii
atgataaaaaataaatatattcacatccgaagcattgattctcgccttgcagcacgatcgagcagtgctcgattaactcgcgcctcaggatttactttggttgaattgttagtcgcgatcgctatctttgcggttttatctttattggggtggaaaattttcgattacttgctcaaagttcgtgatcgtaatgccgaacatgaagtgcatttatttgaattacaagatgcttaa

SEQ ID NO: 52563 - DNA, 816 bp, Acinetobacter baumannii
atgttgaatatagtacagcctaatatttgcttcattggtagcagtaatttgtctttagctttaattggaggtttagttttaaaaggctttcaaagagaaaaaattaatctaatagaggaagtcaaatttgagaatcaaatcattctaaagcaaaagcaacatgaggtgaaaaaggcagatatagttgttctattactagacccaaaagacttaaaggctatactggcgcccttaaaaaaatggttagctgataaaaccattgtgtcgatgatggccggagttaatattcaacaattaatgagtattacgggttcaaaaaaaattatcagagtcatttctaatccccctgtattaacctatacaggtactcatgtgttaattggttcagactatttagagcctttagataaagaagtgatagaaacaatttactcagcaacagggcgaacctattgggcaaattcagaatcccaaagtgatgcgattattgctttatcgggttcaggaccagcttacttcttctatattctcgacagtatggtgaaaacaggggtgtctatggggctagataagcaatttgctttagatctaatacttcaagctgcatcaggcgctgtagaaatggttcgtaaaagtaatgttcagcctagtgagttatgtggcaaggtcacattagcgaatggtattacagagtctgcattacgaatgtttgaattaggcaacctctctgatgatattcggctggctttaaaagcagcttaccatcgtagtaaagaaataagcttagaaattaatgcagaaattacgagacactag

SEQ ID NO: 52564 - DNA, 528 bp, Acinetobacter baumannii
atgtacagtatcgatgataaaatttcaactcgaaaattaatggacaccttaggagaatatttagcccaaagtgatttttccaatgaaatttctagtttaattcatgaggaagtacttactcttctaaaaacaaaagctgctcagaaaaagccaattaatattattgaagatattgatccgattattgaaaataaagctcaagtccatggagtcgacataacagagaataactttaaatctttccgggcaaccaatggatatggggagcatgatctagatgctagtaatatattttccccagcaagtgcaacattaacaagttttgaaaaatttactttatctattggtaatcaaaaacaaattaaaatttctggtagaaaggccgatatagagcatacaatagtccttcatgatcaagatgaaaatacgccttatattaaggttgatcttaagaaggaagagttgcctgaagcccgaaaagttttaaagaaaagaaagccttatgaatcagacaagagtgaagattga

SEQ ID NO: 52565 - DNA, 1113 bp, Acinetobacter baumannii
ttgaaggctgatgaatatatttggattccggttcatccttggcaatgggaaaaccatttaatttctatttttgctgaagaaattctaaatggcaaaattgtttatttagggcaaagtcaggatcgctatttagcccaacaatctctacgcactatgactaacttgcagcatccggaaaagccttatatcaaactgtccatgagtctaacaaacacatcaagctcacgtgttctggcaaaacatacagtaatgaatgggccaattattacagactggttgcaacgtttaattaaacagagcaaaaccgcccaagagcttgattttgctgtattacgtgaagtgtatggtttaagcgtggattttactaaattgccaaaatcacatgctcaacaggcctatggcacaattggatgtctatggcgtgagagtgtgcatcaatatttacgtgaaggtgaagatgcaataccgttaaatggcgtgagtcatatccaaaaagatgggcaagcattaattgcaccatggttacagcaatatggtgttgaatcatggacacgtcaacttttgaaagttgtgattactcctttgattcatttactttttgcggagggaattgcaactgaatcacatggccaaaatattattcttgtacataaacaaggttggccaacgcgagttcttttaaaggacttccatgatggtgtgcgctatagtccagcacatttagcacaccctgaattggctcctgaactcgatcagttgccgcctgagcatgcaaaaaccaacagtatgtcatttattttgacagatgatttaaatggtattcgtgattttagctgtgcctgtctgttttttgtggctttaaccgatattgcaatatttttaaatcaaaactttgatctttcagaaaaaaaattctggcaatgggctgcggaagtcatccaaaattaccaacagcaacatccagagcatgcttcacgttaccaattatttgatgtttttgccgaaaaattgcgcattgagtcattaactaaacggcgtttatttggcgatcgtagtatacaaattaaatttgtcgataacccgttagctccttttaaattgcaggtgaagtga

SEQ ID NO: 52566 - DNA, 282 bp, Acinetobacter baumannii
atgtcaggtattttatttacacagctacattcagctgagttaggtgggattgccttgctcacagatctatttagagagatagttgcaattttactcatgtataccatgggttggcggtttccacgtccagcaatttcaagtgctggcgctacttcaatggatgtaacattagcaatggtaaaacagtcatgtggcacacattatgtaccacatgccatgatgagcggcttactcttaagcctactcgctccacttttaattactgtgtttttaaacttttaa

SEQ ID NO: 52567 - DNA, 1038 bp, Acinetobacter baumannii
atgttgaatgcatttgtttataaattgcttctttcaaataagaaacctattttgacattaagaaatgatccaagtatttccgtaatcaatgttaacttaaattctgcagctacaacaatacagatgcctcgagtagcttcaaatcccccaagtaagacagtgccagcaaaaacaaaaccagcgaaagaaacgtcatctaagagagaagagagctttgttgattacttaattgattttattccttcattaggaaaaacagagaatgttcatacagaaaaaaatggtaatcctttaaccaaacagtatggtagtgatgtcgtttttactattaaaacaatcaataaagagacaggtaaggaagaaaatctagcttattcaattaagtataatggtgcaaaaagaacacattatactggacaagatgggattggattaaaaaaacatcggggtgaagagggaaagaaaattgaaattgttgtagatgttgatagtaaagaacaagtactttataccgctatattgaagaatcctatgccggttattgaaataagaatggataagccaaaagatgatgactcatatttattccctttaaaggcacggacaaattcatataaaaatggatttgctcgatttggttctaatcgtagtggtggaaaacgtaaacacgcaggttgtgatctgtatgcaccaacaggaactgaaattagagcgatggctgatggaaaagtccgtgtagtaaaaggtttttattctggtactgatgtaattgaaattgtacataaaaaacatattatacgctatggcgaggttctggcaggaaagtccttagtaaaagttggagatgatgtaaaacgcgggcaaactattggctatgtcggtaaactcacagtacaagttccaagtatgatgttacatttggagatgtattctaatcctaaagatactagtccattaacagttcgtggcaataatgcctatcaacgacgctctgatctaatagatcctactacttttttagataattcaacattatga

SEQ ID NO: 52568 - DNA, 705 bp, Acinetobacter baumannii
atgagagaagtagatttaggttctaacttagtagagttctatacaaaacctattcgaggtcggctttttgtagttggtgacctacatggttgctatacattacttatgaataagttagaagaactagaatttaactttcagcaggatttattggtctccgttggagatttggttgatcgcggccaagaaaatcttgaatgcctaagtcttattaatgagccctggtttaaagcaatccgtggcaatcatgaacagatgtgtattgaagcaacttttgataatgaaatgaaagaaatgcatgcttatcatggtggagactggttatataagctacctactgttcaacaacaaattgttgttgaacagtgtctcaatttaccgatcattcttgaaattcatcataataataaagtttatggttttgtgcatgcagatatacatatcaatgactgggataatttcaaacaagaggttcttaaaaataactacttcattgaaggtgaacaatctgccatgcaaattgcattatggcatagaggacgtgtccgttttagtacatacaatcctatctataagactgtaacgggagttgatgaaatttatttcggccatactgtagtcaaggaacctgttaagcatcagaattgtttttttatcgatactggtgctgtttttgggggacctttaaccattcttgaactataa

SEQ ID NO: 52569 - DNA, 657 bp, Acinetobacter baumannii
ttggacaaccaacaagctactcaaaatgaaagaaaaaatagtataaatgagctattaaagcagcaggaagaatggagagagaaaaataaagctattcttttatttaaacaacaaattgatcaggaaacctctcttttgaataaagaaaaagagaatcttaattataaattcgaacaatatcaaaaagatgtatctctttttaatcaaggaaactatgggcaatttactcaaagcagtttaaacaaacgccaagctgagttaagccagctttcgttagaattacaaacaaagttttctcaacatagcaataaaatagaaatgcttaatagacaaattaagcaaataaatcaacaacaaagcctgcttaatcaatctattgagcaatttaatttgagtacgacttctggctcaaagacttttcataaaggcttgtttagtcaaaaccaaattcagatttatggctttacttcattcgatgatttgcgcctaacacttgctcatgagtttggacatgcattaggtttaaaacataccgatgatcctaaatctttgatgtaccctcttttaagagagcaggatattcataacttcaaattaacaaattcagatttagatctattggctacattatatggttcaaatgacgaaaatcattaa

SEQ ID NO: 52570 - DNA, 228 bp, Acinetobacter baumannii
atgaaaaaatttctatggtggggaataagtttatacttcagtataagcttacaggtagctgcttttgctcaaagcaatttatcaaatatttcttttaatcagcctttaaaatataggattgattatatagatccacgttttgaattaacgaaagaacaatttattcaaattggtaaagaagcagctgaaatttggcaaaaagaaactgggaaaacctattttatttaa

SEQ ID NO: 52571 - DNA, 234 bp, Acinetobacter baumannii; identical to SEQ ID NO: 45970

SEQ ID NO: 52572 - DNA, 159 bp, Acinetobacter baumannii
atgcctgaaattatagcagtgattttaaaatatgtagaggcaactatggaaaaatatggttttgtaaaagtaacaggatctatcttattgggaatttttctttggcagttttcgaacattattaatgcttttgcaaagttgatagaggtagttcgatga

SEQ ID NO: 52573 - DNA, 348 bp, Acinetobacter baumannii
gtgaaatttgtcgtgtacaaaggtactggtgaaaaagatgcaggtaaagctgcatttgtgcttggtttatgctttatttcagaaggtgcaattccatttgcagcaaaagatccaatgcgcgttattccatcctgtattctaggtggcgcagtaactggtgcattagttgctttatttcactgtgagcttgtgactccacacggcggtgtatttgtactactgattccaaatgcaatcaatcatgcgtggttgtatcttgcagcaattgcggctggaagtatcgtaacgggagtaagttatgccatcattaaaaagaatcaagaagaaaaattattaacaaactcataa

SEQ ID NO: 52574 - DNA, 531 bp, Acinetobacter baumannii
atgggcttaagttgcacagcttataagaagcttagccaatttgatggcacttatgacgaacataaagatgttgtcactaatgatgaaactggtcttgttgtacatgaggatgactactttcaaccttacttaaacggccatttccctaaacatgcagaagaacttatagatactggttattacacctttgaagactcttattggtttagagcaggttcttattctggctataacaactttagagagcaactagcaaaacttgctgggtatccatgtattgagggtgatggttgccaccgttggcattcaaacggagcttggaaagctacctctggtccattctgggagctaattaattttagtgactgcgaaggtgttatcggtacagcttacagcaaaaaactcttggctgattttaaacagtttgatgagaaggctaaagagcttggcgaatatttctatgaatcatattgcgattggatgacagcatttgaatttgcttcagacgatggcgcagtagattttcattaa

SEQ ID NO: 52575 - DNA, 198 bp, Acinetobacter baumannii
atgaactctaaagcattatgcctacaggcaaacccaaacctttattgcaaatctattggtggtggaatgttccagttctaccaaatctttgaaggtcaatacttcttcgctaactcagctaagactgaaaaagctgcatgggatttagctcttaagaagttggatgaagaacgcgttcaggttgagggggtgaagtga

SEQ ID NO: 52576 - DNA, 252 bp, Acinetobacter baumannii
atgaaactattccctaaggacgatacaaactcaacttttactttgactgatggaaagagggattatacttttcaattaattgaaggtgatcaagagctcttctgtgttacgtcgactggctattgtcttgatattgaatcttcaaaaattaactctgaacttatcggacaagaaattgagttagtattgtttatgtacactagtctcgttcctattaagccttttaaacgaaaactaattaatataaattaa

SEQ ID NO: 52577 - DNA, 354 bp, Acinetobacter baumannii; identical to SEQ ID NO: 49134

SEQ ID NO: 52578 - DNA, 348 bp, Acinetobacter baumannii
atgtataacttttctattcccactcagttaaaagcgtggtttgaccgaattgcacaggttgggaaaacatttaaatatacggaaaatggccctgtaggcttatcagaggggcgtaaagtagtaattttatctgcaagaggaggattctattcaaaagagcctctctctcatatggactttcaagaaaaatacatcacagctttttttaattttttaggcattaaagatatttactttgttagagcagagggaacatcaaaagccccagccattaaagatattgaaattcaaaaagctttgtcgagtattgatgaagtaattagtaacttaagtaaaagagaagagtga

SEQ ID NO: 52579 - DNA, 462 bp, Acinetobacter baumannii
ttggcgctacaacgattccatgatgaattcggtttaagccatcaagaaattgctgatacagtcggtaaagcaagaacaacggtaagtaatttattacgtctgttgagcttggctgatgacattaaagaatttatgcagcaaggccagcttgatatggggcatgctcgtgccatcttaactttaaagggcaaagaacaacttgaagttgcaaaaattgtaattgagaaaggattatctgttcgtcagactgagcagttagtgcgcgattggaacgagcctaaacaggaaaaggaaaaagctcctgttgcaccagacattgagcaactaactcagaaattatcggaacgttttggtgccaatgttaaaattgatcataaccagaaaggtaaaggtaagcttgttattcactatcattcactcgatgagttagatggtattttgaatatttgtttaccagattaa

SEQ ID NO: 52580 - DNA, 450 bp, Acinetobacter baumannii
atggattggtctaaatatactattgacggttggttagagcagtttggcgcatggtgtgaaacagttagaatgaaagggggtgatttgccagatgggcttcatatcaatcaaatttactggttgatgcgtgaagctggcaaagaagtacaaaaaagtaaatcttatattcgatgtgagatcagtgattatgaggcggatcaaattcaagcacttttacgaagtctattaaattctgataaaacagattttacaactaagtttgcattaatttgtttaattaaaaataaggttgaaaataaaggattgttgaaggttgctcaagaaacaaaccaatctaaagctcaggtcgcaattatggtgagttgcgctagattttatttattaggtcatgataaaagattaagacaaaatggaggttcaaatgaaaacatacactgtaaaactatatga

SEQ ID NO: 52581 - DNA, 198 bp, Acinetobacter baumannii
atggaggagaaagatattgactttaatattaatagtgagcctgaattaaagttttctattatacctttatggaccaaaccaccttctgaggatataggtgatagtttagattgggcttttacattacttaaagtaattaatataccagatgatattgttaaaactaaactatatgaagctttaaatgatataccttag

SEQ ID NO: 52582 - DNA, 255 bp, Acinetobacter baumannii
atgacacgtcctcaattgaacctcaaaaagaaaataggcttagttttattaagatttgtagccttgcattggatttcgtttcctattcttccttttctagatattccttataaagcagccgtgatcacaggactgatggtactaggagattttctatttttaattgcaattgctctattaagtaaggaatattgggctaagatcaaacaatggttttctaaagtatttagaaaagtaaaacccgaagaaaattaa

SEQ ID NO: 52583 - DNA, 231 bp, Acinetobacter baumannii
gtgaaaataccttattactctttgccaaatatcatcgcgggtaaaaaagtaattgaagagctgattcaggcagatgcaacacctgaaaatttagcggctgaaatagaaaaactaatgaatgttgaaactgctcaaattcaagtaatgcaacatttaactatgcataaacagcttatttctggaaatacagaagatccggttcaagccattttgcaatgtttgaatagctaa

SEQ ID NO: 52584 - DNA, 171 bp, Acinetobacter baumannii
atggtagcccaaggtagccggatttatttacgtactcccctaactcaagatcatctttatgtgaaatggggacaaagtaatagtgaagaatgtcaacttgattatgacattcaatcaaaaatcttacaggaaaaacaattaattattatgacagaggcagtctgcaaatga

SEQ ID NO: 52585 - DNA, 261 bp, Acinetobacter baumannii
gtgggaattattgagtcttttttggttattgattttggttcggcaggtagtcctagtttaatgattcccggtatttccaaggctttgatcacaacagcagttggtatgctcattgcaattcctgcacttatttcctatcgatattttcaaagagtagtgcaagattatattgctgagttagagcaacaatcgacgctatttcatgcctcattgttttacaaacgttcttcagtcatgcaagaacatcgccgcgttggttga

SEQ ID NO: 52586 - DNA, 315 bp, Acinetobacter baumannii
atgcaaaaacatatatgtaaaaaatttaattctaagttcgtgaaaccttcggaaaatgaaacggttgctatagctttagattcattgggaaaaataccaattacaggaatacgtaatatacttgaagaaggagaaaatgtctcatggtttttctattgtggagaattttctgaagatgatgatttctttaaaccaatgcatatatctcatttagaaaactatcttcccgaagttattccttatttggcgttagaagagagatttagatttgtaatagataaacagggttacgaagatgtatggaaggaagagtag

SEQ ID NO: 52587 - DNA, 276 bp, Acinetobacter baumannii
atgttatatcgcataaaagttttctatcgattcttaattgttttcggtatgggttatgcctgtatggcgtacttaagtcttggactaactgaaattttccatttgaacttagacaaaccagaagctatctatttggcggcctttatttctattttgttttatgtatttttcgtgattgttggtttctgcatccaatcattattgcgactgaccattttatcaatcgcattatttgcccttttctttattgtgacacggacggtaggttatgcataa

SEQ ID NO: 52588 - DNA, 324 bp, Acinetobacter baumannii
atgactacacttccatatatagaactcatacagtttgatcctgattacgataacgaagctctatttgatctcgtacatgcggatcaggcaaatcgaatcacagtcgcttttgatgatgattccaaccgcatatacacattcaaagatttaaatgcccaacaacgcatacttgctttgcaggcggtagacataatgcttgatagcatgttcttagatgaatacttccaagagggtgaagaacaggacctaatttactttgatctgcaatccatgagcctatatgccagcagcggtcgaaaaatgaatgaaatcacacctgcataa

SEQ ID NO: 52589 - DNA, 438 bp, Acinetobacter baumannii
atgtcgccacgactggttgtactgatcaaagatggtgtagagataattacacgcgctctatctgcatttgggtctgtaattgagaaagttgcaggagaatcgcgggtaataagctgcccaaccgaagtagaagactcaacagtgtcgaaaccttcacctaaagatggctggtcttgggttcctttaagcatggcccaagttacgttttggaagttgtactcccctgccgcgttcaccaaaggcgtatcgttaaggaagattgacttagggctgtcatctaccaagccaccaatttgcccctcaccgagcaaatcaatcaaagacaggaacgatttcgattcaagatcgtcgtctgattcactgccccctttgccaccaccgccaccgcctgcgcctgcgatgactttaggggccttatgtacatctttaatagcttga

SEQ ID NO: 52590 - DNA, 930 bp, Acinetobacter baumannii
atgattacagggatcgagattttaaagtttggagttgaagatagagccgcttcaaacaagtttttggcagattttggtttaagcaaaagtacttcggatattgaaggtgcagatttataccagactcaaaacggcagcaagatttatctatttaattgtgatgataaccgtttaccgcctgctattgagcaaggttcaactttacgtgaagttacgtggggtgttgaaaatgctcaagaccttgaagacttggcagctcgtttagccgatgtagacggttttaaacgtactgaaaatacagttcagtgtcttgacccaaatggcatgaccattcgttttgaacaaagttttgtaaaagaagtaccagaacttaaaacggaaggtattaaccaatacggcaacattcaacgtgtgaatgcagcaagtcctgtctatgaaaaaggtcaacctgttgcgattggacatgtggtgttcttcacaccggatttagcaactactgaaaacttctatattgaaaaagtaggctttcatttatctgatgcttacaaaaatcgcggtgcattcttacgttgccgcggtgaaggttatcaccacgatttattcttacttagcgttccaaataaatctgcgggcctaaatcacgttgcatttgttgttcgtgatattcatgaggtgattggaggcggtttacatatgaaccgttcagagtggtcaacctttattggaccgggacgtcatccaatttcttctgcttatttctggtacgtcaactcaccattgggtggtgcatttgaatattacaccaacgatgattatttgaccgaagaatggcagccacgtgtagaagaacatcgtctagagcttttcaccgagtgggcgattgaaggtggtcttgatgacaaaacccgccgtcaggtgaagcctgtgtaa

SEQ ID NO: 52591 - DNA, 1212 bp, Acinetobacter baumannii
atggaaaagattgtaattgtaggggcggggcaggctgcaggttgggcagttagtaccttacgtcaaaatggatatgtgggtgaaattcatgtggtctcaaatgaagatcacgtgttttatgagcgtccgccactgtctaagcaagtactttcaaaagaagcaagttatgaaagtttgaatctgttctctccagaacaggttcaagagttcaacattcaatggcacaaaccggaaattgcaacaaaagtcgatcgcgagcaaaagcaggttcatttagaaagtggtcagattttgccgtatgacaaattgttgattgcaacaggaagccgcgcccgtgtacccgtcaatacatggcagttcattccaaatgttgtgactttgcgaaatgtacgtgactgtgaacgtctggctgaaattttaaagaatgcaaaaaatgtggctgtgattggcggtggctggattggtttggaaatcgctgcaactgcgcgtaagcaagggaaagatgttcatatttttgaatatggcgaccgcttatgtgcaagaagtgtgagtccggaagtttctgcatttttaaaaaatatgcatgaggctcaaggcacaaaaattcatttagacagcaagagccttcacttagtggaagcaccagatcaaaaagttgaagtggtgaaccatcctcaacatagtcagttgtttgactgtgttgtagtaggtgcaggcgctgagatcgcgaaagagttaggggtacacgctggtctcgatgtgaaagatggcattgtggtgaattgttttggacaaacctcagatcaagacatttatgccgcaggtgatgtcgcgattcatccgggtttgggctattgcattcagtcttgggcaaatgcacaaaatcaggcgattgcagctgcgaaatcaatgctcggaattgaaactgaatataccgatattccttggctttggtctgatcaatatcactttaatatccagattttaggaacatatcaacctgaaaaaaccaaagaagtggtgattcgccaaggtggtgaagatcaggtgagctatttatatctggaccatgaaaatcgcttgctgaatatgattgccattaatgactcgaagttaatcaaactggcaaagcgttggatgcaagccaataccgttttagatccaaaattattagcagatgctgaatttaatgtcatgaagttaaaaccgtaa

SEQ ID NO: 52592 - DNA, 510 bp, Acinetobacter baumannii
atgacttatttgtggggcctaaacagttgggttccttcttatctcatgcaagacaaaggattcaacctcaaagagtttggggtgtattcaagctttccattcattgccatgttaattggcgaagtggttggtgcgtttttatctgacaaattaggccgccgcgcaattcaagtatttagcggtttattactcgcgggcatcttcatgtatgtgatggtcattatgactgagccattattgattattgctgccatgtctttaagtgctatggcgtggggctttggagtagctgcggtatttgctctgcttgcccgagtaaccacctcaaatgtaggtgcgacagcgggtggaatatttaacggtttaggcaattttgcaagtgcaattgcacctgtactgatcggttacatcgtgatgcaaacacatagttttaatttgggaattaccttcttggctgcagtcgctgtcattgggtcgttgttcttggttcctcttttaaaacgttattaa

SEQ ID NO: 52593 - DNA, 825 bp, Acinetobacter baumannii
atgatgacactcattgaaaagttagcagaatttccggtgaaaacggtcaatgttcaaggccagcagcaagcctatcgggaagctggtcagggcgaataccttgtgctgttgcatggcatcagttccggttctgcttcatgggtaaaccaacttgaagtgctgtctcatcattttcatgtcattgcctgggacgcaccgggctatggcaaatcagatgaacttttaacggatcaaccgaatgcgaccgactacgcaaagcgtttggcagggttgttcgatgctttaaaaattgaaaaagcaattgtagtgggacactcattaggtgccttacagggcagtgcatttgctgcactttgtccggagcgagtgaaacacttggtggtcgctaacttggcgcaaggctaccaacgccacgatgaacagacacaaattcaggtttttgaaaaaagaccaaaaatgttgaaagaactcggtgctaaaggaatggcccaaagccgtggacctcatttgatttataaacaagagccacaagccttagctttagtttcagaagtgatgcagcagttgaccttacaaggtttcacacatgcatcgtacttactggcatatgacgaaatacgtaattatttaaccgatttaaaagtcccatgcacagtgattgcagggcagcaagatcaaatcactcctgcgttaggtatacaagagcttgctcaggaattgcagttggaacagcgcttcgtcatagaagatgcaggacatttaagttatgtcgaccaaccgcaagcatttaaccaaattatgttgacgattcaggaacaatcgtaa

SEQ ID NO: 52594 - DNA, 999 bp, Acinetobacter baumannii
atgtttaagaatatagatgatcgtttagttataaaatgtgaggagttaaatgtaaaacttaatttattaaatattagtctaagtttatcgcaagtaatttcgactcttacatttggtgcttatggggaagtacttgatataaaattaccgacctcagcggactcatttggtataccatttataatggagaaaattggttttttccctgctgatcttaacaataaaagattttttaattatattgaaatatatggtcatgcctcttcatgtgcatgggatgcacgtttaatgaatcttagagttaagaatgatttaagaagagattttgctaaacatcttgctaatttagatgataaaaagggaggggttatttcattcggtgaaaacatggagtgggttgaaaattatactaacagactattgaatttagaagttgcaattaatgagttcagacaagttttacattttcattcacatgagacagaagaagtttttcataagcttatggaaaagcatcctttattacttgatgtatatggaaaagttgaaagtaaacctaaattagtttatcccgctggtgagttttctcctattggaaaaacatatgtagagcctgattttataatttcctattcagatcagtcctataaattgatcgaattagaacgtgcttcaaaaaatgttgttacaagccaaggacaacctagagcggaagtaggacaagcagcttttcagacagctgaatggacacattttattagtgaacattataatttaattaggaagcaataccccagtatcaatgtgaagtgtaaaacatgtttaataatgagccgttcgtcacagctcagttttaaaaactcagttgatattaatcgatataaagagctaattattaaacaatattctttagatgagtttttaacatatgacgatttatttgatagagcttgccaagcttatacattcttaacaggtctatcgccacaaaataattaa

SEQ ID NO: 52595 - DNA, 198 bp, Acinetobacter baumannii
atgttaagttcggcaaatattggccatggaattatgatgggcattgtaatgctcgtcagtatcttagtaattataattgcagtaattgttgggctatacggtaaaaagcgtaaaaataagtctgagacagaaaatataacctttatcattctattatgtattggtatagctggtttgctctattcatatatgggatag

SEQ ID NO: 52596 - DNA, 1311 bp, Acinetobacter baumannii
atgttaaagaaaaatattttactgtttgtgatagtaatctatcttattacagcactattgggatatcgaattggctggtctgtctttcaatatgatgaacttcgtttattgcagtttcctttagcgttatgtgctttattaatattaatctccgcaaaaaaactaaaatactcaatttatagtcaaattaatttttttattattggggtatttatattaattcaacacataaattggggaatttttgagtttcaagagctttggtctgcgatagcattactttttatattttctgccttaacatatgagttaaggaatataaaaaatatagagcatggtattgcactaattgtagttacagcaattattccatgtttatttattttgatttctatttttaattttattatccatcaacaatggtttgattggcagtttaactctggcacgattcggatttatgatagtgttattgttcccttgtttttcttcctgatttatctaaaaaataagaaatatccttatatctcttatttttaccctatagtaattttcttttttgctttagcatggttttttgatggagctaggtctgctttacttgcggtaatgacaggattgctagttctctttatatattctaaagaaaatcgaaagcttattttgcaaagctgtatttatatttttttagctttttttatttataaaatcactatttttttagctgaaaaaaatacaatgactgtaatacgaacgggaacatcgctgcgcgcagaaatgtggaagtttgtatttaaacaatggaaacagcacccatttactggggttggtggtggatacttgtctaaaatacagtatgcgtatggacatcatatacataatctatatttaagacttatttttgaatggggcattataggtctcatattctgtatatggatgttgacccaattaattggtttatttaaagataaaactgtttcactaattttgaaagttggtgtgatcgccgttttagttgatgcaatgttctcaggtagtatggtgtacccagcgtcacaaattgcctgtgtattatttatagcttttactttttctcatagagagttaacttctagttcccaatattcttctaggtcgacaaaaatactgattgctttatggggagttttattcttatacatcacaataatgtatttagggcaagatttaacttgttggagttgcggaagctatggaggacgaatggctccaaacttttggttttatggtggtgcggagcacttagtaccagcttcaaaaattccttaa

SEQ ID NO: 52597 - DNA, 333 bp, Acinetobacter baumannii; identical to SEQ ID NO: 51291

SEQ ID NO: 52598 - DNA, 936 bp, Acinetobacter baumannii; identical to SEQ ID NO: 46133

SEQ ID NO: 52599 - DNA, 624 bp, Acinetobacter baumannii
atgtactattacatggtggatgactttagtatttttccaaatatgacaaatatatataataattatcaacaagattttattgatttggtgatgaaatctccttgtttattaaagatattagctatcatttccgaattgcatccaaaagtttatttaagtgctggcgctgtgagaaatactgtttggtcatatttacatggcaaaacttatgatttaaatacaagtgatatggatgtgatttattatgatgctaatgaatatgatgatagttatcaaaaagaattgcaaagtgatttaaaaagcaaatttccaaatcaagattgggatgttgttaatcaggctttggtacatacatggtaccgtaaagataatggtgaaaaaattcaaccattaacttcgattgaggaagcattatcattatggtcagaaacagcaacagctgtagcaatacgttttgacactttcggtaatttagaaataattgcaccttttggcttatcagatttatttgaattgaatctacgttggaattcagctctagttagttatcagactttcaaaaatcgtgtagaaagcaaaaattggttacaacaatggccaaaattaaaaatagtcaattcctaa

SEQ ID NO: 52600 - DNA, 1395 bp, Acinetobacter baumannii
atgctcattagtacctatgcacaagagcaagcgattgcagaccatttagaggccgcacaagcacaatccttactttcacaaggctatgaaagcatgaaaatgctcagtgaagttgcagccaagcaacaaactgatgctttgaatgtaattaatcgcttacccaaattcatccagtcgcttgagttaaaaaccacagggcaggcattaaatagtacggtaaacctattcaaagaaggaattaataacgatcctatccatgccctaaaagactgtggtggctttattcaagacattggtgcactaggaggaaacgcaaaaggcgttgtagatgaattcaattctttctttagcgatgccaaagatgcggtagaaaatttaaaagcattcatcgaaaacgttgaagaacatggccctgatattgttaaaggaaaactcgcaagtattaaagaccgaattcataaaaatccatttgaaagtattcaagaggtcgggaaagtcttagcaaatgtcgagactaaagattttgatttgatgagtacgtgtggaacttttagtaaaggcagtaaattggaagtatcaccttctaaagcattgagttctttacaaggctttatggaaggttatacccaaggtttagaaagcagttccgatactaaacaacaagagcaaggcaagatcttcagacaagcccttatgttgttagcatcgccaaatggtattgctttgacgacgcctgaaaatattattttgcaagcttcgcaagatattgccgaaagtgccagcggttctattaatttaagcgcgcaaaaaaatattattgggcacgcacaagacaaaatcagtttgtttgctgcgcaaaagggtttgcgtgcttatgcagcgaaaggaaagctcgaactacaagcacaagatgacgctattgaagcaattgcgaagaaggtgattaagcttatttctactgaagataaaatcgagcttacgagtccaaaagaaattgtattaacggcaggtggttcacagctcaaaattaatgccaatggggtattttcaacaacaggtggtaaatttgaaagtaaagctgggcagcatttgtttacgggtggggcaaaggtttcaatgaaactgcctcatttacctgttatacaagaaggtggttttagccaattatttgacttaaaggatttatctaaagataatccaaatttaataggggcaccttataaaatattacttaagaaaacaggtgatatattaatggtgggaacaataaatgatgacttacagacagaacgagtttttactaaggaagaagaagaaatagagttaattttatttgaaactaattatacagactttaatattgaaaatttagattatctttttggagaagaataa

SEQ ID NO: 52601 - DNA, 2136 bp, Acinetobacter baumannii
atgaatatcccacctcgaccatttaagttgtctgtaatcgcctgcgcgatttgttatgccaacctcacctatgcccaagatacacaggtacaagctttgcaaacgattcaagtcaaagcatcaaatgcagagcagtcttctgaacagaccaaggcatataatgttaaaaactcgagtagtgcaaccaagcttaatattgaggctaaggaaacaccccaaaccattaatgtcgttactcgtcagcaaattgaagattttggccttaccagtactcgtgatgttttaagaaatacccctggtgtaacagtctctaatcaagaaactgagcgaactacttatatggctcgtggttttgagatttcaaatatcttaacggatggcgtaggcttccctctttcaggttataactataataatacgaatcctgatacttacttttatgatcgtgtagaagtagttaaaggagctgactcgttaactaatgcctttggcgatccgagtgcaaccatcaataatattcgaaaacgtccaacccaagaatttcaagcaagcggtggtgtaagttacggttcatgggatacgcagcgctatgaagctgacgtatctggctcaattctaccaagtggaaaagtacgtggccgtattatgggctatgaacaaactggtgattcttacctagaccgatattctgcggaaaaaaacggctttgctggtattgttgaagccgatttaacagatagcactttacttaccgcaggttatagccaagaacaaaataaacctaatgcaaataactggggtgcactacctttattagatgccaacggtaaacaaatttcatatgatcgctcatataaccctaaccctgactgggcgcactgggataatgagacacaaaatgcttttgttgaattaaaacaaaaaattaatgatcaatggaatgctaagctgacttacaactatcttgatacgaagcataatagccgtcttctctattactatggttacccaaaagctgatgggtccggtgtttctctaacgccttggggtggacaagaacatcaagaaaaacatgctgtagattttaatctcgaagggacctataagctatttaaccgagaacatgaagcaactctaggctacagctatgtacgtaatcatcaacaagataaacaatctacaggaacgattaacgatagtaatgttataaagtcaactactaccgattgggcaagttggacaccgcaatctataacttggtcagatttcacagaagcggctaactataaacaaaatattaactcaatttatgccgcgacacgtttacatcttaatgaagatttaaaacttttacttggtgcaaactatgttcaagctgagagtaaaggcgaaagttatagctcaccaatgtcatatagtgaaagtaaagtttctccatatgtcggattaacctataattttacacctgaatatacgggttacatgagttatacctctattttccgtccacaaactggtattgataaagataccaatcaagctttaaaacctattgagggtaaaagctatgaaatgggtgtaaaaagctcatggctagatgaccgtttaacaggcacactttcagtatttaaaactgaacaaaacaattaccctttacgtaactcggatggaaacccacttaaccggaaagtaccaacgagtgatctggaatcgcaaggtgtagaggtcggtctatcaggtcaaattactgataacgtaaatctttctttcggctatgctcaatttagtattaaagatactaaaaatggtggcgaagcaagaacatacaatccaaaccagacacttaacttgctaactacctatactccgccagttttacctaagcttaaagttggtgcaggtttacagtggcaagatgggataaagttatatgactcaaatgtaaacggtacgatcaaacaagatgcatatgctttagtcaatttaatggcaagctatgaagtcaatgatcatattacgcttcaagcaaatggtaataatatttttgacaagaaatatttaaatagtttcccagatgggcaggctttttatggtgccccagccaactatacagttgctgtaaagtttaaatattaa

SEQ ID NO: 52602 - DNA, 543 bp, Acinetobacter baumannii; identical to SEQ ID NO: 49299

SEQ ID NO: 52603 - DNA, 1197 bp, Acinetobacter baumannii; identical to SEQ ID NO: 46440

SEQ ID NO: 52604 - DNA, 609 bp, Acinetobacter baumannii
atggttaagcaaaaaaatattattattgggtcagctacaggatacaacgctgacctgatctcttcttttgtatattctttgggaaagacagactttgatggcatattgactttaattatatataaagagcaaatgacagagtttgtgaatgcattctcagacgtcaaaaattttaaaattgaatttaaagtttcaactattggtaaatttaaatcaaagtcaaagtattcaggtatttataaatataaatttgtgaaaaatatctttaagaaaattattgacttaaccgtaaacgaagaaaaacccgaaacaaagataaaaggccttaaaatcacaggttatcctcatgtgagccgtttctttgaatataaagaaattctagaaaatcatcctgatgcttcacatgtattgctaactgatgttcgagacgtttttttccaaagtaatccttttaagaatcttagcaaaggtttatttgtcggaatggaaaatccagactttacgataggtactgagcaatataatcaaaagtggattttggatgcatacggagagagtttttataatcttgctctgtacacgacaaaaatagataactcattgaaataa

SEQ ID NO: 52605 - DNA, 642 bp, Acinetobacter baumannii
atgagtagagtcgaaaaaatatatgaaaatataaaagccaataatgaccatcttcaggatgaagttcatttatttttccatttagttatgaatagtgattttgaagaaattaccgaatcaagatttacttcagttttcctaataaaaatgttctatgcattctttaggggggctaatatagatatgatcttaagtgaaatgaggaacttagaaaatccagatataaattacaaaagaatgaaaccacctactctgtttaaatatatgccattgaagggtttgtggcacaaacactttgagcaaattggattaagctcaatgtctttaaatatcaaaagtcagatcaattcaaatcctaatttttttaaggattttataaatatttataatgatcctaatttaactttaaatgaaaaatcttcagagttggcttacttaagctctagtaagcaatatttagatcgtattgaaagcggaaagctaacaggtgaatggattatttatcatattcacaatcaaaaaaattattatcttaatatcggaaaacataatgatggtgattcaattctggcagaggaaattagagaaatagctttgtttgagtttccacaatttagaggcgaaataccactttttgaatag

SEQ ID NO: 52606 - DNA, 171 bp, Acinetobacter baumannii
atgacttggactgtatacgaatttcatgacagcgttcaggttatacctgaaaatgatttaaaacaccattcaacatttcattgcaaatgccatcccaaatatgaggatggcatttttattcataactcatttgatggtagagaagcgactgaaacgcctttaccgagttaa

SEQ ID NO: 52607 - DNA, 1053 bp, Acinetobacter baumannii
atgaaccatggcacatttcctgtttttgatggccataatgatgtactaacccgattgtggttaagtgattataacaatcctgctcaagcttttattcaagaaggtttagccggacatctcgatttaaaacgttgccaacaagccggttttgttggcggtatgtttgctattttcttgccgccttttcattatgttaagcagcatcatcccaacaaactatttgaccaagacgcatctgacttcacgcaacagcaaattgaacacatttgtttggcacagctcgatttagcaaaacaacttgccgagtactctaacgacattcaaatttgcacaactgttcaggatatccagcactgcctaacacagcaaaagttagccattgtattgcatatggaaggtgctgaagcattacaacataatccagatttactcgatgtattttatgatgctgggcttcgtagcatcggtccactttggaatagaccaagtcgttttggacatggtttaaatgccaagtttccgcattcacctgataccggagcagggcttacaaacgaaggtaaagcatttataaagcgctgtgctgataaaaaaatggtgattgatgtttcccatatgaatgaacgagctttttgggatacagctaacattcttcagcagccaattgtcgcaactcactcaaatgttcatgctttatgtccacaagccagaaacttaacagataaccaacttaaagcaattaaggactctaaaggcatagtcgggttaaattttgatgtcgcatttttgcgtaaagacgggcagcgtgatgcaaacacatccattgaggtaattttagaacatcttgaatatttaatagatcaaatgggagaaaatcatgtcggttttggttctgactttgatggagcactgattagtcatgaaattgaagatgtaaggggactacacctactgattgaagcaatgcaaaagcgacattattcgaatgagattatagaaaaaatttgtttttctaactggctaaccgtgctcaatcgcatcctaagtaaataa

SEQ ID NO: 52608 - DNA, 1299 bp, Acinetobacter baumannii
atgaaacatgagaacaaagtattttttctcatcgatgtaaataacatgtacgtttcatgtgagcgagtctttgacccgtctttgaatgataagcctgttattgtgctcagcaataatgatgggtgcgccgtggcgcgtagcaacgaggcaaaatccttaaatataaaaatgggtgtgccgctttttcaaattaaagacattgttcagcaacataacgtaatcgttctttcaagcaactatgcaatgtatgcagaaatgtcacggcgctttcatacgattcttgcttcttacgtaactgcagaagaagttgaaccgtactcgattgatgagtgctttgtagatttcacagcttatgaaaagaactttgatttagaaaaagtcgggcagcaaatgcgccagcaaatatggaaatggctaggcttaccggtatgcgttggaataggcagaagtaaaacagaagcaaagattgcaaatcatattgcaaagaaaaaccccggctttaacagtgtttgtgatttagtgaatatggatccgtgtaataaagaatattacttttcacttatcgatgtttcagaggtttggggcgttggccgtaaacatgcaaagaagttgcaaagcatgggaattaataccgtgtttgatttagcttgtgctgaaccacgtgaaatgcaaaaacgcttttctattgttatggctcgcactatctacgaactgcaaggtatctcatgcattgaaattgaagacaccccgccatcaaaaaaacaaattattaaatcatgttcctttggaacaaaagtaactgagctagatgatttgaaagaagcaatagccatgcatgcacaagaagcatgtaagagattgagagatgatgaatcattatgcggctgtcttattgtttttgttcaatctagtccttttgatgaaaatgtaccgttctataacaagtcaataaccggatcattttcacagccaacagataatgcattagatttcgtaaaagccgcaacaaaaatggtttctcatatttataaagaaggtattaagtataaaaagtgcggcgtgatattaactggactagaaccgaaggctggtcatacatatgacttactcacagattttgaagctatagaaaagaaagaacaattgatgaaaacactagataacgtacatacaaaatttggaaagaaaaaactcggtataagtacgtgttatgtgccaggtcgcaactggtctatgtcacgggataaattaagcagaaatccttttttgtgggacgaactgttgactattaataactag

SEQ ID NO: 52609 - DNA, 684 bp, Acinetobacter baumannii
atgaaacataggaaagtaactttatcagcagttttattatggggcgtagttgcttatgcacttgcacttcttacatattgtacaatgaagagtgtattaagtgcttcagcagataatatttctgcttttggctctattcttggcgcatgtgctgctttttttgcagtatttgtagctgcatatttatttaatgactggaaggaacaacataataaacaggtccaaaacgattttgctttaaagacatataatcaatttaaaaaatttgaattagctttatttaaagctaatgatactttttcaaacttatcaaatattattgattggaataatgaaattgatttgccactcgatgactcaaaggtaaaagaaagccaaaatgaaatgaatttgatgttttcacaagtacatgaagctgaatatgaatttaagaacttcatgagtcaattggttgactattgcgtagttaccaatcaaggagataattttttaataattcaaaaagacttatatagacaattttttaaattttataacaatgaagatgaactttcatactcttcatataatcaattctggaaaaattatagttacttatttgatgagtacttatcattaagaacaaatacttatgaaaaagttataaaagatattttagataaattgcaagaacacttaaattga

SEQ ID NO: 52610 - DNA, 672 bp, Acinetobacter baumannii
atgcaaacgctattttcctcattagtcaaacgtcttcataaagtctaccgaaaagctgaagccttcattgaggaagaaagagattttacattatcgcaaacttttctaaatgccaccttagaacgctacgtgactaataatgtcgagtttttagatgatctacatgcagatctttatcatgactggttaagactctatgccacaatgcatgttaaaggtttagagaccactttgtcggtcgacttaaaacttatccagatggaatttaataaagaacaacaacttattgtttttgagcaaattagtaacacacaaattgtagaagctaaatataaaaatttctggcaaaaaattgctgtaaaagcggctattttttactatcacaaaattctaaaaaaagatccattaggcatgattctggagcgatttgatgtagcccaagaaaaagatgacctgatcttcttagaccttaaccgttggtttgctaaaaaggccagtattattgaaaccttaggcaaggttcatatcaactatgcacgagtacgtgaagcagaattagttgtctttggtaatgttaatctggctgctttacttttccgtgatcaagatgatgattctgaagatgaacttggagatactgaaattacgccaatacagcaaaaagatgtataa

SEQ ID NO: 52611 - DNA, 576 bp, Acinetobacter baumannii
gtgcacgcactagaacagaaaatcttaacagaaggtatcgttctatctgatcaagtgttgaaagtcgacgctttcttaaatcaccaaattgaccctgtactcatgcagcagattggtaaagaatttgccgctcgctttaaagatgcagggattaccaagattattaccattgaagcttcaggtattgcgccagcaatcatggcaggtttagaacttggtgtacctgtgatttttgctcgcaaatatcaatcgcttactttaaaagacgatttataccgcgctaaagtgtttagtttcactaaacagacagaaagtaccattgccatttcaaataagcacatcaactcaagcgacaaagccttagtgattgatgacttcttagcaaatggtcaagctgcgcttggtttgattgacttaattcatcaagcaaatgcagaagttgtaggtgtgggtattgtgattgaaaaatcattccaaccaggccgtgatttattacttgaaaaaggttaccgcgttgagtcattagcgcgcgttcaatcacttgctgatggcacagtaacttttgtaaaagaataa

SEQ ID NO: 52612 - DNA, 693 bp, Acinetobacter baumannii
atgagttatctatttttgtcgtgtacagagatgaaatatagagacctaggacttcaatcaatatcgcaacttgcatggtggatcatctgtgcaagcgttggtttgttgagttctgttttacatgcggaacctgttaacgtgcaaggttatgttatgcatgtacagatgacgcctgctgtttgtgcgttagatccttctaaacaaaagcagcgtaaatgtcttgaaggatattcgcttacgattactggtttaatgcctgaaaccaccagaactgactgttcaacacaaagctcagctacactgtcaccactgcaagctaaggtggtcgctcgggtgatgccagacaataatgctcgtgtgcaactctggagaagtgtgggtggctgtgtgcctatgaatgcaagtcaatatttccgtacgattattaactttgctgaacgtttaaaaatacctgctaatctaaccagctctactaatgtggaaatgcaacaatctacattacgtcaacaatttaccaagcttaatccaagcttacctcaaaatggtattcgcttcacttgtcagctctcacgctctgatgtcgtactaacagaagttaaagtctgttacacggtaaatggtcaatataagcaatgctcaaatcacgttgtctctaattgcccaagcgaaattactattaaaggcagttattaa

SEQ ID NO: 52613 - DNA, 723 bp, Acinetobacter baumannii; identical to SEQ ID NO: 50177

SEQ ID NO: 52614 - DNA, 2700 bp, Acinetobacter baumannii; identical to SEQ ID NO: 51618

SEQ ID NO: 52615 - DNA, 744 bp, Acinetobacter baumannii
atgccaatgatagacatccaacatatctctaaatggtatggtgattttcaggttttaacagattgcacgacgagtattgaaaaaggtgatgtcgttgttgtttgtgggccatccggttcaggcaaatcaacgctcatcaaaactgtaaatgctttagagccgtttcagcaaggcgacattattgttgatggggtttcactaaaagatccgaaaactgatcttgcaaagttccgttctcgggtaggaatggtgttccagcattttgaactttttcctcacatgactgttttggaaaatttaaccattgcccaagtaaaagttttaaaacgttcagttgctgaagcgcgtgaaaaaggtcttaaatatttagaacgtgtaggtctgcttgcccataaggataaatttccagggcaactttctggtggtcagcaacagcgtgttgctattgcccgtggcttatcaatggacccaatctgtatgttgtttgatgaacctacttcggcactcgacccagaaatggtaggcgaggttcttgaagtgatggtgcaacttgctcatgaaggtatgaccatgatgtgtgtaacacatgaaatgggctttgcaaaacgcgtatctaaccgtttaatttttatggatgaaggtaaaattcttgaagattgcccaacccatgaattctttgataatttagaggcacgtcatgagcgcgctaaaattttcttggaaaaaattcaggcaatgcactaa

SEQ ID NO: 52616 - DNA, 930 bp, Acinetobacter baumannii
atgtctaatatagcacaaatcaacgataccaaaatatcaattgttaacttcaaatctgttccagttgttactacagcaatgcttgctgatttctatggaaccgatacagacaacatcaaacaaaactattctcgaaataaagagcggtttgtagaaggtaaacacttcttcaaaattattggtgaagaattgaaaaaatttgtaggtgacttaaagtcacttgcaaatttccctgcaatttcaaataaaactcgatcccttatcttatggacagaacgcggtgctgcacgtcatgccaagatgttagacacagaccaagcatgggaagttttcgagcaacttgaggattgctattttgtccgtaaagagattttagccaaaacccacaaatcagaacgtgaacccctaaccaatgctgtaaatcttcttgtagctaaaactaagcatttgaattacagcgatgcttataaattagttcatcagcgtttcaatgttcagcatattgatgaaattccatacgatgtaatacctgtggctgtggagtatgttcaccacttaattgctatgtacagcaaggctgaaaaacaaggttctttatttgatgaagatcaatttaagctgctcaagaacctaattgatgcaattatttcccaaaactttgcgactagtcgaatctatcgagcagtacatatgcttaacaacgagcaaggacactacttagctgaatatgcttttaaaactaatattgcagttctaaaacttactcgggcaatggatttaagagggccacttaatagaaaaatcattagtgatgatttaaaaaccataagctacacaacaggcaatcaacattatagcgaccgttggtttcatccattgatggaatcgggaatgctagctggtgctttgcgaatttctggtggttggtag

SEQ ID NO: 52617 - DNA, 1188 bp, Acinetobacter baumannii; identical to SEQ ID NO: 50936

SEQ ID NO: 52618 - DNA, 450 bp, Acinetobacter baumannii
atgtcaattaaagcattagacgtggctaattacatactttggcttgaaaatcgctttgaaggcagtgaaggtatcactccattaaaactacaaaaattagtttattattgtcagggctttcatttggcaatgtttgatgaagaattattcccagagagcatagaggcatggttgcatggcccagtagttccatctgtttatcatcacttcaaggctgcaggtaatgatattgttactccgccaaaagattttaatatagaaattctaagtgaagcacagcgcgaacttctagatgaggtaattgaatcttatggtcaattctctgcatggagattgcgcaatatgacccacgaagaggctccatggaagaatgcctatgagccaggttgcaacaatgaaatttctattaaagatatgaaggcttactttgaaactcaattagaatcttaa

SEQ ID NO: 52619 - DNA, 405 bp, Acinetobacter baumannii
atgaaaataaagaagcctactgcacataaaacaaaaaatattgcccaacaagctgctgacagccttccaaaaaaagagggctgtattattttctctttgcagtatattcagaaaaaccactgttattcaaactgtcagcctgcagaaaagcaggctttagctgatgctatctttaaaagacgagaaatgacatggaaaacgattgcaaaagaaacaagacatggtttgggttatgagaaaatagaaagaaaaagtttaaatgtagctgtgccaaatgttgtaccagaagatgcctcaatactttcatttaggttttacggactagctccaatggttggttatcgcgaaaatgatattttccatattttatggttggatcgtgaatacaaggtgtatccacattag

SEQ ID NO: 52620 - DNA, 942 bp, Acinetobacter baumannii
atgaaaaagattattttattaagtttattttgtttaccagtttttgctttagcgaatacttcacaaccacttaattatcatgataaatgcaaactaagaggatttaatttacttgcctatgatgcgaattttaaggaagcatttgattcaaaattaatgaaatttggagcaatgaagtctacagattttgataaagatggctgtattaatgaaaataatcttataaatggaattctaacagccgaatttcttcaaaataaaaataaatttgttggacagcatttaaaaagttttgttgcatttgattccaaaaataaagaaattcttgtggttttagtagatgaagaatcgaagagttatgtaattggagataagacatctaacttaatttccgctctaaaatcttcatttggttcaaatgagtactttaaaaaagtagatatttcttcgccgttaacgttcacaaatttcaatgagaattatcaaacaaataaagcagaaaaagagttttctaatgttgttgaaaaaagaattgaagaaaacaaaaaactttataaagtggcagctgagaaccttagaaaaaagaatctaaaggatttaattcacaaagatacaaaatacattgatcaactcaaagatggagaaggaagaaaatctaatatcagtgtaataacagtgatggatccaaatatagatttaccgctttcaaaaaagagcatttctcagaacatatattttgtatctgttttagaaaagataggtctcaaaaatccttactcatttaagcctagaagtgtaattgtaaagcaagaaggtgcattgcttaaaattggacttgaatatacagctcaaaattcttatggagctgatgtggttggatttggaaataaagttttatttctaggtagcgatggccaatatcatccagatccagaaaagtaa

SEQ ID NO: 52621 - DNA, 1785 bp, Acinetobacter baumannii
atgaacttgaaattaaaattttttaagctcgccattttaagtctggctattacatcagttccttgtgcttacgcaattacgacagcgcaaccaaacaaaattttgcatgttgcctatgaggccccagatgatggcttcgatatggttaaaaccaccaatttctatagcgctaatattgctgaggcaatttttgagcctttactcaaatatgactatttagcacgtccattacagttagttcccaatactgtagaaagcctgcccaaagtggaacaagacggtaaagtttatatatttaaaattaagccgggtatctattttaccaatgatccagcttttaaaggtaaacgccgtgagttagtggctgaagactacgtctatacaattaaacgtattttagaccctaaaaatagagcgccttctgtttcttttattgatggtaagttacaaggtgccgatacggttgtagctcaagcaaagaaaactggaaaatttgattatgctgctccgattgctggagttaaagctcttgatcgatatactctacaatttactttgactcgccaagactttaattttccttatattcttgcctatattacttttggtgctgttgctaaagaggttgttgactattacggtgaccgtattggtatgcatcccgtaggtactggtccttatatgttaagtaaatatgtaccgagaagtaaggtcgagttagttgctaatcctgattatcgtggttttgtctggaattttaagtcaacaggaacaccttgggataaccaacttgttaaggaaatgtctggaaagaaaatgccacaagttggcaaggtggtggtcagtattattgaagaagagcagtcacgatggttagcttttcagtctggacaactagactttgataaactcacagcgaatgctgttcctcaagctttagatggaaatcagcttaaagcttcttttaagaagagaggaattaagcactatccaaataaggatcctgagattacctatactatgatgaatatgcgggatccagtgatcggtggttttagcccagaaaaaatagcgcttcgtagagcaattactctgtcatacaatcaaaaagaaagcatacaacaagcttataaaagtcaggctgttagatcacaaatgtttatacctgaaggtgtaaacggatataaccctaaatataaaagtagcgtaggatataatccgctgttagcaaataaactacttgattattatggttataaaaaagcggctgatggctatcggaccttaccaaatggcaaacctttaattttaaaaatcaatacagaaaatagctcagcatcggttattcattcagaactctggaaaaaaaatttagatgcgattggcattcgagctgactttaaggtaagtaactttgcagataacttaaaagccgctactcaatgtaaatatatgatctggagcggtgcatggattgctgactatcctgaaggagataattttgcacaattattatatggaccaaatgctgggcagggaaaccatgcttgttatcagtctaaaacatatgatgctctttatactcaggccattcatttaccacctcaacaacggctcccatattacgaaaaacttaaccgtcagatagaagctgataatccttggattattcatgtaacacgaattcgtaattggttgatacagcctcaagttcaggggtttaaagctcacccaatgatgaatacaaactggcaatatcttgatattacctctattaaaaaataa

SEQ ID NO: 52622 - DNA, 354 bp, Acinetobacter baumannii
atgagcaattttgtttttaagcgtggtgacactttcaacttaaatcttcagctagttgatatggatgaagccctgcaatatccacctgatgatgttcgccgtgccattgatctatcaggctacacattcacatcgcaagttaaatcgttggcggatggagcagtggtagctacattgacttgtgcagcattaagccagagcacacaaaagggttggcttaatgtgaaatctggagcaagcacagctgcttggcctgttggtttgtatcaaatggatattaaagcggtagtaagcggcaacactcaacacaccgaaactttgactttccaagtgattgacggagtaacagcataa

SEQ ID NO: 52623 - DNA, 1149 bp, Acinetobacter baumannii
atggcaaatcttgtatttaaatttaattgggaccatcgaccgttccagttgaactcagctcagggcaagcggcaatttatgctgccattcgcttctggcattcccaatctagcacccaacttttcgcaagtccaaggaacagcggcaatctctcaaggtggtacaggggcaaccactgcagcagaagctcgaaataatcttggtgctgctggaaaaggtgtaaatactgacattactgaaatccaaggtttaactactccactttcaatagcacaaggggggacaggcgcaacttcggcagctactgcacgaactgcattaggattgggtgatgcaggtgttttgggttattcagcaaatgcggtagcttctctttttgataaatcacaagtttcacaatgggtaacggttctgggtctaaatcgtttagtgaacatctcccatggtgactggcaagggggaagtacatcaaatcctctattaatgcctacgcgttatgggacattgatgggctatcacgccaatgattcaatcggtacttattcatggcaattcttcaaaggtgtgcaagggcaccaaatgtcatatcgatatggtgctggatctgatgcatggtcagcatgggggcatttaaagaccagcttcaatacatcagttgatgcaaacggattcttaaaatcagcctcaccagtagttaagttgtttaacgaccatatcgaactcaatagtgatgcagaaaaacagccgattgaatttaagaaagttgatgtaggcgattatttacttaaaggctctttaggctttgcccaagaaggctggtacatcgaagtacccaaagacgcaaatggaaacacgatcgtagctgtggtgtatgacacattggaaaacggtgatctatctattaagacttttaaacgtaagtttgattttgaacttgctgcagttgttgcagacttggaattacctatagatattccagaaggtcgctggattgatattcgcttgcatgaagaacctgaaccagagcctgagccacctacaactgaaacaccttttgatttccaacctacaaacttatccgaggctgtggctgctgcaatggttggggtagaaccgccagaaatctcagacacagacgaaacactttaa

SEQ ID NO: 52624 - DNA, 1326 bp, Acinetobacter baumannii
atgaataattgtttaagtaaggcacatttttttgctcaagttttagaagaagtgggtaaaaagatagaagttaaggatggagaaagcttaaattatcactctgatattctttttttgtcttatacaaaaataaaaagaaaagagtatataatagaaaaaggtaagcgagttgagaaaatgactcatggtgggccattttcagcatttagaggaaatagacagttatgtgataaatatggaagaaatgataatcatcctgctgatcaagtaatgatagctaatattgcatatgcgaatagaaatggaaatggtgatattcaatctggtgatggttggaaatatagaggtcggggaattatacagataactggtaaagataaatatgataaaattaataaagcaataaaagataattatcccaatgtaggaatatctattgatgcaaataatattaataatatttatgaagggacattggcttcaatggcttattggaaatcttttggtctatcaaaactagctacacaaaaacaagtagatattaggactcaattagaagttgtagattctttaattgatattattaatcgagatacagcatcaagatcagatagaaaaaagaattttgagtatataactgcgaaagtcttcaagcttaatgaatgtaaaaattcaattgtagaagcgaacttactaagtaaatctacacctacacctacacctacacctacacctacacctacacctacacctacacctacactgagtaatgttttaaaggaaataaagcaattagtagatagaaacataccttattcgcaaactggtgcaagaggtgctggaagtaataaaaatgctacctcagtaattactgctaatgatttaaaaggattagactgttcagaaactgttgcaatatatcttttaaagttaggtgttactgataaattctattctatacatactggtgttatgctcactgaaaatgattttagaaaggctatacgttcaaataaaattgagtatgttgttggaagtaaagatcttaattttatccctcaaattggggatatatttgtttggcgtaatggtggtgggcactgtggtatagtgtatgatgttgatagacaaaatgataccgttactattttagaggctataggtgacgttggaagtgctgatgaaaattttaatataaataatgggggcgaaaaaaaagtagggtgtacgcgaacagctgtatatagaagatctggaaaagctttagcccagcatagaggatgggtgggatattttaggccaattattagtggaaaaaaaatatga

SEQ ID NO: 52625 - DNA, 441 bp, Acinetobacter baumannii
atgaacgtaaaaaccttttcaaacaagcacaaggtaactggagttacagcaattgctgtacttgtagccttgagttcttgtgaatatcgaactgctaattctagcgtcccttctaactactcatatgaaagcaaacaagtagttgcttctgaatatgaactcttaggaattaagcaaactggtgaaaaaactggtgtagctgttatccgcatagacggcttcaaactaaacgtgagcttcgattttgacggcgtagctgatagctatggtgtagctggatctgattttacagcggctgaaattactaaccttgctattgagtcagtaactgacttaagcggcaaaccttggaatgatttcaccaatcatgacgaccataaaaacataaatattttattagcgggctatatcgaccgtaataaatggttggaggcagcctaa

SEQ ID NO: 52626 - DNA, 210 bp, Acinetobacter baumannii
atgatgacaggaacaataaaaaattcatcaccaccattagttattgagtcgattgaagcagaaggaacggtttggatgttgtcttttaatgggtcgaatccagatgaaaatgacgctattgaattgaccaaagaacagtgtttttggttattcgataaaattatgaatattgaccccaatctcttttataaaaccaaggagatttgctga

SEQ ID NO: 52627 - DNA, 327 bp, Acinetobacter baumannii
atgacattagaaaatgtttttaaacaagcaattgattcaaaaaagaaagtaaaactatcttttttttcaaaagaagataatcgagaattagttagaaaatgcgcccctatggactttggcccaagtagacgagcgcacaataaagatgatcgatttcatttatgggattatgaaagtgattcaagggttcataccttgagcctattgcctaatcaaatatcaaatatagaagtaattgatgaggaattttgtcccagtgagtttatcacctggaacatcagcaaatctccttggttttataaaagagattggggtcaatattcataa

SEQ ID NO: 52628 - DNA, 216 bp, Acinetobacter baumannii
atggacaattcaaaacgaccaatcaaccagattattgctcgcattaatgatgctgcgaaacatggtgaagctttggtgttgactgctgaagaagtaaagattctttctaaagatattggcgacaaagtctttattcctgtgcttactaatgagcaggtcgtgcagttggtaaaagaaggaaagctaggtcagaaaattaataacacaaaagattaa

SEQ ID NO: 52629 - DNA, 918 bp, Acinetobacter baumannii
atgagttcaggcgcaaaaattcgattatatgcttgtgaagaagcagttttaggaacaactccagcaaacccgatctggtacacagttcgccgtgtaagtgatggcttatcagaaaatgtctctacggaagaaagcagtgaagtagttgactcacgctatcgtcaaggcggtgtagttactgaagcggaagttgctggtcagttagagtttgaattgtcacttggtacctttgatttattcttaagtgctttagcatttaataactgggcaacgaatagcttaaccattggcggtaatgtacgtaagtcattaacgctggttaaagttttcgaagatgttggccaagtctttatttatcgtggagtacaggttaattctggtgaaattactatccagaccacggggaaaatcactggtaactttggtcttgtaggtagctcgtttactcgtcagcaaacgaaccctgtagtgaatccggttgcagcttcgactcgtccgcttgtcagtatgccgaacgtggaaaacttgcttgtaaacggccagtcaattcaaggcaaagcatgtctacagtctttgaccatttctattaacaataaccttgaagcgatccgttgtattggttcaggtaaatacacacctgagttctacattgaaaagatgatggatatcgaagcgaatgcttcattcatgttctcggccacagctgctggttggattgatgcaatcaaaacccgtgatgtgtttacactgaccttcgacatcagagacagcaaaggcagtaaatactcgtttaacttccctcaattagaagtcatggaagccaatcacccggatggtggtggtgatgacatcattactgtagatatcaactttgcccaagtccgtacagcgccaacaattgtacgtgctcttgtgtaa

SEQ ID NO: 52630 - DNA, 927 bp, Acinetobacter baumannii; identical to SEQ ID NO: 46217

SEQ ID NO: 52631 - DNA, 468 bp, Acinetobacter baumannii; identical to SEQ ID NO: 46236

SEQ ID NO: 52632 - DNA, 708 bp, Acinetobacter baumannii; identical to SEQ ID NO: 46630

SEQ ID NO: 52633 - DNA, 171 bp, Acinetobacter baumannii
atggaaaaatatgaatatcttgcagagcatgtacttgaaatcatgcaattaagcgatagtgaacggattgagacattatttactgatagatggattggctataagaaagcccactctattgtaaacaagacatttttatcttttatattcaatggcttattttcctgctaa

SEQ ID NO: 52634 - DNA, 693 bp, Acinetobacter baumannii
atgtataaaacattgaccacttgcctactaataacttgtcttggcttaagtggatgtgcaacttctatattatcgactgccctgccgaatgagacgactgaggtccaaacaactattttaaaaacagatcaaattattgcacttgggcaagccgttaaaaaccagcaagaacaaggcgtcgtatttataggtcaagactttaattatttaatgaccgaaggaagttcagaatttttaaatatcattaaaaatattcctgtaaatcaaagaactttaatcattccatctcctctgctacttgaaatggatgatcctacgcattttcatggtgaactcaagtttcaatacaatattcccgcttcaaaactctctgatcaacagaaagaaaatttaaaaaatttagggtttaaaaatcattttatggttatggagaaccaaacacagcttttatatccctacgctattattcgttttaaaggccaaatttatcaaaccagtcctactttaaaagtccaacaaacgattccaactccatatccaatcgccttacaacaaaaagatgaaataaccaagaaacatccgtttaaacgtgtaacgcgtatggcgctttatcctttagcgatggcatttgatatagtgacggtagctccttctctcatcttgtcagatttacgaggtgactttactaaataa

SEQ ID NO: 52635 - DNA, 363 bp, Acinetobacter baumannii
atgaattctacatattggtcgatattgagaatatcgggacctataccaggtgaatttagcttattatccattggagcatgtatcgtatctaatccggcaatatcaatatatcgtgagttaaaacctattagctcaaaacatgacttagaggcaattgctgtaacaggtctcaacttagaaaaacttgaagtagatgatttagatctcctaatggctatagtaaatttaaaaaaatggataaaatcatcatgccctccaggccaagaaccaatttttataagacttaattccctatttaattggtcattcatcaattactgttttcataaatctttaatgcaattaaattataaaaccagttaa

SEQ ID NO: 52636 - DNA, 597 bp, Acinetobacter baumannii
atggtggcgcatcccggactcattcagcagttgctcgccgacgaacagatatccctgatagaccgtgcggccgttaaccggcagcgccggggaaatcaccgtccgcgtctcacccagctcggccagcagggcatccagcaccgggccaatgttgccctgcgcggtgctgtcgaaagtggaacagtacttgaaataaaactgctgacagccctgggcctgcagccagcgcagggccgccagcgactggctgacggccatttccgccgggcaggagcgagttttcaggctgatgaccaccgcctcgctggtcagcggaagatcgcgggtcggcacgccattcagttgcaccgtcggcatgccgttgcgcacgaggaagctggcaatatccgtggcgccggtgaagtcatcggcaatgacaccaagctgcatgttgtctctcctcactgtttatggcccggcagggtgatgccgttgaaaatcttgatcaccgcgctgtcatcttcccgaccgaatccggcattactggcggaggtgaacatattcagcgcggtgatcaagattttcaacggcatcaccctgccgggccataaacagtga

SEQ ID NO: 52637 - DNA, 705 bp, Acinetobacter baumannii; identical to SEQ ID NO: 8686

SEQ ID NO: 52638 - DNA, 360 bp, Acinetobacter baumannii
atggaaaaatatgaatatcttgcagagcatgtacttgaaatcatgcaattaagcgatagtgaacggattgagacattattcactgatcggtggattggctataagaaagccattaccatcatgaacacattgaccgatattttgaatcgccctaggaaattaagacctgaatgcttgttgattgttggtgactccaatatgggcaaaacaactatcattcatgagtttgctagacagtattatacaaaaaccgtaagtgatgctgacatggatttattgtccgtaactaagccagttttaccgatacttgctccagcaaaagccaatgttaaagaactctatattctctgtacacgataa

SEQ ID NO: 52639 - DNA, 159 bp, Acinetobacter baumannii
atgtttgtaacgctattgttgagcgtaacgatattatttgatgccgaagttaaacgaccgtcgatgtttgtaacttttgaagttaaatcagttacggcggacgaggttgcttgcaagtcggttgctaacttcttattacctgtaatgttacgtacttga

SEQ ID NO: 52640 - DNA, 465 bp, Acinetobacter baumannii
atgactcctgcatgtagactgttaaaaagtaacaaaatcgaattttctatccatgagtatgaacatgacgcaaatgctaaaagttttggcttagaagctgcggaaaaattaaaccttaatgtaaatgaggtgtttaaaacacttctggttacctatgagaaaaattattttgttgcggttataccagttaaccatcaactcaatttaaaaaaagtagctacggcagtagggtgtaaaaaactacagatggcaaatcctaaagatgccgaacggttaacagggtacttagtgggcggaattagtcctttaggccaaaagaaacgtttgaagacagtaattgatgcctctgcgcaagagctcagcaaaatttatgtaagtggtggtaagagagggttagatattggtgtaaatcctaaagatttagcacaaatattaacggcgcaatttgtagacgtacttgattaa

SEQ ID NO: 52641 - DNA, 471 bp, Acinetobacter baumannii
atgttagttgatacctattcaagctcattaagtttaccttctttttcgagtaatacactaaattctataaatcgtagtacaactgtagtttctaattataatggagttgctaatcgcgtaaataaaagcgttgaaaatttcattgatcatactgaatcaatgcgtgttttttttaaaagctttctaaataatcaatcagattttcttgcgttttttttatgcttatgtgtcattggttcttttcaatcatatgatcttagacttgatagtaaagataatattatttcacctgagatatttaaagattctaaaaatagtttttggtgggataaaaaacattattttgaaatatataaattagaagcaactaatagaggaagagaggcttctgcatatatgacagtattaatgcatcaagctgtacctgtctcttatacacatctgacgctgccgacgaatagagaggtgtag

SEQ ID NO: 52642 - DNA, 204 bp, Acinetobacter baumannii
gtgaaaaaggttgttaaagcgaaaaatttaattgcgttccgtatttggttagaaaaattagggtattcggttaaaaaccttgctgatggaaaaggttttactttcagttttaaaaaagaatatggcttagtgacctgtgatttggcaggtaatgctttagcaatgcagttaggtgaagaatttgaggatcacttaaaagcataa

SEQ ID NO: 52643 - DNA, 384 bp, Acinetobacter baumannii
atgggcatggatggctatttcacagatatgggttatgaaggcaatgctggagatgggtatgttccaactcactcagcaggaccaagagcctatggcattaaaggcactggcgactcaatgtttccagcaattcgtaatggctggtatgttgtatgcgaccctgatgcagagcttgtgccgaatgagtttgttcaggtgtgcttgaaggatggaagatgcacaattaaagaatttgtcggcatcaatggtggggttttaagtttgctttctgtgaatggtggtgagcgatttttctttgaaatggacgaggttgaaagtattaccgctattacagatatcgtgccgccaagtcagcacagacaagaacatccttattcgcattaa

SEQ ID NO: 52644 - DNA, 366 bp, Acinetobacter baumannii
ttgccaagtgaaattggtagactaatattttttacctttaaattaaaaaaaatagtagagaaatattctgctgatattatttggtcaatgaatgttggaccatatgttaaaacttcggcatatcatgtattatctttaaataatgctttccaagtttgtgacgctaatttattagaaatacatcctagtggctcatttagagttagtcttttaagattcttttttagacttagtatgcgatatactaatttaactatattacaaacaccatttatggaaaaattagttaaaaagaattttcataatactaaaactgtcgttgcaaaaaaatcagtaggtattagtctgtctcttatacacatctga

SEQ ID NO: 52645 - DNA, 192 bp, Acinetobacter baumannii; identical to SEQ ID NO: 49401

SEQ ID NO: 52646 - DNA, 219 bp, Acinetobacter baumannii
atgttagcattagttacaggcgcatcagcaggttttggttatagtatttcaaagaaactgattgagtcaggctataaagttattggatgtggaagacgcgcagaaaaattagaagaactacaaaaacagcttggcgaaaatttctacccactcgtatttgatatgactgatacggcagaaaatataaataagttctctgtacacgataaaaatagataa

SEQ ID NO: 52647 - DNA, 381 bp, Acinetobacter baumannii
atgaaattattttttaaagatataattctttatgaaggcattcgaaaagttgaattatcgaatatctataagcatgaagaaattattgatgaacttgatccagaatcaataatggccgaaacaactagtgaaaatgagatagtgttgattcaggcagaacgaaactggtcgggctttgggttgttttatccaaagctgagtatgatagctaagttggaattattgaagaatatacctaagatttttctattagataaacgtgactctgctattagtgtatttaatgaaattggtaaagttgtatttgattatatagagtacgagagagaagtagctaaactagttttctgcggggcgtacatttatgatgaagatgaatag

SEQ ID NO: 52648 - DNA, 477 bp, Acinetobacter baumannii
atgagagatgatactaaattttgtctcggattaaagttgaatgtagggctaatcactcctaaagaaattcaagtttgggcagataaaaaaatattggaagacaagaatgatccatttgttctagatatttgttttctaggatctgaagctgaagttaaggattattttaataaattaatacgggctgatttagatgtacagaataagaaattaatctctatcaatgttttaaaagaatacatatcgacaaaaaaaccatcagacttagactctgatttagaacaatatataattgatattgaattaatttgttggcatattcatgattcagctttaatttccttgctacacatttatggtgaccagattaatttagcttatcaaggagttcttaccatatctgttcaacaagcatttgatgatttttcaaaatatataaatgaatggctagaaaatcaatttaatataatagagtaa

SEQ ID NO: 52649 - DNA, 699 bp, Acinetobacter baumannii; identical to SEQ ID NO: 51485

SEQ ID NO: 52650 - DNA, 3276 bp, Acinetobacter baumannii
atgaaactaatagataatattaattctttattaggtgaaagccttagattaaatcttcaaaataaaacaaaattaaagatcgctgcttcttatttttcaatctatgcctatgctgctttaaaaaaagaattagaaaatatcgaagaactacaatttgtttttacctccccaacctttgttgcggataatgtgtcggacaaactaaagaaagagcaacgtgagttttttattcctaaacaagatcgtgaaagcagcctgtatggaacagaatttgaaattcatttaaaaaatcaattatcacaaaaggcaattgccaaagaatgtgcagattggatacgacgaaaagcaacatttaaatccaataacagtaatgcaccgatgcaggaatttatcagtattcagaaaccggagcaatccttaacctatataccaattcaggggtttacccctatgggcctaggctttgaaaaaggcaatgccatatctaatatggtgaattgctttgatgaacagccgatggtgcaaacctatattcagctgttcaatcaaatttggaatgacccctcaaaagttgaagatgtcaccagtgaaattattcggcacattgaatctgtatatcaggaaaatccccctgaacgcatttatttcttaatgctttacaacatcttcaaagatttcttagaagatatcaacgcagatgtgatgcctaatgacctgacaggttatcaggacaccttggtatggaataagctgttcaatttccaaaaagatgcagcagtaggcatcatcaacaaactagaaacttataatggctgtattttggcggacagtgttggtttgggtaagacctttaccgcattggctgtgatcaaatactacgaattacgtaataagagcgttctggttttatgtcctaagaaattgggggcaaactggacgaattataacgccaatctagtcacgaacatttttgccaaagaccgttttagttacgatgtgctgtatcacaccgatctctctcgtaaaagtggtgaaaccctaggtatagatttggcgaaaattaattggggcaactatgacttagttgtgattgatgagtcgcataacttccgtaaccgtggcacgtttaaggatcgggaaacacgttatgaccgcttaatgaatcaagtgattcgtcagggtgtgaaaactaaagtgttaatgttatctgctacgccagtaaacaatcactttactgacctcaagaatcagcttgcccttgcctatgaaggcaatgcagctctattggaaaataagctcgatactgaacgtgatatcgaaaccatattccgtcgagcacaggccagctttaatacctgggcaaaactagatcctgcccaacggacaactcaagcgattctgaaccttctagatttcgatttctttaagcttttagatagcgtaacgattgctcgttccagaaagcatattcaaactttctatgacaccaaagatagtggacagttccctcaacgacttaagccgatttcatttcgttgtgcattatcgatagaacaggatagtgtttctctgaatcaaatttatgcagatctgtctttaatcaaaatgtcagtttatgcaccagtcagctatatctttccaagtgctttaaaaaagtatgaagaaatttttgatactcgtgtagaaggcaaaggtaaattaagacaggtagaccgtgaaaaaagtttacaggctttgatgacggtcaacttgctgaaacgcttagaaagttctgtccatgcatttaggctgacgctgaacgttttaaagaaaaatattgaaaatgtactcactaaaattgcggactttgaagctcgtcaggcggatgatgaggtcagtatttcacccgactttggctacgatgaagatgagaatggtgaattacttaatactgaagaccttattggcaataagctaaaaattcatttggctgatatggatctgttgagctggaaaacggatctagacggtgactaccatattattcttggtttactgcgaatgattcagccaattaacactgaaaaggatgccaaactacaacatcttaaagcgcatgttgttgagaaaattcagaatccaattaatactaataaccgtaaagtcatcatatttactgcctttgcggatacagcgaattatatttatgagcatattgctccgactttgttagaaacctatggtttgcacagtgccaaagtgatcggcagtgacaatacttcaacgatcaagaccagagtgggaagccgtcaaagttatgatatgcagggcttgctcactctattttctccaaaatcaaagcaaaaagcagacatattctctgaagagtccagagaaattgatgtcctgattgcgacagactgtatttctgaaggtcaaaatttacaggactgtgattatctaattaatttcgatattcactggaatcctgtacgcatcattcaacgttttgggcgtgtggatcgtattggctcatcgaacagcgttattcagcttgttaattattggcctgacattagtttagatgaatatattaacttgcgagaacgagtcgagaatcgcatggtgatcgtcgatatgacaagtacgggtgatgataacgttctcagtgctcaagctaatgatattgcctatcgtcgtgaacaattgcaaaagctacaaactgaagtactggatttagaagatgccaatacaggggtttcgattactgatttagggctgaatgacttccgtatggatttgcttagttatatggaagagcatcctgaattggagcgattaccgaatggactacatactgttgtccctgcacagccagaactcggtttaaatgcaggagtcatttttaccctaagagcacgacatcctgagtcgcctaacagccaaagcaaccgcctatatccatattacttagtttatattaatcaaagtggtgaagtcgtttatgactacacccaagccaaatatttattggatgtagcacgtaaagcatgtcgaggaaaagatcatccgattcctgaagcgtatgaaaagtttaatgagaaaaccaatgatggacgagatatgagccagtattcagaattgttggatactgcgattcataccattcaggacgtaaaagctgagaaggatattgatagcttgttttcaggcttgactacatcagcgttggtagatgtggtttctggattaaatgactttgagcttattagttttattgtgattgaagaatcttga

SEQ ID NO: 52651 - DNA, 678 bp, Acinetobacter baumannii
atgaagttatataaatttccagcccaggctaaagtggatcggttaattccgaaaaataagttttatgaacaaggaaaagccaataccaagatcgaacagctatttgttgatcaagtggaaaatatacggtgggcttataagttagcttcatctacaattcacctccaagatcaggaagatttgaaggaaattcaaatctttcgagtgaaaagtcgggttacagatttagatgtttcgattctatctttcattgataaactcattctaactccaattatttttgaagttgtttatcaagataaagtgaaagtttttgcaacctataaacgtttgaatcaagtagacaaaactaaagcggtgataggtcaatattacgcttctgattggttggatgatgcaggtcgtgttgaattacctctttatctaaacttagcagatctatatgagcatttcatcactcagttattaccgattgcatcaagtgaagatttagaaaacgatgatgaaccggtttctattgaacttaaattacaacaggctcagcagatcaaaaccttacaaaagcagcttgctaagctgagatccaagttaaaagctgaaaaacaattcaatcgcaagattgaactcaataagcatattcaaacaattgaaactgatctaaataaattagtgaattaa

SEQ ID NO: 52652 - DNA, 1953 bp, Acinetobacter baumannii
atggacaagttaaaaatgcactcacctaatcttgtggatgcaaacatcgaaaagatttcagcactattcccaaactgcattaccgaaaccaaagatgaaaatggcgaactgaaaaaagccattgattttgatttgcttaaacaagagctttctcaagttttggttgagggtgagcaagaacgttaccgtttagattgggtgggtaaaaaagaagccattttaacggctaatgctcctattgcgaaaactttgcgtccatgtcgtgaagaaagcgttaattttgataagacagaaaacttgtttattgaaggtgataatctcgaagccctgaaacttctgcaagaaaattatttgggtaaagtcaaaatgatttacattgacccaccctataacacgggaaatgattttatttatgaagatgactttgctgaaagtaccaatgtattttttgaacgttccaatcaagtcgatgaagaaggaaaccgcttaattgctaatactgaaagcaatggccgtttccattctgactggctcagcatgatatatagccgtttaaaattaactagaaatttattaaaggatgatggtgtcttatttataagttgcgatgattcagagttatataatttaaaaaaaatactagatgaagtttttggttcaaataattttattggtaatttaattattaaaagtaatccacgaggaagccagtcagataattttaaggctatagttcatgaatatttattagcatatgtgaaagatagcttttcagcagaagctcttctagatactttatctgatgatatgattaaagaatataatttaaacgatgaaaacggaaattatcgtttattagggttgcgtatgcggggtggctcatggagaagagagcaaagaccactattattttatccattttatattaatccattaaataattcttttagtttaaataaagatacagagcattctatcgaaattttgccgattcaaccatctacaggtgaagatgggacatggagatggagtaaatctaaagtagaaaatgagggaaatttgttaattgcaaaaccaattgtacggaatggagaaaatacatgggatatttttcaaaaagattatttacataatgatgaaggaatcaagggaacaaaactgaaaacaattttggatgcaaaagaattaaattatcaaaatggtagtgttgaggttaagcaattatttgataataagtcagtctttgattttccaaaacctaaatatttgattcagaaaattttaagtctagtctcaacaaataatgaaataattttagacttcttttcaggatcagcaacaacagctcatgcagtcatgcaattaaatgctgaagataatggcaatcgtaaattcatcatggttcaactaccagaacaagtcgatgaaaaaaaagaagcatttaaagcaggttataaaactattgctgatgtatctaaagaccgtatccgtcgtgcaggtaaaaaaattctagaagataatgttaataaagaaggtattgaaaacctagatattggtttccgtgtcttaaaaatcgactctagcaacatgaaagacgtgtattacacaccagatgctttaaaacaagtagatatgctggatttagccgatcatatcaaagcagatcgtacatctgaagatctcctattccaagtcatgctagattgggggattgaactttctttaccgattgaacgtaaaactattgcaggaaaagaagtattttatgttgcaggcaatagccttgtcgcttgctttgatgaattaacctttgatgtcgtcgatgaagttgctaaagatcatcctttacgctttgtatcagcagaaaaagccattcatcttgaccatgataaaaccaatatcaaagaacgctttaaacagctctctcctgatactgaagttaagtttctttaa

SEQ ID NO: 52653 - DNA, 3171 bp, Acinetobacter baumannii
atggaaattcgttttaaaacccttgggtatcagaaagactctgtacaagcgattgtggattgctttaaaggacaaccacgttctgaaggccatcggtacatgattgaccaaggtgcagccaaagcaaaaaaacaaacggcacaggttgatatgcttgaagaaaccttggatttacaaggtggtaaggctaaaaaagtgattgcagatgttggttttgaaaatgcccatatttttgatctgcaagctgtattaaaaaacattcaggaagtacaagcagcaaatggattacaaagatcatctcaattgatcacggatgataatggaaaaggcaagaacctgactaaaagccaattaaaccttgatattgaaatggaaactggtacaggtaaaacctactgttatatccgtaccatgtttgaattgcataagcagtatggttggtcgaaatttattgtggtcgtaccgagcattgcgattcgagaaggtgtttataaaagcctaaatatgatggctgatcactttcaagagcaatatggcaaaaaggcccgtttctttatctatgattccaaagcattacaccatttggaaagctttagctcgaatggtggaatcaacgttatggtgattaacgttcaagcgtttaatgctacaggtaaagataaccgtcgtatttatgatgaactggatgaattccaatctcgtcgtccaattgatgtgattagtcgtaaccgtccaattttgatcttagacgagccacaaaagatgggtgcagataaaactctagagtctttatctaactttaatccattgtttattttacgttattccgcgacacataagcgtaactataatcttgtctatcgtttagatgctttggatgcctataaccaaaaactggtgaaaaaaatcactgtaaaaggtgtggaagtacaaggcttaacaggtacacatggctatttatacttacaagacatcattgtatctaaatctgcacctatcgctcgtttggaaattgagattgaaaccaagaatggttttaaacgtgaggtaagaaaggttagtaaaggcgataacctttacgatatttccaataaggctgaacaatacaatgaccgttatgttgtctcagacattgatgcacgagataactcagttactttcttgaatggcacaaaaattcatgtcggtgaagcattagggcatgttgatgaaaagatcatgcgaaccattcagatccgtgaaacgattcgtgcacatattcaaaaagaacgtcagttatacaatcagggtattaaagtcttaagccttttcttcattgatgaagtggctaaatatcgtcaatatgatgaagataataatcctgtcgatggggaatacgttcaaatcttcaaagaacagtatcaacaggtactcaatgaagttctggatctaaatttagaaaatgacccatattttgactatctgaaagcaattgaggtagatagtactcacaacggttatttctcaattgataagaaatcaaaacgtcttgccaatccagcaattgataagaaagctgaagaagctcaggtatccaatgatacagacgcttatgacctgattttaaaagataaagaacgtctactttcctttgaagagccaactcgctttattttctctcactcagcgttacgggaaggttgggataacccgaatgtgtttgtgatctgtactttaaagcattcagataatgtaatctctcgtcgccaagaagttggccgtggtatgcgccttgcagtgaataaatttggcgaacgtatggatgccaaccatttccaaggggccttaggagaaattcataaactgaataatctcacagtcgtcaccaatgaaagttacaaagattttgtatctaacctacaatcggaaattctgaatacgattcagaatcgcccgacacaagcgactcctgattactttaaagggaaaatctttaagttatccgatgggtctagtgttgaagtcactgaattgatggcaaagcagattaataagcatttgtctaagcacgattatattgatgataatgatcagttaacgccaaagtatcacgaagcgaaagatcaaggcacgttagcagaattgcctgaaaacttggtggcatatactgagcaaatccataagttaattgatggtctatttgatcctaaagctctggaaggcattgcagacgatggcaataagaagctgaccaatagcatcaatcaaaccaatttagaacgtaaagaattccaggctttatggtctcgtattaaccgtaaagcagtttatcaaattcatctggattctgaaaaactcattgaacaaagcattagtgctgttgaacgtactgctgttgagcgtaacaacaagtttgtagaaacgctgagttataaacttgcagaagcgacacagaatgatgaatctacctatgagcaagttaaagccaaagaaatgtttgggaaggtgacttcaaaaactgaagtggcgaatatttctattcagtctcaagtgacctatgacctgattggcaatattgccgatgataccaacctcactcgtaaaacggttgcccgtatcttacagggagttaacgctgcggtatttgcacagtttaagttgaatccagaagctttcattcgtgaaatgagtcgtatcatcaacgaacagcaggcaaaaatggtgattcaaggactaaaatataatcctttagatagcacttatcctgataatgaaatatttgtaagtaatgagaatattccattacaggcgtataaagcagagcgtcatatttgggattacgtagtcaccgattctgataatgagcgtaaatttgttgaggagctggatggtgcagatgaggtggtcgtctacgctaaacttcctgatcgtttccagattcctacgccttttggtagctataaccctgactgggcaattgctttcaataaggataaagtgcgccaaatctatttcgttgcagaaactaaaggctcaatgctagacagtgacctaagggaaaaagaaaaacgtaaaatagagagtgctaaaaaattcttcgctaccttaaatgaagaatatcaatcggtggaagatgtcgttcaatattctgtgattgatagttttagtagtttgatgaaattagtgaaataa

SEQ ID NO: 52654 - DNA, 924 bp, Acinetobacter baumannii
atgggcttttttgatatgttgttttctggcattgggtctttattcagtgcagcagtgagcgtagtttctgaagtcgtttctacagttaaaatctatttcactgcaaaagaaatcgtgacaaagactgtctacgatgaacgagacaaaaaacaagatcaaatacatgagcttaatcaagaaattcaatttttgcgtagaaaattgaatgaatcaggacgtattactgaacaacaacgtaaaaggctgtatgagcttgatgaggaaagaaatttcctaaaacaaggcattaaaagtgatagtcaaattattgctgctgataaatttcaacaaaatgaggagaacattcataaagttgagattgatttagaaacaacgcatgttcttcaatggaatgcttttgcagatacaatggctaagacatgccctaaatgtcaaagacctatgaaattgcagtgggcacgtaatttagttcatgtaaatccacaagatttttattggggatgtacgggttggtattttaataatcagctggttcgtttgtgtaagtatcgtgaaaatctaacgcgacaagatttagtattaatgacagatacatctgtacctgaatttagtctttcagctcaagattttaatattattcttcaggatcatagtacgtctgaaagtattgtagagcgtatggatgacttacaatttgacctaaagagtagaaaacaaggtataaagattgtttgttgccccatacatgctgagcctatgcagcttcaaaagaaaaaaaatggtgtaggtttattagatcaatattatttaagatgtccacattgggcttctgataatcaaggttgtatgtatatggaaaaattgaagtcaggttctcagctagcagctttattaaagtatcagacaggtacaggcatactttaa

SEQ ID NO: 52655 - DNA, 1803 bp, Acinetobacter baumannii
gtggctaaatactctgttcatcaacatccgattgataccttactttcatggatcaaatcaggcgaaattgcaattcctgagattcaaaggccatttgtatggtcaagtagtaaagttcgtgatttaatggactcattatataaaggttatccagttggttacattattacatggcgtaacccagacattcgactaaaagatggaactttatctgctggaaaaaaggttttaattgatgggcaacaacgcatcacagccttaacggctgcggttgtaggccaagctgtattaaataaagattacaaagaaacaaatattcaaatagcctataatccaactgcaaaaaatgatgagacgttatttgaagtctgtaatacggcgatcgaacgcaatccaatttgggtgaataatattgcaccaattctaaatggcgatatttcaatatctcaggctagacgtgcatatatggcactgaatcctgatgcggatgaagattttattgaagacaagctcgagcaattgaaagcaatcaaaaatcgtcaaatcggtattattgaattagactcatcacttgatattgatacagttactgaaatctttatacgcattaatcagaagggtgtggtacttagtaatgctgattttgtcatgtctaagattgcatcagatgagcattttggtggcaatcgattacgcaaaatgattgactatttttgccatcttttaaaagaaagtagttttaataaaactatccaacaaaatgataaagtttttgcaaccagtgatgactataaaaaaatcagttggattgcaaatattaaggatgatctttatcagccgaattacatagatgtattgcgtgttgcatatacttgtcagtttaatcgtgggaaatttagcgatctagttgctttactctcaggtcgtgactttgaaaatagacgtaatgttcaaagtattgcagaagaaagttataaaaaattacgacaaggtctagaagatttctttaatcaaactaattaccagcgatttattacgattattaaatcagctggatttataaacaaaaagttaattagttctcaaacaagtcttaacttcgcttatgctttatatctacagttaagagcatcaaaaatgcccgaaccgcaaattcagaatcttgtaaaacgttggtatgtcatatcactattaacgggacgttattcggggtcttcagaaacagcaattgaacgcgatagtaaacaaatcttggacaaggggattgaagggtatttggcacaaattgagcaagcagatttagatgacggattctgggattaccgtttagtcaatgagttggattcttcgagtactgtgaataatgcatacttatgttatttagcatcccaatgtaaatcgaatgagctttcttttttatcagatagtttgacagtacgtagtctgattgagcagagaggagatgtacatcatgttttccctaaagactatctagctaaaagtggctttaagaagagtgaatataatcaggttgcgaattatgtttatacggagcaatcggtgaatattaaattagggaatgcatctcctagaacgtatatggatattatttatcaagatatcaatttgaagaaaaacgggataaccgctctgaaagatttggagagtttggataaaaacttacttacccattgcataccaaacaatattaatagcttggaatcagatcaatacagtgaatttttggagcaacgtcgtaagttgatggcacaaaaaatcaaagagttttataaaggcttgtaa

SEQ ID NO: 52656 - DNA, 618 bp, Acinetobacter baumannii
atgattagtcttactgctattactactgtatttggggccctagttcctttaatggttgcctatatttcatcgcgacataactttaaaaagcacccaagattagaatttagcgaaagtattgaagctgctaaagagtttgattcaattctaacctccactgaatcacaattagtaaaagatcgcatggctcaaaaattggtaatgaaaaagaatatcaatttcctagaaacacaatatttctatagctatgtagatatggaactttgggttgaaagatatattgatgttcggaaatacatagaaccaattattgatgaggataataagattgttgacttaaagaataaatatactatggcaaagggtatcttatttttatgcatgtattctttctttgccattttagccatgatcccattgatgtttctaaagtattatttagcaatcttgcatcaatctattgatactagtagctttttaataacatttaatttaattacttggccaattttgtttatttttatagccttagttggtcttcatagagctaataaaatagctgatgcttataattttttaaagaaatttgaatgtgaacggataaaaattaaggaatag

SEQ ID NO: 52657 - DNA, 477 bp, Acinetobacter baumannii
atgaaaacccctctcccagattatttggcaaatgttatagaagcctgtgacatcgataacagcggtcatctcgccgattatattcctgagttggccaatgcaaacccaaatcgattagctttagcaatgtctacggtagatggtgaaatttattcggtcggcgatgatgatgttgaattcaccatacaatcgatttctaaaccttttgtgtatgcttacgttttacaacaacttggcattgatgcagttcttgcgaaagtaggggtagagccttcgggggaagccttcaatgaaatctccttgggtaaagatggtcgtccaaaaaacccgatgattaactctggcgcaattactgtacattccttgattcaggtcaaacatggtttgcatagtgcagaaattctacgccgttttatgagcgagcttgctggtcgcgaattaagttttgatgagtctgtttatgattcggaagtctaa

SEQ ID NO: 52658 - DNA, 465 bp, Acinetobacter baumannii
atggaagagcgcaaaaatctggatactagagcttcggctttaatggtgcttttatgtatggtcttagggctgcaacaggtggttctgaaaatagcagcaccagatatttcgccgattatgcaaatcgctttacgttccggcttatctgctgttctagttttacctttattgtggcgagatcattcgattcatctattttcttataaacaatgcaaagctggcgctcttattgctttatttttttcattagaattttatttcgtcacccaagccttaaagtttacctctacctctcatacagtagttttactgtataccgctccaatttttgttgcattagggcttcattggaaatttcccactgaacgtctgaatcgagcgcaatggggggtattgctctggcttttatggggatcattcttacattttacccaacaagcacagctacaaatgcgccagctctag

SEQ ID NO: 52659 - DNA, 498 bp, Acinetobacter baumannii; identical to SEQ ID NO: 16552

SEQ ID NO: 52660 - DNA, 372 bp, Acinetobacter baumannii; identical to SEQ ID NO: 16551

SEQ ID NO: 52661 - DNA, 378 bp, Acinetobacter baumannii; identical to SEQ ID NO: 16550

SEQ ID NO: 52662 - DNA, 1617 bp, Acinetobacter baumannii; identical to SEQ ID NO: 16548

SEQ ID NO: 52663 - DNA, 1527 bp, Acinetobacter baumannii; identical to SEQ ID NO: 16547

SEQ ID NO: 52664 - DNA, 1668 bp, Acinetobacter baumannii
atgagtgctacccggattcaagcagtttatcgtgatacgggggtagaggcttatcgtgataatccttttatcgaggccttaccaccattacaagagtcagtgaatagtgctgcatcactgaaatcctctttacagcttacttcctctgacttgcaaaagtcccgtgttatcagagctcataccatttgtcgtattccagatgactattttcagccattaggtacgcatttgctactaagtgagcgtatttcggtcatgattcgaggtggctacgtaggcagaaatcctaaaacaggagatttacaaaagcatttacaaaatggttatgagcgtgttcaaacgggagagttggagacatttcgctttgaggaggcacgatctacggcacaaagcttattgttaattggttgttctggtagtgggaagacgacctctcttcatcgtattctagccacgtatcctcaggtgatttaccatcgtgaactcaatgtagagcaggtggtgtatttgaaaatagactgctcgcataatggttcgctaaaagaaatctgcttgaattttttcagagcgttggatcgagccttgggctcgaactatgagcgtcgttatggcttaaaacgtcatggtatagaaaccatgttggctttgatgtcgcaaatagccaatgcacatgctttagggttgttggttattgatgaaattcagcatttaagccgctctcgttcgggtggatctcaagagatgctgaacttttttgtgacgatggtgaatattattggcgtaccagtgatgttgattggtacccctaaagcacgagagatttttgaggctgatttgcggtctgcacgtagaggggcagggtttggagctatattctgggatcctatacaacaaacgcaacgtggaaagcccaatcaagagtggatcgcttttacggataatctttggcaattacagcttttacaacgcaaagatgcgctgttatcggatgaggtccgtgatgtgtggtatgagctaagccaaggagtgatggacattgtagtaaaactttttgtactcgctcagctccgtgcgctagctttaggcaatgagcgtattaccgctggtttattgcggcaagtgtatcaagatgagttaaagcctgtgcaccccatgctagaggcattacgctcgggtatcccagaacgcattgctcgttattctgatctagtcgttcccgagattgataaacggttaatccaacttcagctagatatcgcagcgatacaagaacaaacaccagaagaaaaagcccttcaagagttagataccgaagatcagcgtcatttatatctgatgctgaaagaggattacgattcaagcctgttaattcccactattaaaaaagcgtttagccagaatccaacgatgacaagacaaaagttactgcctcttgttttgcagtggttgatggaaggcgaaacggtagtgtcagaactagaaaagccctccaagagtaaaaaggtttcggctataaaggtagtcaagcccagcgactgggatagcttgcctgatacggatttacgttatatctattcacaacgccaacctgaacaaaccatgcatgagcgattaaaagagaaaggggtgattgtggatatagcgagcttatttaaacaagcaggctag

SEQ ID NO: 52665 - DNA, 2109 bp, Acinetobacter baumannii; identical to SEQ ID NO: 16545

SEQ ID NO: 52666 - DNA, 822 bp, Acinetobacter baumannii; identical to SEQ ID NO: 16544

SEQ ID NO: 52667 - DNA, 534 bp, Acinetobacter baumannii
atgaaagtattaaagatagtaataggtacatatattctattaaacagtataagtttatatgcagaaagtacaaacgagtgtatgaagtattgggaaaaaccggcagcaaaagtaagtgtgctgcaagatattcaatgctctaatatatgggaagataattttagtaaagaaaataaaaaattagcaaaagaaataggatttaatctaaaagataaaaattgggtttctactggatcatgtagtcatgttaaatataatgataaagattattatatttattgggctgacatgaagcataataaaactgatcttattatgatatataacactagtaattcatttgcgtactcaagagcattaaacgcaaaaaaaattaaggaaggattcaaaaaagaggattctatagatgtagacttatcttgcggaaaagtaggagaagatatcaatattgtatctgtcttaaatggatatttattaaaagaaacatctattaataatatttctaaatataaaatttatgataggtttaaataa

SEQ ID NO: 52668 - DNA, 2481 bp, Acinetobacter baumannii
atgaaaaaaactataaaattccaagatggttcaatgcaggaatttaatttaaatagggagggatttatacaggctgttagctataaagaatcaagtgctgacttaaaattaagtcctaaccacaaaataaatatgatggctgctaaaaagagtagtccaggcggttatacaggtttctttcaaatgggagagtctgcattatttgaaacaggttactatttaggagatacaggtgtagattttagaaaattaaatccagagaaagagaagaaaaaaataaaaattattagatcaacttttgataaaaatgattggaaaggaaactggtctggtaaaaatggaattcattcatttaatgattttcttacaaagcctgaattacaattaatggcagtaagtgattggattaattacttatgtaaacgtatgcagttacttaattttaatcaatattatggccaaattattaatggggtagaagtaacagagtctggagcaattgctagtgcccatttaatgggtgaaggtgggttagcaacttttttgggatctcctatatttaagataaaatctcctgtatctgatgggaatggtacacatatttcttcatatctatcaatgtttggtggttttgatttagaaaattgttgcaaaagaaaaatttatattagtttaaaagatagttcaggtttagagataaagaataaagaagttattattatctcacagaataatggtaaatatatttcaggcgaaactagggttaaggttaaaagcgatgaaaatggcaatttgcctgttattgttagaaatccgaatactgaaataaaaatttttgctgatggaaaagagtcgaatactattattcagaaagcaaatgagaaacaaaaagcaattttaagtgattttaaggtttcaagtcatccagcaactttagaaaaaaatagtacaccacaaccaaaaccgcaaattaataaaacaccacaagaaataagaaatgaacaaacacaaccttctactgttccagaaaaagagaaagactcttcatctaaagatgtagactttaatattcaaatagttgaaggtgactctggtaaagcaatctctaatatgaatttttttcttacctataaaggtaatattaaaaagcatactgctgatattcatggggtcaagcaaaatattattgcagagataggccaagatattgaagtttctgtacagggtactggacataaacaagttatacatcattttacagcgaatgcggcattaaaaaataaaactgtaaaagtaagtcttcctgtacattcttttaatatttcagtaactcaggataataaacctgttccaaatactttgtttagtattttttacagaggtagagaaatctctaaaaggacagatagccgtggtatgttgaatgttcgaatgttaacaggctttgtttttggcttcggtataaagggaaaaagtttaattttaagtcgagttgaaaaaaatactataacaaaagcttttacagtgaatgggagtgctgttcatgcttcaaaagcatatgaagctaatgatgcaaaacagaagcaaaatgaaaagttaaataagcataagaaagaaaagcaagaggaagctgccaaaaaacaagctgatcaagctaaaactcataaaaatagtaaaaatgaagtaaaacaaagtaatacttatactgaaaatggaggtaagccattaacaactgttagtaatcaagctagtgttacaagtgatactacaaattatataatctatccaaatggaacaatcgataggattaataaagatgctacaggttttgcagcatattactatgtagcaaataatcaaccgattttgattgggaaaagtagaatttatacagctgatagatggttgaagaaaggtaaaaaaggttcaggaattagtcatctagtcagtatccgagaaatttttggggatagtggttcaaaacctaataacaaatgggagaaaaaaataggtaatttgaatatctcaatacataatgatacccaacaacaacatagatattggttatctacagtagcattcgctgcatatattggtgcagtctgtaaatttggtgaaaaagttcggtttagtggctttagtgatagaaatggttcaccaggaggcagtagttctcatttgaatggtgaagttggtgatattggttatattagagtagatagaaacaattcagtaggtgttaattttgaaatggcagactatgatcatgacgcatcgctacgctttgtcaatatattgatatcttttggatggggtaagacgaaaaatatgttgagtgaacattatcccgcacatttagttaataaatataaacttaatcaaggttatatacttccaagatgtagtcaatggactaatcctagacataataatcatttacatttacaaggtctgtcagtaacatttaataaggatgaatga

SEQ ID NO: 52669 - DNA, 522 bp, Acinetobacter baumannii
atgagatttatatttgccttttttatcatttttttaagtgcatgtagccactctaatactattgctgataaaaaaagctatttagactttaactcagtaaatttaaaagataaatcatatattattggtaataaatactctgatgttaatttttcgtcaaaaggtatagcaaaagatcaaatgggaagctgtacaactttttcagattttaataatagtatttcatatactcttaataatcagaagttggttgaagtattaattggaagtgaaaataaaagtatatacacatcaaaaaatatacgaaatggtatgggtgttgaaaatatatacaaaaactataagggttataatattaaaaaaatgaaaagtgatggagctggagattcacaagatgattatacttacatagtgactgataatttacagaaaaataatagtttaatttttgatgttgtacatggaaaaatacaaggaattcacttaggaaaaaagggatttgatttatctgattgtgagtaa

SEQ ID NO: 52670 - DNA, 2340 bp, Acinetobacter baumannii
gtggccacaaatggactttacacagtttcttcaggtggaaatcagggagctgtaaacgtcacgattgaagttgaagtaacgccggttaatgaatctggtgcagccattggcaatccaatgctgaagcagatcatcctaaagggttcagcaaagtcacgtcagacagttggtgcaacgctggatatggtgacttttcaggggcgctgtagtgtccgtgcacgccgtttaactccgactccggcagtcacaacagttgttgatgaagtaaagtggcaggcgctttacggtgcttatcctttacaaagcacagtgtatgaacatgaaacggtttttcgtgcgcgtacttatgcaacgaccggagctttatctgttaagtcccgcaagatcaattttgatctccagcgaatgttgccgacttataaaaacggggcaatgacaacagagctatatccaacgtctagctttgctgatgcactggtttcaatggcactggatgacaagataggccgccgtacgatcgacgaaatagatctggaaaatatctatcggacttataacgatgtagttgattattttggtacgccacttgcggctgagttctgcaccacaattgatgatacaaacctgtcttttgaagagctggttaccaatctttgtgatgccgtattttgtaccgcatatcggcaaaacaataagctcaagctttattttgaacgtccaactgataactcggtaatgctgtttaacttcaggaatatcattccggatagttacaagcatgatcttacctttggcgtgatggatgactacgatggactgatctatgaatacacggatccgaccgacgatagtcgtattaatatctatttgccggacaaaggagcaaagaacccaaaagaagtgaagtcagttggtgtacggaacaagtggcaagctcatttcaatgcttaccggctttggaacaaacttcgcttccagcgtaaatccatcacctttgatgcagcgcctgagtctgaattgcttgtgctacgtgaccggattgctgtagcggattatcgcaatggtattcatcaaagcggtgaggtggtacagcaagagggtttaatcctcaccttaagccatgatgtagatttcattgcaggcaagagctatgtgatttatctgcaaatggcggatggcacagtggacctgattcctgttacaccgggttcagccaaaaataaggtggttttagggcggttgccgaacggggccttaaagctaagtcctgatgattttgtaaataccatctatacagtagttaatgatgatactaaaggttcattgccttatctggttgcaaaaagagaaccggttgaccagttctctaatactattacagcaattaattacgatgagcgctattacctcaacgataaagactttattgacgtgccggttgatgattctccaatttacattcgatatgaccagctggatattaatctggcgcgtttatatcagatgcaaagaggggatttgccaacgactggcgaaatcagttttgtagttgaatctggtgcactagtttctagttcgagttcttatcgaccggaaaccagatttgtctataaattcgactacaactccagtccgccgaaacaggaatttattgcccctgcagcgactgaactacccgccattgatactggtgagttcccacctgatctggtggtaaatctgactattaaaggtgctgttgttgggcgtggtggtgatggcggtttacctcatttggcatttggcgcatgggagtccgatccggattacaactttactaaaacccgacgtgatgggtttcagggagcacccggtttattgaaccggcacagcaaactaaacctgattattgatggcggcactctagctcgaggtggatctggtggtggagcaacaccaagcggtatttacactgggttgtcttatggtgttcaaggtattccgggtggagctggtgcaccatttggacgggtcatgacaggccagccaatttcaagcgactcacaagattggcgctggtattttggaagttacttcaatgtcttaaaaattactgatgccgaagcttcggtacccggaaaaggctaccgaacccaaaatgaccgttatggatccccattatcaggtgatggcggaaactggggcgaacgtggtaccaagtctactaatgatggaacatggaactggaaataccatggcacaactgaaggtcagccggggccaggtggacctgcaattgtgggagttgcaccactgacaactcaattgattaatggagggaaaatcttacaaaccctttaa

SEQ ID NO: 52671 - DNA, 522 bp, Acinetobacter baumannii
atggcacaagtacaagacccaacattctggggcggcaacattgcattttggattcaaactttagtattttttattagtgcgcttattgctatatatactcttaggagaaatgaagctcaagcaaagaaacgtgcaactgtagacttagttctgtcagaaactcaggatatgtacttccgcgatattaaagaaaagtttgggaaatataagaaacaagggatgaactttaccaaacttgcttgtgaggaacttgcagataatccagaagagaatgacgtcattatgacaattctgaatcactatgaattcattgcgtctggaatctttgagaaggcattggatgaagaaatttataaaagaatgaagaaagggatccttgttagagattggaaaacattagagccctatgtaatggagttaagacgtaaagagaatagaaaagctatctatgcagagactcagcgattggcagaaaaatgggaaaaggataaaggtccttcatcaaaattttggcgaagataa

SEQ ID NO: 52672 - DNA, 537 bp, Acinetobacter baumannii; identical to SEQ ID NO: 16554

SEQ ID NO: 52673 - DNA, 240 bp, Acinetobacter baumannii; identical to SEQ ID NO: 36218

SEQ ID NO: 52674 - DNA, 2151 bp, Acinetobacter baumannii
gtgaataacctgactcaactattcaatcgttttaaaacgaattcaattttaatttattgcctgcaaattttaattgtactcacaggcacaactttaggtttactttggttaggtcataatgagctgatcgttcctgtgactttaggtgcgattgctgctgcacttactgattttgatgatcgcttaagtcttcgtttacgcaacttgctctatgtctgcctactcttttttactgtcagcactattcttggttttttagcaccttataaatttttatttattttatatctttcaatttccagtgcttgtttcattttattgggagctttagggcaacgctacgccaccatttcttttggtacgattttactctcaatttatagcatgtttggtttaggagaatatgcacactggtaccaacagcctacttattttgtctatggtgcgttgtggtacggcttaacttctattttattttttattcttaaaccaacacttcctttacaagataaactttcacaaatttttgaagaaatttcagccttacttcaagctaaagcacggttgtttgacccagataataaagaaaatgttgaacagcttttatttgaattatcactgcaaaatacacaagttgcgcaaagccttaaccaaatacgtagctctctgctgactcgccttaaggcatcacgagtcagtaataaaagtatttactggttaaacttatacttttttgcgcgagatatacacgagcaggcaacttctaattatttacactacgagcatatccaacaaaattttagccgtagtgatctcatttttcgttttcagaaaaacctacgcttacaggcacaagcttgccatgatttagcccaatgcattttgcataatcaacaatatcagtcttctcaagaaagccaaattggcctaaaccatttggaaagctctttgaaagactggatacaacagcatccacaaaattttgaagttaaaaatttaaagctaatttttaataatttaaaaggaatgcatgaacaatttgagcagcttcaatatgctcaaccgtttaatgaaacgctaagtcagaacaagcaagaacatctcaatttactagatgatgatattcaaggattttcagaccttgttttaaaaattcggcagcaactgacgccacaatcggccctatttagacatgcaatacgaattgcggttgtgtttgccgcaggttatgccatttccctcttaccttttgcccaacatggttactggattttgctcaccagtttatttgtttgccaaattacttactttgcaaccaaaagtcgtttaaagcttagaacgattgggactttactcggcgttttattgggtattcccattttatattttgttcctagtattgaaggtcaactcattcttaccattatttgtggagttagctttttctacttacgccagaaaaaatatgcgctggcaacactgatggcaaccttaatggtattgctcattttcaacttaaaaggtgcaggttacagcattattttacctcgcctaatcgacaccttattaggctgctttattgcttggcttgctgttaattttatttggccagactggaacttccgtaatattccaaacaatattaagaaaagtagccaagccacctttgattacttcaatatgattgtcgagcaatatcagcatgggaaaaatcaagacattgaatatcgtcgaattcgccgagctgcacataacgcacaaattgaattgtcgaatatgatttcaagcttaagtgccgagcccaacccgaatccagagctgattcattatgcctttcgttatttggtttatagccacagccagctgagttatgtcgccgccttaggcagccaaagacaaaaaattgatgatcaacaggtattacaactcttactggattgtcggcaaattcttaaacaaagtttatctgaacaaacttcggttaactttagttttcttgaacagactttaaagcaaattcaaattttaataactcaagaacatttttcagagaactacatacttgtcttaaaacagatgagtttattattagaaaccttgcctgaactcttaagcttaaaaggcaaacttttagagcatgaaattaaatag

SEQ ID NO: 52675 - DNA, 465 bp, Acinetobacter baumannii
gtggtaaataaaataaaaggttttaccttaattgagttaatgattgctgtagcaattattgcggttttagcagcgatagcttatccctcttatctggagcatgtccgtcataccaaacgtgtggaaatgcaaactactttgcaacagattgctatgcagattcagcgatacaagattgcaaactttaaagtagttggagcaacaagttcagattttaatattgcagcatcctatccagtacaaggtacgcctctttatatagtcaatcttacccctgttacatcaggttctttgactgctgaaacatggatattaactgcgacaccgattgcaaatactccacaatctggagatgggcatattgtcttaaattatcgtggtgaacggtgctggacaaaagggaccgatattaacagtggtagggcttgtgttccttctgtgacctcgaattgggatggcaagtaa

SEQ ID NO: 52676 - DNA, 477 bp, Acinetobacter baumannii
atgaaacgtaaattcacatattctttgggcttcactcttattgaggtaatggttgtggtggtgattgttgctatttttgcggcagttgcaataccttcatatcaagcctatgttttgcgtgcggatgcttcgcgcgcagaacaggaaatccagaaaatttccatacagctcaatcgtcataaatctagaaattttaattataaaggtttttctacaggtgctgctgcgtcagtaattttgcctgttggagcgactggtgatgctgttaaatatcaaataacaatccgagatggtgatgatacttcgaaacctttaacagatcctacagctttagggcaaaactgggtaattcgagcagaggcttccgatccttataattttacttatttatttagtagtaatggattacgttgtaaaaataaagccactagcaatgttacttatataacttgtggcactggagctgagcggtggtaa

SEQ ID NO: 52677 - DNA, 3678 bp, Acinetobacter baumannii
atggataagagagacttaaagttttcatatcatccaaagcttctaacaggtgcgatagctgctttatgtacaggtttagtagcgagtagcataagtcaggccagtgatattgatatttatcaaaaagcaaaggctggcgatattaccttgatgtttgtattagatatttctggttctatgggatatccacagctacaaaataatgccagtgcatgtgatataccaaatgatgttgtacaaacgggttatagtaatacttggtcgaataatggtgtagcagaatataaacgttattattgtactgcagcagcgccaatatattattacatgaaatcaggatcatattggtatagctgtggtaattcgagcttgaaaagcgattgtattaccaaattgaggagccagccttctacaagtgggctagcttcaatatattcaaattataatacttattactataaaactggcccagacgcgcagtatcctgaccgtattactcgtgtaaaagatggcatgattgatttacttaacggtaatactagtaaaggaattttacctatttcggatgataaattgattggccttacaactttttctcgtccaacacaatttaatactgctggtgagccgactgctgcagacaatttaacggggcaggtccgaattccagctcgacgtttagatgcagtcgtaaatggtaaaactcaaagaagaatactaatagaagaaattgcaaaaattggtgccagaggtggtactccgacagctaatgcttatgcagaggcagcggcttctttaatgggtaccactactcaaggactaagtaatagtggttttaactatgctggtacaggtgcaaccagtggagggagctatgtacgccctgatagcattactaaacaaatgacaggaagtactacacagtgtagtggtcaaggtgtttatgttttaactgatggtgatccaaatggaaactcttcagcatcaggattaatgaagaaagctttaagcggtaaaacatttgcttgtacggatagtgatacaggctggaattgtattcaacaattttcacaatttttactaaataatggcagtaaccctgttggattaaaaattaaaacggctgttgttggttttggaagtgattttaatattattccatcttttaataggtcgctttctttagaagagaacttggcaaatattaacaactctactgcatcggcaaatcaaaaagaagctgcgaaatggggtgttaatgcaagtggtggttggtattctggttcaagctctcaagacgttgtaagtagtgtaaatgcatttcttggagatttaggctctgagattccagctgtaactacaggttcacctactattcctaaagatagtcttaaccctgctgtattacaaaaacaggcttatttccctcagttccaaccgactccagataaaaactatcaactttgggcgggtaatctcaaaaaatatgcagtagttaatggtattttaaaagaccgtgataatagtaccttaattagtacagcaactgctacaaagggacaaatacttccaaatcgtgacttttgggcatatatcgataacgacagtacaaatgataattctgattccaatacgcctgggagtaatagctatactctaaaaggaggagcatggtcacagttactcctaacaatgaatcaaacaacacaagagaatcgtaatcttttgacgaatcgaagtgcagacggttcaacgacaacaactctaagacaaattaaaaagtctgatttaacagatacgacttaccaaactgatgggaaacgtggttatttaatggcgttgcttgggtatccaatgactgtgactcaagcaaaggatcctgatcatttagttcttaatgctactccgtccacttctttaagacagattggtgcattaatgcattcctcaccgctattaattaccaatagtggtcaaattacatatacaaatggcgtaattgatacccaaaatcgtgaagactatgtcttatttggcacaacacaggggcttttacatatagtcaaggctggtaaaaatgatagtgcttctgtggatagtaatggcggaaaagaagtattcacctttgtaccaaatgaaatgatcgagaaacaacccggagcatttttgaaaaacgatgccatgaatggaggagtcgatcaattatattatggtattgatggaccttgggctagttatactcagtatgtattagatggtagccgaaaaggactcactgtcggtaaaggctatggttctcaagaaggtaaacagatcgtgtatggcggtttgcgaatgggggggcgtagttattatgcactcaatttgcaagatatgagtaatccaaagttactattccaaatatcccctgatgaacaaaaaatctattataacggttcaagtagtacttatgctgcactcgataatatgggccaaagttggtctaaaccgagtattggttgggtaaattggaagaaaagtgatggtaagactactgaacgtaaacgagtaatgtttgttggcggtggctatgatgaaggctatgagaacgatacctataaccctagcattagccaaggtgcaggtgtgtatatgtttgacgctgataacggtaagctgctttggtgggctagtgccaaagcgactacagctcaaggtgcagaagcttatactcaatccgataatttaaaatatagtgtagtgagcgagattcgtaccgaagaccgaaatggtgatggcttgattgaccatctttattttggtgacctaggtgggcaactattccgtatcgatttagataatactgcaacaacaaatgcaaactttgctaagcctccacaattattattgaatttaaacaatggagctgctagtccgcgtttttatgaaatgcctgcattttcagtatatgactataatggcacaacgtttgctgttgtttctattggtagtggaaatcgtagtaaacctctagctcagtatgcagcaggtcaaggttataaatatgatgcggtatataatatttacgataaagatgtagcagatagaaatttatataaagctgatttcgtatatcaaactccaatcacaaatactaatcaattgggggaaattactaattcaaactggaatacttatgatgatggtgcagtcgctttactttctgctacccgtggatggttctatcagtttaaatccaccaatattcaagatgctaaagtgttttcaacaccaatcgtactgaatcaccgtatgtttgtttctacttttgatggtggaaaagctggtatgtctggagattgtggagctggagtaaaaggcgaaagctttttaaatcagttctgtatgccttttggacaatgtagcaaatctacgttagcggctgaaaatagtagtgttcagtgtgcgcctggtacaaattgttcacaaggggcgggtattcaagatactgctgttgtagatgatggtggtaataataatgatggtggtggcggtggcggcggcggtagtaatggaagtactaataataagaactattgtgtaaatatgggtaaccgtggtgtcaccactatcggcggtattattgcctctagtagtagtaaaatgtgtttaataccacagcgctggtatgtccgttag

SEQ ID NO: 52678 - DNA, 783 bp, Acinetobacter baumannii
atgaaactgaagcaaggtggttcagccttaattgttgtattaattttcttagtcgcaattatgattattggcacaatagcgatccgtaaaggtttaattaatttaaatatagcgactaatagtcaagtgcagcaattaatattgcaaaattcagacgcttctttttttcaaatagagaatcccactaatctgatccagagtttaagtgcaacgggtctattcggttatatcagtaatgcaaatgacaaaaataaggaattagtcttttgttatcgaggagatcaaagcgacttttttaatattggacgtgccagcttaatgcagtggatagacggaaatagtgcacccaccaataatgcattaggtacagatggttattgtgatgcagttgatacaaataataactggtttacaagcggccgtaaggcagtaatgactcaggtcgcagttaaattttcgactgttggggaagatgacccattttatgctcgaactcgcggtctcgatgaaaaaaaagggcaagtccaagaggctaaacgagtcaaagtatttgctgtgtcattgatgccaagcttaagtaatgctaaccgtgctgatatcaataaatgtctacaacagcatatgagtgaagttacgcttccagatgggactacggcgccagatgttactaataaatccgatttggataatccattaaagtcagtagcagagtgtttaaccagcttaaatgttccatttactaccaatattactgaatacacgattgcacaagattttaattaa

SEQ ID NO: 52679 - DNA, 1038 bp, Acinetobacter baumannii
atgaaaaagcatcaaggttttacattaatcgagttaatactttcgttagccttaggtcttataattactgcagctgcaatattattatttttgactagtcaaaaaagtttatctattcaggtcggagtgtctgatttacaagataatgctaattttggacttaactatttatctcaagatattcgtcttgcaaatttaaataaccccaaagcagttattaatgatcaaactgcttatggcggtattgttttaacctctgcgattaattcggctaaagatgctgctaatgaacctcttagtaatctatataaaactattattggggtaactgctaacactaatttactttcacgtagtcagggacatagtgtcggtagtggtaatgcttggacgggagcgtcaaacgtccaaagtaatggaagtgatatcgctagtgaccaactcgttattcaatatgtaccacaatatacaattgatacaaaaagtactgcaactcaagctgatgatgaatatataggcggtacagattgcgaaggaaataatctgaattttcctcttgctagtgggcgtcaagtcataatacaacgttattttttacgtaaagacgctaaaaataatagtgatgaacctaaccaacctttagcacttgcttgtgatgccggctattacccattaactggtaacccaactgctgtaactcgttatggggatgcaggtgaaattataatgaaacgtgtggattattttcgggttttactaaatgttcaagggaattctggacgacgttatatttcaatacatgattatttgaacttgacagctcctcggccacgtattgtttcagtccaaattggcttattaacacgttcattgcaacctgtaggtgcagaaatagcaattaaagatgatcaacaattttctgtattagatcaaacactcacagtaaaaaaaactgaaaattcgacaaaaaaatatgtgcgtcaagtgatatcacaaaccattgccttgcgtaatgtgatcggggagcgtggtgaatga

SEQ ID NO: 52680 - DNA, 501 bp, Acinetobacter baumannii
atgaagaagattgcacaccaacgtggtatgggaatgattgaaattttagttgctttgctgattttagcaattggagttttaggatttattgctttgcaatatagagctttagaggcaagtgcagaaagcacttcacgcgtacaagcaattacgatagcacgtgatatagctgagcggattagagttaaccgtaattcattagctgtgtataaccaacaacttcaagatcctattaaacagaaagactttgtcaaagattgcttccaagacaattgtagtgacacagatttagcagatttcgatgttgcacaagttgtgaaaaatgcgtcttccttgggcatgactatgaatatgtttgcttgcccacaaactaaaaatcgacaatgtgtttatattgcatggggtgatactagtgcaacgaatggcaccagtgcaggggattgcactcaagatactgcatataacgataattcaacgtgtgtgattatggagacctattaa

SEQ ID NO: 52681 - DNA, 450 bp, Acinetobacter baumannii
atgaggggaattattccgcaagaagggttcaccttggtcgagctaatggtgacgattgcggtcatggctattattgcactgatggctgcgccaatgtttggggatctgttaattaatcaaaatttgaatagaagtacagaggagctggtttcaagtataaatcaggcacgtatgaaagctgtggtagaacgtagacaagtaaaagtgcaattaaattctacttatattgcagatactaataatcaaattaattggatgccaagcggaaaagctcaattaaagacgggatctgatacctctataatatttctgatgtccggtttagtaaaagacgcaaccggagatactacatttgaaatttgtaataagactggtggtaataaatcaaaaattattagtgtttcaagaatgggagcaattcaatcgactacggtggggacatgttcatga

SEQ ID NO: 52682 - DNA, 735 bp, Acinetobacter baumannii
atgtctaatcgctttaaattctttctaagccatttatctatttctatggcaatagctttaattattctcatttggtttttttttgtttggtatccctaccccttagcaaaagctgtaggtgttattcatatctttataatgctgatagctatagatgtcatattaggccctactttaagtttttttatatataaagaagcaaaaaaaacgcttaaatttgatttagccgtaattattctcattcaaactttggctttaggatacggtttatatagtattgctcaaggtcggcctgcttggttggtttataatatagatcgttttgaacttgtgcgtaataatgaaattactgacaccaatcttcaaataattcagccacaatttcaggatccttcttggtttaagccacgatttgccgctgttaaagagccaaaaaatacggaggaacgtagcaaaagtatgtttgaggaaatatttagtggtatttcttctgctcaacgaccagagctttatgttgatttggcgcaagttaaaccacttatacggaataaagttcaaaatttgaataaactggaaaaattcaaccctaaacagcaggtagaaaatattttgaaaaaatatccagaagctaatgcatgggttcctttaagagcaaatgctgtagatatggttgttttaatggataaaaattcagctcaagtggtgaaaattgtagacctacgaccatggaaataa

SEQ ID NO: 52683 - DNA, 528 bp, Acinetobacter baumannii
atgaaaattaagcaaattactctttatgttttggcgtgtgctgtgcttgtcggttgtgattcaagaattgatgcagtaaatcaggaaatggccaatattcgtaatcagccgccactccctattgaaccagcaccgatttttactcctgtaccgcaatttaattacgctgctcatcaattaaaaagcccatttatgccaagttctctagctgccgagctcaagattatggcggggaaacgggtttatccgaatttctcacgtgcgccgcaaccactcgaaagttatgctcttgaagctttaaatatgaaagggagcatgcgaaataatcgagggcagatattggccttgatccagacaccggatcagcagattgaacgggtacaagtgggtaactatatgggtatgaatcagggccgtattacccatattagtccaacccagattgatctggttgaaatcgtacctgatggtcgagaaggctatgtcgaaagaccaagaaccttggtcttgattgggcctgcaccctaa

SEQ ID NO: 52684 - DNA, 642 bp, Acinetobacter baumannii
atggcaacaattaatttactgccttggcgcgaagagctgagggagcaacgaaaaaaacaatttataacgttatgttttggggtggttgttttggggattacaaccgtatttgggggatggttttattttgaccataaattagatgatcaagagcaagcgaatcagctcattatgagcacaaatcagaaccttgatcagcaattaaaaacattaaacggcttacaggaacagcgtaatgccattattgaacgcatgaagttgattcaaggtttgcagagtcaacgtccagtagtggtaagacttgttgatgagttagttcgagtcacaccatcagctatgtatttaacgaaatttagccgaaccggagataagtttacgattgaaggtaaagctgagagtccaaatacagtagccgaactactccgtaatcttgaagcatctccttggtatcgtaatgcttttatgaactctttcttggctaatgaagagaaaaaagataaggctgcaagttctcttcttcctagggtggaagaccactatggtagttttgttgtgactgtcgatttgggggaaatgggcgtgaccacaacggatgattctgctaagccatctacaggtgaaagtgtgggggccgctaaatga

SEQ ID NO: 52685 - DNA, 858 bp, Acinetobacter baumannii
atgaatttagcaaatccccaaaccactcatgctgcaattgctgttccgacatcgacggttattcataaaactatcgaaatggatgcagatatgagcgatgacgaacgcgaagttcagattcgtgtagatgcggagcagtatataccgttccctttagatgaggtgagccttgattttgaggttttgcccgatcgtcttgcgaatccaaatcgtgtaaatgtactcttggtcgccacaagaacagaaaacgttgaaacacgcgttgaagtgcttgaattggcagatttaaatcctaaattggctgatgtcgaaagttacgcggttgagcgcgcttttagcgtgtttgctgatagcttaccgatgggtgcaaataccatagggattttagatatcggccataccatgacgacattatctgtcatgcaaaatggcaagattatttatacacgagagcaggtctttggtggcaagcaacttacgcttgaaattcaaagtcgttatggcttgtctttagaagaagcaagccgagcgaaaaaagatcgctctttaccagatgattatgaaattgaagtgctagacccatttctagatgcggtagttcagcaggcggcccgttcactacaatttttcttttcttcatcccaatttaacgaaatagaccatattttgctcgctggtggaaatgcgaatattccaggccttgccaagcttttgcagcaaaaattaggttaccgtgtcacgattgccaacccgtttttacaaatgggcttttctcctcaagtcgacgttcaaaaaattgaaaatgatgcttcatctttaatggtggcatgtggcttggctttaaggagttttgattaa

SEQ ID NO: 52686 - DNA, 960 bp, Acinetobacter baumannii
atgagtacgcaacatgtttcttttcagcaagcttcgccaaacgagcaggctgttattctgattgtggatgatgtgccggaaaatttaggcttgttacatgaaagtctggatcaggcaggttatcgcgtgcttgtcacaaccgatgggttaagtgcaattgaaattgcacaccgatgcttaccagatatgattttacttgatggcaatatgccacatatggacggttttgaaagttgtatacagcttaaagcgagtccaattacgcagtttattcccgttatttttatgacaggtttgtctgagacagagcatattgtgcgtggttttcaggtcggtggggtggactatgtaaccaagcccttgaatattgaagaagtattagcaagggtaaaaacacatttggcacatgccaaactattgcagcaacagaaacaggtgattgatgcaacggaaacagccattcttgcgctagatgttcacggtaaaattgtttggaaaactcaaaaagctagtgatctactaaatcaatatttacctgaattagaagtttttgaagcaggcttaaaagcttggttttcagacttagagcaagaaaaagactccaaaaaattaaccagctgttcttattcaacaccatctcagcaattacagcttttattgcttacgccgtggcaatctgaaacaagcgtagcaaaaaattatcttatccagattaagacctctacacctgccttggaaatggctgatattttgaaatattgcccgcagttgactcaacgtgaggcagaagtcatgcactggttgttgttagggaaaaccaataaggatattgcagaaattttggagctgagtccacggacggtaaacaagcatttagagcatgtttttgaaaaactttgtgttgaaaaccgaactgctgcggtggcgcatattaatagcttggtgcaagagtttcactaa

SEQ ID NO: 52687 - DNA, 156 bp, Acinetobacter baumannii
atgaaacatttaagtaacgttcagcagccacctaaagttgagaataaggctaataaaccaaagcctccaaagggctggaagtggattaaagttattctattggttttgcggtttattctaaaacgcatccttcaagatgatgatttaggaaactaa

SEQ ID NO: 52688 - DNA, 294 bp, Acinetobacter baumannii
atgcttaatgatgcactacttgctataaggaagtatcatcgcatatctcaaacagaattatctcaatctcttggtatttctaattcttacttatcagaaattgaaagtggaaagaaaaagccgactctagagttactagataaatattctgaatattttgatatccctgtttcttccttaatgttcttttctgaaaatatggataagcatgacactttatcaggaaaatttcgttattttgctggtagtaaagtaatcaaactcatgaactggttaagtgaaaatggaaagtag

SEQ ID NO: 52689 - DNA, 903 bp, Acinetobacter baumannii
atggaaagtagcccaccttgtgattatgcaaaatatgtatacgaattggagttgttaagctctccgttatttcatattacaagtaagaagcgattggctattctgttatattcatctgttaaagaactgaacaatattgttcgttcgaaagatcagatgtatcaatattttaatgaaacccagactgataatagtggaaacattattaaagttcgacctattcaaaatccccacgatagattgaagcaaatccatagtagaattggaaaatttttgggtaatttaaaagcccctgaatatttgcattcaaaacgttctaaatctgcaatttcaaatgcaaaagcacatgtgggtattaaaggacatactctaaatattgatattactgatttctatccttcaacttctagagccaaagttcaagctttttttgggtatactcttcaatacccgactgatatcgctaaatatttgtctgaaatctgcacagtaaacaattgtcttccaactggtagcccattaagttcagcattagctttttgggctaacaaatctatgtttgatgaaatttatagagtagctaaaagtcgttctataactatgactgtttatgtggatgatatttcatttacaggaagggctgttaatcaaaattttctaaagaaaattattcaagtaatagagaaataccagcataagattaagcaagaaaagataaaactctttcctgaatatagtgttaaatttgtcactggtgtagcaatactaaatggccgtttgcaaccagctcatagacattatagggacatcagggttcttcagaaaatcgataatgaccttcaagcaaccctgcgtttaatgggtaaaaataattatataaaacagattactaatcaggtttaa

SEQ ID NO: 52690 - DNA, 984 bp, Acinetobacter baumannii
atgtttaattttcttgtagttaagattttagaatctaatagttttactttaccaaataccttaatttatggtgatgtagaattgaggtcagcttcgagtgattccaaaaaggagatcgctgtattaaaagaatctgctgacaatcatcagttaaattttgataaatatacttacacggcaaggatttgtacaattgtttactgtgataaatttgtagatgcattaagtattgcctctagtcgattctcgacaattttagatttgaatgcaactaaatttcatatttctaacattgaagtttcagatataggatttgttaagaacttagattcgggtgagctacttcctattaaacgtgagagatttaatccctcaacctcttatgttgtttctcatggaaatattcaacagatagacgatataactcatattcttagtttagactgtgatttgagtcaacgttatctaagagctttacactgggctagacatggaaggcatgaaaataatagtcagttaaaaatattgtttaattggtttacattagaagcgctattaaaggagggtgaaaaagataatatttcttctaatatttgttttttaatgggattccccaataataaaaaaatactggaagtaaatcaaacacttataaaaatcatatctaatcactctagatatgatttttggaagaaaaaacttattgaagatttagatagtattcgagtttttcgaaatgattctgctcattcaggatttaggattgttgatttttcaaaacagaaattagcactatatagccaaattatgatttttggaacttctagaagtttaagtgctgttcgattcgctttactaaataatattaggactttaccagaatttaaggaatatatgccttatatctttgagcaaatagctaccaccaatgatatacatggcaatatcatctattcattagaacaagctttactagttgaataa

SEQ ID NO: 52691 - DNA, 552 bp, Acinetobacter baumannii
ttggaatcatgtttagatgatattttttacaaatattcagtcaccaagctgagtagtaaaaattatgcaaaaaatttaacaaaattaattaatttcttagtagttaaaggacgttttctcgaagctagattttatttagatcaattagaaaaaacacataatggaaatataatttctatccgtctaggctataagttagcaatagctctttttgataataaaaaagtagttaagtacgatagcttattattagaaagaaaaaactattttgagctagaatggtatagattacagtattactattccgtcaataatatccctgaaattataaaaagcactgagtatttattatccaaaaaaaaattggaacaagaatatatacaaaccattttggaggctgtttggaatatacgtgattatagactcgcattaatagttcataaatatatcattaaaaataggatgcgccttgctcctcaaatggagaaggtaattagagatattgttctagaaaaattaagagactctttggcgaaatataaaaatgtttaa

SEQ ID NO: 52692 - DNA, 1482 bp, Acinetobacter baumannii
atgtcagcattacatacatctccaaaatttacggggttttttcgacgtttagtcgaagaaaagcatgtgtcggcagcgaccatgcaaactgcattagatgcagcgaaaagagctaagcaggacacagtcgcatatttaattgaagaggttcatctctccccttcgttattggctgaaacaatttctgctgagtttgctgaaccatatttcgatctggatgtttatgacacttctcagattcctaaagatctggtcgatcagaaactgattttaaaacatcgaattttgccgctcattcaaagagggcaaattttatatgtcgcgaccagtaatccaagcaatatcgaagcgattgatgcaatccgttttaatagtaaattgctggttgagcctgtaattgtggagcaccataaactcgaaaaagttttaggccagcattttgcagaagaaagcagctttgacttcaatgatgaagagtttgatctcgatgttaatcttgatggtcctaccgctcaagacgatgaagaagaagctccacaaggcgatgaagccccgattgttaagtatattaataagttattaattgatgctattcgtatgggtgcttcagacttacattttgaaccgtacgaaaaatcctatcgggtgcgctatcgtgtcgatggtgtgttacgtcaaattgccaatccccctctacagcttgcaaaccgcttggcatcacgcttaaaagtaatgtctcaaatggacatttctgaaaaacgtgtcccacaagatggtcgtatcaagctcaagctgtcaaaaaccaaagcgattgattttcgtgtgaactccctcccgactttgtttggtgaaaagttagttctacgtattcttgacccatcaagcgcaatgctaggaattgatgcactaggatatgaagaagatcaaaaagctttgttcatggaggcattagataaacctcaaggcatgcttttaattaccggaccaacaggttctggtaaaaccgtatccttatatacaggtttaaatattttaaatactgaaagctccaatatttctactgccgaagacccggtagaaattaaccttgaaggaattaatcaagttaacgtaaaccccaaggtagggcttacttttgcggccgcacttaaatcatttttacgacaagaccctgacattattatggtgggtgagattcgtgacttggaaacagcagaaattgcaattaaggcggctcaaaccggccacatggtgatgtcaacactacataccaatagtgctccggaaacattgacccgtctacgcaatatgggagttccttcttttaatattgcaacatcagtaaacctagttattgcacagcgtttagcacgtcgtctttgttctcaatgcaaaatacctgctgatattcctaaacaaagcttattagaaatgggctttaccgaacaagatttagcgcacccagattttcgggttttttag

SEQ ID NO: 52693 - DNA, 1641 bp, Acinetobacter baumannii
atgacaaaacagatctggttagatgaatataagcaatggaatatagaaagtacgattacattgccggatgaacaaacttcacttctcgatttatgggacaacagttttaataagttccagcaaagaaaggcttttatatttgcagatcaatctttttcttatgctgaaatcgatttatatagtcgacaaatagcaacattcttgcaaagtttagggctagaaaaaggtacacgtgttgccgtgatgatgcccaatattattcagtacccaattatttcacttgccgtcattcgtgcaggttacattctggtcaatattaaccccctctatacagcacgtgagttaaagcatcaattaaatgatgccggcgcaaaagtcttatttatattagaacagtttttacctgtttatgaggcagttaaagagcacgtgtcgattgagcagattattaccaccaccatgactgaaatgttggtcgagcaacctactgaattagacaccttagattctaaaaaatacgcttttaagcaaatcttattgaagacaaatgcccaagactatatacgtcctaagcttattcttgaggacactgcgcttttgcaatatacgggcggaacaacaggtgtctccaagggtgccgaattaacccataaaaatattgttgccaacttattacaaaataatgtggtttttaaaagctactttggtgaccgagatgcttttgaagatgaagtagcgatctgtgccttaccgctttatcatattttcggttttactgtctgtttattgcacagcgcaatgaataaaggttatgccactgttttagttccaaacccgcgtgatttagatgctctcgtgcattgttttgaaaaatatcgtcctacggtttttcctgctgtaaatactttatttaatgcgctgcttcatcatgaaggctttaataaattggaccatagccgtttagaaattaccacaggcggcggtatggcaattttgaaatccactgccgatggatgggaaaaactgacaggacgtattatccgtgaagggtatggcttatcagaaacttcgcctgttgcgacctttaacccgccaatctctaatacttttagtggcacgatcggtattcctgtaccgagcacggatattgctattttggatgatgaaggtcaccaattagcgcccggtgaaattggagaaattgcaattcgtggcccgcaggtcatgaaaggttattggaatttacctgaagaaacgaaagcagtcatgactgctgatggtttctttagaacgggtgacattggctttatgaatgaaaaaggctacaccaaaattattgaccgtaaaaaagatatgattttagtgtcaggttttaatgtttttccaaacgaaattgaagaagttttagcccaacatccaaaaattttggaagtcgccgtggttggcattgcagatgaaaaatcgggtgaggtgccgaaagcctttattgtcaaaaaggatgactctttatcggttgaagaaatccagacctatgccaaagaaaacctgacaggatataaacaaccacgctatattcaatttattaatgaattacccaagtcaaatgtgggtaaaattttaagaaaagaactcaaggtttaa

SEQ ID NO: 52694 - DNA, 549 bp, Acinetobacter baumannii
atggctgcagcaacacaaaacactgacgaaactttagcttcaactgacgaacaagcgactaataaaccaaaaaacacacgtaataaaaccaataaatctacagaaacacagaatacccaagctggtgatgaaaaagcttcagaccaaggtgatttgttaaatagccaaggtcctgaagacggcgcttcccaagatgaaggtaagaaacctactaatttgaaaaatggcgattcagataatgaagattccagtactaaagataatggaaattcaactgaatcatcaaataaggcacaacaaactgatattcccatggccgaacatcaaattgtggaaaatctttctggttctaccattagtaatgtagatcctctagttattaatgtgactaataacggattttcaactgttttagaaccgttatcacgtgttgctattgaggcaggtaaaacagcaagtattacgtgtcataaccaaacatttaaacatcaagtactggaaaacttacgtcagttgaaggggcttggtaagaatctaactgttgagtaa

SEQ ID NO: 52695 - DNA, 1002 bp, Acinetobacter baumannii
atgaaaatactaaataaagttgaagctaaacttgcttgggccaacggtgaattacttttagtaaataatactgagcgtaatggctgggaaccatttaacccttatgactttggctttgatgtttttgataaattcgaatttcaattaaagcctagaactatttttattggcgagtttgaggtaccagaaccattaagagaagcgcctgctaaaggttctacttgctcttacccaagtccaactgttgaattaggtgtgcagcagtttaagtggaatggttcaaaaggacaattacgcatgcttcagcatggccaagtccactcaagttttgataatgcttttgctcattgctgcgcgattattaaagtcagtggtggtgagtttgctgaagatatgctcaaacttctgaacaagccaactgatgaagttgaagaagaaaagcctttagaaaatgaagttgagaaatcacctcaggttaatactgaaaaaacagtaattgaagagactactaaagatttaaaagaggatctcgatagtgcaattgttgttactgaggggccttacgtttcatcatccgaggatctattagttccagaaactaacgagcctaaagtagatccagaatatcagcaaaccctagatactcttctacagcgtgtaaaagagtcaaaaacacctgcagaagtaaatgcggtttatcgttatacccgcacatgggatgacgaacaaatgaaacctatccttctcgccactcacaaacgtcttgaagagctagaaaaagaaaaggcatctgcgaatgagccaccctctttaatggttcagatccagaacgcaccagatctcacaacattggatgcgctggaaatagatgtggctgcacgagatccgcagattcaaccgaagctaatggggtatgtgagaaaacgccgctatgaattagagaatcctacacctacccaacctgaagctgatcctgattatctattggtggacggttactag

SEQ ID NO: 52696 - DNA, 408 bp, Acinetobacter baumannii
atgattgatctaaataaaaaaagagaagcttttgaaagatttcatgccaaagaatgtaattgcagttatgaaagtttaaaacgtcaactagatagacaagaggcactaacaggacacagatatttaccaactagtcctcgtcatgaagcttggttgatttgggatgccgcatggaatgacgccagtgctcaggtgttgccaacttggattagcgtgactgatgaattgccacctactgacataatggtacttatttgttgggcagatgctcctgatgtcaccccagaacaagactatatgactattgatgaggatttaaatagcgtatgggcaaactatcaaaatgatccaccttcacattggatgcattttcatagtgtgccaaacgtatcgggagctgaacaatga

SEQ ID NO: 52697 - DNA, 210 bp, Acinetobacter baumannii
atgagcataacacttagcggtcatcaactaaaaagccttctcgaatttgtaaatccagatggtgagaaagatttagatcaacttgatactgaactaacaattaaattctttgaagatggccacagtggaaaaggctattacttttggatgaccgaatatccagaagaaggcagcatgttgttggatgttgaatcgggagctgagggatga

SEQ ID NO: 52698 - DNA, 216 bp, Acinetobacter baumannii
atgagtgaaaaatacagttttctattattggttatggctatttttggaattgcattagtacgaactggtaaatataccgatagttttgtatatgcagtttcaatagcttatctggtgctttttgttctgactcacttcaagccgatcgttatcaataacaatgatttttcaggctcaaaagtgagtttggaagtagataaagaaagcggaaagtaa

SEQ ID NO: 52699 - DNA, 789 bp, Acinetobacter baumannii
atgaatgcaatttctaattttacttttcataatgattataatgttcgcgttcagttaattgatgctgagccgtggttttgtcttgctgatgtctgctgtgttttatcagttgatcgtacttctcgtttattacgtgatttggatgaaaaggggttggcagattgccacacccctacaaatggtggaaatcaaaagattaaatttgttaatgagccaaatctttatcggatcatctttcgttcaaataaaccagaagcaaaacaattccaagattgggtatttaacgaagttttgccaaccatccgcaaaacaggcaaatacgaagcaccaaaaccaatcgaaaaacgcaattatatcaacaacaatgacatgttaaacatcaagcgtctgatttggtgctgtgcaggtcacttagatcagaagcaatcagtcagcagcgcaatttggtactcgcttcgcaatgtgactggcgtaccgagccctgctaagtttgaggttgaacatttgccattgctggcacaagaatttaatcgcattctaagcatcattgagccatacctaaaagcacgttacgcatgtgaggaagcattagttaagcgcttacttcgagatcgtgaagacgctcaatctttactggctaagttgcttgatgaaatgaaggcggctacacaggattttgaaaaaggattacagaaacatttgccaatggtttttcaaggcgaatgtttaaatcttgttgagcgtaaaccatgtggtattgatcatcacgaatttaatcgttgggcttaa

SEQ ID NO: 52700 - DNA, 678 bp, Acinetobacter baumannii
atgattatgacaattaaaccatgtaaacaatgcggagcacctgtaagtgacaaagccgatgcttgtccaatgtgtggtgctaaagttaagaaaatggggatattcttaaaaataatcctctggtttttcggtattatgattttttttgcagttgtagggaaaatcgctggcccaagcaagcctgaaaaagtagcaagttcacaagaaactacccaagatgcaagtgtaacatctgaaccaacaaagaaagaaaattggattaatcatgtttcaaaagacgagatgaggggaactgaaacacgtgtcactagaacaataagtactaatgaagcagattttgaatttccatataatggtggttcaaatcttgtattgactgtccgtaaaggaaatggtggaaccgatttaattttaaatataacgaaaggccaattcatttgctctagtttcgatggatgtaaggtcaattttaaatttgatagtggaaagatccagacagttacaatggttggtagcgatactcatgatacagacatcttatttgtggaaagcgaaaaaacaaccaagatgttgattcaaaaattgaaagcatcaaagaaacttattattgaaccaagcttctttcaggaaggaacgaagcaatttacatttgatatagaggggttccaagagccatag

SEQ ID NO: 52701 - DNA, 144 bp, Acinetobacter baumannii
atgcaggcttttttaattaaattttttagcatagccccgtggaatattaattattgttttggctataaaaataaaacctgcctaggtttactaattacacagcaacttttgtatttagaatatttagcatggtttgcattttag

SEQ ID NO: 52702 - DNA, 1086 bp, Acinetobacter baumannii
atgaaatttaactcaaaaagaataagtggttttttaatttttacatctactattattttagctgcttgcggtggtgaaggctcagatcagaatacccatgatcaagccgaaaataatttagaaaaagaagacaaaatttaccaagtctattatcaaccttctgatatttcttcaagtatttacagtgattcttttgaaattaatcaatattcaattaagaataatgaaatcttttttgcaaagtcacataaccaaccgctagaaactgaacttttaactgaacagaaagttttaaataaagggaccttacaaacacatactgtgaaaaggttaacaccgagcagttggacgtatgaattaatgcctgatttgaaagaaaatttaaaatttgaaattgtgaatttagagggtgaaaatatctttgatcgtgtattaccgggctataaagaaaataaaaatttagaaacgggccttcacaatcaacttgataaaaatttactagacttctaccaaaattataagaatgttaggtttccaaaaaatagttactgttatcgtttaaaagaaactcaatggaatcaatcttatatttcttatatatctagttttaattcaaatccttcgtttagtgagaaaaagcagtcaattgtcgaaagatataataacttaggccaagataaaaagtattttaggcttctaaattcgcagtggtatggttataacttaactgttttagaaaacttagaaactggtgatattcaaagcgcattgggaaataataataaccagtctgctttttttattaattttatatcaagtagtcggtgggatgctgatagaaatttagcgtatgaaaagtctcatctgtattctatagaagataacccgcttaataatgtgcattcattaattgctttcagacaaaagctaaaaatcgcaaatcttgaaaaaggttgctttgcttttaatactcaagcagctcaagctattcaaagattaaatctagttaactggcaacaaggagatagctcagatattggcccattctttggtcgaagaaattttgtctatgatatgagtgaatga

SEQ ID NO: 52703 - DNA, 1308 bp, Acinetobacter baumannii
atggcaagagtagttaagcccttaacagttactcagatagagtctacccaaccaaaagacaatgattactctatatgtgatggtgatggtctttatttacgtgtgagaagatctggtactaaaacttggatttttcaatacaagaataaagacaacagtcgagtcattatcactattggtaactaccctgaatgtaagttggcttatgcgagagaaaagaaaagggaatatcaaactttaattgcagaaggaatcaatctaaaagagtatttgaatgagttaagcacacaagtatcaaaagagtattgtttagaatcaattactagagcatggctagatcaatatgcaataaagaagccattggatgatgaaactaagagaaagagaataagaaaatttgaaaaccatctatttcctcaaatcggtcatttacaaattaaggatatacgtcctaaagatttgcgtttagctcttaataaaatctatgaaaagagcgctgataatgcacaacgtattagagctgatttgattcttatttttagttatgcggtccaatatggatatatagaagtaaatcatgcaagagaaatggaagcattagatttaagcggtaaatctaatcataggccagctttacctcttgagaaacttcctgagcttatccagcgtattaagtcagatacaggctatgaaatcactaagctgtgcatgctgctaagtttacatatttttattcgttcatcagagcttagatttgctagatggagtgagattaatttaaaccagaaacaatggattcttccaagcaaacgaactcaaatttctggaaacaagcactctcaaagaggatcaaagatgaaaactcctcatatgattcctctatctgactatgttgttgggcttcttaagaaagtaaaggtgttaggtggcaattcagagttcgtattccctagttcttatgatggaagtagttttatttgtgagaatactttcaatacagcattgagacgaatgggatatgacacgcgccaagatgtatgttttcatgggtttagagcgatggcacgttcagcattaggtgagtgtgggttatttcaaagagatgccatagagaagcaaatgagccatcaggagcgtaataatgtagtaggtgcatatacccatgtggctgagtatatgcaggagcgtagaaaaatgatggaatggtggagccagtatttaagtgaaattgaaaccaagggctatgtatcaccttacgcttatgcaaatgcagataatctaattcaattcaaccgaaaagctgtttaa

SEQ ID NO: 52704 - DNA, 258 bp, Acinetobacter baumannii
atgaataacgttgttaacgaggcaataatacgaagtgcgattgcggactctcttgagattatggcagagaatgcaccacggcgctccaaatgcatcaaatctacatttaatgtaagtcctgaggattaccatcttttagagttgatatgtagacttacaggaaaaactaaacaagagatttatactgatgctctaagacaattacttagacaaagaaactatttagatgacattcctataaatcaaaatgtagtatga

SEQ ID NO: 52705 - DNA, 798 bp, Acinetobacter baumannii
atgctaactaatgagcaaattgaagaagtattagtaaatcagggctttactttatccttacctaacaaacctaaaaaatataaagtacttccattcagagccattcattttaattatcctatctatataaaaagtagtaatagactccctctcgtgattcatagtgatttccttaacctcagtaatactctaatgtcattagaaggtgttaaaagtaatcaccctcaaatgacatacttcaactcaaatatgaaagggttcgatacaatactaaataaagggaaaaagcccgaacgctatggacttcactttggatttgaaacagaagaatctctaaaagtttttcttaatactttaaatagtgacaataaagccaactcgacagaaacatttccttataatagcgacaaagaaacagatggtttgggctttgtcacaactcgcataggccatcaagcactaaaggaagcattacataaatactggaatggttgctcggtaacgggttatcaaaatcgagcgctcttaattgcctcacatatagtcccttggtctgaaaataagaactcacgattagattcattcaatggtttactcttgacaccaaatttagatgcattgtttgataaaggcttaattagttttaatgagcatggagaaattctgatctcaagagaactagatcccagaatagattatgaagtacttggtttaaaccattctctaaaattgagaaagatcgaacatcgacaccttccatacttaaaatggcataatgaaaataagtttaaaacttga

SEQ ID NO: 52706 - DNA, 774 bp, Acinetobacter baumannii
atgacctatttagatctaaggaattttgctaaaaaacttgtgaaaaaggctgatgaatggaagatcccttgtcagatatacaagtactctttagagatagggaatttcgaagaaacaaaaacaattgatagctttgatatgagaactaagtacatagttctatttgctggttcagcttttgatgaaatgcaaatagttatcgatgctttttcacctttaggaaaattaactctagataaggggaaagactcattacaaaaaggagaaatttatggtcgagatgtattacagagcgtacaagaattaaggttatataaagagataggtcagtcttctgggcaatatacaaaagatcaaatcttagaagaaggtaaacgttggctaaaggcacaagagctaatttatagcaaagctaatccaaagattactgataatgagttagtagcactcatgaaggaaataaagaagaattttaaagatgtgatttcttatttagaacactcaagtaagccatggccaacagtgcgcattacccgactaagtggtgtatctcacaaaatgcaagcaattcctaatacaggtacgaaaagggtgagctatagaaacttggttattgtttttagctctgataacaaattccctaaattaactttacctaaaccctcaacaaatagaaaggctcgaagtaatagcatttcagaacaatacaggactgatccatcttcttttcaattctatagaaaatttggaatatttgaaatttacgataagtaa

SEQ ID NO: 52707 - DNA, 1146 bp, Acinetobacter baumannii
atgagttgggaagataaaaagctttcagaaatgggagtgaattttcagtcagggttcgcattcaaaagtgtagattttaaaaagtcaggaatacctgtaattaaaatcgggaatatccaaaacaaattagtcagcattgatacgaatggtaattacataggactagataccttaacagacaaaataaaagactatttattaaataatgatgacgtactcatagcaatgactgggcaagggagtgtaggacgtgtaggtagacttaagttaaaacttggagagaaagctttacttaatcaacgagtagggcgatttatatgcaatgaagtaactgtacatttgccttacatttattatgttctgacatctgatttatatcaggaatacttatttaatacaggtgtgggaagtggacagcccaatttaagtccccaactaatattagaaacggaaataccatgtccttcttatgagcaacaaaaagctatagcctctgtcctttcatcacttgatgacaagattgacctactccatcgccagaacaaaactttagaagccatggctgaagcgctgtttcatcagtggtttattgaggaggcgaaagaggattgggaaataggaactttagaggatctaattgatttaaaatatggtaaagcattgaagcaagagaatcgttccggttcgggttaccctgttgttgcctctagtggagttgttggatttcataataaatatctggttgaaggacccggtattgtgataggtcgaaaaggaactcttggtaaagtttactttttggaagatagtttttttccaattgatacaagttattttatcaaaacgaaaattcctgaaagtaatttgatttttgaatactacttactcaaaacattggattttgctaacatgaatagtgattctgctgttcctggtttgaataggaatctcgctttaggcactacgattcaaattccgcctttaaaaagaatagttgagtttaatacattagctaaaccatggtttagtaaaatttatacgaatacaaagcaaatccaaacacttgaaaaactaagagataccttacttcctaagctaatgagcggtgaagttagggtagaatatgaaagagtggatgctgcataa

SEQ ID NO: 52708 - DNA, 540 bp, Acinetobacter baumannii
atgaataaaaaaattttaggggtaatctttggattaatcattttaattcttggatacttatatgcttccccttatcttgcgattaataatattaagaatgctgcacaagcaggagatagcgaaaaggtatcaaagtatattgactatccaagtgttcgtcagagttttaaagatcaaatgaatgcctatatgtttaaagagatggcatctaaagaaacaaatggttgggaagctctcggcgcaatgatggcgtcaacaatggttgataaaatgattgatgctatgatcacgcctgaggggatgacattgatgcttcagggcaaagatctaaaaggtaccttgtcaaatggttcagatgatcctcaagtatcggaagcgaaagaagagccaaaaccagattactcttcacgctatacatcaatgaatgattttgaggtcgtaatcaaagatcaggataaagctaaagaagttaaagtaatgatggttcgtgatggtttaagttggaaagtcaataagatcgtcgtaccacttgaaaaatga

SEQ ID NO: 52709 - DNA, 603 bp, Acinetobacter baumannii
gtggcaaacatactgattaggacctgttggaatacaaaccattaccaagctcccgcaggtgtaggacatcttgcagagacccaaatcaactatgtcagcaacgaaggatatggtgtagaggaatggaactttaataaagatgaactagtcgatggttttctatatggctacatccgtccagatttcaaatctttagttgggaaaactcataacatctatttttatacaaaagacccatctggaaacttatttataattggccattacaccgatgcttattttcaaacagattccgaacgccgtgaattaaagaaagttatgaaagaacaaggattactacaaaaaagaattaaacaagtgtacgagatcttaaaatctattccagagtttcaaaactgctcactagaagatgtaaaaaatgaattcaaaggaataagtaactttaaacttaaagtcaaacctaaaaatgcagttctatataaatcaatgaagccattttctgaggctctgtggcataaactctctcctgaaaaaaagctatgtaaacgctaccatggctataactttattcctaacttaagtgcttttgagcaagccatctaa

SEQ ID NO: 52710 - DNA, 669 bp, Acinetobacter baumannii
atgagctgcacctttcaactgtccaaagcccctgaacatttacttcaagccttacatgaagtcattcctcattgtgaattaatggcacaacagttgccagaaaatccaatttctttatggttgattccacctgtttttccaactgatcgattggatgacgaagttattcgccgtatctggaatgacacgccgtattggattttctgttgggcatcaggcttggcgatggctcagtggatacttgcagagccgcaccatgttaaagataaagtggtattagatttcggagcaggttctggtgtagtggcaattgctgcaaaaatggcaggagcaaaacgcgtaatctgctgtgatattgatcaggtcagtttaaatgcttgccgtgaaaatgctttacttaatgatgtagaactcgaatatttggatgatttatataaggctgaacaagtcgatgttttacttgctgccgatgtgttatatgaccaatgtaatcgctttttcttagacgaatttttaaaatttgcacctgaagtatgggtagcagatagccgtgttaaaaattttagtcatccaaaatatgaaaaaattgaagaaagaagtgcaacaacttggccagatctggatgaagcgaaagaatttagaaatgtaagtttttataagacgctgtaa

SEQ ID NO: 52711 - DNA, 801 bp, Acinetobacter baumannii
atgataataaagggacctcccactagttcagaagaatatcaaattatctttcagtggcttgaagagcggttttattattctattggggcgatggcttttcttaatcaaacacaaactaccaatgccgagtggcaactcttacgtttgtatgactcacaaaacgccaagcaactgctaggagtcgcagttattcttgctgggggcacctgcttctgggttccatcagaggcatcatctggatcattactgtgtacatcaattttacagcttcaaccgcgtcggatcgtaacgaccgcaattgggcgggacttattacatgccgagataaaacaaaaaggacgcattttaagagaatatgatcaatggatcatggtttgctcacgccaattttctgaagctcaaggtcgcttggctgaactcttggacattgcccgccttaacgaatatcaacatctatacaataaagagcgctcagtgaatgaagcacctgattgggcatcactaattcagcaacaaaaaattattgtgcttgaagcagacgaccaaatcgtttcgattgtgcgtttaggcatagaaaccaatcgcctcgtttctattggtggcacatatactttccctgcttatcgtcgaaaaggttttgccgaacgcgtcttaaaatttgcggttaatcggattgtggcaactggacggattgctcacttaattgtcgacgttgataacactccagcggttaccctttaccgccaaatgggcttcgaatgtgtagagtcgtcttacattgcttacccagagtatttataa

SEQ ID NO: 52712 - DNA, 549 bp, Acinetobacter baumannii
atgccaaatttagaagcatcatttagagcattacgcgtactccacgcggcaaaagatttatttaatcaacatgggttttacatcgggatcgatcgaattattgaggaagccaaaattcccaaagccactttttataactactttcactccaaagaaaggcttattcagatgagcttaacttttcaaatagatgcattaaaacatgaggtattttcaattattcactcctatcgtgaactcatggcattcgataaactcaagaaaatttacttcttacatgcgaacttagatggcttttatcggttgccatttaaagccatttttgaaattgaaaagatctatccagcagcttataaactcgttattgactatcgaaactggttcattaaagaaattcttaaattgcttttaactgtaaaagtgactgctacagttgaagacgcacacatgtttttatttgtgattgatggcgcgatggttcagcttttggggactaataacaccgatgaaagggatgcattacttgagtactttttaagtcgggtttga

SEQ ID NO: 52713 - DNA, 324 bp, Acinetobacter baumannii
atgtcaggtggaggcggaaattttggatcaggtagctttagaccttcaacagaccaagaaataacttgtgaaaatttgaatatagctctaagtattattaggcctgattttagcgtattcgatacgcaagagttaaatggtattcgactaacaatgtatactgaagatggagcagtagtctttgaatataaagacaattttgttggttatggagctgattccttaattggtaagttagtagaatgtttagaacaaggttataactacactgctgtaattagtagttttgaatgggattcatttatacgagttaaagtacaatga

SEQ ID NO: 52714 - DNA, 1200 bp, Acinetobacter baumannii
atgaaaaataatattaccgtagtaggaggactttatagagaaatttcaccaaaatcggatttttttttaggttcagggggaagagctgctttatttttagcggagcagaatatagatgtcaaatttataacatgtgcaaccacactagcttgtaaatcatttcaagctagtaaaagaggatttatctctagtaatagccagattgaaattatcaatcaagaaactgaatcagatatttcttttgaatacagttcttatttatttgatccattaattattggttatgaaggtttttatgaaagagaagttaatttagataactgtctttattttggtatgttaaatgcaaatataaagattaaggctactaataaagttgtttatgacccgcaaaatacttcacagccaaagaaatttaatgagacaggttctgatgctggagaactagctattgttttaaatgaacatgaagctaaagcaatggtagggagcttagaaacttcagatttaataagaaaagtaaaagaagttaatggtgcagatattgttgttctaaaaaggggaccttatggagctcaagtattagtaaatgatgaaatttcagatgttcctcttttcttatctaataagtttaataagattggctcaggtgatatcttctcagcttgttttgcatttagctggataatagaaaacttagatccaatagaagcagctttaaaagcttcaaaagcagtatcagtatatgtagaaacccagaaatatgaaaacctttcgattattttagaccgaacttttattgagttggatcaacagaatattgcaagaaagatttatttagctggaccatttttctcaatttctgagttatggttagttgagaagataaaggcgatttttgaattatataatattgaagttttttcaccttatcatgcagttggtgtatctaataattcttatcaaattgctcaagctgatcttcaaggtttagaaaacgcagacactatttttgctatttcaaataatttcgaccctggtactatttttgaaattggctatgctcgcgcactaaagaaaaatgtatttatgtatttgaattatgcagcaaaaaaagacttaactatgtttgaaggaacaggatgtgtgatttcagatgatatagattttttaatatatagggcgatatggaataaatga

SEQ ID NO: 52715 - DNA, 597 bp, Acinetobacter baumannii
atgaaaaagtgccttttactatctggtggtattgattctttttgtctggcttttcttcagaggccagacattgcaataactattgattatggtcaatcagctgctgaagcggaaattagatcttctgaatttgtatgtaagaagcttggaatcatccatgaaattatcaaggttgattgtagccacctaggaatgggagatcttagtaataacccaatgagtaaatacaatgagttctcagattggtggccttatagaaatcaactcttgattacattgtgtgctatgaaagcaatacaattaaatattaatgagattatgatcgcctcagtggcaaatgattcatctcacattgatggttcacaaagatttataaactgtattgataatctaatatctctccaagaaggtaatttaaggattactgctcctgtgaatcatttaactacagcagagcttatcaaagcatctaaagtgaatttaaatgtattaaagagttggagtcatagttgtcataaagcaaactatccatgtggaaagtgtaggggatgttataagcattacgagtccttagaattagccgaaaaccttatgtaa

SEQ ID NO: 52716 - DNA, 252 bp, Acinetobacter baumannii
atgtttgcctcgatgtttcttttttcctttgcaatgtcgattacacccggtcccgtcaatacagtcattttatcgaccagcttaaatcatggtttaaaaagatcacttccctatatttcaggtgccaccattggctttaccttacttttgatttttatggcttttggccttcaaagtgtattaactcagtttccagttgtcttaaaaattcttgcagtttgtggaacgctctttgttgctatatcggcataa

SEQ ID NO: 52717 - DNA, 1281 bp, Acinetobacter baumannii
atgagattccacctctttaacgcaatccctagggttaagacgtttgcggcaagaattcagatgacaacaaaaggaaaaactgcattagctcaagtagcaagcctatctaatcttgaagaagcttgggaacatatttggaaaaattcaaaaaaacaatctaaaaactcattggatttaaataatataagtctcaatgattttaatcataataaaaaacaactattaaaaaaaatttcaaaaaagttgtcagatagatgctatgtatttaatgatctccatccgtttttagttcctaaatcgaatggtaaatataggttaatttgtgtaccgactattgaagaccgtgtagtacaacgagccttattaaatgtattgaacaattattatcataatcaacttgataatgggatcagctatggctttatcaataaaaaaacagtcaaggatgcagctagaaaagcctgtgagcttcgcaaaacgcacaagtgggtttataaaactgatatcactgcattcttcgataatgtagaccgtgaaaaacttaaggaaaaaactaaatctttagttaaacatcgttctctacatcctctattattttcgataataaatcgtgaagtacgaatcacctcaaattctcaagcattacggattaaaaaacttggaattagaagaggacatggtgtccgtcaaggaatgcccttgtctcccttttttgcaaatttatttttaggcacttttgataatgaaattaaagctaatggttttagcgctgtaagatatgctgatgatttaattttctttgctaagagtaagcatgagtgtgaacaaattgatagtttttgccgtacatctttaaaaaaattagatttagatattcccctacttgatgaattaaattcaaaaacagtaatttacaatccagatgaaacagttgagtttttaggattaggtttaagtaagaaaaaatgtaatgctgactatgagcttattttaacaaatgaacaattacaaatgatccgtactgaattactacaattaggttcaatcaaacaactacttgatagtaatattaagttagctaatcttgggagtgctattgaatcacgtatagctggctataaagctgcatactcagattgtattactaactatactgaacttgaaaaccacatgattgatttacatcagaaagttctccatagaatatacggagttggtggtttaaatattaacttaagttctctttctagtgaaaatagaagatttcttggtttaacttaa

SEQ ID NO: 52718 - DNA, 483 bp, Acinetobacter baumannii
atgatgttaaataaacaaggcacgatgacaaaatttattattagctttgctatactcttaactggatgtaatttatctgctaaaactaacccaccgtcaaagaaaatctatgagctagatttaaccgatcaaggaattagtcctgaaggtggtggaattgaattgcaaaaagtaaaaaattattgttctcttatactgagtctttatggagaatcaggacaagaaaaatataaattcaattttaagaaggataatttgattaatacaaattacctaaaatatagatatagaaatggtttaatagaacctaataatgacttagatgaccttattgccgatgatagtaaaaaaacagataaagacactatggaattaatagtcaataagtcatttgttggagataaagatagacaaattacaaaaaagtttgaaatctataagaaaaaaattcctaaaagcctattagacagaaactgtaactaa

SEQ ID NO: 52719 - DNA, 1332 bp, Acinetobacter baumannii
atggactgtctggccaatataaagttcttagatgctcttgatcaaccaataagtggcttggctcatcaactttgggtaggtcctacattaatttctgagtttgtaactactgcgaatggcgaatcagtctggattaaacgtccggttggaacagttcttgatgttcgagttagaagtatggacactggagagtacaactctcaagttaaaatacaactaattggtgaaaagactgtttttactatacgcagtcctaaagttttacttaaaggtgtaaaactaagtaccaaagatatagctcagggaggatatattaggtcaacatacattgttgctgaaggagattatttgtctcgaatagcgaaagacaacaataccaccacggctgagctagtaagaatcaacaatttaaaaaatggccaagacattcatgctggacaagtcttaaagttacctaccaataagactgagacctcttcgtctgcacctgtacctgagaacaaaccaaaaaaatttttactacagcagagccaggcagagaaaaccaagattatcgtagctcagcgaaccgatactttacctttaattgccaaacttactggtaatagcattgacgaaattaagaaacttaatgggttaagtaacgatagaatctctcagaaccaaaagataagagtttatgatcgtcaagttaagccagctgtacctaaaccacatattgagaagagaaacgaagagaaacgacctgcaacaccgctaatcccacctaaaattgttcaggatgcttctaaaaataaggaaaagacgccaattgcaaaggtattatcatcaacttctacatcttcaaaagtctctgaaaagaatgagagagctattgccagattacatcctcaggtaagaggcttaataagaaagtttattaatgaagtatatgctcagcatcaggtgcaacttgttattgttcaagattatcgtacttatgcacagcaagatgctttgtacgccaaaggtcgtacagcacccggaagtattgtaacaaaagcacgaggtggtcaaagtaaccataactttgcattagctgttgatgttttcccattatgggaagatggtaaacttcatatggatgcgaagtcggatgctaaaaatattaaaatactgaaaaaagttgcccctgtcgggaaaagtattggattagagtggggtggagattggaaatcaatagttgataatcctcactttcaattaaaaactggaaaaactatgtcgcagcttagacaactaacgaaagaagcaggcggtgatccattaaaggtagtatatgatgttaaataa

SEQ ID NO: 52720 - DNA, 441 bp, Acinetobacter baumannii
atggctggtggtacacgtattgtaattaatgataaaggtattcgtttgataacagggggtaagtttgaagttaaagctggtcaacatatctttaatgatggacagcgagttaaagcggaacttcctaatttacctatcgttaatgagactaataattatacaaataaatgggatttttatgatttatttaatgaatctaatttttcaaatgtgaaatataaattaattaataataaaaacaatacttatatttcaggaacgctagatgaacatggtcgaactcaacgtataaatacatctactaatgaaggctacgatatgctcattggcccagatgaggactggactgtttcagtcgaatctggcaatgaagatgaggaatatgattatacatgtaaatgtggctcacacgaaaattatgaacacgaggatgagatttaa

SEQ ID NO: 52721 - DNA, 684 bp, Acinetobacter baumannii
atgattgtttctgctcacttaggtgatgttattatgattgcagcagataagagggcaatgaattataatgttgagactaatgagttaaccgtatcacataataatgaaaataaaatacagttatggtgcagaggtgcagtagcgggaacaggtgatgttgtatttataaacagaataatgaagcgattcgctgatatttctattgaagaacaaaagattaaacaaatagatattattgctgaggaaataaatagaagattatatgaaggattacctatagattttattaataataatacaattgtattttctatttttaatggtgtgaattccttattatattcaataccgattagcgcatttcttgaaaaacaactgtctaataattaccttaataaagttgaaccaggaacagttgaagtgtgctgtctacatactcctctagatttatcgtatctaaaaaactttcaaagtaatttacggggtcttaatagtttcgatagcactgttcaattccttatctgttatgttgaacaactaaaacaaatctttgcaatgcaagcttcaattgattccagtgttacttctgcatttgatctatatttacagtcttgccagacaggtcaatggcttgctttacatattgaaaatccgcttttaaattcatctattatgtttaaatga

SEQ ID NO: 52722 - DNA, 891 bp, Acinetobacter baumannii
atgctttacgacgttacgattatcggcggcagttatgcgggtttatcagcagcaatgccgttagcccgcgcacgtagaaatattgcgattattgatgcagggcaaagaagaaatcgttttgctgaacattctcatgggttccttacccaagatggaactcgagctagtgaaattgttgaaattgcaaaaaatcaattagaagcatatagcactgttcactggaaaaatggatgggttaaacaaatcgcaaaaatagatgaaggcttttgtatttgtattgatggggtagtttccattcagacaaaaaaaattattattgcggcaggagttaacgatcagttgccggaaatatctggtttggctgagagatggggaaaaacgatttttcattgcccatattgccatggatatgaattacaacaagggaaaatcggtattttggccacttctgagcacagcctgcaattggcgatgatgttgcctgattgggggccaactacacttttactgaatggagatgatcaactcatccatacagaatggcatacttccttgcaaaaacgtggtgtagttgtagaaccaggttttattcaggaaattagagcgaatgctgaggtagtttttacggatggaaagattattgctctagatggactgtttgttcctacacgtacctatattactcaaccttgggtggctgagcttggatgtgaagtcgaagacacaccgtttggacaaataatcaaaacaagcgcgacaaaagacaccacagtaaatggagtttttgcttgtggggatattgcacgtttaggtggttcagtaccattcgcagttgcagatggaatgatggctggggtgagcgctcaccgttcacttgtttttaatatgtaa

SEQ ID NO: 52723 - DNA, 1398 bp, Acinetobacter baumannii
atgctttggacagactgcttaactcgcttgcgacaagagctctctgataacgtctttgcgatgtggattcgccctttagtagctgaagaagtagaggggatactacgtctctatgctcctaatccttattggacgcgttatattcaagagaatcatttagagttaatttctatattggctgaacaattgtcagaagggcgggtgcgtcaggttgaaatcttggtagattctcgtcctggtagtattttgtcctctagtgaacagcctgcaacaactacagcagctttacaaactgcccctatacctcaacctgctaaggttaaaagagaaccggaacctgttgctaatactgcggttagttctaagagttcaaaaaagaaactattaaatccacaatttactttttcactatttgttgaaggccgttctaaccaaatggcagcagaaacctgtagaaaagtattaacacagttaggtgcttctcaacataaccctttgtttttatatggcccgacaggtcttggtaagactcacttaatgcaagcagttggtaatgccttactgcaagcgaagccgaatgcaagagtcatgtatatgacttcagaaagttttgtacaagattttgtgagctcattacaaaaaggaaaggtagaagagtttaagaaaaattgccgttctttagacttgttattagtagatgatattcatcttttggcaggaaaagaagcaagcctcgttgaattcttctatacatttaatgccttacttgatgaatccaaacaaattattttaacgtcagatcgatatcctaaagaattaacagaacttgatcctcgtttggtttctcgtttttcctgggggctatcagtaggtgttgaaccacctgatattgaaactcgaatcgaaattctgcttaaaaaagctgaaaatagtggcgttgatttacctagaaactgtgcgttgtttattgcccaacaagtcgtagcgaacgtacgtgaacttgagggcgcactgaataaagttgtcgcaatttcacgttttaaaggtgctccaattgaccttgatgtcgtacgggaatctttaaaagatgttttagcgatccgtgctcgtacaattagtgtagaaaatatccagcgtgtagtgagtgaatatttccgaattccattaaaagagctggtaggtccaaagcgtacccgaatttatgctcgaccacgtcagttggcgatggggcttgcccgtgaattaacgggagatagttttcctgaaattggaatggcttttggtgggcgtgatcacagtacagtgatgcatgcttgtgaaaaagtcgttagtttacgggaagaagacccaatctttgatgaagattataagaacttattacgtttgcttcaaagttaa

SEQ ID NO: 52724 - DNA, 429 bp, Acinetobacter baumannii
gtgaaatactcaaatgaaaaaatagtaaaagctctcttactttctcctttaccactactttttttcacagcagtcctctttatcgtaatgaatcaggaatacagcctatactcgattttagtggttcttgtagggcacggtcttgtctacttggcttattgtattttgactgtacctttcagcttcatattctcaattcttttaaatcgttataacagtcttaatttattaactatctgtattgcctctataattattgctactccattttttattctttttggatggagtcacacaggagcaatttcgaaagagtggtggaagatgtatacagatacatggactatctttatggctctatttcctggcttatgttattggctatttctgattaacctaaaagataagaaatcaaagaatattgaataa

SEQ ID NO: 52725 - DNA, 5121 bp, Acinetobacter baumannii
atgaatacaaataatctaatacaagttcacacactgacagataactccagtggatattttttcaagtcatttgatgatgagaagtcttttgttattacatctaaacatagcatttgtgaccaaaaaaaaagctgtgacttataccagagaaaagtggatagatgttgcagagcctgtcctaaagaatttgatataaaagatattaaattattaaaaaacaatgataaggctactcttcaaatagaaaaaatctattatgagaaaacaaaagatttagtaatcgtaagtgtaattgatcatgctactgataaactaatcataaatggaaaaagtagtaatgacagctacgtaacttttggttttaatagtttagaaacaggagtgactagcttaatctttgatacgccgagagttattgatacacttatatattacaatttacattcaaacccaatcccaaatttaatagaaaaagaagataattttgatgggatttcaggctctgtagtttttacacatcatgaaaagtacccgacagcaaaagcacttattattcataatgaaaatcataatgatattggagcagaaagccttgatactttaaatttcagtgaaattaatgatttttttgattgcaaagtatttgatcagagactttacattccagaagtacaaaacattaaagagattagtcaacagagcttggagcaagtgcttaaaacgattgatgactttgaattatctagacctgcattacatagtgaatttgaagaaaaattaaactcaggcagatttatccaaatcacaggtttatccggtacaggtaaatcagttcttctaagacaaatcgctgagtcaaaagctaatgatttaccatttttatttattaaatcagatcaacttacaggaagtaataattggttagaatatctatctagagttggactgccgagtttttcaacttcagagtggctaatcagtttagaagctagtgggggaattccaattgtctttattgatggtatagacagagttaatgaaaatagtaaaccaattattgaagatttaattcgttcaatttttaataatgatgatttagccaactggaaaatcgttaccactttaagagacacgggacttgagccattaaaaacgtgggtcggtgctcttttgaaaaatacatcgatcgaaactataaacgtcgatctcttaaatgatgatgagtgtaacgaattagctcagcgaattcctagcattagtaaattgttattcagagagagcaaaataagcagtattattagacgtccattctttgctaaagttttagtaagtttaaattctaatgattttgaacctgactctgaattagaactaataaatgaatggtggaaacgtggagggtttaatgctacaggacaagaaatctataatagacaagacctattaaaaaatatttctgaaatcaaagctcaaaatcttagtaatagcgtcaagcgtagagagattcaacctatcgatgctttagatagcttggttgttgatggaatcattcatgtaaattctaaaagttctaccgttgattttacacatgacatattttttgaatggtcactactttatgttctgcttgaagaacaagaagaatggctaagtaaaatagaaagctttggacaaccaccttttatagcaagagttgtagaattacttgctcaacgagaatttattgacaatgagtggagtaagcatttatcaaatccaaagtttaaagagctaagatcccaatggttgagagcatgggtaattggtcccatacagcaccctaagttcattgaatcaaatacggaatatacaactgctttaataaaaaatgatttccatctagttgatagcttattaatttggtttcaagccgaaaaaacaagagctaatccattacttttaaaacagaaaaatcaaatagaagaggccatccattttgcttggccatcagatattctattatggcaaaaactattggattatatttttaatttaatcccacgtacaccacataggctttaccctaaaattttgaaaatttttgaggtttggcagtatgttggtatacatataccgacaaatcgtgtttctaaaacattacttgaaatttctttaaattggcttatagaaatttctaaacccgaaatattagatgattggaaacaaataactaactttagagattttaagttagaattaattaaattaattttaatttctactttatcagagccatcatatactgaaaaatatttaaattttttactttcacacaatgaactatctaaagaaatttatagtcatattacaggcttttcttctattatcgcgcagaagcatccgaagctacttgtacatttgacattaaaatttttattagatgaattacctaaggagcgtatagagcatgaagaagctgtatatgagagaaaaaaacaatattttaaaaaactaatgtctataccagttgaagaaagaactcaagaacaacaatcaaaattagatcatcgtgctttatattttcatcaagtaccatttcagcagatccatagtggtgattggaaaaaattatcaattaaatatgaagctatacatttctctcctagttcagctttaaaagacccatttttttcattattaaattattcagaagaggatggattacttttaatccgagagttatctaaccatgctattcaggcatggagacaactatgtgtactttctaaaaaaaatcctctaccaattactattgaatttccttggggtattcaagaattctggggtaatgaaaaggaatatatctggaaaaaacctgtttggataaatgatgcgatttcatcggcctatatggtgttagaaaattggtgctttgaacaactagagcaagggagagattttgatgaactcattcaaaaaattactttagggcatgaatcagtagcaattcttggtgtagtaagtgttttagccctaaataaacaagttgtttctaattctatatttgcagttgtcactaattttaaaattttagagttagataagtatcgtttccagcaagacttacaggaacctagtacaactttaatttctcttcaaggtgaatcaaaatatcaaaaagatattaacgctgtcagacacaactatagtagagagggacataaatcaagtttagagtttttactacgaaattactttatcagccttgaatttcgtgaactaacaaaagataagttatctaattttaaagctgatcttccttttaattttgaccatgagaagatggataaaacaatagttaattctttagaacagagagctgattattacgctgaatacggtaatactaagaattatttttatcaagaactcgaaaatcaaattagttttggctttaatcatcctcactatcaaaaacaaagtaactctaaagaatataaagagcaaaataattttttaatgtatattcaaattgcttattgggctgagaaatcattagaagctaatgcaattcaaagtaattacactttagattcagttattgagttatacaaagatttagaagaaatggatttatttcacgatgcttgtgatatttatgacgattcttctacatataaaagaatgaaacaaagtgcttttagtgcattagctagcatgatcttagtctttagagtagatcgtaatgaaggtgatctagaattagctcgtgatattttaagccaagtagtccagttaccatacagttcttatgagatagattgtccacaagcatcccttgcttctcatccaaagaaatttctagcacaggctttagtgagtgaaattattcatggcactacgaatgattcaactttcagtaatcttctaaatattgtagcgagcccatctcatgaaatttcattagtgacactaaaagaatgttttaaattatttgatcactatcctaaactgacttggtctgcaatttattttgcatttgctctatgtaaaaatcatttaaaatatcgaatctatcgattagatgaatatccagaagcacaacaagagttaaaacaagtaaatgaacatctaaacaactattttaaatctgaagatgactggtgttcattacctataccagatgccccttggagaaaagataataaaaatgggtcaagatggatagaaacaaataattgggataatgagttttcaggaaaatttattcacttactgcctgagttactttgtgataccaatcaaatctatatacttgattttattgaaagttgcttagaatggactatagaaaaacaagaaccttcttggctcgaagagaatcagaggttcgatgataaagatattatttatgcatggaatcatagcatagccagcgctttagcaagagttattggaatatttcctacagaagaaatcaaattacaatttcttataccaattcttaatcttaaaacagatgtttgttgggaattgctttatcctttcattgaagattatatttgccgttatatttatgatgcacaaaacatacctaaaaatgctttagatgttctggatttatgcttggaacgttttttaaatgcatccttttttgataaaaaaggttatatagcagggcggatttttggttttgatttacctaagattgcaaaatcactgatgtttgtatcaatagatcaaaatgcaccattagccagtaggtttgtgaatggtgattggtctgaaattgatataatcttacctttagttgataagtatatccgaacaggaggttggatcgaatatattattcaattgttcttaaaattgtgtgaacgatcaattcaaaattatccatcaaatatttatgctgaccaaatcttagaactaatattattagatgagcaattgaattggaatgagcaagtatatcaaaggatatctagccttatccaaatttttatagacaaggaacaatctatgccaatagagttacgacgaaaattcttaaaaattattgattggttagtagatcatggtgatcgcggaagtgcagcacttcagcaaagcaaattttttcaaaatgtgaagagctcctga

SEQ ID NO: 52726 - DNA, 1023 bp, Acinetobacter baumannii
atgttaaagattcatgtaatagatgctgctcatggtgattgtattctactggattttgagcatacgaaaatattaattgactgtggacctttcaaaccctttcttactagaagaaatgttcgtaataatttaaaaaatcttatcggttcagagcaaaagattgatttagcaatagtgacccataatgatgatgatcacattggcgggttcgaatcattaattgatgaaggtgttaagttagaagcgattctttttaatagtcttcaagatatccctgatattataaaaagctcgcaaaaacaaatttcatataaccaagataatgctcttaagcaaagattgttggcagcacgaggaattaaaactctatgtttaacaagagattctactccattaataattaataatattacgttaactgcgataacgccaacggttgaagctctagaatgcatgctaaataatgccaatgttcaaaaagagagagaagaaaaaaagagaaggcaaaaacagatctcaagttcgaagactgaggaaataaagcctgaggaggctttacaaaaaattcaatctggtcaagatgttttcgtaaaagatccatctattactaataaatcaagtataggattagtcattcaatacggatctttctctgggctttttttaggggatgctcatgctgaagatgtgattgaagggctgaatattttaggttttaataatcatcaatttgacgtggtaaaaatatctcatcatggaagtgaacgaaatacaaatattgaatcattaagtcttttaggaaagactgactatatattgtgtgcaaacaatgaaaagcattatcaccctaataatatgacattagctagaatactaagtttagataacaccccaactattcatttaagctcagataatcctagtctattggaaaaaattaatgattttaaaaaactaggttttagtattaatgaatcatatccgactaatggcgtgaatacactttactatgaatacaaataa

SEQ ID NO: 52727 - DNA, 504 bp, Acinetobacter baumannii
atgcccgcctgttcgagcgtctggaggtgcgccggcaccgttcccggcggcagcatgtcccgcaatccttccggtatcgccgccggccttgcgtcacgggcggaaaatagcggcagggtatcgcgcctgttttcggccttttggaaccagcccttgtgtgcaaggcgctgctccagcgtgtgccattcgtcatccagcgcaaaggggcggcgttcaatgcccggcacctccccgtttgccgcgcccgcccatgccgaaaaatcccgctccggttccgaaccgggaaaggcaccgcccacaagcgactctccgcccgcagccgccggtgcaacttgcagccaggttgccggcaaaagcgaccggcctgacacgggcgcttgcgcctcgtcccaagaaagccgccgcgcgatcacaagatgcgtgcgcaccagcgcatcggaaaaccagccgggctgggtatccgcgacaatgtactcaagacggaactcgcgcagcagcaggtag

SEQ ID NO: 52728 - DNA, 1914 bp, Acinetobacter baumannii
atgaaacaaatgagaatgccgggggaccacgaacagatgcttcacaccgcgactaggccgcgcaaggcagcgccggcgatgcccgccaaatctctggatgccctctaccgccagccgctggcggcaaagcgtaccggtgccctgtacggggcctttccctacccgacaaaaatttccccggaggcgattgccctatatatcgccgcccataccaaccccggcgataccgtgtttgacgggttcggaggcagtggtacgaccggcctcgccgcgctgctttgtgaacggccaaccgaggaattgcgcgccgaagcggtccgccttggtcttgatgtgcaatggggtgcccgcaatgccgttctctatgaactgggtgcgctcggctcgttcgtcggccggaccctgaccaatccgcccgatcctgtcgcgttcaggaaggccgccgaagatgtactggcggccggggagagcgaagacggctggatgtatgaagcgcgcgatccctcctgcgcgaaaggctcccttcgtcatctgatctggagcgataagctgcgctgccccggttgccgcagctctgtcaccttgtgggatgcgtgcgtctcgctcgatccggcggagatatcctcgaccttctcctgcccgaaatgcggtcatgaagcgccgctagatgacgttcagcgggtgacggcacaggaacaggatgacgtgctgggcgaacagcgcgcactgcgcgggcgcgcaatggcccgcgtctatggttcgaccgggaaaaaacgctggtcgcgcccggcaacggccgccgacctgacgcttatcaagaaaattgaggcggagccgatcccgtcgtgcgtcccgcaggcgttgatcccctggggtgacctctaccgaaaaggctaccatcaaggcattacgcacgttcaccacttctacacgcgacgtaatctcatcgtcttcgcgcgcatgtgggagcgtgtggaatcctatcacggcgcgctgcgggaagggctgcgcttctggctgctcagctataacgccgcgcacggcacgatcatgacgcgcgtcgtggcgaagtccggccagaaagaccttgtcgtcaccagcgcccagcccggcgtgctctatgtcagcggccttccggtcgaaaagaatttttttgcaggattgcgacgcaagctcacaacgattgcgcaggcgtttgagacaatctacggcggcagtggcaaggtcgaagtcgtccacggctccagctgcgatgtcgcgctgccgtccggcagtatcgactacgtgttcacggacccgcccttcggagccaacataccttacgccgaactcagttttataaacgaggcttggctcaagacattcaccgaccgcgcggatgaagccattgttagcccgaaccaaggcaaggccattgacgagtaccgggacctgcttacccggtcgttcagcgaggcccgccggatattgaagccgtccggcaaagccacgatggtgtttcattctgcatccgccgaagtctggaacgccttgcagcgcgcctaccaggatgcgggctttgacgtggaatatgcgggggttctcgacaagaagcagggcagcttcaaacaggtcacaacggaaggagccgtgcgcggcgatcccgtgctcctgttggggccccgtcgcaaggccgaggcccggatcgaaagcaagaccggagcgaacgaatgtgtatggacggtcgcaacggcacttcaccgcgcggcgaccgccgcgcacgatccggccgaagcgacggcgcagagactttactcccgcctcgtgacgcatttcctcagccatcatcagcaagtcccgctcgacgcggatgtcttctatcgctggtatgcggaacagccgctgcccggagttctatgcagtgctggtgactga

SEQ ID NO: 52729 - DNA, 528 bp, Acinetobacter baumannii
atgaccaacgtatccgacagcagcccccgcatttatgtcgcctgccttgcagcttacaataacggttttctgcatggagcttggatcgacgcggatcaggacgcggaccagatcagggacgagattgccgcgatgcttgcccgttctccgatcgaggaagcggaggaatacgccattcatgactatgagggctttgagggcgtcagcatctccgaatatgcgggcatcgacagcgtggcgcggatggccgccttcatcgcagaacacggcgcactaggcgcgggcctgttggagcagttcagcggcgacatggaccaagccgaaaccgccttgcaggattgctatcatggtcagttcgcgagcctcgccgactacatggaggaattgatcaccgagagcgtcacgatccccgaggccctacgctactatgtcgattggcaggcgatggcgcgcgacgctgagatgggtggcgacctgttcaccatcgaaactgcggacggtgaggtgcatgtgttttccaacaggtga

SEQ ID NO: 52730 - DNA, 339 bp, Acinetobacter baumannii
ttgcgggggcgcaccgcaagcaaggctttctggaacctagggggaatggctatgcgggttcccgtcgaactcgatcccgatgtagatgacgaagcgccgaccggcgacaccataaccgtctatgacgaacggcattacgtcacctatctgcgtttgctggatgcgaaggccgagggcgcggactggaaggaagtcgcgcagatcgtgttgcaccgtgatccggtcgccgatgaacttcgcacccgccgttgctggcaaagccatctcgaacgcgcacaatggctgtcgcgtgggggctatcggaagattctggagcaggcgtcagtcaacaaggagtga

SEQ ID NO: 52731 - DNA, 1050 bp, Acinetobacter baumannii
atgaaggtgcgcgacctcgaaaatccagccatggcgctggtgtccggcgtgctttcgggcgacgcgataaagccatcgctcgatgccgccagtcagccggaaataggccgggtcgatggtcaggaccagcgagcggtcgatgacgctgttgtagaaccattcgggcaggacgaactccatgccctcgacgcggccggcgcgcgtcgtcatttcctcccattcgttgatccaagaaaactggcggcgacgccaatgcgggccgttgcgaatggtggtggcgatgacggtcgattgcagccgcgccagtgcagctttcaaaagccggtattgctgattgccggtcggccgtccgatggcgcgcaacagatggtaaggcgtaaaccggacaaagcgcgacgtggtgaggccgttgttctcggccgcgacgatctgcgaggctgcccatatcagcacatcggcgtcccaaatggtcgccatcccatgctcgggcatcccgaacacctgcacctctatgtcggcggctttgtagagaatcggcttggtgcgcggggtcttcgccagcgagaagaacggccgttccatcaagtcgcgctggtcgcgcggcggtgcgtcgcccgttgcgaccacgaaggggtccaggcggctgcgctcgctgtcctcggccggctgcgcaggggcgtgatcgtcctcgcgcagcatctagcagtcgccccgttcttcgggcgtgagcggacgcgcgggaaagaccgtgccggcggtcttgtcgcgggtggatttgcgctcgccggccgcgctccagtcttccagatcgcggacggtgtagaggacgcggccgccgatctttcgataggtcgggccggtgccgtaggtgcgatgtttctcaagggtgcggatggatatgccgaggaagcgcgcggcttccttggtgcgcaacaggcgcggcggcaggcccgcaagcgggttgggcatggatcacctccagtcgggattgggctgccgggggcggcagcggactgtggcgaaccatggcgagagaccggcggcgcgtag

SEQ ID NO: 52732 - DNA, 519 bp, Acinetobacter baumannii
atgacccgtcgcgcccatcgcagcgcgcacggccgtccgctgccggacggacctgcgcccttcaccacattggtcgagctgaccttcgacaagcgcaaggtcgagcactggatacgcttcggccgcaagagctacgaacagatcatcgacagccgccgcagcgtcgtcggcttcgcaccgggcagtgtcttcgccttcgtgcgatgggcgagcggcgaccatggcacggtcgtttcgcgcatcgacattgtgcgggcaatcgggcgcggcgagccattccagacattgccgttcgtccgccccggcggcgaaatcctgctgcgcctcgatagctggccgaaggtccagcgcgggcttgccgcaatcgacgccgtggaatcgctcggcctcgatccggccgacgccgcaccggagcattggcggcacgtccacaaccgtttgacggccaatctggagccgcacgcatacacgcccgagcgacatgccgcgtggcttcaccgtcgaaggatcgagccatga

SEQ ID NO: 52733 - DNA, 564 bp, Acinetobacter baumannii
gtgcgtcggcgcgcgccactcgaagcggccgacgccttcctcatcggtccagagcgggaccgctcggccgatgacggaagctgcggggatgggtccgaagtagcggccgtcgaggctgtcgcggacttcccaattcatgaggaaaagctgaccgctgccgatgatgcggcagccctgccagacgggcagatcgcggccgaggctgtcgcgctccagcgcctcgcccatctcgatcccgtccaccgtgatcgtgcggccggtgcggcaaacccgctgtccgggcaggcccaagacgcgcttcaacagcgggacgccgcgcgcgatatagccgcgctcgaccatgaaggcggccagcggttcggacggcatgacggcgaccagctcgggcacgtcgatccggtcggccggctcgagcgtgtagaagccgatgggcgcgctggccgtggcgttccagatgagtttcacgggccaatcgacggcgctggcggcggcgatgccgatggcggcgagcgccgtcaccgtgagggcgcggcggcgcgtcatggctcgatccttcgacggtga

SEQ ID NO: 52734 - DNA, 336 bp, Acinetobacter baumannii
atggcagagataggcaccttcacccgcaccgaaaccggctatgcgggagagcttcattcgttcggcctccacgaaaagctgttcatcgtcccggccaaagcgagcgacgtaaaaaacgcacctgactatcgcgtgcgcctcgatagcgaggacggcccggacgccggccccgcatggaaagactccagcgagaacgctggcgagttcgtgtcgatgcgattggaggggccaatcttcccgttcccgatccgcgccaaactgttccagtccaacgacgatccttcggtctggacgctgcgttggaagcatccccggaaagtcgaggatgaggaatga

SEQ ID NO: 52735 - DNA, 933 bp, Acinetobacter baumannii
atgacggccgcgcgcgtccggcccgccacccggtcaaagatcggcatccctttgttcgcggaaaagccgtctcatcccttcgtcccgctcggcgaccagacggccggcgcgcgcagcgaaggtcaggggcggccatcggccggcgcttgcgccttgcccttgaccgcagtgagcacgctggcaggctggcggcgaagcggagacaggccggcatggcattatgtcgtcctgctgctggcgggggcgctttccgtctgcataggaccgggcgtcgccgtcgcgcaatccgcatcggtcgagcgcccggccgccgcccatccgtatgcggcgcacatcgtcgaggcgtcgcagcggttcggcatccccgagcactggattcgtgccgtgctgcgcgccgaaagcgcgggcgatgtgcgcgccatatcgtcggccggggcgatgggattgatgcaggtgatgcccgacacatgggcgggcctgcgcgtccgccatggcctcggccgcgatccctacgacccgcgcgacaacatccttgcaggcacggcctatctgcgcgagatgttcgaccgctacggcaatgtcggcgcgatgcttacggcctataacgccggccccggccgctatgacgagcaccgcgcgacgggccgcccgcttcccgccgagacacgcgcctatgtcgccgcgctcgccccgatccttggcggcgcggctccatcggatgcgccgttgcaaccaccggcaccgccgcccgactggcgcgaggcaccgctattcgtcatgcgcccggacgacacgcgagctgccgccgcgccgccgtccgaggtgcaaacaggcgacggccgcgctgccgttccggcgcgcgaccccgcccgtgcggagccgcaggacggcagtattttcgtggcgagcgccagcgacgggggaacgccatga

SEQ ID NO: 52736 - DNA, 2055 bp, Acinetobacter baumannii
atgagcgccgacgacgaaaaccgcttccgtccgaagcccggccgtatccgatccgacacgccgaagggcggcaagaccaagagctttttcacgcaggtcaagaagatcacgcggcagcatcaggcagcagcctcccgcgatccttccatgccgtcatccgcccgcccgtcatcgccgggccggtcccgcgccgtggtcgccagcggcaagggtgtgaagcgcggccggggcgcgagcttcgtgcgcgcccgcaatatctccggccattggcatcatcgccagcccggcagccgccgcgtgattgtcaagcagcgcagcgtccgggccgcgtggaagggcggccgtgcccgcgcgcatctgctctatgtccagcgcgacggcacgtcacgcgacggcgagcgcggccggctctatgcggggaccgaggaccgcgccgatggcgacgccttccttgatcgcggcaagggcgaccgacatcagttcaggttcatcgtctcgccagaggacggcgcggagctatcggacctcacggcctacacccgcgatttcatgaagcaggtggaagccgacctcggcaccaaactcgattgggttgcggtgaaccactataacaccggccatccccatgtgcatgtcatcgtcaacggccgcgacgacacgggcggggatctagtcatcaatggcgactacctttccgtcggcctgcgcgagcgggccagcgaacttgccagtctcgaactcggccccgtgaccgagatcgagcagacgcgcaagctgtcggccgaaatagaccaagatcgtttcacccggatcgaccgcgccatggccgaggaagccgatgcccgtttcctcgaccttcgccatgaaccggcagcgccgaggcggcagttcgagcgcaccctacgcctgcatcgtcttaccaagctggagaagatgggactggcgaccgagcacgcgcccggcgtttgggaattgagcaaggacatggaaccggccctgcgcgagcttggagagcggggcgacattatccgcaccatgcagaaggcgctcggcccgcagggcggcgaacgcgatcccatgagcttccaaatccatgacggagcgcccgagacgcccatcgtcggccgcgtcgtggacaagcacctgtccgacgaactgggggagaacctgaccgttgtggtggacggcatcgacggccgcacgcaccacatcgccggcatcgcgctcgagcggctcgaggacgcccgcatcggcagcgtcgtccagctcggccccgccgaggcggcagcccggccgtccgaccgcaccattaccgccattgcaaaggacggcatctatcggccgagccgccatctggagcaggccaagttcgagggccgcgttccaggcggcgactatgagggctatgtcgatgcccatgtgcgccggctggaggcgctacgccgggccggtatcgtcgagcggatcgacgccgaccaatggcgcatccccgatgatctggtcagccgtgccgccgcccatgacgccggccgagacagtcaggccagcgttcgcgtcctttccccggtcgatctgaacaaacagatcggatcggacggcgcgacctggctggaccggcggctgatccacggcgagacggccgaccttgcgccaaccggcttcgggcaacaagtccgcgaagccatggaccagcgccgcgagcaccatatcgaacagggcgacgccacccgcagccgggacagccgcgtcttctaccggcgcaaccttctcgccatcctgcgggagcgcgaggtagccggcgtcggatcggatatggctttgagtaagggcctgccgttccgcgccgccacggacggcgagagcgtcagcggcaagtttaccggaaccgtgcatctatcgagcggcaagttcgccgtggtcgagaaatcccatgagttcacccttgtcccgtggcggccgatcatcgaccgccaactcggccgcgaggttatgggcatcgtgcagggcgggtcggtgtcgtggcagttagggcggcagagggggctggaacgctga

SEQ ID NO: 52737 - DNA, 984 bp, Acinetobacter baumannii
atgcggcgcactaaccatcgaaacctcgtgaatgtcggtatcctgtctggcaggataccgctcatttcccttgttcagttcatcgccgtcgccgagcatctgaattttcggcatgcggccaaggcacttggtatcagccagtcgagcgtcagcgcgcgtgtgaaagcgctggaggataaccttggtgtcctgctatttgagcgccatgcgcggggcgttcggctaacagacgcaggcaggcacttcatggagcgtgtcacggcgggtgtcgatcaactcgatcacgcagtgaagaccgcaggcatgacagctcaaggagaatacggccggcttcgcatcggcatccatgccttaatcccacgcagctttctcacggagctgatccgtcattatcgggaagaacatacgggcattgaggttgagatcaccgaaggcacagcccgcgatgcggtgatgcagcttcgtgctgaccagctcgacgtggtgttcgtcgcgggcaagcccgagatgcccgactgccatacccgaccgatctggaccgaaccgctggtggccgtgctatcggatgggcatcgcctcgccgggcagtccgcaatcacttggtccgatctggtcggcgagactttcattgttcgctatggtggcaccggcccgcaggtccatgaccatatcgtgctgcgccttgccgggcgttggcccgcaccgtcgatccggcgctttgatgtggggcgcgacacgctgctatctatggtcggacaaggcttcggcatcactatcgtcggcgaggcaacgtcattgttgccgacgaccggcatcgtcttcctgcccttcctcgatgaaccggagccggttgcctttacagccgtctggtcgccgttcaatcgcaactccgcactgaaaaatctactcaacctcgcaggcaaaatgaagcgtgacggcgattcgcccaatcgtttcctggatggcactcgaccggcacgataa

SEQ ID NO: 52738 - DNA, 468 bp, Acinetobacter baumannii
atggcgcagatagtcttgcgtatgccggccgagcactacgccatcggggccgagcaatccggccgcacggatttccttgtcttccgcccatcgcgccgatccgtaggtggcgatgttgcgggcttcccgcgctcgaatgatcgacatgaggatggcggcggcgatggcgatgaagccgcccgataccgcgatgatgccgccctcgacgaagatagcgggcgcgtaggcgtcgaaggaaaaccaccaccagaagaaggccggcggataatagaccggcaggcccgccagatcgaaccatggcgctccaagctggggctggaagccgaggcgaaaggcaacccattgcgtcgccgcccacgtcatcaccagaacgatggtgatgactacggcgatctgaccccaaaggattcggcctccgcgcaatgcaggctccagtcggcaaaagagacggagccgatcagagagtag

SEQ ID NO: 52739 - DNA, 1389 bp, Acinetobacter baumannii
atgctccggcaattccggctcacggcggatgccggcattggccggatcgccttcggtccaattggcggcgtccttcgcggagctgccatccgccgcgaccacgcggccggaccaatcatcggcggatgggctgggcgccagcggagcggcgaccagatcgggcggggtcaggatgcgttcctgaaaccgcgcatcctcgaaatagcgggccttggtcgcgcggatcggcggcgtgcccgcgaccatcacgatttcatcggtgggcggaagctgcatgatctcgcccggcgtgagcagcggccgggccgtctcctgccgcgacaccatgagatgcccgagccacggggccaatctgtgcccggcatagttggtggaatcgcgcagctcggtcgcggtgccgagcgcgtcgctcacccgcttggccgtccgttcgtcgttcgtggcgaagctgacgcggacgtggcagttgtcgaggatcgcgttgttcggcccatacgcgcgctcgatctggttgagactctgcgcgatcaggaagcccttgaggccgtagcccgccatgaaggccaaggcggattcgaaaaaatccaatctgccgagtgccggaaactcgtccagcatcagcagcagccgatggcgcttgccggagccggccaattcctcggtcaaccgcctgccgatctggttgaggatcagccgaataagcggcttggtgcggtttatgtcggacggtggcacgaccagatagagcgtgacgggctggcggctgccgaccagatcggcaatgcgccaatcgcatcgcgccgtcacccgcgccaccacgggatcgcggtagaggccgagaaacgacatggcggtggagagcaccccgcttcgttcgttctcgctcttgttcaacagctcgcgcgccgacgacgcgatgacgggatgaacgccagcctcgccgagatgcggcgtgtccatcatggcgcgcaaggtcgcctcgaccgggcggcggggatcggacaggaaattggcgacgcccgccagcgtcttgtccttctccgcatagagaacatgcaggatcgcgccgaccagcaggctatggctggtcttttcccaatgattacgcttgtcgaggctgccttcgggatcgaccagaatatccgcgatgttctgcacgtcgcggacttcccactccccctgccgcacctccagcaacggattgtaggccgacgatctggcgttcgtgggatcgaacagcaggacgcggccgtgcttcgcgcgaaagccggccgtcagcgtccagttctcgcccttgatgtcgtggacgatgcagcttcccggccatgtcagcagcgtcggcaccaccagcccgacgcccttaccgctgcgggtcggcgcgaagcataa

SEQ ID NO: 52740 - DNA, 480 bp, Acinetobacter baumannii
atgaccacacgcacccgcctgaatatctacttcgacccagcgctcattccgcagatcgaggcgatggcgctgcgccgctcggtggcgctacgccgcaatgtctcgaaatccgccatcgtggaggcggcggtcatgtcctacctgtccggcgatgccgacgaccagcttgaagccgccatgtcgcgccgcctggacaagctcggccgccagatcgacacgctcgacctagatctcgccgttctcggcgagacggtcgcgcagttcatccatttctggatgaccatcacaccgccgcttacgggagccgcgcaatccgctgctcgcgcgaaaggcgcggagcggttcgagggcttcatgcaaaatctcggtcggcggctggcgacgggagacaggttcctcaaagagctgtcgcgtgacctcgactcacttccctacgatccgttgccggacgagtccgagagcaacggcgatcaagaatga

SEQ ID NO: 52741 - DNA, 984 bp, Acinetobacter baumannii
atgaccaccaaccaccaaaaaccggaagccattgcgcgcggcgcgcgcatgttgcgcaccgcgctcggccccgcaatcgcccggctgctcgaagacccggccgtggtcgaagtgatgttgaacccggacgggcggttgtggatcgaccgcctgtccgaagggctttccgacacgggcgagcgcttgtccgccgccgatggtgaacgcatcgtgcggttggtggcgcatcatgtcggcgcagaggttcacgcccgcagcccccgcgtctcggccgagctgccggagagcggcgagaggttcgagggcttgctaccgcccgtggtcgccgcgccggccttcgccatccgcaaacccgccgtcgcggtgttcagcctcgacgactatgtggccgccggcatcatgtccgccgatcaggcggagacgctgcgcgaagccgtcgcagcccgcgctaacatcctcgtggcgggcggcacgtccaccggcaagaccacgctgaccaacgcgctgctcgccgaggtggcgaagggcgcggatcgcgtcgtcatcatcgaggacacgcgcgagctgcaatgcgccgcgccgaaccttgtcgccatgcggacgaaagacggcgtggcgacgctttccgatctggtccgttcctcgctgcgcctgcgccccgaccgcatccccatcggcgaggtgcgcggatcggaagccctcgacctgctcaaagcatggggcacggggcaccccggcgggatcggaaccatccatgcaggcaccggcatcggcgcgctgcgccgccttgaacagctcatccaagaggctgtcgtcaccgtcccgcgcgccctgatcgccgagacaatcgacctcgttgccgtcctttccgggcgcggttccgcgcgccggctggccgaactcgcccgcgtcgaagggctgggaccggacggcgactaccgcatcacccccgcaatccccaccagcacaggagaatcttcatga

SEQ ID NO: 52742 - DNA, 423 bp, Acinetobacter baumannii
ttgaaaatcccggcaccgcgtcgagttgttcaaggccgcccgccatcaaacgagcgccccgccgccgaacgagaagaacgacaggaagaagctcgacgccgcgaaggcgatggacaggccgaacacgatctggatcagcttgcgaaagccgccgcccgtatcgccgaaggccaaagtcaggccggtcacgatgatgatgatgacggcgatgatcttggcgaccggcccttcgatggactggaggatgctttggagcggtgcttcccacggcatcgacgaaccggacgcatgggcggccggggcgagcatgaagctgatgacaagggtggatgcggcggtcgcggcgaagcgatagccgcgcgaaatcgtgcggatcatgaagattctcctgtgctggtggggattgcgggggtgatgcggtag

SEQ ID NO: 52743 - DNA, 210 bp, Acinetobacter baumannii
atgccgccgcccgacctcgacgaattggggatcgcgtttcgccgcccatacggctgcgaaatggccgatggcccatatggcgaggccgaccagccaaaggcgcaggccgaggcccacggccccggcaagcgttccgttcatgatggcgatggcgcgcggtgcgccgccgagcaggatatgctcggtcaacgctcggtggaccgggattga

SEQ ID NO: 52744 - DNA, 945 bp, Acinetobacter baumannii
atgaaagagttatccgaatctggaaaagagtttcaagaaaggcaaagaaaccagcatgaggaatttataaattataaaacttatttaaagaataatggattagaatttattctaagaggaatgttaccaaattctttctcaaaaattgcaaattccaatcctaaaatacgtgatagttggttcgataggtgttctagtcttaaagagcaagatgtacctaaattatataattttatattattgttagcttatacatattccgagatcgatattcaaaaagcccagttactttggaggaaagttgagaatagcgaatcattttctaagatttatattggtcaagaaaaaatttcactcaaacaaatgtcagtttggggtgtgaaaaacgaaaatttaaatccatatcgctttcatttgcttgataaagcaatgtctgatgaagaaatatatagcctcgtcttagcagcgatagtaaataaaaatgatagtgttattcataattatattaaacagaaaattaatagcatagaaccagctcaaattgctagaggagttctagttgcaggctgtttagatgaaaactatatatcaaatgaagtttttagtaaatatactagttataaaggaataattggggaggcatataaagcttctttatatatgtatgaaaggaatatttggtcgaaatattggtttaaaaaaatggtatctacagaagataaagaggagttttggcgatatatgatcttgtttacaaaaatagtagattcgagattttataattggaaagattctgtattaaatgaaaataatctttttaaaaatttttatcaaagttttagaaatgatattaataatcgttgtaaaaaatggcaaaaagaaagatcaaaaaaattgtttggtaatgagccaccaaaccctatatatatttattcacaagattaa

SEQ ID NO: 52745 - DNA, 642 bp, Acinetobacter baumannii
atgtgctcaaattacctatttccaaataaaagaaatttgacactcttaggtgtcgatacaagccagtttgatcttgagcttaaggatcatgtattcccttcctatcatgctccaatcattctgaacggctcagatcacttagagcttgatattgcaaagtttggattactaccgagctgggcgaaagaattgaagttcagcagtcatacttataacgccagaactgagtctgtagcagataagcctagctttcgacatgcttggaagtacagcaagttctgcctagtcccagtacaagaattttatgagccgaaatacatcaatggcaagccacactggtacaccatcaagcgtaaagatgatcagccttttactgttgcagggatctatgatgatgcagtgattaatggcaataaggtacgttccttttcaatgttgaccatcaattcggaccatcacccttttatgaaacaattccatgcaccgaaggatgagaagcgatccatcatcgttattccagaacagtacagaaaagactggctaacagccgatcatgaacatgcgcatgaatatttctttcaaatgcccgatgaattcgtcacatttccacgcgatgagcagaaacaaaacgtcttattctga

SEQ ID NO: 52746 - DNA, 669 bp, Acinetobacter baumannii
atggacagcaaaaccatccgatataaaaatacacgccttctagttgatgaaattggcggagtatctaattttgctgaaaaaattaataaaggtcagtcacaaactagccaatttgctggtacaaatccaataaaaggaattggaaataaagtcgcccgtgaaattgaagaagcttttaataaacctcatggttggctagatcaagttcatgaagataatgaatcaataaatttagataacaatattaccgatccatttcctatagctggacgtttagttcctgttatttcttgggttcaagcaggaacttggaccactgctgagtcggttccaatgggcacacaatttaaggaatggttaccaccaaatcctaagtgtggcaaaaatggttatggcttgattgtagttggagaatctatggctcccgactttcgacctagtgacaaaatttatgtaaatcctgactttcaaataagtgatttaaaaacaggtgatttggttatcgttgcatgcgacggagaaacagaagctactttcaagaaattgattgtagaaagcaacggtatgtatttagaacccttaaaccctaaatggcatgagaagatcataccacttcgcgaaggatgcaaattggttggaaaagttgttggtttatatagggatgtttaa

SEQ ID NO: 52747 - DNA, 255 bp, Acinetobacter baumannii
atgaagtttcgcgatttcatcctgaatatgactccagatgaactaaatgaatatgcaaaagctgctggtacaacaactggttatctaaagacacatcttttgtatgggtataaagaaccacgaaagaacttacgtaaagctttggctgaacatagtggtgggaaagtttcagagcaagaagtattacaacatttcgggttgtatcccatctcaaatttattaaaccaaaatggtaatgaagtagctcagacttaa

SEQ ID NO: 52748 - DNA, 882 bp, Acinetobacter baumannii
atgagtaattttgtgcctaattcctttcaagtgcctaatgcatttgttgacgaggttttaaataaaatctctgatgctgcatgcaaaatttatttagttatttgccgtaaaactcgtggctggaataaggagatggattccatctctttaactcaatttgaagagattacagggaagagtagaccgacagttgttaaatgccttaatgaattaattaaagttggtttagtcgtggaacaaccaagcacaattcatggaaatacattcaaattaggtaacgatactagcgttggtttagtgcttaaattccctagtaaaaattttttactacctgaaatttatggacaatctagtaaaaattctttaccactgctagttaaaaattttaactacactagtaaaaattttttaccgctactagtaaaaatttttaacacacaaagtatcactatcaaaaacaactctcaaagtaataaaaaaataaataaaaaaagagagtctgtatctgaaaaacctaaaacagaaaaaccaagtgaatttaatccacgttcggttgaactacctgcgtgtgtagatccagagctgtggaacaattttgttgatatgcgtatcagcctcaaaaaaccactttctgaaaacgcagtaaagctaatccttaaaaaacttatctcgtttggaccattggctaaccaatcactggaaaactcaattatcggaaattatcagggtgtatttgaaccacgccaaaatcaaattccggaaaacccacaatctcataacgttcctgaagaaccgggttatttcactcagatgtacgctgagagcaaccgttcaaacgtgattgatgttacccctgaccagcaatatatcggaggctattaa

SEQ ID NO: 52749 - DNA, 477 bp, Acinetobacter baumannii
atgagtgcagttttaaaaacacaacaaatggattggtctaaatatactattgacggttggttagagcagtttggcgcatggtgtgaaacagttagaatgaaagggggggatttgccagatgggcttcatatcaatcaaatttactggttgatgcgtgaagctggcaaagaagtacaaaaaagtaaatcttatagtcgatgtgagatcagtgattatgaggcggatcaaattcaagcacttttacgaagtctattaaattctgataaaacagattttacaactaagtttgcattaatttgtttaattaaaaataaggttgaaaataaaggattgttgaaggttgctcaagaaacaaaccaatctaaagctcaggtcgcaattatggtgagttgcgctagattttatttattaggtcatgataaaagattaagacaaaatggaggttcaaatgaaaacatacactgtaaaactatatga

SEQ ID NO: 52750 - DNA, 255 bp, Acinetobacter baumannii; identical to SEQ ID NO: 44740

SEQ ID NO: 52751 - DNA, 159 bp, Acinetobacter baumannii
gtgccaggattattttctaaaaaagtacaattattaccaaaagaacatttatcttttatagtcacagaaaaaggtatcgaatttgatttttcaaatagaacctatgtaattaattcatttcatcctcaggttttctttgaaaaagaaaacccgctctaa

SEQ ID NO: 52752 - DNA, 831 bp, Acinetobacter baumannii; identical to SEQ ID NO: 36219

SEQ ID NO: 52753 - DNA, 552 bp, Acinetobacter baumannii; identical to SEQ ID NO: 28363

SEQ ID NO: 52754 - DNA, 390 bp, Acinetobacter baumannii; identical to SEQ ID NO: 28364

SEQ ID NO: 52755 - DNA, 351 bp, Acinetobacter baumannii; identical to SEQ ID NO: 28365

SEQ ID NO: 52756 - DNA, 273 bp, Acinetobacter baumannii; identical to SEQ ID NO: 36220

SEQ ID NO: 52757 - DNA, 429 bp, Acinetobacter baumannii; identical to SEQ ID NO: 36221

SEQ ID NO: 52758 - DNA, 1278 bp, Acinetobacter baumannii
atggtaagacccatagccctgattgatgggaataatttctatgtttcgtgtgagagggtgtttcagccgcacttgctaggcaagccggttatcatcctgtcaaacaatgatggttgtgccgtagcacgatcagaggaagcaaaagccctcggtattaagatgggtgcgccgctgtttaaaatccgtgagctggtcaaagaacacggcgttaaagtgctatcctcaaactatacgctttacggagatatgagccgccgtgtcgtggatgctgtgagccagttttcacctcattacgaaatctattcgatagatgaaaactttgttgatttgtcgggctttggtgatcgttatgaagccattgccgttgatatgcgagccaccgttagacaagtgaccggaatccctaattgtgtcggcattgccgagacaaagacacttgcaaaacttgccaattttgccgccaagaaaaacccgatttttggcggtgtttgcgacttcacgcaaccggcagtattggcatggtgtttagaccggattccggttgctgaagtgtggggaatagggcggcaaacacaaatcaagctggcatcacaaggaatagcaacggcggcacagttgcgcgacatgccgcgcacacttgcacgtcaactcggtacagttgtcttagaaagaacagttgcggagcttcagggcatccgctgccttgagatcgaggacattgcaccacaacgcaagggcatggctgttacgcgctctgctggtgcgcctatgcgcgatttagaggctgttatgcaggcactcaccgcccacgcttcccgtgccgctgaaaagcttcggttgcatggattagttgctggtcagatcacagcgttttttcacacaaacagtttttcaaaaaacgccgcgcagcactcggtatcaagaaccgtaaagctgaagcccatgacgaataatacattcgatcttgtgcaggctgttaaccggtgcgcccgtgctggttggcatcctaaagcgcatgagcatggctatagctatacaaaggcgggtgtgatgctcgatgatcttctgaaggcagaggacgcgcccaaaatgctttttgatatagtgcagccccgtgatgctcgcctaatggaagcaatggacgcaattaatgaccgatacggcaaacgcaaggttgttatcggtgcgcaaggctttcagaataaacatgaagcgaaagcggatatgcgttcaccacgcttcacaacaagactttcagacttgccagtaatttgttga

SEQ ID NO: 52759 - DNA, 327 bp, Acinetobacter baumannii
atgactttaacgatgcaagatacattcatttatatggctctgtgtttcggtatgtatgtttatctaaaactattccgaatgtaccattccataactgaagataactgtacttttaaggatgcttttacagcctctttttcagatgaaagatattttggcattagaaataacattctagcatttgctgccttagcatttgcttctttcggtctgtttgtttgctataaatttgtaacccaagaaatcacatattcaaaaattcacactatgatcattgtcattgtgaccggcctgctggcatttacgctgataaaactgagaaggtaa

SEQ ID NO: 52760 - DNA, 675 bp, Acinetobacter baumannii
atgactcaaacagtaccggcaaaggccacaaattttgttcgtgcctatcttcgtgcatcaactaaagaacaggatgcacagcgagcgcggggcagtattgatgcctttgcgcaagagcgcggcttatcaatttgcaactattatgcagaaaatgaatctggcgctcgtttagatcggcctgagttattccggctcctgagcgattgccagtctcaagatattttacttattgaagatgttgaccggttgtctaggctgcgtgaagctgattggcaaaatctaaaagctatcttgcgggatcggcaaattaaaatcgtggccgtgaatgtcccgacgacttggcaaagtctaaaagctgaccagaccgaatttgatgcccgaatgtttggcgcaatcaatgacatgcttctagacatgctggccgctatagcacggcgagattatgagcagcgccgtgcgcggcaaagacaaggtattgataaggcaaaatccaacgggaaatttaagggtcgcacacctgacctgaagcgatatgaagctattaataagatgcttgcaagcggcaactcatggacaacgatacaacagacattgaattgcagccgctccacgattgccaaggcggttaattataaattaaccaaggaaagcactaataagataagaggtgattaa

SEQ ID NO: 52761 - DNA, 249 bp, Acinetobacter baumannii; identical to SEQ ID NO: 36223

SEQ ID NO: 52762 - DNA, 1200 bp, Acinetobacter baumannii; identical to SEQ ID NO: 36224

SEQ ID NO: 52763 - DNA, 867 bp, Acinetobacter baumannii; identical to SEQ ID NO: 36225

SEQ ID NO: 52764 - DNA, 378 bp, Acinetobacter baumannii
atgataagtttatcaccaccgactatttgcaacagtgccctgaccggaaaaggcgcccagatcgacactacgaccgcatccggtcgcatggtgtttggtatatttgccactttagcagagttcgagcgagaccttattcgtgagcgaacagtagcaggtcttgccgccgcaagagcgcgcggccggaaaggagggcgaagattcgctcttacaaaagcgcaggttcgtcttgctcaagccgccatgacacagcgcgacacctctgtttccgacttatgcgcagagctgggaataaaacgcgttaccttatatcgatatgtgggaccgagtggggagctccgggactacgggaaacgcgttcttggcctggttccgtag

SEQ ID NO: 52765 - DNA, 300 bp, Acinetobacter baumannii
gtgaaagatacttatcttttaatatatacaagatataaattcctaatattttcggtatatacattaatttctgcttttggaatatttgtacaatatattaaggaagttttgtctatatcttctgttttagttatattttcatcaacttttttttgcttatatgcttggtttaatggaacttttacctttgtatttgctatagatgttaatagtagtacaggcgaggtttatagaagatggtgtgtaattctttttagctctttgttctatgtgtatactttaattgatccttttttataa

SEQ ID NO: 52766 - DNA, 645 bp, Acinetobacter baumannii
atgaaaactcttctcgtcgcaaacatgaaaggtggtgtaggtaaaacgaatacagcaattacccttgcaacagctctagctattaaaggttaccgggtagctctagccgatgcagatgttcaaaaatcatcgctacaatggctcaaacaccgtccagcgaaaagtgtaaaaattgagacattagattggagaaacgataaatctattggtgatgtaccaaagaatatagattatttgattattgatgctccaggagctctatctggtgatcatgcagagcaactcattagtgaaagccactccatcatcatcccattacaaccatctttttttgatatcgatagtacgaagagatttttaaaacatcttcaagatattaaaagagtacgtaaaggcaaagttgaaattcatctcctagctaatcgagttaaaacaaatagttctggttcacgggatatacaggaatttttcaataaaattgatcataaacctacagcttggatctctgaaagaagtgcctatgggcaactagctatgcagggtctaagtatttttgataaaacacagaaaacttatgttgatattcaaaaacaatggcaaccacttcttaatatggttattgatgataatgcagagtggttctaa

SEQ ID NO: 52767 - DNA, 381 bp, Acinetobacter baumannii
atgagtatgctttatttaacaattgatggtgatgatattggtcaaatgatcacctcatcatatctaaaaaatgatatttatgaactttctagaatcaatagtgttgttaatgagaaaacacatttaatttcaaattttttaagagagcaaggatttaatattatattctgcgcagctgatggagttgcaggttatatcgatcgatctgctatagataagaaatttatttttgattccattgagtccttagctgagcctgagttgcacttctctgcgggaattggctcaaccttacaagaagcatatatagcgctactttctgcaaaaagtagtgggaaacgttgtatccatgatttttcacaaataagttcaaatgtttag

SEQ ID NO: 52768 - DNA, 615 bp, Acinetobacter baumannii
atgtttagaattattgattttaaatcgctattacgatatgtcgcaacaatgacgactatcttaagtattggtgcatatgagttggtcagaagctactggctaaatgatttccaaataattaaaattttaagtattgcaccgtggatttcattattagtaattatagctttaacaactagcctgactgctcgtgcactttggaaagtgttgaaaacatttaaaccttctttatatcctgacttaaacggcacatgggaaggtgagataacaactgaaaatgataagaaaatacctgtccgtgtattgattaaacaaactttacttgcaacacaaatcaatattcatactgaaacttcaaagtcattaacccttgaaacaactcctacggtcgaaagtggtgaaccaaaactttattacatttatcgctcactacccaaaaatcctaattggaactcatatactggctctactatttttgacatacgtaaagtcgatatagatggtaaaaatgttttagaactttcaggttattattatacagaccgcaaaactactgggcgaattagctttatacaaacaggaagttgtgtagaaaaggatgtttctttttattaa

SEQ ID NO: 52769 - DNA, 1056 bp, Acinetobacter baumannii
atgcttacacaaaataatcagaagatagccaaagtcctaagcctgaatggtggtggagttagaggactatttactattagcttccttgcagaaatcgaaagaataattgaagcacaaaataatttgcagaatgtaaaaattggggattattttgacttaataacaggaacctcaatcggtggaattcttgcacttggtttagcatcagggaaaagtgcgcgagaactcgaaattgtttttaaagaaaatgctcctaaaattttccctacttggcgataccgattaaaaaaaatccttttacccttctttccaatatataaaagtaaaccgttgcgtaaaacaatacttagcatgattgatgaaaatttagtttttaatgatctaaatcgaagagtaatgattccaacagttaatttatcaagtggaaatccttttttctttaaaacacctcatgatccatcttttacacgtgacggtgttttaaagctaatagatgcagctatggctacttcggctgcccctacatactttagtccacattattgtgcagataaagaagcatactttgccgatggtggattagtagcaaataacccaagtttcattggtttaaaagaagtactttataacatgaaaagtgatttcccagatataaatatcgaaaatattaaaattttaaatgtgggtacattaaacgaacattattgcctacgcccaaaagtattagaaaaaaaatgtaaaaaaggatatttaggtttatggggaactggtgaaagactcgtcttgagtactatgacagctaaccaaaaccttcatagatttatgctaattagagaatataggccatatagtcttgataaaattaattttattgaaatagatggaactattcctaatgaagcctcaaaagatatcactcttgataatgcttcacttagtagtctcaaacatctattagggcatggcaaacaaatggcaacagaaaaatttgcgcaagaaattcatttgcgttctttttttgaagataaagttaagccatttattagaagcaattag

SEQ ID NO: 52770 - DNA, 360 bp, Acinetobacter baumannii
atgtgtataagagacaggttattaagtgggtgcacaattaattctaagttattatcaccagcaaaaagtgatgatgacaaaattattgtagaagcagaaaagtacaagcaacaatatcaaaaaaagatctttaaaatttggaatgttccgccttcttcagtgggaatgagtgctagcgttaaagtctttttaagtgatactggtgagattgagcaaattatttttctagataaagaagaccaaaagtttaagtcgagtattgaaaaggcgatatggcgtgcaagtccctttgttttaccttctaatccggaagttagaaaacaagtaagaaagttcaatattaaatttactgcaaagtaa

SEQ ID NO: 52771 - DNA, 399 bp, Acinetobacter baumannii
atggcaatgactttagagcagacaaggcaagctattatcgatcgtatgcaagcttttaccggtattacgcaagacagaatccagtatccaaatttaccaggctttaatgtacctaaagatggtgtttggtgccgcttaacgattgcaggtggtcccagttttacttctggcattgcagataagccatgtactcgccgtaccggtaatatcatgattcaatgctttgcacgtcccaattcaggaataattgaaatcacaaaattgagtgatgcattacttgctcattttgaatatttcacaatcgaacacttagaatgtttgaatggccaatctatttatgcgggtaaagatgctgacttcattcaatacaatgtatcaataagttttttagttaactaa

SEQ ID NO: 52772 - DNA, 696 bp, Acinetobacter baumannii
atggctattagaaaattagaagataaaattaagcgagttttttattttattggcggtggaatagtagtttacttgttgatcagttttactattttaagttcatttccatggtacccatatcaactaaataaaaaactagcttacgaagttttaaaagatgcattcacaataggcgcagcatttcttgctccaattgctgccttcgttttatttactgattggagagttgaacacaggataaaaagtactcttcagcttttggaagatctgaagaatttatcatacgatattaaaaatggattgggtttttacaatgccaaaattattacggaaaaagaatttccaattaaagaatttagaaatagagaggatcgtcaaacaatacaatggcaacttataaaactgaaaagaatgaatggtcagtttttaattgataatgtagaagtaaaaaagtttcaaaatttacaatctaactttgtggattttgttgataagatattgaatgatatgaatttttttgaatatttttcttatgaaattgcagttgataaaaatcttataaatagggattacaataataatgaatatttaaagtatatggggattttagaaataaaactcaaagatttagaggatttgtctaatcaaattgatcttcaggttgttaatgtacaaaattccattttacaaacttaa

SEQ ID NO: 52773 - DNA, 837 bp, Acinetobacter baumannii
atggctcgcaagattgaatactcggaagaaatttggaaccggctaaaaaaagtctatgaatcttctcctaagattacgtggcagggtttagttgatcaggttggcgaagaactcggttgtgagatgccttcgccatccgttgtacgccgtaaagcacttgcggagaaatggaaaaagaaagctaaatctctagtcaaaaagacagctcaggagcttaataaagagattaaaaaattgaccaaaaaaaacaatggtcaagaagatacacaagatactgaaaaaactgaaaaaagtaatagtcaaaattctgtcaaaaaaacgtcaaatattgctgaatttaatagtcaaaactcaaaaaatagtggtcataacaacggtggccgttctacagtcaacgagaactatctaaagtcagctttggttgtcaaaaacaaccgtataagagctcataagcttggagagttaattacagacactatcgatagtgttattcatattagagatgaagtactgaatttaaataatccaactgaggaacaattagcattagtcaagttcaagatgggacttatatgtcaagttgtagatttaaacgttaagcaaagtatcagcatttctaacattgccaagacagaagcaatgttctggggcttagatgtagatgatcttaaagaccagtcggaagttcaagcacggcgtagttctgttatttcgggtgctgaagaaagaatggcaatcgctaaagctaatatgaagaagaaaaaagaagaggcgtttatgcgtaagttagcgctaattgaagcaggtgaagtagagccagatgataaaaatgaatag

SEQ ID NO: 52774 - DNA, 435 bp, Acinetobacter baumannii
ttgagcaatatttggctgcgcaatggatttactattgaaaatgatgaagactatggcgaactcgtatcaattgagtctgtccatgaacttcataatgccattggattgtacttaattactcaaaagcctgacctgaatggtgaggaaattcgttttttacgaaaagaattgaacttatcacagaaaaatcttgctgggcttttaggtgtcggtgaaactagtattagacattgggaagctgatcgcggtttaattggcaaacctacagagcttttacttcgtgctttatataaagagcatgtgcagggtgatggtgagttacgaaatatgatcgaatcattaaatcaccaagaaagaacattagtcccaagtgaaattagcttctcatatggaactaatcattcttggcatcaaagtaattgtgaaatagcttag

SEQ ID NO: 52775 - DNA, 519 bp, Acinetobacter baumannii
atgagcgagaatcaaaaagaccctcaatacaaactaagatggtctgaagagttacgcgacaaagtggctgaatctgctaaggcatataagcgctctatgaatgcggatattatcgctcgacttgaaagaagctttatcttagaacctgaattatctccactgaaaatgccgcctgaagagctagaagcgcggctaactaaagtattagaagaacgagaacaaaatagaaataaaggcgaagagctcaatatagaaatttcatctgaatctgaaaaggacaaaaagattcagatcctagaagaacaactagctaattctatgaagatgatggaaatgattacaggtatgtttgaatcaatgcttaacggtaaccaagaagagtacatggagtcagttttcaagaaatatccaaatgtgaaaaagttctataaagagaaaactaattacttccaaaaagatgaagaaaatgaaaatagctctgaacctaaaacagaagataaagaaaaaggctcatggtaa

SEQ ID NO: 52776 - DNA, 162 bp, Acinetobacter baumannii
atggcaaagcaaaatcaacagcagttaaaaattagattttttgatgattctgatcatttgaaattaaaggaaattgctgaaaaagaggaccgatccttgacctatgtggttaatcaagcgattaaacaatttttacaaaccaaagagagtgcgaaagcatga

SEQ ID NO: 52777 - DNA, 510 bp, Acinetobacter baumannii
atgtcaaacgtaatgacaactgaagaaatcgtaattgttgaaaacgacaagccattaactacgtctttacatattgctgatggatctagagcgaaccataaagctgtaatgcagttgataaaaacacatattcatcatttcaataagtttggaagggtggcatttgaaatgcgaccctttgaaacagaaggtggagttcaaacaagacggattgccctactgaatgaacagcaagctacattcttaatgactttaatgcgtaacactgaacgtgtagttgagtttaagtgtgctttagtgcaggcattctataacactaaggaatttcttagttaccaatatcaggcacatgccaatattcataacaaacttaatatgcagttagacatcgagaaagctgacgctagtttggcaggtcatatcttgggaagttatcggaaaaagcgaaacacattaattagcgcaatcaaagaagtggagcgactaatgcagccatgtttatttgattga

SEQ ID NO: 52778 - DNA, 501 bp, Acinetobacter baumannii
gtgaagttgggcttgcatctttattctgatgaactaagatttgaagtgcacttaacagatagtgcacttcatttaattcatcttcacagacagtttgcagatgctcaaaaagctgaggcgtgtggaataattattggtgaaatacgtagtaaatcattaagggtaatcgatattagttctccagcagatgatgatgaaagaactatttatagctttcatagaaagtctacaaaacatcaaagttatttaaacaaggtacatgaaatttcaaatgggatattacaatatataggcgaatggcatactcatccagaaccacaaccacggccttctaattgtgattatcaagggtggagtcaacttattagtaatgggaaatttaatgagcttcctaagttactatggatagcaggaaacaaaagttataaagaagattggtttagtttacttttaaataaaaaatattatgctttaagagtttatgagggggatacgctttga

SEQ ID NO: 52779 - DNA, 1185 bp, Acinetobacter baumannii
atgggtagtaatttacacagaacttttagagctagagatgacggctttattacacaaattaagcctacaaatgatcagcgtgattatttaaatgcgtgtcgtcaaaaggtaagagccacgctgaagcaaggtatggcaaatttcattgtagagaatggaggcgatccaaatcttgttaagccaaaattccgtcttcaaggatcttgggcttatggtacttgtaaccagccagcataccctacacaagaaatggatgttgattatggtgtgtaccttccaaattctttattagctcagggacgttctgataaggtagctaaatcatattatttggcagtggaaacgttattgcaacctttggctgatagtgagggttggaaactatgtaaagataaaaatacttgttgccgacttatattgaaaggcaatgcacatatggatgtacctctttatattgtacctgatccaatgttcgatagcttagttgaaagaaacaatatgattctagatgaggcaaaagcaacaattgccaaagatgaatatgtattcaagggttatcactacgcaactgaaagctttgaaagtgaagcgaaaatcatcgaattacattacattactaaaatccatatggctttacgtgatggtaattggaaagatagtgactgtgagttaattcgtaaatggtatgcagattttttggctgatcaagaagataatggtcggcaattaagatatattgctcgttatcttaaagcttggcgagatcaagaatataaagatggtggagggccaagctcaatattgctgatgattatagcaaatcaaaattatcaatatgttaaagatagagatgatcttgctttattgcatgttttaagacatctcccaaaggcattacttgggccagtcaaagaaccttctattcctgaacatacagatgaagacttcaatagaattcctaaagaggaaagacaagaagcgcatgatttagctaaagatttacttagcgcagtttcagtagctattgatattgaatcacctaaaacttcaattggttttctgcgaagccaattcggaaaaagaattcctgacaatgaaagttatgtggttattgagaatgctaatcaggaattgccatatcaagctacgtccccagcaataattgaacctacaaggggtgggtga

SEQ ID NO: 52780 - DNA, 1134 bp, Acinetobacter baumannii
atgtttatgcaacaaaaccaacaaaaatataaattttttttcaaaaaatgggttgaaattcacacaaatggcctcataaaaaaagtaattcatattataagttcaacaaaaatggaaaaatttcaaatcctagctctatcaggagggggatatcgagggttattcactgcaacagttttaaaagaattagagcaagaagctaaagaaaatggacacgactctatagctgattgttttgatctaataaccggtacctctgtcggtggtatagtcgcgttggcaattgcttatggaataaaagttgaagctatcgttgatttgtttaaatcacacggtgataaaatatttcagcctaagccttttcttaaatttacaggttcaaaatactctaatgaatcattgaaaactgtcttagaagagtggttcggagattcaattttaggagatctcaaatgtcctgtagttattcctacaattgatttcacacgaggcagtcctgtaaccctgaaaacaccacataatccaaatctgaaacgtgattggaaattaaaaatagttgatgtagctttagctacatctgcagcgcctacttattttccacgacatccgattggtccaaatgaatatgtagatggtgggctttttgctaatgatcctagcttgattggcttacatgaagctgattatatgtttaaaaagaatattcaagatgtacacattctttcgattggtactttatcgtcaaaaaagcagcttaatccaagtacaaaaaaagatggtggatacctagattggggtgaggggtctatccttaaggcagctccaaatattattgatctagttttgagtagccagcaacaatttatggaacaaatggttaagcatagaatggaaccatttccaaaccaattttacaaaatcgacgaacagatcgtgcaagcatcagcccaatttattggactagatgaaacaagtgatgctgctaagcaagtacttgaaggaaatggaattcaatctgcaaaagttgcattgggcaaagattttatacgaaattattttaatcagccttctagaaaaagagaatggtttgatgggccacaaaaaaatgtagggggagataaattaaatgggtag

SEQ ID NO: 52781 - DNA, 447 bp, Acinetobacter baumannii
gtgacacattcagtcgatcgactcatacataactcacttaaagaaatatgtaaaaaatgtaaagaagatttttcaggcttagcgatagtttgttatgaggatttaagtcaccttccctatataagcttacataaagaacaattttttaccgattttgatttaaaaaatattaatgaaaccttactgagaatatctacttattcttcagcctaccatgatggatttcatttctatgatattaactctaaaaaattaacccatatttctcaattcatctcccctccgttagagtctgtagcatatatgaatattgaaaatatcattccttgcggtgctcgtgagatgacagcttacttaacatcgagtattcaaggaatattttgtgtaggcctgatcagtgccaataagactataaaagtttttaaaaacaactcaattgttaaataa

SEQ ID NO: 52782 - DNA, 321 bp, Acinetobacter baumannii
atgagttttttagtactaaaatttaatgagctaacaaaaataatttacttatttgtaggacttactggtgtatttattggattaatacaatttgttaattggcttgttgctggaagtctaactttactccaatctctaaccccttccattaccgtatcactttttatcttaggcttacttcttagaacagttacaattaagcataagtttttaagtattattattggcaagccaattatacatggattatggaaagggaatttgacgagcaattttgaggtaaatggacaaaaaatggcactgttgcaaatagagatttga

SEQ ID NO: 52783 - DNA, 210 bp, Acinetobacter baumannii
atgcttggttttatgtactacttgcaattgctgggctacgtaatagtccggcaaggcatggaccaagcaatgtttctaacaaagcattatgcggtaccagttgcttggcggcgcataacgatcgactatcacaaccgattaaataaacctgcccagcagctttatagagagtttgttgagtggactaaagaagaatatttgagggcttaa

SEQ ID NO: 52784 - DNA, 198 bp, Acinetobacter baumannii
atgtatttaatgcatatttggacatttaactctatggaaaaaggtgaatctctattcgcctaccaaatacaaaaagaatttgcagatattttggtttcaatttttgataaggaaacacttccacttatttctgatctttcatatgtagattacgatttaagagatggatccgtaaatttgaacaactcctataagtga

SEQ ID NO: 52785 - DNA, 1428 bp, Acinetobacter baumannii
atgagtactgatgcggctcgggataaagccatccggatcgaggcgcaagaagatttatatttcttcacaaggtacatgtttaaggagcgccgtggttataaatggatgcaaaattggcaccacttagaaatctgcgaagctttaatgaaagtttatcgcggagagataaagcggttaattattaacgttccaccacgatattctaaaactgaaattgctgtaattaattttatggcatggtgttttggtaagaatcctgactgtgagtttattcatatcagttactcagcaatgcttgccgcaaataatgcatttcagactcgtaatatggttcaagaaaaggcttataaaaaggtctttcctgatcttaagttacgtgaggatagtaaagctaaggatttctggcgcacagatgcaggcggagtctgctatgcgactggtactggcggtaccattacaggttttggtgcaggcaaaatgcgtgaaggctttggtggttgcatcatcattgatgacccgcataaggccgatgaagccaaatcaaaaactatccgtgaaggtgtaattgactggttccaaaatactctcgagtctcgtactaactcaccagaaacgccaattattgtcattatgcagcgtcttcatgaagatgatttggcaggatggctgctaggtgatagaaaagacggcgttcctgtagctggtggtaacggtgaggtttgggagcatctatgtctttcggctattcaggaagatggatccgcactgtggccagcaaagcacaatatccaaaaattgaggctaatggagcaagccgcaccatatgtatttgccgggcagtaccgacaaatgccatcaccgccagcaggcggtttttttaagcccgacaatattcaaattgttgatgctttgcctgcagatgtagtgaagcaagtaagggcatgggactttggggctaccgaaaatgagggcgactttacagtaggtgtgcgagaagctctaggcgcagatggttttacttacattgtcgatgtaactagaggacagcttggtccagacaatgtgaataagcgcttagaacaaacagcaaaaatagatgggaaaaaagtttctgtgcgcctaccacaagaccctggtcaagctggtaaatcgcaagctagttcatttgtaaagcttcttgcgggttatagcgtgatagccaaaccaatttcaggtgacaagcttacacgggcacaaccatttgcggcccaagttaacgtaggaaatgtacgtatgctcaaaggtgaatggaataaggactttattgatgagcttcgtcattttcctaacggtacacatgatgaccaagtggatgcagcctcagatgcgtttaatgaattacatgaaggttttgaagccttctttgctgatatgggatttgcacgatga

SEQ ID NO: 52786 - DNA, 471 bp, Acinetobacter baumannii
atggcgacactaaaagagcctgtgaaaatctttatagttcagtctcttgcttgtcgtgatacacctcaagaagtggctgaactcgtaaaacaagaatttggcgttgatatagatcgtgttcaagttgcaacttatgaccctacaaaggttgctggtaagaacttaagcaaaaagtatgtcgaactatttgaaaaaaccagagatgagtttgataaaggtttaattgatattccaattgccaataaatactaccgattgaagcaataccaaagacaacttgagaagactagaaacgtcaaaacagccttaaaaattcttgagcaagccgctaaagacattggtggtcaatttactaatcgccaagaaattacaggcaaagacggcggaccagtccaaacagttaattctgaaattcaagttccaatggaagattacttaaaagcacggagggaagtcttagatgagtactga

SEQ ID NO: 52787 - DNA, 642 bp, Acinetobacter baumannii
atggagcagatcagaccatttccgccgactgaatttattgacaaggccgaagaagaggaagcaattcgtattgttccagcgcccgatttaaaaaattgggttgttgctaattacttaactattggtggacctctttataaccccgatcatgatcacatagctgaactgcttcacgataatgaagaatttttagcatttgcttgggcctcttctgcatataaaagcaagcaagctatggtgttaggccagtgcgaaaaagtcatgttcaatgttggtggctggcgcaaagctagacaagagcaacagatgcgagactggttcggctttgtgccaacttacttaataactgtcgatgcttctttttgtgagcgtgcaaatgatacagagttctgttacttgcttgaacatgagctttaccacattggagtgatgagagacgaggacggagaaattgtttatagcgatagttctggtcttcctaagcactatcttgcaggtcatgacgttgaagagtttattggcgtagttaaacgttatggaccaagcaaaaatgttaagcgacttattgaagtcgcaaataatccgccgtttgtttctaatcttgatatttccaaatgctgcggaaactgtgtaatcaattga

SEQ ID NO: 52788 - DNA, 429 bp, Acinetobacter baumannii
atggatgataaagagtacttttggcttacacaaaaaaaagagctcaaaacgaaacccaaatccagaccactgcctaaagctaaagaaaaatatctcgaggccgaagaaaccttatttcaagaactagaagagcatcgaattggttatagaagaaaatttcaatttgaatcaacaaaaaattggcggttcgatttttatattgtgaagttgaatcttcttatagaaattgctggcagtccgtgggcagttggccgaggtggcacaaagatagcaaattcatttaataagtatgatctagcactagaccgaggttatgtatttgagcgtcttgagcctcaccaaattgaatcaggttatgcaatcaactggattaaaagcgaattagcgagaattgaagatggagcagatcagaccatttccgccgactga

SEQ ID NO: 52789 - DNA, 219 bp, Acinetobacter baumannii
atgaatatctgtgttggtggtgaattggatgggcaaaagatagaaaaagaaggaagattgcttaaagcttcagatatcgacccatcttttaaaactgagtactacaagcaagtttttaaccgcgacaatacggtgttccatttctggctgccaattggatctgacttacatgatatgtctgagaaagttctaaatatccttagagcacctaaaaactag

SEQ ID NO: 52790 - DNA, 330 bp, Acinetobacter baumannii
ttgttcttaattacgcaaaagcctgacttgaatggtgaggaaattcgttttttacgtaaagaactaaacttgtcacagaagaatcttgctgggcttttaggagtcagtgagactagtattagacattgggaagctgatcgcggtttaattggtaaacctactgagctattacttcgtgcattatataaagagcatgttcaaggtgatggcaaactaagaagtatgattgagtcattaaatcatcaggaacgaactttagtaccaagtgaaattagtttttcatatggaaataaccattcatggcatcaaaccaattgtgaaatagcttag

SEQ ID NO: 52791 - DNA, 591 bp, Acinetobacter baumannii
atgttagataaagatcagattttagggccaaatgatattcgaacagctctaagaaattgggtttataaaaaatttgaactcaaacaaaacgatattttaattaatgaactcggcttttggaataaagatcctgagtctactgtagattgttcatttcgcgcagatttagccttagcaaatggtcgcttagttggtttcgaaatcaagtcacagaaagatagcttgaagagatggacatctcaaatgatggcttataataatgtttttgatgaaatatggctttgtagccatggcaagcatttacatcgcgctttagatattactgacaagcatataggagttttggcagttgatgactctggttctattactgtcgttcgatatgcagctgaaaacacaaaattaaatttttatgatttatcaggattactttggaaggaagagttactagcctttgcagctttaaataatattatagaggtaaaatcccgaatgacaaaaaatgaaattcgggatattttatcgaaatattcaagtgtaaataaattaaaaccttatcttttacaaaaactcaaagaacgaaagtcttag

SEQ ID NO: 52792 - DNA, 1425 bp, Acinetobacter baumannii
atggcggccggtttcggtgttcgacgatggacgccgcgtctatgtcgtcttcccggccgggatcgtgcagggcgaaatgccgccgatcttcgtgcttgccgcgaacggcgagccgcagatcgtcaattcccgcatccaccagaacgtcctgatcgtggaccgcctgttcggcgcggccgagctgcgccttggcagcggcaaccgccagcagacggtcaggatcgtccgcatcaacccgccgcaggccgccgccgcgcagcccgccagcgcgaccggagactcgccgtcatgacagacaccactatcaccgacaccgccgcgcccatgcggctacgcgccgaaacgccccgcgtcacccgcctgtcccgcaagatgctggcaggcgtcggtgccgtcgcgttgctcggcatcggcggggcgctcatctacgctctccagacccgcgatgcaggaccgggcggcgaagaactctattcgaccgagaaccggcccacggcggacggcctgtccggcttgccgcgcgactataccggcccggttctcggccccgcgctgcccggagatttgggccgacccattctcgacgcacagaaccggggccagcctgtcgcgcccccggccatcgcaacgccagcggtcgaccctgatgaagaacgccgccgcgccgaagaagaagccgcgcgcttgagcaatgtctttttccagtccggcccacgcacgggaatgccggcagaaacagccatgcccggtcttgccggtctcggcctcggcgggcagcccgcgacacaggatcgccacacggctttcctcaatggacccgtggaccggcagaccgtcgccccggaccgcgtcacgccccctgcatcgccttacatccttcaggccggggccgtgatccccgccgcgctcgtcaccggcatccgttccgaccttcccggccagatcaccgcgcaggtgacggagaacgtttatgacagtcccaccggctcgctgctcctgatcccgcagggaacgcgcatcatcggccaatacgatgacggcgtgaccttcggccagcgcagggtgctcttggtgtggaaccgcctgatcctgccgggcggccgttccatcgtccttgagcgcctgccgggcgcggacgccagcggctatgccggccttgaggacggtgttgactaccattggtgggatctgatgaaggccgcagggctgtccacgctgctcgcggtcggcacggagctggcgaccagcgacgaggaccggctgatccgcgccatccgcgacggcgcgcaggacactatcaatcaggcaggccagcagatcatccagcgccagctacaggtcgccccaacgctgaccatccggcccggcttcccggtcagggtaatcgtgacccgcgatctggtattcgagaacgcaggaggttga

SEQ ID NO: 52793 - DNA, 1257 bp, Acinetobacter baumannii
atgctgactgacgctggcatcaaagcactgaagccaaagaataaattatataaggtcgtagaccgtgacggtatgtacgtcgtggtcaatccctcgggggcggtcgtgttccggtatgactaccgcctcaacgggcgtcgggagactttgacgctgggccgctacggcgcttccgacctgtcgctggcgcgggcgcgcgagaaactgatcgacgccaagcgcgccatacttgaaggacggtcgcccgcccgagagaagcaacgcgagaagcgccgcatcaaagaggcaaagagcttcggcgagtttggcgaacgctggttgctggaggcgaagatggccgacagcacccgcgcgatgcgccgctcgatctatgagcgggacattcttccgacctttcggaatcgtctgctgacggaaatcagccccgacgatctccgcgccatgtgcgccaaggtgaaggcacggggagccccggcaacagccgtccacgtccgcgacattgtgaagctcgtttatgccttcgcgatcctgcacggggaaaaggtgccgaacccggccgatgaggttgggcctgcctctatcgcgacctttgttcccaaagaccgctcgctctcgcctgctgaaatccgggtcatgctcggccagcttgagcatgtgccgacgctgccgacgatccgtctcggaatgaagctgttcctgctcaccatggtccgaaagagcgagctacaggatgcgacttgggatgaggtcgatttcgagaacgccgtctggtcgattcccaaggagcggatgaagcgatccaaagcgcacaacgtctatctttcggagcaagcaatcgacattctcattgcgctcaagacctgcgccggcaactcaaaatatctgctgccatcgcgctacgacgcggatgcacccatgtcgcgggcgaccttcaaccgcatcaccaccgctgtcgtcgtgcgggcgaagaaggagggcttgccgctcgaacctttcacggttcacgatctgcgccggacaggctccacgctcctgaacgagctgggcttcaatagtgactggatcgaaaagtgcttggcgcatgaggatgggcgctcgtcccgtggcatctacaacaaggctgaatacgagcaccagcgtcgccatatgatgcaggaatgggcaaacctcgtggacgcttgggtagcgggccagaaatacgttccgacgctctatccgccgtcaatggaccttctggtccctgagcctagcgtttga

SEQ ID NO: 52794 - DNA, 345 bp, Acinetobacter baumannii
atgacaaaattaaaatacacccctgaaatcagagatagagcggttcaattattgattgaatctgaaaaagattatccttctacttgggctgcaatcacagcaattgcgcctaagattggttgtactcctgaaacacttcgtgcctggcatcaaaagcatttagatcagcaaaatccagttaaagtacagcagctttcagaccaagaacgtatcaaacaactcgaacgcgaaaataaagaaataaagaactgcaacgcgccaatgagattctacgtaaagcagccgcttttttcgcccaggcggagctcgaccgcccacacaaataatggtggatttcatccataa

SEQ ID NO: 52795 - DNA, 426 bp, Acinetobacter baumannii
atggtggatttcatccataacaataaagatcgatatggtgttgatgcgatttgtaggattttaccgatcgcagcttcaacctattaccgaactttagatctcgctgacaatccagaacatcgagcgaaacgagatctacatgatgagtatcatgctgaacaaattcaacgaatttggaaagaaagttcaggtcgatatggtgtgcgtaaggtctggcaacaattgaaacgtgaaggttatgttatcgcacgttgtacagttgctcgattgatgcagaagctaggtatacaaggtgtctggcgtggtaagaataaacaaaccacccgtagccgagatgatcaaaaacgagcagctgacttagtgaaacggaattttagtgcagatcagcccgaccaccttacgaaacagtgtttctcaggtcactga

SEQ ID NO: 52796 - DNA, 1200 bp, Acinetobacter baumannii
atgagtcttactgaaattaaagttcgccaagctcattgcaaggaaaaaacttgttttttatcggatgaagatggacttagtctaaaaattgaaccaaatggaaggaagtcttggagttatcgatatacagatccaaaaaccaagaaacgccgccgaattcagttagggctttatcctgatttatccctgaaaaaggcacgacaagtcagggatgattttagagataataatttctgttttgaaaatgaaactgtttctaatttaattacttttcatcaggtagcagaggagtggctacagttcaaacttaaaaatgcattcaatgatttaccacgctgtggtgttctccagttagcagaaaaatgtttacagcatgatatttatccagttcttcaggatatcccttttcaagatattaagcgctatgacctagtttcaataattagaaaaatagagtcacgtcaagttaaagaacctgtcaaaaaagcttgtagttatttgaaccaaatttttgactatgctgtagcaatgggctattgtgaatataatatcgcgcatggtttaaataaaattgctgttaacaataaaatcaagaagaactatccttatttaaaagctgaagacatctcagattttatgcataaattaaaaaagttggatgcacatcccattattaaaaaagcactcatgtttaaattatatactggcgtgcgaggggcagagttgttaatggctgaacctcatcattttgatataaaagataaaatttggagaattccagccttacatattaaacagtttcgacgtaaagttatcctaggacatgaaattccagattttttagttccactttcagatcaggcgttagagatcttaaaagatgcgatgcaatggtcattgggtgaaaaattcatttttgctagtccgcgaaagcaggatcacccgattcattttaatacattaaatatggctatacgtaagatggggtatggaaaacatcaactttcctcccatggattacgttctaccttcagtactattttgaatgactcaggattgttccaagataattggattgaggctcaactttcgcatattgataagaatcgtacacgtgctagctataatcatgcggattatttaattcaacgaactgaaatgatgcagtggtggggagattatttaagtgctgctcagtga

SEQ ID NO: 52797 - DNA, 174 bp, Acinetobacter baumannii
atggtaatcttgaagcatggtggaaatcgatttacgggtacgatttcgaaaggctcacagagtgggaagcaaagtatatcctcaactctcgtaaaacagctgacgaagtccgagatagaatcattgcgtcaaaacaaacgtgatgcttatgcacttatgatgaaaatgaattaa

SEQ ID NO: 52798 - DNA, 939 bp, Acinetobacter baumannii
atgagtaacatagtatataaagataataatttggttgaagcatcgtattcactaaatctatctgagcaaaggctaatattaattgcgatcattgctgctcgagaaattgagaaagaacttacttctgatactatacttacgattcatgcttctgaatacatgaaacagtttaatttaggacgtcaagcatcttatgaagcgttacaatctgcatgtgataatctttttgaacggcatttgaattataaagcagtagatcctataactggaaaaataggaatatacaaaagtaggtgggtttcaaaagttggttatgttaaggaagagggatgcgtccaactaatttttgcaccagatattatccccttatttgtaaaacttgaagaaaagttcacaagatatgaacttaaacaaatctcaccacttacaagcatttatgctattcgcctgtatgagttactcatacgttggagatcaactggtaagttatatatttctatagatgagcttagatcaaaactcggattgatagaagatgaatataaaaagatgggagactttaaaaaaagggttcttaccgtagctttaaatcaaattaacaaatttacggatattactgtttcttatatacaaaaaaaggagggaagaaatatttcagaattacatttcatgtttgaagaaaaagaacaaaataaaacgagtacaagtgctcctttagagccaacttataaattgacagctaagcaatgtatattctttgctaaaaagctatgtgatattactaactatccaaaatttggtaatgatttcgcacatcgtggagagactctagaagactttcaggaaaggatatcaagtgatcttcttgatagcgataatgttagaaagtatttttcttatttgttagaagttggttatgctcctaaatacaagaagtaa

SEQ ID NO: 52799 - DNA, 639 bp, Acinetobacter baumannii
atgattatcttagttggtggtgaaaaaggcggtgctggtaaaagctgtttagctcaaaatcttgcagtttacttacaacaaagtcaaagagacgtcctcttattagatgctgaccctcaaggaacaacaacagattgggtcaaagaaagagatgaaaacgatgaattaaataatattccatcagtacaagcatcagggaatatacgttcagttttaaaagatttagataaaagataccaagatattatcattgatgcaggtggacaggattctgaagcattacgttcagcaatgactatagctacacatatgttattgccgtttagacccaaacgaagagatctaaaaactttagatcatatggaacaagttttaaaattagcaaagacagtaaatccaaatctgaaagctagagcaattattactcagtgtccaactcttccttctcaagttcaaagaattttagatgcaaaagaggcatgcaaatcatttggtattgatgcattgaattcaatcacaacaaatcgaaatgtttatgatgatgcagatgaaaatgggctttcggtttttgaagtaaatagtgatcctaaagcgaaagctgaaattgaaagtattgcaagagagtttttaggagtataa

SEQ ID NO: 52800 - DNA, 288 bp, Acinetobacter baumannii
atggctggtttaactgggctaaacaaaaaacctgaacctactgaacaagataaaatgttagatgcatttatatctggtgcagaaaagagggtaaaggctttagaatcaagtgaaaaaaaatttattcgttacactttttctctcaatgaagatattagtaaactaattgatgagctggttgtaaaagggcaaaatgcaagaataaatcgttcaagtattgttcgagcagctatagaaaatttatcgacatatagtgcagatgaattaaaagaaatattaaataaataa

SEQ ID NO: 52801 - DNA, 423 bp, Acinetobacter baumannii
atggacttaggtattaaagaaaatgatttttttaagatgatctctataacatttcatccaattgctttgaactgtgaaatagataagcactttttagatatagcaacggataagactattcttattgaattagaacaggctgaaaaagaaaaattaaaaaatctgagtacaaaggtaaatgttttttataaaaaggagaatagctattttttcaatccagaattcagtgaaatggcgagtaattatttttcagaagatgtgattaccgaaattgacccatcaagaatttacagtcatgaaaaatatattcaatctttactcacccaaagagagattgatttaaaaacccgatattaccccgtgatatatttacaagaagatgactctaaaattatgattaataatgttattattattttttag

SEQ ID NO: 52802 - DNA, 699 bp, Acinetobacter baumannii
ttgaatctcaatagtttacctatcaatgcaaccatgcttgccttaagaaattctattactaattacgatgattggataaaagttttatatatggatattgatgaagtctactcatcttgtctagacagtactgaaatattcatgaaattatctgagacagaaataagttccatgataggtatgggacttaaaatgagattctataatgtacaagttgattcagataaaaacggcaatgcggatttaagtgttcaatcaggttcatttctatggattggtgaagctaagattgtcaacaatagtacaaaaacagattttgaatatctccacggcggattgaagcaactactaacccgttatagtaaaggacaaggcaatgctgttaatggctctcttttaatctatcttaagccaaatagcagatttacaaacgaaaataattttatgaatgactggataagttacgtgcaagaacatgaatcttcatatgtaactcactatcaatgtactcagaaaaatacgaatagtattactgaccataagcatcctacttcaggtaatgattattccgtaagacacatgccccttacacttcatcacctacctgaagatagcagtggaaaagatgcaaaaaaatatgcagaaagacgtagtgtatatgaaagtgcaagtattggtccaagcaaggaaatcctttaa

SEQ ID NO: 52803 - DNA, 441 bp, Acinetobacter baumannii
atgaaaaaattcatagaaaaagttaataatgttcttgctattctaaggtcagatcataatagtaatattcagaaatattcactaaatattattagttatgtagaaacattagattatttagaagaacaagaatttattttctctttcttattcaaagtatcaaaagcaactgaagatgatttagaaaacttcagtaatgccgtttatctgttagtaaatgaacaagttaatttctttgatcaaaaatttcattattacaatgagctaaatgatgactgggaaccctattcatcggaactattttcaaaaagtttgattaacaataatttcacccatcctataaatggtaaaagaatttctaaaaatgaatattttgatctagtccaaccttattttgtagcatctgatgaattgttgggagaaagttttgaatctcaatag

SEQ ID NO: 52804 - DNA, 666 bp, Acinetobacter baumannii
atgagcatttttgtttaccatgatcaacgttcatatgttttccgaagtaaagaagaatcttccacaattattaattcgtttaatgaagagctagatccattagatgaaaaccaagaaatacttgaattaatcaaagtaattaaagtaacaatcccaacttttgattttgttgtcttagacaagagactaaaaatattaatcattggctttgaccttgcatatgtattccctaaagcaatgattaataaaactttagatcaattggaaaacaagatcaaaaagattaaaggtcttagtcatataaaccgattgaattttagaaatgccattgagaatatggaaacagaaacagatggtattgtttttggacatgcattttgctcttcaggcggaacatttaatcatctaggtaaaacttcctcaaaaagagctgacgtaagaaaggatagtttttttacaaaaggctcaacaggtgaaatccttgattattatggcattagaaaacgctacaatacaggaaaaagagattgtgccgttacagtagcattatcatatagagagtataaagcttctgctttaactcctatttacgtcgcaatattagattatatgcaagatgctaatgacttaagatactgctgtaaaaaacttttagataattcataa

SEQ ID NO: 52805 - DNA, 762 bp, Acinetobacter baumannii
atgaatactcttgctgaacgacttaggtatgccatggaagttttgccacctaaaaagattaaaggtgttgagcttgctcgtgcagtaggagttaaacctccttctgtgagtgattggctgtctggaaaatccaaaacaatggaaggtgaaaatttattacgtgcctcaaaatttttgaatgttaatccttcatggcttgcatctggcacgggagagattcaatcaagcacgagagataaatttaaacaactggatatcgaagagttcaaaaagaaatacaacattagtgatagtgatgaagctcttttattttcaacaattatcgaaaaaccgtttatcccatcatctaagcgttgggttcctgttaaggcttactccaagatgggcatggatggctatttcacagatatgggttatgaaggcaatgctggagatgggtatgttccaactcactcagcaggaccaagagcctatggcattaaaggcactggcgactcaatgtttccagcaattcgtaatggctggtatgttgtatgcgaccctgatgcagatcttgtgccgacagaatttgtacaggtatgtttgaaagatggaagatgcaccattaaagaatttattggaatcaataacgatgtattaagcctaatagcagtaaatggcggtgagcgccttacctttcctatggatgaggtggaaagtattactgctatcacagatatcgttccgcctagccagcatagacaagagtacccatacggttaa

SEQ ID NO: 52806 - DNA, 381 bp, Acinetobacter baumannii
atgagctttatcactgaacaagaagcgatagaacatgttgcaggctttgatgctttatctgctagtgataaggctcaataccttcagatgtcagaagcttatctattagcacgtaacgttaagccttatgaagacgttacccaagttcctgaacctctaaaaactgcctcatatcaaataatcaagggcattatgaaaggtgatctatatcaagggcaggaacaggcactaaaacgtaagaaagtcaaagctgatacggttgaaactgaaaaagaatatcaggacggatcagtaaagcttagtgcgattgagcaattcattcttgatttgattaagccttacagcaaacgaaaagctgtattttttgtcaggaaaatctaa

SEQ ID NO: 52807 - DNA, 951 bp, Acinetobacter baumannii
atggctgagacaaaaattgctgatgtaatcgtacctgagttatttactccgtacgtattaaataagactgccgagagatctgcattatggcagtcaggcattgttggggagcttgatgaaaaagtcgcttttggtacagaaggcggtactacagtaaatattcctttctggaatgatttaagcggtgaatccgaagtactttcagatggtaaagctcttggggtaaataacatcactgctggtaaagatattgctattttgcatgcccgtggtaaggcttggggtgcaaatgatttgtctaaagcattatctggtgatgacccattgggtgcgattgctgatcttgtagcagattactgggctcgtgaatttcaggggtttaccgtaaatacacttaaaggtgtatttgggtctgcaagcatggcaggtaatacccatgacatttcggctggtactggagcagcagccgtaattgatggtcattcatttatcgatgcatcttataaactgggtgatgctgttgataaattaacagcgatttcaatgcactcattcacaatggcagcactagccaagcaaggtttaattgaaactgtgcgtgatgctgatggtgtggtgctttacaaaacttttatggatcgccgtgtgattgtagatgacggcatgccagttgaaggcgacgtatttacttcttacttgtttggttatggcgcgattggtttccaagatattggggcaccggttggtgtagaaacagaccgtgatagccttgctggtactgacattcttattaaccgccgtcactttgtactacatcctcgtggcattaaatgggcaggtgatacaggtattgcacctaataatgccggtcttgctacagctgcaaactgggaacgtgtttacgatcctaaacagatccgtattgtggcattcaagcacaagatcaaataa

SEQ ID NO: 52808 - DNA, 792 bp, Acinetobacter baumannii
atgtcattgccatttattgttgattcacttgatgcaatcaaagaagaacaccgagctttatatgtcgaggaaaacgggaagtttcgccttgatttagaaggctatgaagatccaaaaggtttgaaatctgcccttcaaagcgagcgtgaggctgcaagaactgcaaatcgacaacttcaggaacttcaaaaacaatttgagggtattgatcctgaaattgttaagaaagtctttgctcaacttgaccaagatgaagaggctaaattaattgcagacggcaaagttaatgaagtgattcagaagcgtaccgagaagatgcgcgaagaacatgaaaaattactgaaagccgaaaaagagcgtgctgataaagccgaagcttatgcacaaaagttcaagcaatcagtaattcaaagccaaattgtacaggctgctgttgagcttgaagcattgcctgaagctactgccgatattgcctttttagctcagtcaaagtttgcattagatgaaaacggcaaagctgtggcagttgatgaaaacggggaagtagtcattggtaaagatggtcagacaccgatgactccaaaagaatgggttgaatctctacgtgagcaaaaaccgtattactggcctaagcctaatggcatgggtgcacctggtagcaacaattcaaaaagtcagccagacattctcaaagccgatggctcggtaaatatgaccaaattagcgcaattacgaaatgaaaatccgcaactagctaaagagctagcggcaaaacacggtattaaactttaa

SEQ ID NO: 52809 - DNA, 819 bp, Acinetobacter baumannii
gtgcaaactcgaacacccttagatggtcgcttagcacttgaagttgcgttgaaaattcttcaaattggttgtggtgctattggcggttatttaacagattctctatttaaagtaggtgcgggaattggagaaaattcaaaattaactttagttgattctgatagtttaggtagagacaatttaggaagacatttcctaaatgcatcttatcttggagtaaataaagcagaagcattaaaactctatttagagtttaattatagaaagtatttagtaaatgataaattgaatatttcatgtgaaacgatcaatgtaaaaagtctttccagtaacttttatgatgagtttgatgtagtaattgatgctactggtaaatttgaagttgctgaatatttaaatgaattaaataaagaacgtagtcaagcgaagcaatttccaatattacatttatggatttttgcaaatggagaatgtgtacaagcattctggaatagccataaatccttggaaaataaaggtggttgccattattgcctttcctcactttggcagggccaaccgaaagaattttatccgcttccagataagactagagaaacaactataagaattactcgtccgtgtgctaattatacaccatatacaattagctcaagcctaaacgtagctagtatgggaatcgaaatactcttagcatgggctggaaacactcttaaatctaattattttactcattattcttcaactctatctgaaaatcgaaatatccatctaaaaaatgaagtattcaaacaattaaattgtcctttttgtaaataa

SEQ ID NO: 52810 - DNA, 1266 bp, Acinetobacter baumannii
atgactaattctactattttgaatgctcatcggggttatcgagctctagaagatggttttttaagagcattaataccttcccaagatactattaaggaacttaacgaatgtcgtaaaaaaattagatcttgcttgaaatctggattacgtgattttattgaagattacaatccagaggggtcaaatccaaagttccgtatacaaggttcttgggcttatggattatgtaatttacctgctcatagaggacaagaacttgatcttgattatggagtgtatttatcagctgaagtttttaatgaatgtgaagaatattctaaagaaactttgaaaagttatttttcaaccgtcgaaaatcttttagacgaattggcaagtgaggaaggctggcagttagattctacagataatatgaattgtatccgattacttgtaaattcctatacacatctagatgtgccagtttatatagttcctaaagatatgtttgattcacttgaagagtatagtgagcttcaagttggtttacgcaaaaaacagataggattggaagattataatttatatgactctataactatggacactgcttctatatctgagagttttaaattcgaaagccatgggttactttatgaagaaaagttcaaagatcacattgaacttgaaaatattaaacggattacaatggctcaacgcgatggtagttttcgcgagagtgattgcgaacaagtaagacaatggtttttaaattttattgccaaacaagcagatgaaggaaaccagctaagatttatttgtagatacctaaaagcatggcgcgattatcattggattaaaggtggtggaccaagttcaatcctactcatggttatagcatgccaaaattatgagtttattgagaaacgtgatgaccttgcccttttaaatattttgagcattttacccgaggctcttaaaaacccagtatatgaaagctcgattccagaccatgaaaatgaagattttaatcgaatcaaacaagaaaatcgccaatattgctctaataaagctacagagtttttaaatttaattaatgatagtttaaatgcaaaagagaaaaaatattgtctaagatttcacattgaagcctttggacaacgttacccttataatgaggattacattgaaatatctaaagtaccaaccactgaacaagatatatttaagcagactttgagcagctctcaaacagcgaaagttttaccttcagtgacaagtggttga

SEQ ID NO: 52811 - DNA, 501 bp, Acinetobacter baumannii
atggggtatgtcacatttatagatgaaaaatccgatttttacatacgctttaatttagatattttgtctaaattggattctttccggcaggttaaacaaaatatgcccgaggctggtggagttctaataggtgaagtatatggaaacaatggattttggattaaagatgtgacattcccttgcagaaatgatgtttcatcaagaattagatttattagacaagatactaaacaccaagaaatagttgatgaatggcacacgaagtctaatggaactatgcaatatttaggagaatggcattctcatccgcaagagaagccaagcccatctttaatagatatagaaagttggcgtaatttagccttaacaatggattctcaaatgggaaatcaaccttttttactattaatactaagtatgggagatatccataaagattggattgcgatttataatgaaaaaaatggatataaagttttaaaaagaatctcactactataa

SEQ ID NO: 52812 - DNA, 1137 bp, Acinetobacter baumannii
atgcgtcagtgggtgttgagcttcccgtttcagctgcgtttcctgtttgccagccggcccgagatcatggggtgggtgctgggcatcgtttaccgcgtcattgccacgcacctggtcaagaaagcgggccatacccaccaagtggccaagacgggcgcggtcaccctgatccagcgttttggatcggcgctcaatctgaatgttcacttccacatgctgtttctcgacggtgtgtatgtcgagcaatcccacggctcagcgcgtttccgctgggtcaaggcgccgaccagcccagagctcacccagctgacgcacaccatcgcccaccgggtgggtcgctatctggaacggcaaggcctgctggaacgggatgtcgaaaacagctatctggcctcggatgcggtggatgacgacccgatgacacccctgctggggcactcgatcacttaccgtatcgctgtcggttcacaggcggggcgaaaggtgttcactttgcaaactctgccgaccagtggtgatccgttcggtgacgggattggcaaggtagccgggtccagcctgcacgccggcgtggcggccagggccgatgaacgcaagaagctcgaacggctgtgccggtacatcagccgcccggcggtatccgagaagcggctgtcgttaacacgaggcggcaacgtgcgctaccagctcaagacgccgtaccgggacggcaccacgcacgtcattttcgaaccattggatttcattgcaaggctggccgccctggtaccgaagcccagagtcaacctaacccgcttccacggggtgttcgcacccaacagtcggcaccgggcgttggtcacgccggcaaaacggggcaggggcaacaaggtcagggtggctgatgaaccggcaacaccagcacaacggcgagcgtcgatgacatgggcgcaacggctcaagcgtgttttcaatatcgacatcgagacctgcagcggctgcggcggcgccatgaaagtcatcgcctgcattgaagaccctatagtgatcaagcagatccttgatcacctgaagcacaaagccgaaaccagcgggaccagggcgttacccgaaagccgggcgccaccggctgagctgctcctgggtctgtttgactga

SEQ ID NO: 52813 - DNA, 711 bp, Acinetobacter baumannii
atgaatttaaatctccttgatgaagaatcaatccaaccttctgaacccacgccatgtgattttttcaaaggtgaaaatgctatcaaaaaagctaaacagttaggattacctgatctcgagttagtcagaaacgcaattatgatcggtgatgctgactatagaacaaatactcactataaccgtgcacgctttattgcacgatggggaaaaattggagaacagattgctttactgcttcgacaatctgatcctgcttggatattccacaatgacagccagccaagaattgagaatacagtaaagaaaatacaaattatctttatgagcgggaatattgcattggggttagctgatcaagttgtatcagcacactgtgaaaaaggattaatgacattaaataatattaaggagaatcagtctgcttatgatgatgagacaaaattgagaacatggattttatactttccttcagcatcacatccagcctataaagacattgatatcccaaatattccttttgaatttgcatacccaactagcttcgtacaggacttaaaagcgaaaaaaatttcaattttaccaagtgaccatacttgcagaattgcatttgaaatagataatacagttcctgtaaaaactgatcctaagccagtattggaaccatctaatgaaattaaaccagatgattttgatattcagcttgtagtttaa

SEQ ID NO: 52814 - DNA, 1107 bp, Acinetobacter baumannii
gtgtttaataaagatcgtttacgtattgctaaagaattacgaggacttagcaataccgatttcgcagaaaaattgagttgctctatctctaaggtaaagcaacttttagacgtggataaagaaatcaatgaaaatgatcaagatgatatatgccgtgtattaaatttacccaagtcattctttgcaggtaatgacacacaaccacatgaaacagaccaaatcttctatagatcggttgctcgtattaaagcacagcatagaaaagctaatgaggcatatactcttttagcaataaatattaacaagtacttaaatcagaaagtaaagttacctacttttcaccgtcctgatttagatattactgagtttttgggtgaatctaagtatgccgatcacctagcgtcagagttgagaggtttatgggctttaggtaatcaacctattaataacattgtttcgttgtgtgagctaaagggaatccgtgtctttagattaccgactgaaattcgagaaattgatgcactatctttttttgatgatgaaagtggtagccctttcatatttctaaatacatttaagtctgccgaaagagcccgcttcgattgtgcacacgaacttggtcatatcgttatgcatacgcataacaaaaaaattcgtgtcgagaaagataatcgtgttctcgaaactgaagcggatcaattttcatctgaatttttaatgccaacagatgcatttctttctactgctccacgctatttttcactagaaaatatgattgagtataaaaagatttggcgaacatccctgaaggctattaactataaagctcacaagctgggattagttagtgattgggttaatcgtagtaactctataaagatcaattcgttgggctacaacattaatgaacctgaagaaactcatcgagatgagagtttgatgttgcccaaaattatctctgttttagcctcacaaccatcttttgataaaaataaaatgcttgatgaaattggaatctctgaagaagattttaatcaattaacatttgatgctttagttaaagttgagcccccgaagaaaaaacataagttatatattgtcgagtaa

SEQ ID NO: 52815 - DNA, 1149 bp, Acinetobacter baumannii
atggcaaatcttgtatttaaatttaattgggaccatcgaccgttccagttgaactcagctcagggcaagcggcaatttatgctgccattcgcttccggcattcccaatttaagccctaacttttcacaagttcaaggaactgcagcaatctctcaaggtggtacaggggcaatcactgcagcagaagctcgatcaaatctaggagctgctgaaaaaggggtgaatactgacattactgaaatgaaaggtttaactactccactttcaatagcacaagggggaacgggtgcaaactccgcaattagtgcgaaagttgcattaggtctgggtgatgctggtgcattgggatattcagcaaatgcggttgcttcgctttttaataagacacttgtttccgattgggtgtctgttttagggcttaatagatttgccaacatttcacatggtgactggcaaggcgggagtacagcaaactctctctatatgcctatgcgttatgggacattgatgggctatcacgccaatgattcaatcggtacttattcatggcaattcttcaaaggtgtgcaagggcaccaaatgtcatatcgatatggtgctggatctgatgcatggtcagcatgggggcatttaaagaccagcttcaatacatcagttgatgcaaacggattcttaaaatcagcctcaccagtagttaagttgtttaacgaccatatcgaactcaatagtgatgcagaaaaacagccgattgaatttaagaaagttgatgtaggcgattatttacttaaaggctctttaggctttgcccaagaaggttggtacatcgaagtacccaaagacgcaaatggaaacacgatcgtagctgtggtgtatgacacattggaaaacggtgatctatctattaagacttataaacgtaagtttgattttgaacttgctgcagttgttgcagacttggaattacctatagatattccagaaggtcgctggattgatattcgcttgcatgaagaacctgaaccagagcctgagccacctacaactgaaacaccttttgatttccagcctacaaacttatccgaggctgtggctgctgcaatggctggggtggaaccgccggaagtctcagataccgatgaaacactttaa

SEQ ID NO: 52816 - DNA, 354 bp, Acinetobacter baumannii
atgagcaatttcgtttttaagcgtggtgacactttcaatttaaaccttcagttagtcgatatggatgaagccctgcaatatccacctgatgatgttcgccgtgcaattgatctcactggttatacattcacttcacaagttaaagctttggctgatggtgcagctgtggccacgttaacttgtactgcattaagtcaaagtacacagaagggatggctgaatattaaatcaggtacaagcacagcagcatggccacttggtttatgtcagatggatattaaagctgtggtgagtggcactacacagcacactgaaactttgactttccaagtgattgacggggtaacagcataa

SEQ ID NO: 52817 - DNA, 444 bp, Acinetobacter baumannii
atggcctcacgtataactttatttctcaaaagtacggtggctaatatggcaatgaatttagagcagacaaggcaagctattatcgatcgtatgcaaagctttactggtatttcccaggaacggattcagtatccaaatgcaccaggctttactgtaccaacaaaaggtgtatggtgccgcttaacgattgcaggcggtccgagttttacttcaggtattgcagataagccatgtactcgccgtaccggtaatatcatggttcaatgttttgatcgattgcataccggagaaaaagcactaacagttcttagtgatgatttgctggcacattttgagcatttttcatttgaggatttagagtgtttgaatggcgaatcaatttatgcaggtaaagatgctgacttcattcaatacaatgtatcaataagttttttagttaactaa

SEQ ID NO: 52818 - DNA, 369 bp, Acinetobacter baumannii
atgggatggaaggggaaaaagccgactagttttagtcttgaggtatctaaagcagcagaagaccatgtgaagcatattgtcatggatgctgtgcaatccttggttaatctaagtcctgttgatactggggcttatcgtgcttcacatatggtttcggttggatctggtgactatggcatacgtggacctgaaactaacccaattcaagatgctgctattcaagctgtaaagattaaattgggcaatttggtctacatacagaacaaccaaccttatgctgagcgcttggaaaacggttggtctgatcaagcgccacaaggtatttatggcctcacgtataactttatttctcaaaagtacggtggctaa

SEQ ID NO: 52819 - DNA, 189 bp, Acinetobacter baumannii
atgaaacaaaaccctattcctagtcaaaccacatcacgcctatatcaacacccgactgttaaagaacagcgtccttctcgtttcgccacaattaaagcgaacgttatcgacttccttatattcattgccctttcattcgttctttgggtgattgctgtagccgctgcatcttggatgatgggaggctaa

SEQ ID NO: 52820 - DNA, 315 bp, Acinetobacter baumannii
atgtattatcttgctttatattccgtgattaataaattttctgatgaagtaattccaccattgttaattgatacaccgaatcaacaagagcaatcccttgaaaactaccagaaaatacttgattccttagttaatgatttacccccaaatactcaattatttttaggtgcaatggaacatcctcttttagaaaaatttaaagatctttgttcagaaacaattgaattacacaactctcataagttagtaagcaattcaaattatgacctttattttaacgaaatggagaactatctatctaaatttttgatttag

SEQ ID NO: 52821 - DNA, 213 bp, Acinetobacter baumannii
atgctcgtcccgttccggccccgcccacaccgccgaaagcgggatcatgtgggcgagattcaaagtgctgatgggtggctggcggacgttcgcgtaagcgtgtccgggcaggctgccgagccatgcgtcaaccgcattgacggtttcggccatggcggtgaagtcgcggccctgaacgatcttctcgaccaggcgcagcttctcgtcggctag

SEQ ID NO: 52822 - DNA, 1332 bp, Acinetobacter baumannii
gtgcatagttactcgggtcatagacgatgcggccgaagccgaattgcgcatgggccgggcttgtcagcatgggcgaaagcgcgacaggaacggcgagcgccagcgcgagggccgaggccccgacgatcttgggataggtcatggaagaatctcctctgtggggtgggtatcgagccgagccggcgcggcgtattccggccggtcggcaagattggtgaggttcgggatcaggtcggccgcccactcgacaccgcgctcgcgcagccagccggcgaggaagccgtcgcttccgtgttcggcatggatgcgcgcgatttcggtctgatcggatttcgaggatgcggcgcagagcgcaaggccgacttcggacaggccaagctcgaacaggcgattgcccctgcggctttggcagtaataatcccgcttgggcgtggcccgtgcaaggatttcgatctgcctgtcattgaggccgaagcggcgatagatggccgtgatctgcggttcgatggcccgctcgttcggcagcaagagccgcgtcgggcagctctcgatgatggcgggcgcgatgttgctgccgtctatgtcggacaggctttgcgtggcgaagatgacgcttgcgttctttttgcggagcgttttcagccattcgcggagctggccggcgaacccttcgtcgtcgagcgcaagccaaccctcgtcgatgatgagcagcgtggggcggccgtcgagccggtcgccgatgctatggaacaggtaggacagcacggccggcgctgcgccagttccgacaaggccctcgatctcgaacgcctgcacgtccgccgatcccaaatgctctgtctcggcgtcgagcagccggccataggcaccgccgacgcagaacggccggagcgcctgtttcagatcgttggattgcaacagcaccgcaaggccggtgatcgtgcgttcctcgaccggggccgaggcgagcgaagtcagcgccgtccaaagatgctccttcacctcgggcgtgatggcgatgccttcgcgcatgaggatggcggcaatccagtccgccgcccatgcgcgttcataggtgtcgtggatgcgggcaagtggctggagcgaaacggacgcctcgtctccttccgtgaggccaccgcccaaatcgtgccaatccccgcccatggcgagcgcggcggcgcggatactgcccccgaagtcgaaggcgaacacctgcgaacctgcatagcgccggaactgcaaggccatgagcgccagcaacacggatttgcccgcgcccgtggggccaacgacaagggtgtggcctacgtcgccgacatgcaaacttag

SEQ ID NO: 52823 - DNA, 363 bp, Acinetobacter baumannii
atgaaaagtcatgatcatttgcttgataagcaatacgatgatgaacactacaactgtgttcatttcgctcatgaagctgcattggatctatatggaattgatcgatctgaagcacttgaactctttatgcagcctaagggcaaaattactttcctgccatcacggttaaaacttttaaatccgctgcccatgcccaaggaaggttgcatagtcgccttccatccgagacaaagaaataagcccccacatgtggggctttttcgtttgggccatgttctgcatttgatggaaggcggagttacttatttagcggaagacgtcattaaagcgatggggtttagtcgggtcagttactatgattaa

SEQ ID NO: 52824 - DNA, 318 bp, Acinetobacter baumannii
atggctcaagcagaaacagtaacagaacttacgccatatttagaatattggagcagcggcatctatatgtttaagtgccccgggtgtaaatatttacatccttttcatgtaaaagagggcgcacattataatggtagtatctggaactttaatggtgatgttgaaaagccaacatttacaccttcattactagttaatgatcattacccagcaagccgatgccatctgtttttgactgaggggaagattcaattcttgactgattgtcatcatgagctcgctggcttgaccgttgatatggtgccaatcgatgtttaa

SEQ ID NO: 52825 - DNA, 600 bp, Acinetobacter baumannii
ttgactactagaatatatgttcgtgccagtacaaaagatcaagatgctgaacgggcattagatgacttaagagcattttctaaatctttaaaacaggatgtgaaagaatacgtagaaaatatgtctggaacaaaacttgagagacctatactaaatcgcttattaaatgaatcagagcatggagatactttacttgttgaaagtgtagatagattatctagactttctcaaattgactttgaagtgttgaaaggacgtataaaagaaaagggattgaagctagttgtagctgatttaccaactacacatatgctcattagctcaaacgatatcattacaagttctattctgaaccttgtaaacaacatgcttatagacttgttggcgactatggctcgcttagacaatgacaaacgtagggaacgtattaaacaaggcttggaaagaagtggatacaagccaagtggtaagaaagctgatattgctaaacattttagaattaaagagttagctgataaaggtttaactaaagaagaaatagcaaaggccgttaattgtggcgtagctactatttatagagtattaaaaaatgaaaaataa

SEQ ID NO: 52826 - DNA, 225 bp, Acinetobacter baumannii
atggaagtgaataatgcgcctcaaaatatagataaaaaaatcacttgtgatatctgtgatagagtttctttagatagttatggaattttaaaaacggtttctcaaaaagcaactcaggagaaaagtgaagaaaacgaaatttacttgtgttcatcttgcctttttagcttaagagcccacctaagaacacaaaaaaaattacttcatctattcgatgaaaattaa

SEQ ID NO: 52827 - DNA, 489 bp, Acinetobacter baumannii
atgacaaaaggagagattcttcaaagatcatttgttcgctttcttctaggcaaaaactttcagaatcatgaatttcagcaaatctggactacctttgtacaagaacgaccaagtggtttaaatactgaagagaacttccatttcatttataatttttttgaaaggtctttagcaaaggagtattttatcttggatacatctcatgttcctcctagatacagttcagcctataccaagcgccaattaatgaaagaaaatttaccagaggagcttcgaccatcttatgactcaatttatcaaaaggtgcaaaccctaaaaaaagctattaaacaaaaagagttagaaattgaatttttaaaagaatacagtagagaatttcctaaaattcaatttgaaattgaatcgttaattcatgaaaaagaacgtgagtatcttgcgttagaatcaaatatgaatgcacttgatgcaatctttaaagtatttaactaa

SEQ ID NO: 52828 - DNA, 240 bp, Acinetobacter baumannii
atgagctcaatacatgacccgagatatattggtctaatacattgtttaatatcgatacgtgaggaaagaaatattactcaggtacaggtagcctcatcgttgaaaaaacatcaatcctatgtggctaaagttgaaaatttagatagaagattggatatcattgaattaaaagattggttgaatgcacttggtgtaaaatttgctgaatttattagtatttcaaatatagaaaatatttaa

SEQ ID NO: 52829 - DNA, 600 bp, Acinetobacter baumannii
atgaataaactcctcgaagtaaattttaattttgatacggatatggttatatcagtcggagacctagttgatagaggtaaagacagcttcaaatgtgttggactagtcaaaaaatcatggtttaaagctatacgtggcaaccatgaacaaatgtgcttagaagcatccattgcacctgaaatgaaagagtttcattgtaaacatgggggagagtggctatacgaacttacaatgcaaaactataaagaagttttaaatatctgcctaaatttacctattgtgctagaaattgcttttagggggaaaaagtatggatttgtgcacgcagatattaagcaaaatgattggtcagagtttaaaaataatatcttaaagaaagactatttttctgaatcaaactcttctacattacaaagtgcgctatggggaagaagtagaatattggcgaagcattcgctcaaatatcaagaaataataggtattcatgaagtgtacttaggatatacagttgtggattttccagtttataaagacaattgtatttatattgacacaggggcagtttttggtaaacaactaacggttctagaaattaaataa

SEQ ID NO: 52830 - DNA, 1806 bp, Acinetobacter baumannii
atgcgctctacgccctgttccacagcagctggtgccgggcggcgatggaagccgccggcacgccgcttggcggcggcgcactcaaactcgaagcgacgcacatccgtcaggtgccgattcccaccttatcggaccgcgactgcgagaaacttgccgcgctcggacagcagctggctgcggacgtgccctcagcccggcaccagatcgacatattcatcctggctgcttcgttgcccggtatggataaaaaccacctcaaagacctggcgaaccacatcgattcccgccttgaggccgcgtgcgccgcccgccaaaggaccgcccatgacagctgatattggccgcattcgtgaaactatcgcgcgctgccgcatgctgcgggatgctggtcatgtcgaggcggtgctgcgcagcgagttccaggggcgattgcggcttatgttcccggacaccgcgcacgagacctggatcaacaactacaccgaaggaacggaagcccataccaaggtgggcacaggatcgggcaaggccgcatcccggttcatcgacaatctcgtgggttcgaccacgattgagtacgaatccgacctgcggaacaccgccaagcgcgataccggctacgggcaggtgcaagagcaggcggcggggcttgtccgcgcgggcatgccggtttcaacggtccggggcgtgttgtcagacacagtcgaatggtacgcctatgatgccgagcttgcagcgggggtcgatccatcgtcctgcaccgctgccgacatcacgctcattgttatcgacgaactcaagctgcccgatgacagcgtcctgtccgccgagcagctcggcggctttatcaaaaagcatctggcgcgcgaacagtcgcggccgttgcggtccgaattccttgcctccgaccttggcatggactctgccgcatataagagcagcgccgggcctttgtcgttgctggtggacgaggggcgcaaggccgatccgtcggcgagcctcgcctccgatctctggtcgcagttcgtcgatcatctggaagggccggcaggcaccttccgcaccgccgcgtatgtcgatgaagcttacgtgactcttctcgcgcggcttctgagcgcgaacgtgctgacaggcaaggcggtgctcagcacggacgacgagctgaaaataattctgaatggggagttcttccgcaacaattttcaactggagaatgtggtcgagcaggattatttcggctggcttctcggcccgtcctacatcgaccgccttgtcgccgtggcccgcgctctccagcgcgatctctatgcttacgatttcggctggtatcccgaagaggatttgttcggccgtttgatggcgcagctcgcccgccgtagccagcgcaagttgctcggccaggaatggaccccgcactggctcgcccgtctgcttgccgaccgttgcatcgacggcctcccgaacggggaaagcccccggatcgtcgatatgtgctgtgggtccgggaccatgctcgcggaaatcataaaggccacacgaatacggttcggcttttccaccatcgaacagcttgaagacgtagcaaccggcttcgacatcgacccgctggccgtcagtctcgccaaaacaacttgggtcgtcagtctctcggctgagatcaaggcggcgacaaagcccatcgtcatcccggtctatcatgcggactcgctgttcgccgtcacgccggtttccgcgtcagttccgctggtcggcgaaagcgataccattccgataggcactgttgcaaatagagatttgagtcgatga

SEQ ID NO: 52831 - DNA, 633 bp, Acinetobacter baumannii
atgacgaattattttgagagtcccttcaaagggaagcttctgactgagcaggtgaagaatccgaacatcaaggtagggcggtatagctactattccggctattaccatgggcactcgtttgatgattgtgctcgctaccttctaccagaccgtgatgacgttgatcagctgattatcggcagcttctgctccatcggatcaggcgcagcttttattatggctgggaatcaaggccaccgatatgattgggtctcttctttccctttcttctacatgaacgaggagcccgcgtttgcaaaatcagtcgatgcattccagcgggctggcgacacagttataggaagtgatgtgtggatcggttcggaggccatgatcatgcccgggatcaagatcgggcatggagcggtgataggtagccgcgctttggttgccaaagacgtggaaccctacaccatagtggggggaaaccctgcaaagtcgattaggaagcgcttttctgaagaagaaatttctatgcttttagatatggcttggtgggattggccgctggaacaaatcaaggaagcaatgccttttctttgttcgtctggcattgccagcctgtatcgtcgctggcaaggcacaagcgcctaa

SEQ ID NO: 52832 - DNA, 474 bp, Acinetobacter baumannii
gtgaaactatcactaatggtagctatatcgaagaatggagttatcgggaatggccctgatattccatggagtgccaaaggtgaacagctcctgtttaaagctattacctataaccaatggctgttggttggacgcaagacttttgaatcaatgggagcattacccaaccgaaagtatgcggtcgtaacacgttcaagttttacatctgacaatgagaacgtattgatctttccatcaattaaagatgctttaaccaacctaaagaaaataacggatcatgtcattgtttcaggtggtggggagatatacaaaagcctgatcgatcaagtagatacactacatatatctacaatagacatcgagccggaaggtgatgtttactttcctgaaatccccagcaattttaggccagtttttacccaagacttcgcctctaacataaattatagttaccaaatctggcaaaagggttaa

SEQ ID NO: 52833 - DNA, 204 bp, Acinetobacter baumannii
atgggaaatttgtatagcttactatttataccagagttagtggcatgctctggtacatttgatttacttgtttcgggtaatgctaataatggaattatatttcagctatctaaaagtgatgccaaaaagcttgatagtagttttcgattttatatgatggataatagtactgttcctgctggtgcattgaaagaaacagtatag

SEQ ID NO: 52834 - DNA, 969 bp, Acinetobacter baumannii
atgggcaacacgggcgtcatcgacaatttccttggggtcttcacctcttacatcgacagcgggttcggcctgctcggcggcgaggtggccttcatcgccacaacgctgatcgtcatcgacgttacgctcgccgcgctcttttgggcatggggcgcggatgacgacattatcgcgcggctggtcaaaaagaccctgttcgtcggagtgttcgcctacatcatttccaactggaacaacctcgcgcgcatcgtcttcgagagcttcgccggcctcggactcatggcgtcgggcaccggcttttccgtcgaagacctgatgcggccgggccgtgtcgcgcagaccggcctcgacgccggccgcccgctgctcgattccatttccgacctgatgggctggatcagcttcttcgagaacttcatccagatcgcgtgcctgctgtttgcatgggcgctggtggtgctggccttcttcatcctcgccatccagcttttcgtgaccctgatcgagttcaaattagtgactctcgcgggcttcgtgctgatccccttcggcctgttcggcaagaccgccttcatggccgagaaggtcttgggcaacgtggtgtcctccggcatcaaggttctggtgctggccgtcatcatcggcatcggcagcaccctgttttcgcaattcacggccggtttcggcggggcaaccccgaccatcgacgacgccatggcgattgtgctcgccgcgctgtcgctgctcggcctcggcatcttcggccccggcatcgccaacggcatcgtctcgggcggcccgcagcttggcgcgggcgtagccgtgggaaccggcctcgctgccggcggcatgggcgcagcggatgcagcgtcggcaggccctcaaccacggcatcaccatgacagcccatgccgtccgctccggcgacagccacggctccggttcctccgtcaacctttccgaaagtga

SEQ ID NO: 52835 - DNA, 1209 bp, Acinetobacter baumannii
atggatgaagcaacaatcaaaagtatggctgccgaattggctaaaggtctaaaaacaccagaagacttaaaccaaatgacagcagtctttaaaaaatgcatgattgaaactgcactcaatactgaactttcagaccatctcggttatgaaaagcatcagcccaagaaaggctcaaatagccgtaatgggtttagttctaaaaccattacaactcaagatggacaactggctttagatattccccgtgatcgagaaggttcatttgagccacaaattatcaaaaagcaccaaacacgcatcaccagtatggatgaccaaatcctctcactgtatgcaaaaggaatgactaatagggaaattgtagccttcttcaaagaaatgtacgatgccgatgtgtcagcatctctcatcagcaaagttaccgatgctgtgattgagcaagtgactgagtggcaaaatagagccttagatagcctttatcctgttgtctatcttgactgtattgttgtcaaagtccgtcagcactccaatgtgattaacaagtccgtataccttgctttaggcatcaatatggatgggcaaaaagaattactgggtatgtggattgctcagacagaaggtgccaaattctggctgtcagtcatgacagagctaaaaaatcgaggagtacaggacattcttgttgcctgtgtagatggattaaaaggctttcctgacgcgatagcctctgtttaccctcatactgatattcaactgtgtattgtgcatgttgtacgcaatagcctgagatttgtaagctggaaagactacaaggctgttacgtcgggtctgaaagcgatttatcaggcaagtacagaggaaaatgctttaaagtccctagacatcttctgtgatcaatggaatcaccagtatcccaaaattggagaatcctggcgggccaattgggaaaatatccgaacgatctttagctatccagccgaaatacgtcatgctatttatacaacaaatgcgatcgagtcgttgaatagcgtaatacgccattcaacgaagaaaaggaaaatcttttcatctgatgactcagtaaagaaggtcatttacttagcaacatcaaatgctgcgaagaaatggacgatgccaattcaaaattggcgtttagcaatgaattggtttacgattcagttcgatgatcgattaaaagatcatttataa

SEQ ID NO: 52836 - DNA, 345 bp, Acinetobacter baumannii
atgacaaaattaaaatatacccctgaaatcagagaaagagcggttcaattattgattgaatctgaaaaagattatccttctacttgggctgcaatcacagcaattgcgcctaagattggttgtactcctgaaacacttcgtgcctggcatcaaaagcatttagatcagcaaaatcctattaaagtacaacagatttcagaccaagaacgtatcaaacaactcgaacgcgaaaataaagaaataaagaactgcaacgtgccaatgaaattctacgtaaagcagccgcttttttcgcccaggcggagctcgaccgcccacacaaataatggtggatttcatccataa

SEQ ID NO: 52837 - DNA, 228 bp, Acinetobacter baumannii
atgaattctaaagttgaatctattgatctagaagtgatcaaagcagatttattgaaaaaagttaatcttctacgcaaaagaagataccctttttcttctataaatgaaatagctgaaaaaaatggaatttcttcttcaaatggttatgattctctattaaaaaaaattctacaacttagtaaaggctgtctcttatacacatctccgagcccacgagaccgaggctga

SEQ ID NO: 52838 - DNA, 378 bp, Acinetobacter baumannii
atgaaagataatgaattaaggaaattatatactcttgaggctttccttgattacggagatttacccaatacttttcgggagggctggtcgccaaattatggtcttcatttcgaagaaataggcattaataatgatgaaagagcccatgtctacatcagcttaaatggcaggctgaaaaaggcaaaatgtgagtttattcaagataaggctttagctgaaaagcttctaaaacatgttgaggtaaaactaaaaaagctttatccaagtattacattaaattttagaacggttgaatcaagagaattagactacagaagaaaaaaagccttagatgaagcaactaacaataatttaaaaattcagcaatcactccaataa

SEQ ID NO: 52839 - DNA, 156 bp, Acinetobacter baumannii
atgggattcatcgtaaaactacttgtttcaggaaattactttaccgcaggtgaagatgacatagataccactccttctagagaagaagctgtagctaatggacaatttactcactatgaagaagcaaaagaaacagcagaaacatggtctggatag

SEQ ID NO: 52840 - DNA, 513 bp, Acinetobacter baumannii
atggacacggcgatttgcaccgctaccgctctcggtgtcgccgatgatccagcgggcggtgtcgcccgccgcaatcggtcccgcgcctgtcaggctttcgcccggctccagcgcgatcgtcgtgatctgcccgactgcggcatagacctgatagagcgcgccttccgaccacggataaatctggatcgcgttgtagtagccttcccggcgcggctcgacgcgggcggcggcgttggcgttctcgacgcggccggtcggcgtgcctgcggcggtgccgccgcgcgccacggtccatgccgggggcacatgcagcggccggggcgtattgtctgttgccgccgcctgcacggtcggcagcggcggcacgctggcgtcgtagctgaattgcggcgtccggttggtggcgcagcctgcgagcatagtagccgaaagcagcacggccgcgattgtgtgggtgcgggtgatcgtcctcattggctcatctcccgcgaccacgaaattgcattgacgtag

SEQ ID NO: 52841 - DNA, 306 bp, Acinetobacter baumannii; identical to SEQ ID NO: 51511

SEQ ID NO: 52842 - DNA, 516 bp, Acinetobacter baumannii
ttgtttagtgctaaatttttgaataattatgaatttaaaaataaagcagatatagaaaataaaaaaaacttagagagcgaaattatttctgataaaaaatcagatgttgatttagaaagtttggtatcagatagtaatccaaattataatgatgaaggactctctaacgaaaattcggaaacatcaaataatcaaatacttgaacatacagttaatgatatacctgtcgctataagatttagtattaatgatgttaatagttcaatttataataaaactgcatataatatcgtaattcaaggacgtgctgatagagaaattgtaattaatgacgtagttttaaatagaggaaataaatgtggtctttctaaatatgctctagaaaagcaattgccagtaattttaaaatttggtgaatatattgaattatctataggtgcttgtgatgctcaaatggttcaagagatagaagttaaaacaagttttggaaattatatatttagacctcaaagttaa

SEQ ID NO: 52843 - DNA, 681 bp, Acinetobacter baumannii
atgaaaaagattattttattaagtttggtttttggtttggtagggtgtactactcctcaagttggtaattatattcctaaaactgcaaacattagtaagccgccaataggttctataaatacggcctacgtaggggattctttagtttcacaaggaaagatcattgaacaagacgtaatggtgatacagtctgattatgatctaaatatgcaatataaagtattcgctggtaaatatgctcaaattggctatgacaaagaaaataaattttattctttgcgcgaacttaagaagaatactgaaggagctagagcaaaactattatcggatccaccaagtgtcttaatgatcaataaaaaaggatggttatgtatggtaacaatctacaatactaagtcatgtggtgatgcgacaggtataagtttcaaaactgaaggatcaattaacgaagattcgttccaacaaactttaatttacagtggaaaagttggaaataaaataaatattggttatcgtgaattctcaagcaatattgctcgaccagcatttaataatgatgttgagtatgatttaagccaatcaaaagaaattggctataaaggtgctcttttggaaattattgaggcaacaaaccaagatattaaatacaaagtgattaggaactttaataaggtagattaa

SEQ ID NO: 52844 - DNA, 405 bp, Acinetobacter baumannii
atgaaaaatgatgatgaaaaaaccttatttgcaaaacgcttaattcaggctatgcaatcaaagggttatgaacctaaagcctcagtcttggaaagagaattcaatttgaattactctggtaaacctatgactttacacggcgtgcgtaagtggcttattggagagtctatcccgtctggtgataaattattagctctagcaaaatggctcaatgtacctccagaagaactagttttcgaaagaaattttcaaaaaataaaccaacatctagaaccaacttggcaacaggaattaggttataaagataaagaaatatttgaagcttatatgaagctttcagcatctcataagaaaattattagagacatgatcattgctttatcagataaatataaagaaaagtaa

SEQ ID NO: 52845 - DNA, 210 bp, Acinetobacter baumannii
atgaaaaaattaagattaacaaaaaaagaagtttgttatatgctttcaattaaagctgataagttaagaaagctaataatagaagatgagacctttccacgcccaattaaagatggtcagaatagacaatcagcagtatatttcgattttaatgcaattgaagcgtggtggagaaatagactagaaaatccattaaataatttcgtataa

SEQ ID NO: 52846 - DNA, 279 bp, Acinetobacter baumannii
atggtcgtggtcgcagccgttatgatgacgacgaagatgatgaccgcggccgttcaagcggtcgaggccgtggccgcagtcgttatgatgatgacgacgaagatgatgatcgcggtcgctcaggcggtcgaggccgtggtcgcggtcgtgatgatgacgacgaagatgatgatcgcggtcgttcaggtggccgaggccgtggccgcagtcgtgatgacgacgatgaagatgatgatcgcggtcgttcaggtggccgaggtcgtggccgcagcgccgtga

SEQ ID NO: 52847 - DNA, 705 bp, Acinetobacter baumannii; identical to SEQ ID NO: 8686

SEQ ID NO: 52848 - DNA, 501 bp, Acinetobacter baumannii
atgataaagaattgtgctctgattaatcaaggatataaattgatttttgatttaaaaatatggttggaaaaaaatggggaagatgagatgagatctacacatgctttgactctggatagcactactaatagtggtttaagtggagtgtatggtttatatggaacaagtgagtggtgggataatattgaaaaaggtaatattgaaacatatatggtaagtggggtaatagttgatcttagtaaagggaatgtttttgttgaagacaatacaatgataactattgagtcagataatactgaagatgagatatatgaaggagtagtatttacgaatgaaaatttgaagaaagagtacagtaatctttattctaaaggaaataaaatagttgttttttatattttagatgaattaaaagataaggatgcttttaaccctataattaaggataaagtaggttttttaccgataacaaataaggtttatattaaaggtggaaattaa

SEQ ID NO: 52849 - DNA, 279 bp, Acinetobacter baumannii
atggcaaatgcatattcttttgatcctgcaactggtcaagtaaaacaggctactcaaggtttagaagctaaaaataatttatgtagagctgcccaggcgaaactaaacctcaccacgtttttaaaagacaatttagaggaatctaaagagctttataaatctattgatggtgcagagactctagataaaaattatcttagtggacaacagcaggaacaacaaaatctcgtttcaaatttgaaaaaagaccttgttggaactggatttaactgtgagtaa

SEQ ID NO: 52850 - DNA, 324 bp, Acinetobacter baumannii
atggacagtagatggattgaagcgcaacgccgtgaaatggaaaagcttatttcaccagagctaatcaagtcgagagatttagcacgtcaaagttacttcgatcagatggaaaaagaaatggctgaccacgtatcacgctcaattgaaccactcagcggtaaaaagcaaagcactctggttgaactaagtgagtcaattgaaaaactggctcagaagtataaacaagatgctcattcatccagccttttaggtgatcaggataaagcgcgagtttataactgctttgctaatcaattggaccatttgctgaaaggtggtgcttga

SEQ ID NO: 52851 - DNA, 561 bp, Acinetobacter baumannii
atgctgcccatgcggcgaggcaatccgtatcgctcgccgccgcctcgccaagttgctggcaacggcgcagggtttcgcgcagcggatcggccggggtttggaaggccggcgcagggggcggcgcggaaggttcgtccttccgcgccatgtcgattgcggtcactgtcaaggcaatcgcaacgagcaccacggccccaagccgggccagcatcttgccgtccatggcgagcctcccggtcagttgccgttgttgaacatctgcgcgttgccgggctggtagccggtgccgggcgtcaggaaccgctctcgccggatgcggccctgttcggcggcggtcgcgcgctcggcttcggtcagcgcgtcggcgcggccgttcgccgagatgaccgcgatcagatcggaaagctgctgcgactggagggcaaggagctggttgccggcctgcgttgcctgcaatgccccggtcgcaccttggctctggccgaccagggccgccatctcggcgcggttgctgtcgatgttgccgaccgcccctgcctgaacgcgcatcgcgtcctgtaa

SEQ ID NO: 52852 - DNA, 165 bp, Acinetobacter baumannii
atgaaagataaaaactttcgtttattagtacgaaatctaaggggaatgatgaatggccaaaagattaatcttaaagaaacttacaatattagcaactacggaaaagtcagggaatcaattcatctttgggaacggcataaatctgataaccagctcaaaaaatag

SEQ ID NO: 52853 - DNA, 312 bp, Acinetobacter baumannii
gtgtttgcttgtatgtgtttaacattaactgaagctaaacaaaaacttagagcatttgctagagatactagcaaaatcaagttaactgcacatgcaaaagaaagaatgaaagaacgctgtatctctatgaagcaaattatttgctgttttgagcatggagatattactgaggggccgtacccaaatactcgtggtaattgccagctaaatgtttctgttcgcactgcaggcgaatacataacaacagctgttgcaatcaagcagagcgagaacggtgaattctcagtagtagtcactacatttagagagtag

SEQ ID NO: 52854 - DNA, 609 bp, Acinetobacter baumannii
atgtatcaaatgattgaaaaagaaggatatgttgatattttggttgccgctgcattccatattttagcagggaaacctttaataaattttacgcttgaatttataaaatggagttttggttatagtttaaattctggatttggttctgctgatagagaatttaaaaatctaattagatacaactctgttgattgggaaagtactagaactcaattaataaatgaagcacaatctttatattctttagatacttccaccgttgcaaaatgggcgtatgttagaatactttgtgcaacaggggagactaaagatgaaaattttgcagaagaaattacaaaaaaacttagacttgatgcccaattaccaggacggcgaagaatagaaaattattgttccactgatccatgtgatcctgaatcatttcagccagaaaatattattaaaactgctgaaacaattaatgaagttgatgttaataaaatttggactaatcagatgcagacatctgagggaatctttttacaagaggtacaaacaggtcttgctcgctttagttcaaaagggctttgttgcacaaacctatctctaaaggcttattccacaatataa

SEQ ID NO: 52855 - DNA, 525 bp, Acinetobacter baumannii; identical to SEQ ID NO: 16553

SEQ ID NO: 52856 - DNA, 480 bp, Acinetobacter baumannii
ttggttgatgtaattatagatattctatattcaagaaaagatattaagtatttttttaatgagcctgtaggtatacttttacggaatgcaaatatatcagcaagatctgctattgagtatttgccagaactaatagcttttgaatatgatgacctagaattagctaaaagagaaattgcttatgagaaagatcattttgataaaaggacatctatccttacgggttctttagacaaaattggaatatttccatcaattttagcaacaatggtattgttgctcactcatttaagtaataataaaactttcgaatttttacaagaacatccagaattccaatttttattctatatattaattgctgttgttgtagtctttcaattattttcaatatttactaattttatttcattaaagttatcttatttaattcaagttcttgaatgtactattaaattaaaaaaagatactaatggttaa

SEQ ID NO: 52857 - DNA, 156 bp, Acinetobacter baumannii
atgtttattaaaagtattttatcttcgattacgagtattatcccacttcctgaaaatagtaacacaagcagtaaattaggtaacggctctggtgacggcctacttaatgggctttgttgcacaaacctagcatcaaaagcttattcagcaatataa

SEQ ID NO: 52858 - DNA, 486 bp, Acinetobacter baumannii
gtggctaagaataatattgaaggtggcattgccgtttcaaagtttgatggtttttggattgaagataactttgctgtgcactccgcccgcaactcggttttaacgcaagaccacggcactaacccatttccgacctcggcgaccattggccccgactttagcaataatgatgaaaccgccgttgcccttcgactgaaatataactggaaagactatgtgaaaggcttaaaaaccgaagcgaaatatatttatggctttggcgctcaccaaagtaacatcagcagtgatattgaaggtaaagagcgctactttgacttaacattaagttatgccttgccgtgggtgaaaaacttagatgtgcgttattcatttttgcattatgagtcaaagtttgaaaatgcaaacctaggtgaaaaaataaatggcatgacccgtaaagattgggaccagcaccgtgtatttattaattaccattatacgttttaa

SEQ ID NO: 52859 - DNA, 279 bp, Acinetobacter baumannii
atgattaatataactgctattgatgttgcaaagtggatggttaaagaattagatgaacaagaattcctttatcctgaatgggctgtatgggaaatccaagagatatttggagatgattttgtttccgaaaatgaaaatggaaatttaacaatttccaaagttgttctaaaagaattccgcaaattgaccgaaggagaagtggtatggatgcgatcagaaaaagcttggcgtagattatacgaagatgaaaattatgaaggccgtcaacaaacatactaa

SEQ ID NO: 52860 - DNA, 741 bp, Acinetobacter baumannii
atgctgccattgatcgattttcattgtcatttagatttgtatgacaatccacaagctgtagttacagcttgtggaaaattaaattatattttatcagttactacgacgcctaaagcttggtttggtacaaaaaagctcgcggaaaatcataagcgaattcaaactgcacttggattacatcctcaaatagctcatgagcgttatgaagagctagatttatttgacttattaataaatgaaacgaagtacattggtgagattggtttagatggttccacatctttaaaacctcatcaaaatatacaaagtaaagtattcaagcatattttgcaaaaagctaataactcttctgctaaaatattgactattcatagccttaatgctgtagaagctactctagaagcactagataattattttcataatggtattccagttctacattggtatacgggtaaagaaaatgatttaagaaaagctattaatagaggttgttggttttcgattaaccagagaatgttatcaagtgatagaggtaggctgcttgtaaatcaaattcctagaaatcgtatattaactgaaacagatggaccctttataattagtaaaagtcgtcctattcaaccagccgaagttatgcctgttattattaggctgagtgagatttggaaagaacctcaagaagttgtgatagctcagattttcgaaaacttaaaaaatcttttgcaaactattaattaa

SEQ ID NO: 52861 - DNA, 1329 bp, Acinetobacter baumannii
atgattgagctttattttgatactgacaatacaaaactaccacctatgacggataagcttttgccagtttatatgtttggcagatcagcggtttctggaaaatataatagtattggtggcgctgctttacaagaatttagacgtttacaagaagaagcggatgagacagcttttgatttaatgatgttatcattagccgtaacagctgcagatacttttgtagagagagatagtagagctgaagatgcatggtgtcgacagttcaagataaatcttcctctgttaaatccaactttatgggatggacaaaaaaatttgttaaaggaaattttacattttctgagcggcgatttgtgggatttcgaatttaggcaaagtaattttgtaataccaaaaatggtaaaaggtggagttcgaacaaagaaaatttatataaatggacatgattcagtttgtttattttcaggaggattggatagtacaattggagcaatagatctaaaggctcaaggcaaaaaatcagttttggttagccatgcatatccaaaagatcgacaaaaacaagatcatgtatactatgacttacaatttgataatgctagattccaagtactagcgaatcctcggaaagttaaagaaattcctgctgatgttcaaatgcgaacacgtagttttaatttcatcgcttttggtgccttaattgctactgctctaagtaagaatcatttttctaataaaataattaaactttatattccagaaaatggtcttatttcgattaatccaccacttactcctcgacgtattggggcattaagcacaagaacgacacatccttattttcttcaaaagttgaatatactttttaagaatataggattaccagttgaaatagaaaatccatatcaatataaaactaaaggtgagatgatgcttgaatgcaaagatcaatcatctttgaaaaaaattgctgcaactactgtatcatgtggtaaatggaagcgatccggaatgcaatgtggtaaatgtttgccatgtttgattagaagagcttcatttgataaataccaatataaagatttaactcaatatcaatattctcatttaagtgatgtagtaaaacatgctaataagagagatgatttaatgtctatggtgatggcaattcataagattagaagctcttctaacactaatctttgggttgcaaagtctggatttctaccaactgagccaaatgaacgacaattaattatcaatactgttttaagaggttttaaagaggttgaagaatacctaaagaaagaaaatctgggtataaatatttaa

SEQ ID NO: 52862 - DNA, 765 bp, Acinetobacter baumannii
atgggaacatcaacatcaagtaaggggccaaatggaaagacacctttagtaccatcttgggcaaatgagggcggtggggcaatttcatgtggaattgataatactctaggtgaatttaggggatatttagggaaggctgctaataaaccttcgggtccaagtggtacaaacttaagaaaagcaatcggccattatgctaagaatgcaacaggtgggaaaaaggtagcgcctaaacgctatcaaaaacttatcgctgctggtggaggcttgtttgatttattccagaatattcaagctggaaaggatcatttaaatcttaaaattgcagacttaaatggtcagcctatcgatattgttattgatcaaattatagaaaatcttttagtagttgatggggactctgaacgtataagagcgagtttaaatcaatccttagctgaatgtttagatggtatggatgattttgatttcacgcaaatttctagcgatatgattattgatttaatgttgaattacacagaacaatatttatttcaacaaattatcttagattcaagagctgcttttgataaggctgatacgcctgaaaatattgctagtcttgaacaagatctccactctttgattaagtcttcagttgataaacacatgagtgcacaattaaagaaccgtgaaaacacattaactagaagtgaaattgaacatatacaaatgaaagcattagaagatatttggggtgagtgggaggactatttaaatgattga

SEQ ID NO: 52863 - DNA, 1794 bp, Acinetobacter baumannii
atgtggtcagatattgagtcaaaacaggattttttaaattactcagaagcttcagaaattgtagttaatgttttaagtaatcctgcaatgttaccgatttcaataggtgtatttggttcctggggtacaggaaagtcaacaatattaaatttgattgaacaaaagctacaagcagaaaaaaaagaagattatatccttattaagtttgatgcatggctttatcagggttttgatgatgcaagagctgcattaattgaagttgtcactttggaaatagctaaacttgtagaggataacaagactcttctagataaaacaaagacaataactaaacgagtaaataaattgcgattgctagcaatggcagcggaaggagcttcttggttagctggtgttcctacttttggtgctgcatataaagcagttgaggctattggagatggaattaaagggaaagctgatttagaagatggtgaggcggtaagcaaaataataaaagatggtcagagtggtttaaaagagcttttaaatgaagaaataacatctgcaccgaaggaaatagctgctttaaagacagagtttgcagatttacttgtagattttaataaaaaaattgtcatatttgtagataacctagatagatgtttaccaaagcagactatacaaactttggaatcattacgattatttttatttatgccaaatactgcttttgtgatagcagctgatgaagatatggtaaggcatgctgttaaagaatactttaatggtatagatgaaaaacacattacagattatttagataagttaattcaatttccagttaaagttcctaaaattagtactcgtgaagttagagcatatttatttttactctatgcatcaattcatgaaacttatggaaagcaaaagcttaaaatagaaagtttaagaactggtttagaaaataatttgaggctttcttggaaagaagatccaattagcgtggagaatgctttactgcttttagattcagatggtccaaggacggttaatctattaagtgattttactatagcagatcggatagcacctttattagcatcatcgaaaagtgtcgaaggtaatccaagaattgtaaagcgaatgctaaatgttattagtatgcgaaatatgatagcaagtgctcgaagaatgccagtagacctgaaacttattgcaaaaatggctttgtttgaaagatgctgtaaatcaactgcgatatctattctttacaatgaaattaatgcaacagctgatggaaaaccagaattatttagacagttagaggctgttaaaaatgatctcgaagcttttgaagagaaattaccaaaagattggaaagaacacaaaaccttcctttttgattggataaatttggaaccatccatttcagacaaagatttaagaccgcttgtttatctaagtaaagaaactgtcccacttcgtatagtttcgagaggtttatctgaaattgcagatagtgcttatagattattaataagaacatcaaaggtatcttcgccatctgctattaaagcaattggaacaattccccaaggggaagaaaaagatgtgatgcgtttaattttagaggaattaaggcagcattcaaactggagtgaaataccatcaggttttgctggtgcttttttactagcccaagaattagaagaaactaggccgcagtttaaagccttcatttccgaggtcatgccgaaacttaagccttggtttaaaagtcttattaaagaagaagtttggtttaacaattaa

SEQ ID NO: 52864 - DNA, 465 bp, Acinetobacter baumannii
ttgcttggagattttattgatttatggagtaatgctcgatatctttcagaagcgcaatttaatgctaaatggtttttaatttatagtgacttggaaaagttaaatattaatgtaccaaaaaatatcttaagatctccttttaaaacagtgattaactcgattttaagtgccaaattaggatatgttataggttatcaaataacggacttggttggtgttgctcaaaatttaatggaacatcaccctgagtatataaaacattttttactaactttaaaagtaactaaaaaaaataatttacttaaaaatgatttggttaaatatgaaagatggattaaaagatattcagaatatatacgacagcctgatagtttgaaaatttataaacatgacttaaatgattttatagaatttttagttcctgagtttgaggggcgtttgaaagaatggggttgtaaaaattga

SEQ ID NO: 52865 - DNA, 1068 bp, Acinetobacter baumannii
atgttagattatcgagttcgttcatggtcacttctcaatttagtaaatgacattagagaaagaaggcttgtaccagatgcatattttcaaagagatttagtttggcgtgaaatccataaaaaagactttattgaaactattttactgggtctcccttttcctcagctatttatttccaaaggaaaagtagatttagtagaaatgaaaactgtttcatgtattgttgatggtcaacagcgtactaatgctattattgaatttattgataatcgtttttctgtatcagataagtttttcagagatttggacgatatagaaagaacaaatttcttaaaatatgaaatcgcagtaattgaacttgatcttgaaaatgatgaccctcaagtacaagaaatttttcaacgtatcaatagaactgcgaattctttaagaggtatagaaaagcaagcctcgcagtatgcaacttcagactttatgctaacagcaaaactactatcagatcaaattgatttaactgctgaaaataatgaatacttcaaagaagatcctagaattcctagtgattattacgattgggcaaaacagcagaaagttacacgctctcaagatttatttacatctaataatcttttcactcccttagaaatatcacgaaaaaatcatttaagttatgtattaaaccttattgctagtatagaaggtggtatatttcataggaacgaaaagaccaatgaatatttagaattatattcagaaaactttcaaagcaaagatgacgtagtaaaattaattgaaaagacatcctcaatatatttgaagttaaaattttcaaaaaagtcatattggctaaataaagcaaatttctttagtttattttatgcattagcaaagaatataaatgaaggaaagaacataaacattgaaaagcttaaagaaaatttagatatattttattcaaacttaccagatgaatacaaaatttcagcaactgagggtgttaacaacttacgagaaagacgtacaagagatcattatttaaatgaaattataaataattctttattataa

SEQ ID NO: 52866 - DNA, 633 bp, Acinetobacter baumannii
atggatgcaaaatattattttgaaacaataaaaaatgatcttgcgattggcaaagatcgatatgatatagctcgaaaaatctttacgagtttccctgactatacagctataaaatatgatcaacattctgtggaatttgaaataaaaaatgaagtaagtaatcatttccatattccatttcattcaatacaactgtgtggttcagcaaaaactggaaaaagtttatataaacatcatgattttgataaaactaaatccgacttcgatcttgcaattatttccccagaactatataccaaatatttcgaagtcgcatttaaacaaactcaagcctttaaagacgcaactacctttccacgtaaaaagaaatggaataaagagcttcaaaggcatataaatgttaatgttaaagatgaatttttaagctatctaaatattggttattttcgcccagacctcatgccgaagagtaaagatagaacagaatggttctctttttttaatcatttaagtgagaaatatattcaatactttagcaatatcaatgcgggtatttatttatcacaaaccttttttgaaaataagcaatttgcagctctagataaaagtttagaattcaatttcgaggattaa

SEQ ID NO: 52867 - DNA, 372 bp, Acinetobacter baumannii
gtgctggttgagcgtgttgaaggatttgcttcacctatcgaatggcaaagggcatatgatgaaatcaatcgctttgaaaaagacttatttgatagtcaaacgattgtggtaaaaatttggctggcaattagtaaagatgagcaagagcaacgttttaaagccagagaagagacaccgcacaaacgctttaaaattactgccgaagattggcgtaaccgtgataagtgggatgattatttaaaggcggccgcagatatgtttgagcggaccagtaccgaatatgcgccttggtatattgtcgcaacagacgataaatatactgcacgcttggaagtgttaagagctattttaaaacagctgagagcagattaa

SEQ ID NO: 52868 - DNA, 690 bp, Acinetobacter baumannii
atgtctttttctggctatgggccactccttcttagcggaacatggatgaccatacagcttgcgctgttatcactcttgctttctgtcattattggcttaattggtgcgagttcaaaactctctaatattaaagccttacgttatgttgcaaccgcctataccacgctcatccgtagtgtgcctgacttagtgattatgctgctgttattttatagcttgcagttgggcttaaaccaaattactgaagcactgcaaatggatcaaattgatatcaacccatttgtggctggtgtgattactttagcgttcatttatggtgcatattttaccgagacctttcgtggtgcatttcaatcggttccaaggggacaaattgaagcagcaatggcctatgggatgacgccttggcaggtttttcaccgtgtattattccctcaaatgatgcgttttgcattgcccggcattggtaacaactggcaagttttgattaaggcgaccgcattggtttctattattggcctgactgatattgtaaaaattacgcaagatgcaggtagaagtaccatgcaactgttctttttcagcatcgtcgctgctgccatttatttggcaattaccacagtgtcgaacctgattttaatatggcttgaacgtcattattctgctggtgtgaggaagggacaattatga

SEQ ID NO: 52869 - DNA, 474 bp, Acinetobacter baumannii
atgaatgcacaaaaaggttttacattaatcgaactcatgatcgtagttgccattattggtattttggctgcaattgcgattccgcaatatcaaacttatattgccaaatcgcaagtatcacgtgcggttagtgaatcaggttccttaaaaactgtaattgaagactgtttaaataatggtaaaactacagttggtgaagctgctggtgaatgtgctattggggcaacgggttcaaatattttagatggggctgcacaaagtggtgaaactttagctgctggaactggggttccacaagttacattagcaaatacaggcgctgcgacaattgttgcaacttttggtaattctgcttctactgcattaaaatctacaccaactacagtaacttggactcgtacaacagatggcacttggacatgtgaaagtactgctgccgaaaaatataatagttctgcttgccctgcagcataa

SEQ ID NO: 52870 - DNA, 876 bp, Acinetobacter baumannii
gtggcattattactgcctgtattggcatttatcacaggacttctacttgctcagacctccatttcagaaaccgtaaaacctattctctcagcttggcttgcacgactcctgattccgattgtgattatttacaacatggtcttttatcaatcgggaagcttgagcttaatgctctttagttttggttcggcgttcattattttctttgcttatttggctttatttaaagaccgcttattggcactttgcgtaagttataccaacatgggatggcttggttttcctttcgctatggctttattcggtcctgaagcaactgctccaattgttgctttatatattggaatgtcgctttttggcaatgcttgggctgtgactgccgttactacggcaccgcaaagtaagctcaatatattaaaaaaggttttaacttctccgccttgtatatcgatattctgtgctgttgtgctcagacttttaggggcccaacatatcgaaagccctgttatacattgggtttatgaggttgctaaatttgcaatgacttttgcaggtatgtgtgtgcttggaatgtggctgcgccgtaccagagtttatataaaagatttaatttacagtacaaaagctcaagcatttaaagtggcctgtggatttgtactttgtggattaagttataggtttttaccgattccaaatataaatcagcacatcggtgtaatgtttttaatgttttgcttgccaccggcagccaatattgtagctctagaaacccattatcaaggcacgggtagatctgctgcttatatcgcttcagggacgattgtgagttgtgtgtgtattgcgatttatgcagtgtttttacacttgttcgtctaa

SEQ ID NO: 52871 - DNA, 465 bp, Acinetobacter baumannii
atgaaatatttggatataaatgcccctattattccttcaaaatcaataggaaatatatgtataggtgatgcattatctgattatctaaatatgattgatgaaaatataaaaaaggaaatcctcattgagaacatagatactaacgaaagaaaaattacttttggcaaattgccagtagaaatattcgtaaaaaaagattttgataagatttataaaatttctgcgggtattggttatcaaggtaaatttaatggaataatatctgttggagataaagcgaaagatatttttgggaaagatagtagcttttattataatgatttatatgaaagtatattaagtagaaattatgagggtataatcttggagttctctaatgaagagccatgggatgaaaatataagaattgagaacttgcgtgtgtgttttataactatatttaatcctcaggagactcctttttaa

SEQ ID NO: 52872 - DNA, 357 bp, Acinetobacter baumannii
gtgaaagaatcagaaattacgaaagcgactttttataacttctttcattcaaaagagcgttttattgaaatctgtctaatcgtacaaaaagaacgtttaaaagaaaaagtggtctcaattgttgagtatgcccaagacacaaacgcggccgataaactcaaacagctttatttcttacataccgatgtagaggggatgtactacctattatttaaagccatgtttgaaacgaaactgagctatccaaaagcctatatctccgcagtgagatatcgaacatggctcatgaatgaaatctatatccagcttataaaactaaaaaccgatgcgacttttcaagatgcaaaactcttttga

SEQ ID NO: 52873 - DNA, 585 bp, Acinetobacter baumannii
gtgatttataaacttaaaaggtggatctctgctgaggtaattgatccatttttttcattatattcatatatttataaaaattttgttcttgtccttaccttaagtttttgtctaatcgtactgctttgtactcttaacccaagtatagtttttactcgtaaaaaagagggttttattgtttatgagcctaaatttcaaaccaaacatgggcgtatgacatcactgataataaaaagaggcaataaaaaattttttattaattgtgcatattttaaaaatgagaatagttcattttgtgaattatataagcctagaaaactacttaaagttgagggaggtttttttcctaattcatcattgttttttaaaagtaagtatattgtagttaataaaattcgttttgaagatgaaaaaggtagtgtaattaatttttcaacaagtgaagaaaaaattacttcttggtggaattgggttatgttccccatcttattgatgaggtatttaattttaatctggttagtggtggttgtttcaatattacttttaaaattaattaagtataagagaaaatctaattttatttaa

SEQ ID NO: 52874 - DNA, 450 bp, Acinetobacter baumannii
atgcgtgaagatattgagattctactaagcttttcaaatatggttgatagaataacgaatgctgaggcgatacgacaatataaagaacaaattatcactgactttttggaatcatattatgcagatatgtatgaggtggaaaagttacatattggtgataaatttgaaaatgcagatatggattatataattgacttaaaaagaaaaatttttgagaaatattggcataatcatgaatcgtattatcagccttgttcaatgggtggtgatgctcattttgattgggaaaaagcctctgatataaaattgtatgagaaaggagatgactttcaacaactatttttagtttcaattacttatcaaggaatttttaaacatataaaaatctatatgattgaatacaaagatggaaaactaggtatacaacatgagttttttgaggttatttaa

SEQ ID NO: 52875 - DNA, 201 bp, Acinetobacter baumannii
atggcaaagaaaagtatgtacttaagaattaaagaatcagagcaagatatgcttagagaagctcatagaaaaattaataataaattattagaaaatggatacccaacggtacaagatagtgaaatattgcatcaattaatcgaaattggattaaaaaaactagatgtagataatctaggtaggttccatctaaaaaactaa

SEQ ID NO: 52876 - DNA, 195 bp, Acinetobacter baumannii
atgacgacatacgtttgtaaagagattgcacaagtaaacaatcagacaacgtgtgtcacatatgttgcaaaagaggattttgatcttttgaacatctcagtggctgatgcaaatgctttgctcagtcaaattctcgtagtgttcgctagtgtttgggtagcaaacatcattagcgatatgtttaacaaggggtaa

SEQ ID NO: 52877 - DNA, 255 bp, Acinetobacter baumannii
atggaaattaaagcaactaaccaagttgaaaaaactaaacaaccacgtcaaatgactaactctgagaaggtaattcttggtgttggtgcgactgcattatctagcgctgcatttgctgatgtagatgcgtctgcgggtattacagttattggtactgctgtagctgtaattggcttaattggggcagccaaaatcgtaccacaagcgactatggtcgtttggggctatgtaaaacaggcattcaaccgaacctaa

SEQ ID NO: 52878 - DNA, 1293 bp, Acinetobacter baumannii
atgatccacagaataaatatatttttgctctcgttactggttgctcttgcgcctaacttcatttttttacaggcagcaaatgcgactactgttgcgggtgaaggttggtccgttactaaacgacttgtacaaggtgcaaccacattctatgacggggcaaaaaacgttgttttaaatggtaaaaactatgctgctactggtgctgctgcgattactccaactgcatcacaagtttcaaagatgatcgtaagaactggtgctgttgtagctgttgatttagcaattaaagctttaatcggtgcagtaggttatacgatggaccctgcaaataatcgtgttatttatcgtgtacctcctgatccaaattcaccgaatcttcaatacgcatggcattggactaatatcggttattattcgactcctactgaagcagcagttgcatatatggcttatcacaattcaactgcttcatcatcaaaacaggcagcttcttatcagattaaagatactattagtgataaatctaaaacagttaacctttttgattcttcgggtgctttggtcggactcgctacaattcagtggcttttaaatcctaattatgacccgaaagcaccgccacaagaaaatgaagaaaaatatttaccgtatgatgccgtagcttctcaaatcatgtctgatgcggttgcagataaagccgaaggtaaagcatacgtttcatctgttgctgatactgcacttgaagatgaacaaagacagattgttcctgctacagatataactaatcagttaaataactctcaagctattccgaccaataacgctgctcagggcacttcaactccacgtgccgatccaaacgatccgactgcaccaccagcgccaccgactgacataacaattaactttccagtgttttgcgattgggcgccatcagtatgtcaggctgctaatgctgcaattaatttccctaaactcttcgttgagaagttccagaagtgggatgactggcttaatagagaaactaagccttatacagcagatgaaactaagattgatacggaagacaaacgtacttttgatttctcagtgtttaataccaatagattttctgtagacgataaatgtccaacacctgagcctcaaacaatcactgttctcaatgttacgacttctttcactttaagccttcaacctgtttgctcaatccttgaattggctaaacctgcattaattgcgtgttcgtatatctatgcagcttacatcgttataggagcagctaaaggtgggtaa

SEQ ID NO: 52879 - DNA, 276 bp, Acinetobacter baumannii
gtgggtaatttattcaagtttataggtgaaattcttgcttcaggttttcttagacgtttactagcgggcgcgggaatttctctggtgtcttctacgattgttttaacggtcgttaattatttattagatcgctttatgtctggcttttttgcggtcggaaatttagctggtcttgttggggtagctggtctagatcaatgcgtttcaattattttttcggcatttattgctagagcaattattgcaagttcttcacttggattttcaaagaattag

SEQ ID NO: 52880 - DNA, 1176 bp, Acinetobacter baumannii
atgatttatttaattactgccacgcctggctcggggaaaacattgtgggctgtcaaagagatatttgcacgtgtaaatgaagctgaaccgtggaatattttttctaacatcgatggtctaaaactagatacggcacaaccgttaaaatcgagttttgaagactatccgccacgatctttagtagtgattgatgaagctcaaaagatcagccacttttcaaaaaaatataagcatccggttaagaatgaaaaccatccagaagtagagtttttacagacgcaccgacatgctgagttcttggatattattttcatcactcaagccccacgtttgttgaatgcagatgttttagacatggtcgggatgcattatcacttgcatcgtccaatgggtatgaaaatggctacatggtggttatggaaatatcaccagttaaaccctaatactaaatctgtaaaagcagatgcagaagatactggtacttttacatatccaaagcatctctttggaatgtatacgtcttcaaagggtggcggcgatactcatggcaaaattaagttacctgcaaagctagtacaaggtatttggatgctatgcctaaccttaattgctgcgggctatttctatgtaaaacaacaagactctaagactgaggaaccaaaaacaattaaatctgagattcctaaagctgccgatccgctacaaaagaaagttgatgaatgtgtaaaacagcttggctggtctgccgatatgtgtcgagaaggtttggaccctgaatacaaagcaaaaagagaccaggaaaacctaatgaaaacacagaatgacatgcagtctatttctgttaagtacaatcctaataagccttatgacgttgatactagtcaaattagctatgagattacgtcaaagcctgtgttttctggttgtatgaagaagggttctcgatatgtcgcatatactgagcaagggactattttgcatgatgtaagtcaatctgattgtagaaaactgattgagaacaatgaccgtccatataactattttaagcagcaagctcagggttttggtaatcaacctcagcaagtacagcaattcactaatcagccccagactcaagaatatgacgctgaatttattgctaaatatcaggctgctaaagcacaaggcttaatttga

SEQ ID NO: 52881 - DNA, 201 bp, Acinetobacter baumannii; identical to SEQ ID NO: 52875

SEQ ID NO: 52882 - DNA, 1227 bp, Acinetobacter baumannii
atgttagattttctgcggttagctataccaatcattcctacgtatgtgcgtagtcttgataatcatcattggtttaatggtgatattcgcgattttggtattcctgctgcgactcgccatgtttctaagaccgatgacggtcaaacgataacaggggagctttaccatccttatgaatctttgccgtctgactatacagatatggctgttaagttttatacaaatacaatgaatacaccgccttatgttgagattaaggcgtctccgttgaagttgttacaaggtcacaatgtgtatggttttgagtctattgaattaggctctgatcatatgcttggcatgttactcgaagcctttccccagttagccccaatcttagatttgccaaatactgaggttttacatctagatacgacttatttatttagattgccacatcagaatatggttcaacctacgcttgactatatggctagcttggcttcgggtcaccgtaaagctcgtgaagttaaatatgataactatatttcttggggtaatgacggtgccagtgttagacctaaagcctatggcaagtttgaagaagtaaaaagccaattacataagctacagaagaaagcagataagggctgtatgcgctctaaatcacttgttattgctatgaataatgccttgccatttgctaacgctattcttcgtttagaagcccgtatttgtaaaacgtatttaaccaagaatggttatccatctaatttatttcagcttattaagctgcaacatgaacagccagaactattgctacgcctctggcacgtagcgtttgacccaatccttaagacaatggagggtgagtatatgaactttgcaagtgatgatgaattagaagccttacttaaatctaaattggtgacttacaccaagaaaggtaatcctagttatgttagagcttataacgctcttgatttctatcgttctttacgtactgatggctgggtcaaagttaaagctcggcattgtaagtctcgattttataagcgtaaagacgatttacttgagtgtggtattgcgctttcacaccttcagaatttacataaaaatccaaacggcaaagttatcccatttgttcgtttatttgaactcaagatggctgatcaattgccaccagattacgttcaaccagtttcacaatacagcccaaagaatcagggcttacatctagttgcctaa

SEQ ID NO: 52883 - DNA, 303 bp, Acinetobacter baumannii
atgcaattatcatttaacaaacgcacaatttttccatctgtttaccgcggtgaaaataagaaaactggtgagccaacttgttacttgtctacaactgtattttcgccagttaaatacaatttaaaaccagctgctggaatgatgccaactgaacagattcaatcaattcttgaagagtgtgcagacaatggccaagaagtagaaatcgaatttacagagcaacaaactaagtatggtgcagagatgcaaattttcagcgtgaagccattaccgaagaaaaacccaatggaatcaaaggcttaa

SEQ ID NO: 52884 - DNA, 690 bp, Acinetobacter baumannii
ttggactcgattaaacaatatgatgatggacacgtatttacagcgtgggttgcattaatcggtatggtaatggctgccacttgcttgttttgttttcttgcagttacagggtttgatttacatcaaatatttaaacctgaatttgcattaactttgtcggcaaaagaccaagcccttttcagaacttcaatgatttctgactgttttgggttttatcttccttttctagctgtgggcgtatatctgtggcgaaagttgcgctcttcaggaggattgttgtccgatatcgctattttatttcttgtgatttcaaccatgttaggcatagcaggggctgttttacaggcctctgtgttaggaccacttgccgaaacatatatgtctgggaacgaaatggctaaacaggcggcaggcactgtgtgggcaaccatttcgcaaggctcgcaaaatggcttatggccaatggaaggaccgaccatcggtttttgggcaatagtcaacggactacttctgagaaaaaacaaatccgcattaggtttcccattggttttggttggtttgggatatgttggatttgctgtgcttcttttctcaggcttttctcaagtggctttattccttgaactgttcttattaccagtgcaagtagtttggttaggtattttcggtttgagtttattacaaagatag

SEQ ID NO: 52885 - DNA, 606 bp, Acinetobacter baumannii
atgacaactacaagacgtagacccaaacacgaccctaaagtttctgaaaatgaaatattaaatgctgctgaacagtttttaagtgagcatccttttcgtgaactcaatgtagatgaggtcatgcgccgaactggcttaaaacgtccagcattttatgtacattttagagataagcatgatctggctttacgccttgttgaaaatattggcaaagaattatttactattgcagatagatggcttaagggtaacaattcccaagaagatttgcgtcaagctttagttgggcttgtagaagtttatgtgcaacatgggcgtgtgttacgtgcttttggagaagctgcgggtggagatgaacgtgtagacaacgcataccgtagtttagttcaagactttattaatgctgctgctcaacatattaaagaagaacaagaggcgggtagaattaagaaagatctagatgtagaagaaacagcaaaagcacttatctggcttgaagaaagatatctttctgaagtttttggacgtccatctgaagttgatccaaaggtagccataagggtacttcaaaacatttggttatcgacactttatggtgctaattaa

SEQ ID NO: 52886 - DNA, 927 bp, Acinetobacter baumannii
atgatgaaaactgtaactttcaaaaataaaaacatcgatgtttctgcaactattcgttttccaaaagattttgatgaaaacaaaacatatgcagccattgtatgtgcgcatccaattagtagctgtaaagaacaaactgctggcgcaatctatggtgaaaaactcactgaagctgggtttattactttagcatttgatgcatcgtatcaaggtgctagcggtggagaacctcgctttcttgaagaccctgcaacacgtgtagaagatttccgctgtgcagccgactatttaacaacgcttgcttatgttgatgaaaaccgtattggtgtattaggcgtatgtggtggcggtggttatgctgttaatgctgctatgactgaacgccgttttaaagcagtcgcaactgtggttgcggcaaactatggccgtttaatgcgtgaaggtgaccaaacacctgaagctgccattaaaactttagaagccattgcagcacagcgtactgccgaagcgcgtggtgctgaaccatttattacccagtatattccaaactcacagcaagagcgtgaacaagctggaatcaatgatattgatatcaaagaagcgattgattactacaaaaccccgcgcggtcaggcagaaggttcaccaaataaacttcgcttttcaggtttagccgctgctgttgggttcgatgcatttcatttggcagaacacttgctcactcaacccttacaaattgtgattggtgatatagcaggtggattcggttcttatcgcgatggttatgagttatatagcaaagctgcttctaaagataagaacctttttgtggttaaaggcgctagccactatgacttatatgaccaacctgaacctgttgctcaagccttagaaaaaattattccattttttcaaaagtatctttaa

SEQ ID NO: 52887 - DNA, 888 bp, Acinetobacter baumannii
atggaaaattttgaattatcagttgtttggtggaatacaagtctttctccaccaatttcgtcaaaaagagataaatctagtgatgaaaagcgtgctgcaattgcatcagtaattcaaaaatttatggaaaatgattatgagtttatttgcttaggtgaagttgggccagaagatatagatttctttgagaaaactatctttccacagaccttaggatacttttgtgcaaaaggtatagatggcgtaggacgtactttttttgatacctgtatttactacaagaaatatcattatttaattagaaacggtaatagtgacgttcaaaattttacaatgacctcagctactagaacttttaaatatggtcaaaaatataaattttctttattaaatgaggagaaaattacaatttatctttcacattggccaagcaaattaaacgatgtatctttgcaaatagtatcaattgctgagcgcctaagagttaatattgaagatgaattaaacgaaacaaaaaatattattctcgttggtgattataatgttgagccttacgacccagcagttgttcatcaattacaaagctctagagaaaaaactattgtttcgaaaaaaccaaatgttttttataatccctgttggaaatttcttgttccatcatttcaattaaagtctttgaatactcatggaacatactactacgctaatggtcaattccatcactggcatgtcattgatcaaattatgttttcaagtaatttcttaagcgatgaatgggatttacaagataaatatataaatattgttaatcttactaatttagataatactcaaaagtctcttctatcggaccatcacccactcagtgctgtaatcttaaggaaataa

SEQ ID NO: 52888 - DNA, 441 bp, Acinetobacter baumannii
atgatcaactttacagattcacttcaattaggtttacaatctgccttagatagagaaagaaattttcaagaaatccataatctattttattctcttaaagaacaaatacttgaattttctaataattcagtaactctagaaatgatattccgagaagatcctgatgatgaagatactattatagattactttgaaaattttacagatctttatattgataaaagcctatgcctaactagagttgatgatattcaagactttgagtggcttagtatgctcaatttttcttcaaatggttatccttgcactattacgattgatgggaaccgttttgattcgattgataaaattagtttagaggagaatataaagatgttattatcaactcctagcacaggacaaaaactatttaggttaatgaaatcagcaggaaaaatttaa

SEQ ID NO: 52889 - DNA, 2997 bp, Acinetobacter baumannii
atgacgcaactgaaagagactaaaataggaaaaagtacgataacaaagctgttacttaatgatcatgaactctcgcctgatttagtctttgaatcatggttaaggtctaatttcttttttattgaagaaaatcaagctttgggtgtcaatggacttagaccgccacaattaggtggaatatttgcagcattaggctatgaaagatcagatgaaaaaaatgcagcgacaattgtcatgccaacaggcacaggtaaaactgaaactattttatcaattgtagtagcaggaaagtttaaaaaaactttagtcattgttccatccgatgcactacgagagcaaacaaaaacaaagtttgttgaacttggtttattaaggggattaggtttgattaggcctgatactctaaatccagtagtttcaactatcaaacatggaattacagataaggaagagttagataaaatattaaatgctaatgtattaatagcatccgcagcctctctatcaaaattctcaaaggttctttttgataagcttataaatgaatgtacacatttaattgtagatgaagctcatcatgtaacagcttccacatgggctagaattaagtctcaatttaaagataaatcagtttttcaatttactgctacgccattcagaagtgatggttcaagagtagaaggaaaaataatttttaattaccctttgaaacgagcacaggaagagggatattttaagcctattatattttatcctgtaagagaatttattgaagaaaaggctgatgaaacaattgctaagcaagctatatcactgttaagagaagatttggaaaatggcttcgatcacatagttatggcgagagcttcatcaatgaagcgagctaaagaaatcttcaatatttattcaaaagaaaaagatcttaagcctgtattgatagatagtaaaacaaagaacaaaacagaagtacttaaagcaattagaaatagagagcataaaatcatcgtatgtgtaaatatgcttggagaaggattcgatcttccacagctaaaaatttcagctatacatgatcctcataaaagtataaatgtaatgctccaatttacgggtagatttacaagaacgacaaagaatgttggggatgccaagtttattgcaaatattgctaatacaagcgtcaatgaaagtttggaagaactttataaagaggattctgactggaatacagtaattagtagtattagttctagaaaaattaaaaatgaaaaagaatatcaagcatttcgagaggaattttctgaaccgagtaagctattagatttggggttaactccaagtataagtactactatctataaaatgaaattcgcgaaatggaggccagagcggtttagtgagtttggtagtaagcaatttcagatcgtagattcagtgattaatgatgagcagaatacgttggttttttctgttaagtcatatttacctgtaggctggactagttctagagagctttttgatgaatcatgggatttgtatatagctttctatgataagaatacagatttactctttattcattcttcttcgaaagatggattagtcaagagattagtacaactaattgctgaagatgctattcaggttcaaggtgaatatatatttagagcgttggctaatttaaaaagattaaaactgcaaaatgtaggtcttaataaaaataaaaaagggctacgctattctatgcatacaggtacagagattaatgatcaaattcctgatattgaagctaatagagcaactaaatcaaacatttttggtaaaggatatgaaaatggtcaactcgtaagcgttggttgctcatataaagggaaaatttgggcaatggatagtaattccctagatcaatggatagcatggtgtaaaggaataggtactaaaatacttgatgataccattgatacaaatgatgttatgaaaaccgctatgcaaactgaagagttggaagagttcccaaatattcgggtgttagccgttgagtggcctatagagattcttcgaaaaaatgaaatgaaaataagaattaaagcggttaaatgggaagagtcattaataaattgtgatttaatttttagtgatgaacagaaccaagatgtaaaaaaacttcatttgagtttaagaactaaatatggacttagtaaaatctcaatgatgattaaagaccgtggaaatgtagtatttcattcagaagataacttagaaattaaaataggtgagcaatcttattcaatagatgagttctttgacgagaatccaccgacactatttttaacagatacctctataatcgatggaggttttagatactacccaaatgacaattacgcttataaatataatatcaataatacagaagactgggattggcatggcatagatatatctgttgaatcgcaaacagtacttaagctaaaacattcagtgcagtattttacaattcaaaaaataatgaacgagtatgatttaatttttgatgatgatgatgcaggtgaggttgcagacatcgtagccatcaagaatattaatgatactaagctaatcatagacttatttcactgcaaatattgtccgaaatctaaacggggtggaacacctcagcctggtgccagaatcgatgatgtatatcaagttgttgggcaagcagaaaaaagtgttaagtggtttgcagataaagagagattaattttgcgtttaatggaaagagaaagggaacgtttaaaacaaggaaaagcttctagaattgataaaggaaaattcgaagacttaatcaacttagcgaaaattgctagatatgctgatttccagctaggtattgctattgttcaacctgcaatttccaaagagaagatgtctgacgatcaattaactgtgattggggctactgcggcatatatagaggaaattagtggtgtaaaactaagagtaattatcaatagataa

SEQ ID NO: 52890 - DNA, 879 bp, Acinetobacter baumannii
atggaaattaaagtactggtagatgtaaaaacaaaacttggagaatgcccaacttgggatgctgttcgccaacgcctattttgggtagatattgttgatggacgattattctgttgtgatgaattcggtgggaatatacgggcgtgggaagttcataaaaaaataggttcttttgctttacaagaaaattataacggcgcaattgttgcgctcgaagacgggttatatcaactcgactttgacacaggcaacttaaaatttatttgcaaccctgaaccagacctacctcaaaatagattaaatgatggtcgtgttgatcggcaaggtcgattcgtttttggttctatgaaccgccttgaagatggaaataccgcgtctctctatcgattagatgcagattataaaatagaaaaattagaaaataatattaatacttcaaatagtatttgctggagtcctgatggtgctaagctctattttgcagacacatggcaaggtgaaatctggtcttatgattatgatcttgaaacagggcaaatctcaaataaaaccattttttgtaagatagatacatcagacggtggttcagcagatggctcgacagtagatcgtgaaggttatttatggaatgcaaaagtatattcgggtcagttagtacgttatcgtcctgatggacaaatcgaccgtattattgaaatgcctgtaaaaaaaattaccagtgcagtttttggcggaaaaaatcttgatgtcttgtttgttacctctatgtcgcaaccgcctcttccgaggttccctgatgacaaccaattgcgaggcagtgtttttgccatttatgggctaggcattcaaggattagccgatgctcgatttatggggtaa

SEQ ID NO: 52891 - DNA, 198 bp, Acinetobacter baumannii
atgatgagtagaactattattaaaagtagcggatataactttgcccgccataaatcaggtagttttgaaataaatttttctgaaaaatatagtctgatccatgttccagcaaccaagaataaagcagcttcaaaccagattagtccgataaatccgttgggtgtctatgtagattgccaaattgacaatacgcaatag

SEQ ID NO: 52892 - DNA, 885 bp, Acinetobacter baumannii
atggctatccagcttttagatgcggcaagaaacgaaattccagtgaaatttacgcagttttctggtggcgagcgtcatgtccaaattgatgagacaaccttaggttcactatctggcaaggtagtggttcgcgcaaagatggcctcaagtcatgatgtgatggactatttgttacttgaaaatatattgctgactcagggtttaaccatcgacctagaagttccgtattttccatatgcacgtcaggaccgtatttgtgcagtaggccaagcgttctcgcttgatgtgatgaccaagttactcaacatcaatgctgacaaaaaggcgggcaaacaaggcaaggtgactgtttgggactgccatagtgaagtaacaacagcattacttgctgccaatacttcttttagtgaagttgtaaacatcagttcagtcgacatcatcgcaaagagtgaagcgctaagcacattgttaaaagatgaaaaaacagtgctggtttgcccagacaaaggcgcaaaagcacgtacacaaatggttgcagacgcttttaattctaagcgcaaacaaccaatcactattgttcagtgcgataaaaaacgtgacccagtgactggcaaaattttaggtacacatgtacatgcgactgatttatcaggcctcacagcggtcattaccgatgacatttgtgatggcggtgcaacctttattggtattgccaaagaactgcgtcgtctcaattgccataaggtcgttctatacgtgacccacggtattttcagtaaaggaatagaggtttttgatggactgcttgaccagctatttacctcggacagtttttcacaacaaccatcagacaaaatttcagtaattgcttttgcagcagaataa

SEQ ID NO: 52893 - DNA, 1698 bp, Acinetobacter baumannii
atgcgtacaacaacaggagtcatgaaagggcttaatccgactgttactattgtctcgaagttattactcttcatttttatcgctttttgcatttttaaggaaaaacaggcaggtgaatattttcagctgatatctaataccttattacaaaatgcaaaatggtatctcttgttactagccacaagcttattagtatttcttctttacttatgtatgagtcgttttggacaaataaaattaggaaaagataacgaaaagcctgaatatagtaatttggcctggatatgtatgcttttctcatgcggtatgggaattggcctaatgttttggtctgtagctgagccaatcagtcactatgctagcaatccttttactcaagggctatctgatgaatcagcccgtatggcaatgcagttaacatttttccattggggactacacccatggggactgttttgtttagtagctgttgctttagggtattttgcatatcgtaaagacttacctttcgcaatgcgctcagtcttatatcctctgattgggaaaaaaatatatggtccaattggagatatagtcgatacattaactattgtcattaccgcttttggtatttcccaatcattaagtatggggattcttgagctaaatacaggccttaatcatacttttggtattagtatggatgtgaaaatccaattaatcctagtactagtactttgtgcactagcaactctctcacttttatctgcaataagtaaaggatttaaaattattgccgaaggtaatatggttctttcctacgttctagtatttgctattatctttattggttcatcaagttacattttaaatactttttttgaaggtattggtgactatctacagaatattattgggatgagtttatggagtgatgctcagaaagattctggctggcaaaatttatggaccgcttattattggccgtggtggatgacttgggcgccatttgtagggttatttattgcccgaatatcaaaagggcgtaccattcgccaagttatcttaggctcacttgcagcccccactttacttacttttctttggatagccgcatttggtggggccgcactgaaaatagagaaaacttcccaccaacaaacatcttcaacaattgttacgaatatcccttctagtacatcagtcgataaagttccaactcacgaacttactatcaccgaagcgactcaacaagatccagcacgagcggtattcgtgttctttgaccatctcactccaaactctgatactaaaatcattctcagcgcattactttgcttactattagccattcatgtgattaccttagttaactctggaatattagtactttgtttcttagattcttctggtgcaacggacccatcaatcggaattcggctgatttggagtgctattattcctttaattggtggaggactactactagctggcggtctaactgctataaaaacagcttgtattattgcgggttttcctatctcgattctattaggaattatgggtttctcattaataaaaagcttacgacaagatccgaaatttcaggaaaatgaaatagtttctattcaagccgatgcttcccccttggagaaaaaattagttcaaactcctaaaaaagaggataaagaattaaatgatcaactgattgtagagtaa

SEQ ID NO: 52894 - DNA, 1677 bp, Acinetobacter baumannii
atgcgtacaacaagggttgctgaatccaattctgcggtttcaattatttcaaaaatattagtagtcgcatttgtacttttttgcgcaatttatgcaaccgaagcagcgaaaatatttgctgatttatcaagcgccttactgcgcaatatgaaatggttcattttgctatctgttacagcgatctgctttttcttaatttatatcatgtgcagccgttatggtttaataaaactgggaaaagatacagataaacctgaatacagttattttgcatggatttcgatgttgttttcatgtgccatgggagtcggtttagtattttggggcgttgctgaaccaatgaaccattatgcgagtaatccatttacaaaaggtttcacggatgaagcagctagtatggcaatgcaaattacctactttcactggggattacatgcatggtctgtttactgtattgcagcgttagcaatcggttatttttcttatcgtaaaggtctacctttttctttacgttcaattttacatccgcttattggcgatcgtatttatggtcctatcggacattttattgatattgtcgtaattgttgtcacaacttttggtatctctcaaactctcgctttaggtgttttacaaataaatgccggattacataaagtttttggcctagaaaccaacacaactgttcaatttattctcatgattaccttatccagtattgccactttctctgtagtgcgcggtattggtacaggaatgcgccgtatttctgaacttaatattatcctatcaatcattttgattgtaatccttatgctcattggacctgctagatacattactaattcttacttagaaggtattggtaactatacatctaattttgtaggtatgagtttgtggagcgatactcaaaaagactctgagtggcaaaactggtggacagctttctattggttatggtggtcaacttgggctccatttgtaggtatgttcattgctaaaatttcaaaaggacgtactatccgtcaactcattgcaggtgtgcttgttgttccaactttggttacttttttctggtttgcagtgttcggcggttcagctctaaaaattgagcaagactctcgccatgcatttgaaaaacagcaatcagctttagtagagaatacgcaatcaaccactgcaacaacacatcctaccattacttctcaaactgaagataaagcagaaccacaggaagagtttactggtggtcctatagtaaaagcgacacaaaaagacagtaccctcgccgtttttgctttatttgatgctgttggaggaggaggtatttttggacaaattcttagtattgcaacctgtcttctactcattacttatcttgtaacatcacaagatggcggaacacatgttctatgtttccttgataccttatctgaaaaagacactcctatccgtactcgtcttttgtggtgtgtgtttgttactgcaatcagcctaggtttgctttatgtaggaggtctcaaagcgattcaagccgctgtcacactatttggattccctattattgttttgctcacaattatggctgtagcacttatgaaagctttcaggcaagaagatatagcaaatattaacgttgtacctaaacatctgaagattgagcctgaagcataa

SEQ ID NO: 52895 - DNA, 1782 bp, Acinetobacter baumannii
atgtctaattattcgagattaaaacaagcactactagagcttgaaaaaaatgaagaacaatttgcagctgtaaattgtagaaatcattgtgttgttttagcaggtcctggtagtgggaaaacaaaaacgcttacaaccgctattgctcgtactcttcatgaagagattattaatccaagagcaattgcatgcataacttataataatgaatgtgcaattgaacttgaaggtcggttatctaaattaggaattgaaaataatagtcaaaattttattggaactgttcatagttttgctttaactcaaataatagtaccctatgcacgttgcttacaagggctccttcctaatgattttaaaatagcaaataaaaatgaatgtaatttagctgtcgaaaatgcctataaagctatatataacgatgggggagaccctcacgcacagtgggaatttgctaaagaaaaaaggaatagagaagtagacagaacgcatcctgcttggaaaggccataataaagaactggctgaatttattgaagaatatgaatctgaattaagaaaaaaaggccttattgatttcgatgatatgcctctcatagcatttaaaatgattaaagaaaacctttggatccggcatgctttagaatgccgatttccaattttatttgtagatgaatatcaagatttaggtcatgtgcttcatgaactagtacatctactttgttttgatggaaaaatccggctatttgctgtaggagatgcagatcaatcaatttatggatttactggagctaatccagagttattacaaagtttgactgagagagatgacgtagagacaattcaattaaggtataactatcgttcaggaacaagaattgtcaaagcatctttagctgctctggatgaggaaagaaattatgaaactccagaaggtactccagagggggaaatcatttttaatccggtgaaagggacattagaggaacaagcaaattttatagtagataagcttttgggtgaattagcttcgaagggtttgaaaaatgaacaaattgcaatcttatataaggctgcttggttaggtaataaaattgtagaggccttagaagcaaaaaaaataccataccatcgaactgatagtaattcactaattaaaagaagttcaaagttagcttgttttattgaggattgtgcaaaatggataacaggagggtggaaacgagctgaaccaccttttaataaactatcaaaacaggctttaaatatagtttatggaaataactatacacaagctgaaaaacaaatattagacctgcaacttattaattttctacagaagagtagatttgtttctgaaactgcaaatgcatggttaataagatttgaaaaagaacttatggctcattggtcaagtatttgtcgtaataatatacaagaatgggaggtatgtttggatcttataaaaaaaacttccccacaaatgaataaagatatgtctcttgagttattttccggaaaaactgaaggaactggaagattgatcctaactacttttcatagttcgaaaggtcgtgaatttgatgctgttattatttttggtgcaaacaaggggatattgcctgataagagagatcttaaaacatttaaatctttaaaggaggtaaaaagattattctatgttgctgttactagaccaaaaactatattacatttagtctatgagtcaaaaaaacattctgaatttttagatgagttttatagacgtactcagcaaagttag

SEQ ID NO: 52896 - DNA, 1794 bp, Acinetobacter baumannii
atgcacttaaaaaatttaaaaattagaaattttaggaatttcgaatctatagatatccctttgagtgataatattgtattactcggggaaaatcggacaggaaaaagtaatttaatatttgctatgcgattagtgattgatcaaaatctttcagattccgctagacaattaaaactctctgatttttgggatggttgtgatttatttacgaaaccacaaattgaagtacatttagattttactgattttgaaaatgatccagatttaactgcattacttacggattatagactggcctccgatcctcatacagtccgtttaagctatatatttagatgtaaagccgagtgtactggtttacctacaagtagtgaagatttcgaattcttgatttatgggggcgacgtagaagaaaagcctattaataatcaagttagaagaagaatttcactagatttattagacgctttacgagatgcagagaatcaacttggttcatggagaaactctccattaagacctcttatagaaaatgctatgagagcaatcgatagtacaactttaaccactatttcagctgatttagaagcagcaaataaaaaaatagtagagcagcctcagataaaagttttagatagttcattaagtaaacaaattctgagtctttctggtaaaggacatgatttaaagccttcgctccgtttttctaatgcagatcctttaagactatttcgttcattaggaatgtacattgatgagggaaaacgtagtattaatgaagctagtctaggctcagcaaatgttatcttgatggcattaaaacttgaggaattttcttggcgtaaagaaaaaaatgaaagaaattattctttactatgcatagaagagcccgaagcccatttacaccctcaacttcagcgaagtgttttcaaaaatatatttaacgaaaaggattcagctcaagctcttattattaccagccattctccaactttagcagcagtagtaccactacgttcaattgttaatttaaggcagataaataatagtacgaaagcattttctctagctaatttaccaattgatgaagatgagaaagatgatattgaaaggtatttaatagcaactcgttctgaaattttattttccaaaggcataatttttgttgagggggatgctgaagaagctttgattcctagctttgctgaattattaggatatgatcttgatgggtttggtattactgtatgcaatattggtggggttaattttaagccttatgtcaaacttgcaagtagtttaggtatcccttttacgattattactgattgggatcctttagatggtactaaacagccgttaggaaaaaaacgcacagttgaaatttgggatgctgctggtgaggtcaatttatctacttttaggcttactcaagaacagcgagaatggtgtgataatgcttcatatgatcagttttcagctcaatgggcaaaatatgggatatttcttaatgatcaaacttttgaagttgctatagctcaaactccaaatttaagcgagatattattagatattttagatgaacagggttttggaccacaaagaactcagagaattaaagagtggagaggcgatcatacaaaaataaataatgaaaatttactttctatgattaaagatatcggaaaaggacgtttaagcggaaaaattaaaaagagaataactgcatctggaactataaatcctcccgcatatattactaatgcgattgagtatatggtgaaaaatgtctaa

SEQ ID NO: 52897 - DNA, 1443 bp, Acinetobacter baumannii
atgtcagaacagcaattaagaaaagttaagggaatttggtgtaaatttaacaatcaaaatagaatgtcaactgttaccctcgatgagatgcgtatatgttgtataaaaaggggggtagagattattgagattgaagaatgtacttttggttttaaccaaagtattccagcaattaaaattacagttgcaaataatctgactgcattattacctcgccagaaactatttgatattcagatatataaaaataatattctaccttttaaaaaagaagaagaattttggcataaagtagactggttcccaccagtatttatgaatatggaaatgataaatgaaggctttaaagtaactaatttaaaaattggttatcaagattattttaacaaaactcagcttcaggagcgttttagtgagttcttcccgactgtgtataatctttcaaatatcattcctataacaattcaaacattgcccaagtcaatttctatttcaaagcatgttcctgtaatcagagagtctattttagccttctacagtggaatgcgagtaacatcagtagcatcattaattccaattgttgaagatattttaaactcgatcattgaggatgccgatgaagatctaaagttaaaagataaagttcagagatgtattgcacgtgcaagagaaaatataacttccgatcatatattaggcgctgactggatacctgatgaatatattgaaattgatgttttaaaggtaatgaatgagcgtattaggataattgaattaataggtgattggctaatcaacagcttttatgaaaaaacaaataagtatcaaaattcatcgggttttaataggcatttttttgcacatgcaaaatctgaaatttggcaaaacccatctaatttttttagagcaatgggtttaattcaggccttagcctttgtcgaatgttttgcaatgaagcaatcaaaactttctatatttgcaccgcttccagatcaaaggtctaaatcatttcatattgaagttttggcctgtttaaatagtcagcatacaaaaaatatttttcttcagcagatacaaataaataataatctaccttttaatgtcattgtatctgatgatggctggttacgaaagtctgctttgctgtcctctcaaatgaatgatgatattgtcaaaagattgcgtaatacaggatggcaatgccattcattttctgagccggagaaagagggagagtttataacaatacaggcatttaaaaatggaagaaatattaaaattgcccttttgtattgttgtgatacatgcaataaaatctataaagaacttgagaaaacatgtgactatatactttatttgggccccccctataaacaatcttcttatgctcaaggggtgcaaaaacatgtgggccctttaaatgcttggttagttcccaattag

SEQ ID NO: 52898 - DNA, 1701 bp, Acinetobacter baumannii
atgaatactcaagtacaggtagtatcaccacagaattttttcgatgaatcacgctcgattgctgaaaaatttatccaaacagttgttgctgttgacgataatatttcttttatagaacgtcctaatagcgttaataattctgatttaaatgttcaggtgcctgatgatgaaagcgggttaggtacaagtagtgttggcactcatgaattgagtttagatgctcctgatttaaacaatgatttaaattatcaggagttatcagcttgctttgctgataagtcaatcttgtgtagtgctttaaaagcttatgagggtgaagatggagaacaaaagaccatagaagcgacttttaatatttctaagaaagctgatattactatcttagattggcaaatggaacgtgatcagagtaattacgggaacattgcaaaaggagcaattaaaaaacttctacaatacgatgtagacgggaatggccggttacgcttaatcctgatatatacgagtgaatccatacccaccgtattaagagctttaaaagaccaatttacagaatttcagccaaagatagagaatgaaaaagaaatacagttttctttcgaaagcttatcgttgtgtaaagtagttgtgattaataagcaaacaaatattgaaagtttagtagatagatcaattgaagaattcacgcatatgacatgtggattactgtcaaatgcaactttggctgcaattactgagattcgcgataaaacacatcatcatctgtataagtttaataaaaaattagatgcggcctatatatcgcatgttttaggattaatttcgtcacctgcaatgagagaaaatgcacatgaagttgctttcgattatggcattgatctattggctgaagaaataaaatctgatctacaaattagtagtcaggttaaaaaatctttatctaaagatgttttacagaattggccaaattttattatcgaaaaaaatccagaaacgatattcaaatttaaaattggagattcatttgaagttccagttacattagaaagagtgaaacgtattttatcagtaactgataaatctgagtttgaaaacattttggaagaagagccaaaatttttattagattcttcatcaggaacaatcgctaagacctttagtgataaatatattcaattcatgattaatgatgataacttgcaggagcatttagagttaagtgctattcaatgtacaagaagaaatatgaagaatagaggaagctatgtacctacgttgaaacaaggtgtaattgtaaaaagaagagaagataaaaagttttatgtatgtattcaaccattatgtgacagcgtacgagttaaagatttaactaattttacattcttaagaatttcaaaagttccaaatgcgaagccaatgactcatgtaattcatggagtagatgtaccttacttggcctttgatgtcgatccaaaatcaaaaaatatttatatggctcaattcttaccagatccatcagaaaaaatggtaaaagctgaattatgcaatcaaaaatatatatttaaagctggggatgaggttttcgaatggtgtggtgaatttaaacaacccatatttcaaggtattgttaatgatgtaagtgctagtctagctagagttggatttgattcctttgaatggttacgtcaacgaaaatcttaa

SEQ ID NO: 52899 - DNA, 1287 bp, Acinetobacter baumannii
ttggaaaaagttaaatttttagaagatttgaaatcaaaatttaatatcaaaataccaagcggtgtaggatttaatcgtgaaatatcaaatcgtattgataaatataatttggtaaaagaaaattttctaattgagttagagaagtttaatagtaatctaaataagctttttgtagattttgagaataagtatggaaataaagttgatcttaaaaaacgtattacagactcattaattcagcaggaagagtcttataaacaaagcattagtcaattgtatagtgagactaacagtgcaattaaagaactaactgagtgggcaactaaagaaatcagaagaaataaagaggaaggatttaaggctttagtacaactgcaaacagaagtggcctcagtagatttttctagtaaatcaaatgaagaattaatcgaactgaaatcaactgtagaaaagcaatttcaaaacttatctgaaacagtctcaaatagtttgaaagatattcaaacacagataaatacaagcagggaacagacttcagaaaatacattatcttcatcaagattagtttcaattcttgaaactgaatatgaggtcttaaaagagcagcaagaagaaaatctagaaatgattcaacttggtatggcttttggtgtaattcatcatgaatttaaccataatattcttcgtgtacgtagaggaatcaaggacttaacaccttgggccaaagcgaatccaaagcttcaagaaatatatgacaatatacgtactggttttgatcatttagatggttacttgagaacgtttacaccactttcaagaaggcttacgcgtcgcaaatctatcataacaggtgaagcattaagtttgtttttaaaggaaattttctctgaaagattggaaaaagaaaatgtagaaatgctttttactacggaatttttgaactttaaaattcaagcatttagttcaaccttatatcctgcaatcgttaacttagtggataacgcaatttattgggcaaacaaaagttcgtcattgcaaaaaaaagtaaagctacatgctgataatgagaatttatttattgccgatactggtcctggtgttccattaattgatagagagaatatttttgaattcggcttctctcgaaaaattggtggtcgaggtatggggctttatatcgcaagacaaacgctagaacgagacgggtttaatttagaactagaagaatttgatccagaaatcggcgcagtttttaaaattagtcatattgaagttgagggggattaa

SEQ ID NO: 52900 - DNA, 1383 bp, Acinetobacter baumannii
atgatcgtaacctttatttcccaatgcggaaagaaagcgattcctcgaactcgtcgcgtgttagatgcttttgcagatcggatcggtgataacacatggcaaacagtcattactgaagatggcttattggctgtaaaaaaactactcagaaaaacagtcacaaagaatactgcggtgagttgtcattggatacggggtcggcgtagaagtgaacttttatgggtagttggtaatcggaataagtttaatgagcaggggattgtgcctgtaaacaccacgaaaaaaagtctagctcaaaataaatgggaaaatgattggcattatttacctctcattaaagcattggttgcagtgtctgctttacttcatgattggggtaaagcaactgttttgtttcagcaaaaactactgagtaagaatgatcaattcaaaggtgatcctttacgacatgaatggatttcctgcatgttgttaaatgctttggtgcaatcatctggtaatactaagtctgatgaagcatggttaaaactattgatgaatcaaacttgggacgaggaactactcaaacaaacgattgtaaagaactcagatcaatcgaaagttctagaccaacttccaccttttgctcaattagttgcttggttaattgtttcgcatcatcgcctgccgaatttaaaaactgaaaaagagtataaaaaatatgggagtgaggacatttcatgtatcaaggatttatttgaatttatcgaagcagattggggttatcaaaataagtttgaggaaaaagagtatcaacagcgcctccaattatgcttcgagtttgaacaaggtttattgactcaatcggccgaatggaccaagcaagttaaaaaatggtcagcgcgtttattacaagaatctcaagtatcagaacagatttttgttgatggttgttggcgagtgattttacatcatgcacgcttatgtctcatgttaggagatcattattattcatcgtgtgaggctgataaaacttggaaaacaagtttatcactcgttgcaaatactgatccaaaaacgaaacaagccaaacagtatttagatgagcatttggtacgtgtcagtgacaatgcaatgcgagtagcccaggccctaagccgtttggctgatgaaatggaatctgcatatgatattcaaaaattaaaaaagaaaagtccacaaggttttgaatggcaagatcaagctgttaaaggaattcaacagttcattcaaaaaatgaggggagtgagaaacaaggttggtttattgtcaacatggcaagtactggaaaaggtaaaaccattgccaatgccaaaattatgcaagccctatctcaagatggtcaatcattacgttatgttttag

SEQ ID NO: 52901 - DNA, 1632 bp, Acinetobacter baumannii
atgaataaaattagctcaatcttaaagataggtgctaccttaatagcgatcgtgcttctacaagcatgtgcgaccgcaccactacccaaaataactaataaacaggcaaaaggagttttggaatctataaaaccagatgaaaaactgaatcctattgtactcagtattagttttaatagtggaataatttatccttctttaaaaatagaaagccttacagaaaaaacagcaatacagaaaaataataaaatctatgaaattaaagtaataaattcagatgtctctcgctctacatttatttatagtgggcaactaccagccggtgaatatcgcattgttgaattgagcaactatcaaccttccccaaacccttttctttcaggtaaaatccaatttattaatttaaatgataaggataaacttcatccaatgggtacttttaaagtactagaaaataccacaactgatttaggacgtattaatttaactcatgctaatgatgcctatttcatagcaagatctgcaaaacatttttctaataaggatttaattagcaaactaaaaaataattatctagaggcgatttataaagataaaattttgaatggatggacgcagccagttacagctttagaaaaaaatacaggggatgagagtaagatactaccctttggtatgcagtgttttaaagaactaaaagataatactattgtagcttcaagcaaaattggctcagtttttttcttacctttacaagatactaataaaaaaactaaaatttttcaaagtaatgataacttggcttttgactgtataactgtaaaagaaaattataactttgattttttagcttatggtgaaatgaacactctttataaacatttaaaagaaagtgacgttcttacctcaattgatactggcaatctaccaatcggcataatttcatcaatagttggagatgataaaaacggatggtttctatctcatatagtgggtcacaaagctacagtttataagagcaatcgtctagaaaacggtaattggcaaccaattatacaaaaagaaattcttgataatttttggggattaagtggattttggttgtgggaagatgaacaaggatttagctatgcagatatgtacggaaatattaacaactataattatataacgaaaaaatggtctgaaaataaagtaccaaataatgagaatatatctcaactaatagttaatccagataaatcaattagtataattacatcaaaacgtggttttgcgggtatattttcaaatctatttaacactaatgatcatggtatgacatggcaaaaagttaatagtccttttaaagtaaatgtcttccctgctcaggtttcaaaacagggagatttatatatatcaggtgcacaattcaattgggaaaaattagcaatttcagaagattcaggtagaacctggaaaatgcatgaaataatgtctccaagttctattgttactttaaattcaggagaaattattaatatcctttattctggccaatatgcattagttaaaatatcaaatgataagggtaagagttggaagactctttatagcacctataacagaaatttaagcaactcatcaaaatag

SEQ ID NO: 52902 - DNA, 255 bp, Acinetobacter baumannii
atgcagcaatctatccaaattaaaatcgaatcattcggtgcaattgaaaaattgcttccccaaaatctttcgatcgtttgtcctgccaatattctagtgaaagatgtcttagatcaaattgtgactttacatccggaatgcacacaggccatggaaaaatgtgcatgtgcgatagaggataacgttataaccagacaatctgccttaaatcagccatgtactttggttttattatcaccagttgcaggaggatga

SEQ ID NO: 52903 - DNA, 522 bp, Acinetobacter baumannii
atggcgaatacttctaaatcatttatcggctttactgcttctttggtactctatttctctgggataaatacactttacgcaaaaatacctgatgaacttctttatcagcctcccaaaaatgtacaatcgactcaactagctactctagtaggttttcaaaaattaaatgctctccagcttattaaagcccgtatatatcttacttatatcaatgataaagctactttaaatcgctcgcatgactggaataaagtttatgagatttctccaggactgacagacatccgccttgtatcagatacacctaactattttacaagtggacgtttaaaatttactgcaaaagccagtcatcattatcaagttaagaataatcaagcagatataaagtttaataaagaacctttactattttgggtagaagatcttgatacaggtgaggttgtaacacctaagcaggaattattaggtattacggtcccttcatcagtaagttttgtccctgtgatcatttcaaaataa

SEQ ID NO: 52904 - DNA, 582 bp, Acinetobacter baumannii
gtgaaaaaaattattttattgtctagcgtaactcttttgggatcattactatctgggtgcataacaactagaaatatagggcctatagaaccaatcacttattattcttcccctgctatttccacaaatacagcaacaattatcgggagcactgaaattagtcattcgattaaagctgataaaattgcatatgtatttgcagttgattttaagaaaatcgaaaatggtcgaggacaaatgagttcccagctagcagtagaagctggtgagcatgatctacagctatggtgtcaacaaggcggctttaaatatacaaacttagcacgagtaaaacttgaagctagtaagcattatcaagttggtttcgctatgaatgtaaataaccaatataattgttatatgtggatctatgacttagatgccaaaaaagctattggggaattaatacctacaattgaagttggtgaatatgccaatcccgacaaaatgcgtccgattacacaatttttagaagctcgtccaagtgcccaatcaaatgtgactgtaccgattcgagtaatcaataaaatgggacataattaa

SEQ ID NO: 52905 - DNA, 1296 bp, Acinetobacter baumannii
atgaatatacttgctctatcaagtacaggtgagctatcccttgttgcaggggccagcccatcactaaaactggaatttgatactcacagttatcttgcaaatacagaaatcaatgtggccttttttgcgaaagtaactagcccacgcggtcctgcagatatttctatgcgtttggaaatacgtgatgcggtaacaggtgatcaaattgttactgttcagggattagtagatggagacattgaaaattctgcttctattgtcgctgtagctgatgcgaaagaatatttcgagcgatttgatttatcgttaggtattgatgcgttacaagcaattctcaaatctaatgcttataacgaatcaaatagcttaggtcgtgcatcaaaaacgttggcattggaagacgaatcgttaccgtcatttaaaccagatgaactatataaaattctgacaagccaattaagcacaccagcatatctgactttaccaaatcctcatgatttaccaatttatgttgcggctcaacgtgcagctacaaaattacgtattcctttggatgctgaaatcaacccaacttttacagctgagcaagcagctcaatttgcgacaagcgtagatgctcaatctcagtttgttcaattcatttggagcccgaacctttgccgcccatctgatgctgtcacgctaagaggtcgaaaggtaccagcttattatttgggccattacatcggcgataaattattacgtaatgcaaagttaaataaacaaggctttgcgccgttaaaaaatgcagtagcttggaaagattatccctttacagcaaaaaacttaagccagatgccgaatactgatcttgaagatgaacagactcaagaaatgttggctaaggctaaagtaaatgtagttcgcccagttaagtttgaaactacattatttgtattaagtgatgtgcttacgcaataccaaagcaaaaatagtgctttgcgtttagttcccgccgcggagatttcggctcgggttacgaataaatgtatcgagatcctgcggacttatatgttccaagctacaccggactatatcaaaaaagctggtgatgacatccaagagtttttagaaggtgcttctagtgaaacaaccggttggttgcaaccggctgaagacctagggggtaaaccttttgagttcagtttaatacctgacaaagactatccatatgagcgtgtacgactctatttagcccatggagttgttggtacaactcgtgccgcaatttttgatgacgacgttttagttaaataa

SEQ ID NO: 52906 - DNA, 426 bp, Acinetobacter baumannii
atgaaaatagtaagatcaagaaaaggaataatttatactctttattcactattaaaccctataccatttggtatgtttgttggagctctaatttttgatattacttataaaaatacaggtgaaatattatgggcaaatgcagccagctggctggttgtacttggtctaattattgccattattcctagactcattaatttattttatgtgtggtttcgtcctatacaaaatattagaaaaattgaaataacaggtttctttctttacggttttgccatagtaagcggaatcttcaatgcttttatacatagtcgagatgcatatggaattgttcctgctaatgtaattttttctttcatcactgtttttttaatttctatttattacatatatgaatcaactgctagaaatgatttagaagattaa

SEQ ID NO: 52907 - DNA, 1308 bp, Acinetobacter baumannii
atgaaaactatttataaaaccacattattttttttaatgaacttagcactatttggatgtagcagagaaagtgtaattgatctggataaacaatatggagcgaatcctgagttaccagaagcccaaaattatttagttccacctatgaaagttccacgaggagttggttgggcagaaaatcaaaagcctgttgtggcacaaggtttaaaaattgagaaaattgccgatggcttattacatccaagacagctttataccctcccaaatggcgacgttttagtagttgaatcgaatagtccaggtgaagcccctaccactacccctaaacaacttattgcaaataaagtcaaaggtctttccggaaaaggaggtaaaggtggaaatcgaataaccttactacgaccaacagaaagtggtgaatggaaacaatatattttcttaaaaaacctttactctccttttggtgtacaacttattggtgattcactatatgttgccaatacaaacaatatcactaaataccaatatgtagatggctcaacttctattaatgatacgggaatcgttctggcagatttaccagatacgattaatcatcattggacaaaatctctagtcgcaagtaaagacggaactaagctatatgtgggtgttggttcaaacagtaatattggtgaaaaaggtttagctgtagaatatcgtcgagcaacagtacttgaagttgatgttgcgagcggcgctagccgaatatatgcaagtggaatacgaaatccgactggattacaaatagaacctgaaaccaatcaactttttgctatcgtaaatgaacgagatgaaattggtggaagtttagtgcctgattacctaacctctgttcaagataaaggtttctatggttggccttatagctattttggacaacatcttgatacacgtgtaaaacaacaaagacctgatttggttaaaaaagcaattaagccagattattcattaggttcccatgttgcacctttaggtttatggtttgcatcgaaaaaaacaaaccttggtgaccaatttaaaaaaggcgcttttgtgagtaatcatggtagttggaatagaacacctttgaatggctacaacgttgtgtttattccatttataaatggcaaaccaactggagtccctaagactgtagtgagtggtttctattcgcaagatcaaaagagtttgtacggtgcgcctgtaggtttaacagaagatcgttcaggggctttattggttgcagatgatgtcgggaatgcgatctggcgagtaagtattcaataa

SEQ ID NO: 52908 - DNA, 1230 bp, Acinetobacter baumannii
atggcacagtctacatttacaaattctccgttacagcaaccattagaattggcgtgcggcataaccatacccaaccgtattgcaaagtcggccatgagtgaacaattagctgatcgacacggctcacccaccacggacttacaacagttgtatgcagcttgggccagaggtggagcagggttgttaattacaggcaatgtgatgattgaccatcgtgcctttgttgagccacgaaatgtcgttttgcaagatgagcaatttttacaagctaataagttatgggctcaggctgctaaggccaatggcagcaaaatcatcatgcaaattaaccatccgggtcgtgttgctgtcttgccacttttaaaaaagccgatagcaccatcagcagtcggtcttgatttacctgccatgaatattcttcgcattccacgtgcgatgaccgaaccggaaatatatgagcagatcaatcgatttgctacaactgctgagcttgctgttaaagctggctttgatggcgtacaggttcatgccgcacatggttatttactctcacaatttttgtcaccactctcaaatgttcgaaacgatgggtggggtggtagtcctgaaaatcgacgccgtatgttaattgaaacggttcgagctgtacgagttgcaataggcaaagacaaaatattaagcgtaaaactcaactctgccgattttcaaaagggcggcttaagtcaggaagagtctctacaaattgcattagctttagaagcagaagggatcgacctattagagatttcaggcgggaattatgaatctcctgcacagttaggctatgcaccagatcgttctgctcagcgtgatgcatattttattgattatgccaccgaacttcgcaaacaaagcaaattaccactcatgttaacaggtggactgcgtaatgtagattttatgaaccttattgttgccaatggttccgttgatttggttggattggctcgtccatttgctatacaactagatttggcaaagcaacttttgtcagggaaatcgataatagaacccgctcgtgtgccttcaattggctataaacctgtagatgcctatttacaactggcatggcacgcgacccaatttcgctgtattagccgtgggcaacaacctaaagcgattaagggcttagtgcgaacattgattgcctttggtccacgtatgggatgtaatattctaactcagaaataa

SEQ ID NO: 52909 - DNA, 870 bp, Acinetobacter baumannii
atgaatgcgctctttcaatcaaaaaaaatacaagatttttctaaaatctcagcttcaattgatattcctgtaagagtaatggactttgcctttccagatgaaattccagagttctggttcaataataatgccttgcttacgatgttattgactgctttatcgagtgcttttccagatggtgaacgtcaatttattcatagtgtgcggaattatcaggacaaaattagcgatcctattttgcttaaacaagtccgagcttttattggccaagaagcgcatcacggtaaagagcatgatgcacttaatgccatgatgcttaaaaaaggttacccagttgcacgcatttataaacgctttaaaaagatgaaccgtatgttgcagcaacggttttctttagaacatcagttagcttgcacggtatgtatggaacacctcacagcaattttagctgactatttcattagtaccgcaccccaagatttagagctatttaatacccatgtaaggaaaatctgggcatggcatgcgattgaagaaacagaacataaagctgtggcttttgatgtgtaccagtcgttggtcaatagaccttatttcttacggctggtgatgttagaaactacgctttcttttcttatcattaccagcagaggaacaaccgaacttttacgagcttctggaaaacaaagagacttaaaagaactttatcaaggtttccgttatttgtttggaaaacaaggtctagttagacggattggcaaacactatctcgactttttctccgcagattttcatccttggaagcatgacaatcgggacatgatgaacttattaaaaaagcaatatttcaatgaagagctgctgaattga

SEQ ID NO: 52910 - DNA, 747 bp, Acinetobacter baumannii
atgagacaactcatcaatgatttaagtgttccagtgggcttagccaatcttggtaataagctgtatcacaatgctcagtatttgacggctgttgttgaagtcgatgaaaaagcgatggctcgttggttaccgtctggaatggcactggttcaacctgccagagctgatttgttctgtgcttatttcccagaaaatgtctatacgggtgcttaccatgaagcgggtttattcgttcatattaaagtaggcaataaaacaggaatcttttgcccttggatgattttggacgatgatcgcgccatgattattggacgtgagttgctgggctaccctaaaaagatgggtgagattagctgggaaaatgacggaaaacgtattgttagcaatgcctcacgccgcggtacaacactcattgaaatggaagccaagctgggtgaagtcattcatgatgcgcctccaattttaggtttaccacatcgaaatattacaggtggattgggaattggtttacctcgtgaagttcgatttaccccgaaagaacacccacttgaaatccgtcgtgtagaaatgaacctacgttttacgggtactgaaaatgaccctttacatgagatgggactaggtaatgtcattgaagcaagactgcatcgagttgatttgtcaggtgggataattcctccaattcaaataccacgtttacgtacgccattatttttattgcgtcagtttaatcctcgtgttttataa

SEQ ID NO: 52911 - DNA, 804 bp, Acinetobacter baumannii
atgagtctacctattccacgagcctcatctcgcgttgtgattacaggtgcttcatcaggcattggagaggagttagcaaaaaattttgctgtgcgaggatattccttagttttagtcgctcgccgtatcgaaaaattagaagcactggctgaaaaactaaaagttgaatatcaaatatctgtagatttatatccatgtgatttgggagatagacaagctagagctaagtttcgtcactatttagaaagtatcgaagtttccattctttgtaataacgcagattttgcgacttttggacgtcttcaagagttagatgcagatcgagagcgtgaagaagtcgaagtcaatagtgtggcaattcacgacctgactttagccgtgttgccacaaatgctcaaacgaaaatctggagcaatactgattgtaggctctacttctggtcatcaacccactccggcaaatgccacatatgcggcaactaaagcatttgcaaactcatttgcagagtctttacatagcgaactaaatggtacaggcgtgacctgtactttacttgccccgggtcctactaaaacaggttttaatgaagttgctggaattaccaaaattgatggagtcggtggaaattttgtttgggtaacagcagaacgagtagctaaagaagcgattcaaggcatggattgcaatcgccgtattgtgattcccggttttattgcacaggcgcaaacttttgggggacgttataccccgcgcatcatcttgctcccaattctgaaacaagtattttcgagattaaaatcatga

SEQ ID NO: 52912 - DNA, 1047 bp, Acinetobacter baumannii
atgaaagatccttatggactatccaaagccagcattcctatttcttatgctcatttattattagaaattatggtagacaaagggtttttagcccttgagattttgaaaaaaagtaaaattcccttaacacttttagacagattagacgcccgaattacccctattcaatggtctaaactggcatgggaaagcttagtattgtcaaaagattctggtttgggatatgagtatggaataaaactgcgcttaactgctcatgggccaatgggatatgccctcatgagtagtccaaatctgcgtcaagcaatagaggtttcaacacaattctttaatatgcggttaaaagattatcagattgctctgctagatgagcatgaattttctattattgaaattaaagaaactcaccctgttgtcagcaatcaacccacccaagccgaaacgcttagacgttttttttatgagtgtctaatgattggagtgattcaagctggtcaatttttgagagagcatgatttttctgatattgaattatctgttgactggtcagaacctagctaccacaaagcttatcaacacctattgcctactattcattttaatcaaccaaccaatcaaattcggtataaaaaacagcttttagatttacctattaaaatggcagatccgattgctttcaaacaagctctagcccaatgtgaagctgaacaactccgcttttccgaacaaattaaagatatatgcctgaccgtaaaagcagagttaaatttaaacccacaagttggttaccctacatttgatgaaattgcgaatcgcttaaacatgtctagccggaccttacggcgccatttaagccaagtcggttcttcatatcttcatctattagaagaagtgcaacaaaaagaagctgaaaacttactactcaatagtgatatggaaatacaagaaatagctctttatttaggctatatacaacccacaaatttcactcgtgcatttaaaaaatggacaggtcaaacaccgattacatttagaaagaatcaataa

SEQ ID NO: 52913 - DNA, 528 bp, Acinetobacter baumannii
atggatgagccaacgaatgacttagatatggtcacacttgagctacttgaggagatgttgtctgaatataaaggtactttgcttctaattagccatgaccgtgcttttatggacaacgttgtaacatcaacttgggtatttgatggcaaaggcggtattgcagaatatatcggtggttatcaggactatttaattcagcgtccaaatgagagagtcgttgaccaaaaaggcgatgtaaaaaaagctcaggctaaagcagaagctgaaaaaaatgcagctcaaacgaacgtaaaaaaggtcaaattaagctacaaagaccaacgcgaactggaacaacttcctgcggaaattgaaaaattggaaaccgagcaagccgagctttctgacaaacttgcggatggttcatggtttgtcacagatgcagatgctgcaaccaaagcaagccagcgtctagcagaaattgaagagttactccttgaaaagttagagcgttgggatgaacttgagcaaatgagtaaaggcaattaa

SEQ ID NO: 52914 - DNA, 288 bp, Acinetobacter baumannii
atgactcaaataattgtatctggccttgaaaaaaagacttttaattttttaagattttacatatctcgtgcaaatagaattattccacctctagtcgccttatgtttgattattggaataataggatggtttactttaacccctcaagaattaaaggactatggaaaacatgcagctactagtttgagtttcatctcaaatattcagtattttagagaatctggttattttaatacagactctcatgaaaaattactattacatacttggtctttatctgttgagtag

SEQ ID NO: 52915 - DNA, 204 bp, Acinetobacter baumannii
atgacgcttaaagaaaaaatattgtttttgacagtcactcgcggttacacccaacaagaagtaagtgatgaaacggggattgagcaaagttctgtttcaagaattttaaagaacactcaaaaaagtgtggggtatcagaaaggcatcgctttagatgcgttcgtaaaccgtgaaaaagaaaaaatgcaatctcaaacagcttaa

SEQ ID NO: 52916 - DNA, 774 bp, Acinetobacter baumannii
gtgaaatctatgaattacctgaaatcgaatcttgattatttgctcacaaagaatgaaacaaaccccactgatcttgagcaaaagcacccagagattaaacaatcgactgtattccgcattttgaacggaattactaaagatcctagacgctctacattagaacctattgctaaatgggcaggcgtaactgttaatgacttatttgataaagatttatctgtcttagaaagaaatcaaaacgaacataatccaggtcctgagaataatttaatttatgatactgagatccatttatacgaagatggtgaccctgttcctgatggttatgtagctattgatttctatagtgaaattaaggttagtgcaggaagtggttacttgaacattgaacatcaaagccctcataagttcttatttccaattaatgaaataagaagatatgacgttaaacctgattgtgcgaaggtactagttgtagatggtgaaagcatgatcccggatttatatccagggcaacgaatctcaattgatacatctgctaaaagaatctttgatggtgaaatttatgcctttttgaaaggtgatgaattaaaaatcaagatgttatttgaatggaatgaacaaggtaaaggtggcttcaaggcagtatctcgtaatacagacaaagttaaatatcctgatgaatattattcaccagctcgcattgaagcagaaaatgtacaaatcattggtcaatactggtggaaatctgaaggtcgcaaggtgagacgttaa

SEQ ID NO: 52917 - DNA, 285 bp, Acinetobacter baumannii
atgaaaaacaataaagaaaatacggcagacttaattggtagacaagcttttctaaaaacatttgtcgaagaggtagtaagatcatcaccagatatggctgcatctattctaatgaatataaaagaactcactaatgagcatcatccccttgtaactcaagcatttacaatggatcattttgaaaatcatgatatggctggcaacgttataaagaatgctctacatggtttcgacatggaattagcaagaatgcttaagctaacagttgaaaatttaaagatttag

SEQ ID NO: 52918 - DNA, 372 bp, Acinetobacter baumannii
atgaaaaccaactatttacgaggatataaacgttacgaaaacagtctgaataatcaagcaaaccataaatcaactttccgcgaattcgttggaaaggatgaggaacgtggtttatacaaagtacgtttaggccatacagtttatgctgcaaatcacacattaactcgtgtttatacggttaatgaagccaatgaattaactcctgtttcacaatatacgttaaatactaaggattggattttacgaaacctagaaaccgaaattaaatatcgtagaggacgtgaattaggtcaaattcttcaaaaaacgcacatcccttcccctgatcgaaaagcttacaaaattcgtcgtggctttcttggtacacgttaa

SEQ ID NO: 52919 - DNA, 1029 bp, Acinetobacter baumannii
atgaaacctactctatttacgcctgaaacatgggcggagtttacccaacaactcaaaaattcttgggaaaaagataacgctggtactgattcaccaatttttgttgttcaagaaaaaaagattgtttggggtttagatccggctagtgattctgtagaaatcactaatattgtagatgccgatgatgaatcaacatataaatcaattgatgatttttttgaatctcttaaagctacagataagcatgctttaaatggtttagcaattgaagaggaagatgaacttttcctcgatgtaaaagcttctactcaaataaacattttatctgattggaatgaacgcaatattcatatctgccatggtaaatatttttgggaagatgttaattgccatctaactcgttcagctgcagatgcatttattaaacgtaaatcgcatgatttcggtgagttgcgggtatttgttaagtcactttattggtgtgaggagtttaagaatttacttaacgctattattagcggtgaagtaggtttgacaagtatagatgacgacaacatcctaaacgttttgggaccaattgaacccaaagcagataaagaaattaactcaactcaagcaaaaaaatctgcgaagaaggccaataacaaagaggaaaattggactcgttatcataatgacaaacctgttgagtctccgttagctggccttattgaaaagctaaagaaaactaaaactgcagatgcagctaatagtctcattgaggaaacgaaagactgggcttctgaagatcaaaaatcttttttaactgagttaaataaacacttagtcatcattgctggtcaatcgaaagaaaatatttcaatttctgaacgagtcaaacgagctacagacctgactacgttggatgcgattgaaattgatatttcagaagcagatgaacgtattcaagaacccctaatggagctggttataaaaagaagaaaagaactagaagttgaaaataacttcttattggagtcaccacaatga

SEQ ID NO: 52920 - DNA, 510 bp, Acinetobacter baumannii
atgattttttatgaccgtgctttttttgaagaaaatttcaaaaaaactgaaactttcaagcaagaaagcaatattcgaaaaaatgacattcttgtatttagtgaaaccatgaatggctattttaatatagtgacaaataaagcttggttactttggaaaaaggaaatgcaagctcatgctgattggtataaaaatgatgacccaattgcatataaatgggccaaagatggaagccctgaatatgaagctgacttttatacaagtgcaaaagcttgggctgcagcaaaagcccaagctgggcccacttggatcagcgtaaaagatgaagagccacctacagacataatggtacttatttgttgggataatgcaccagatgttactccagaacaagactatataactattgatgaagatctaaatagtgtatgggcaaattattataatgacccaccttctcactggatgcattttcatagtgtgccaaacgtatcgggagctaaacaatga

SEQ ID NO: 52921 - DNA, 345 bp, Acinetobacter baumannii
atgaacaaaatgacccatgagcaatttttgttgatgaaattagctgaagaagcttcagaaatagcccagattgccttaaaaactgctcaatttggtatgaatgaaaaacatccttcaatggagctaaacaataaacagagaatccatcttgaacttaacgatttatttgcgattgtcgatgagttgaataattggtaccacttcaattatcaaccggaccacttagctaaaattcgaaagatagaaaaacttaatgagtatctaggttactcaattaagttaggtaaagttgaagatccttggagcttttccaaagaaaaagctacgggtagtttggagggctaa

SEQ ID NO: 52922 - DNA, 348 bp, Acinetobacter baumannii
atgcgtgattttaaagtcggggatcacatcgtgattgaccaaaagtatgacaagactttcatgccagttctgcaaatcctttcagaaggtaagaactatttctattgcaatgatgggcaagtacataaatcgcaaatggaacaatggcgtaaagctgagccagaagaaattgcactgggatgtcgcattgacatgccttctctgcctgagccagtaggaagcttacaagaactgcatcccgagttcgcaaaggtgcttcacgagaactttctagagctgatcggagacgacttccccatagaaaaccacatttcgcctaactgcaaaacgataggggaacaatcatga

SEQ ID NO: 52923 - DNA, 426 bp, Acinetobacter baumannii
atgaccacattcaaagaggctcaaagggtccagtcacaaaaggcagctcgttctaagcgatttaatcgagtgcctacagaagatcaagaacagatgacgctcatgagttgggcgcatcgtgtgaaatatgggtcaggtcgtttgagtgattacctgtttcatattcctaatggtggctcaagaaacatccttgaagctgcaaagtttaagaagttgggcgtgaaggctggtgttccagaccttcagctaattgttccaaatggtgagatacacgggctttggattgaattgaagtcaaagaaagggaagttacaaccaagtcaaaggctcatgattcaacgcttagaagaacaaggttacatgtgcaaagtctgcttcggtgcagatgaagccatagatgaaattaaaaagtatttgatgatttga

SEQ ID NO: 52924 - DNA, 675 bp, Acinetobacter baumannii
atgggattggtgaaggtttgggataaagaaattaaaggcaagctgtatgcagttggagatattcacggctgctacaacttgttgatgaatcgcctcaaggaaattggctttgactttgataatgatcttcttgttgctgttggtgatcttgttgatcgcggtgcgcagaatcttgaatgtatcgagttgctttctaagccatggtttacatcagttcgcagcaatcacgaggatctatgcattggcggcttacatgatcagtcatataaacgttgccatatagacaatggtggtgagtggttctacatgcttgatgggcaagctatgtacaacattgcaaaagtattctctgaattaccaattgttttagagataaaccacaaaggcaagaagtttggaattgtgcatgggcatatcgaacagaatgattggaatgagtttaaggactcgtttagtcagccatctaaaaaccgtgctccatcagatttagctatgtggggtcgtgagcgtcttgatactgacaatcagcaatacacgcatgtaaatggtgtagatgcagtgattatggggcatacagtaactcaaaaaccatgtaagcgtgataactgctattggattgataccggtgcagttcattggggaactataacaatcttagatttagaaactatttga

SEQ ID NO: 52925 - DNA, 174 bp, Acinetobacter baumannii
atggacacaatcgaagcgaagaagaatttagatttactctacaaagatcggtttaatttagaaaatttgaatcatctcaatgcgagagatcaattcaaacaagactgcaagcgtcgaatcagagacatcgacactcagattgctaacatcaaacagaaccttaaaagtgcgtga

SEQ ID NO: 52926 - DNA, 189 bp, Acinetobacter baumannii
atgagtaggactcgaaaaggcagtaagcctcaaaattgtgactatgagtattggtctaaaagagttgggaataaaggtggcggacgtggaatgggtcgccaaaccaagaaagaaacgctatctagagagcgcatgttaggtaaggcggctcttattagtgagcttaaagatgtttataaaaaaaattaa

SEQ ID NO: 52927 - DNA, 1071 bp, Acinetobacter baumannii
atgagcatagatgaagcaaaactagttgtgcctggaacgaatgttctcagaagagctggcgctgcacttataagcaatacagccactcaggtagaaaagacagaagcctataatattttaaataattggagagcactccattcttatcctattgatgtatttcagaaaaatattagaagtaaatgtacgcaactaaagtttagagattttacggttgcgcaaagattgaagcgtatgccatctattatttctaaattgcaaagaaacccaagaatgaatttggctagaatgcaagatattggcggagttagggttattttgccaagtattgcagatgttaggaaattacatgaagcactagtggggcgaaataataggtttaaccacgttccgattgtgccttgccatgattatatagaaaatcccaaaagtgatggatatcgcagtatccaccaagtttttacctataaaagtagagatcacagtgggcttgatggtttaaaaatcgagttacaaatacgtacagccttgcaacactcttgggcgactgcggtagaaacattgggagtaattgagaatgcatctattaaatctggcttcggaagtgatgagattagacgctttctaaaactaagtagcgctttattttctattaaagaaggcacacctgttgttgaagagttttcaaaatctactccagaagagatcgcgattgaagcaaaagatatcgagcaacggcttcaaatctttactaaattaaaatggttgcagatatcggcaaaacatattgagtctacgtcaaatagtagacatgcttaccacctattaattctcaagcaagaggaaagtagctggaaagtaaatgtaattccatttaccaaggctcaggaggaaattgctcaaacaatgtatgccactttggagtcacaagtaaaacaggaacatgatgtagacattgtccttgtttcggtgggtgacatgaaggcgattaagaaggcctatccaaactactttttggacacaaatcaatttattaaagaaatgcagagtgcgttcaaaaaatatacttag

SEQ ID NO: 52928 - DNA, 483 bp, Acinetobacter baumannii
atggaaccacgattcgtcatcaaaaaccattctgacatcaactatgtaattggctatctcaacagtaaccacgctaaagcagcgagtgaagggaagcctttagtcgtattgatcgcaccacaagagaaagaccggacaaaagctcaaaatcgtttgtactggatgtggcttaatcagtgggcgaagcatcaaggcactgataaagatacagagcatttgttctttaaaaagcaattcttagcgcgtatttatcatcgtgatgatgttggtcagtacagaaagacgtttgcagcagtaaaggttttgaaagatcaaaaacatccgatgtatcagcaagtggcggatgggttgaatgaattaatcacaacaactgatgccagtgttgagcagtttactgagtacctaaatgacattcatgcattctgcaataaacatgggtgttatttggaaacacctgatgaccttaagtatgtgttggaatag

SEQ ID NO: 52929 - DNA, 342 bp, Acinetobacter baumannii
atgacagatttgaataagttaagaagtgagtttgagggaattcctgaaattaagactcacctagatcacggtaatgttttttggagtgataagaatcaaacttatgcatctgaattccagtgtcttcacgcagtggcatgctacgtaaatggtgcttggtttggttggcaagaaaaagccaaagctcaggcggtgccagaggattactgtttagtacctaaagtgcctacagaaaagatgttccaagcttacgaacgttactcagtcgcaccaatgtcgacgctgagtaaaactggatacaaggcaatgattgaagcaagcgaatcgggagctgagggatga

SEQ ID NO: 52930 - DNA, 264 bp, Acinetobacter baumannii
atgaaaaaaattgaattaaacgcaattagcggtacttctgaccagatcgcagaagagatttttaagaaaattattgggcctatggttgatgaaatgaatagccaagataaagactcagcaaaggttttcacattctcagtaatgtggcttggtatggctctatatgctgctcaatttgaaccgcacaatgccaagaaaacaattcaatttagtgttgatcagttcatgcaaacgttcgacaaattcagcaaaagaccgagctaa

SEQ ID NO: 52931 - DNA, 258 bp, Acinetobacter baumannii
atgaacgactggcaaatattacgaagtcggtatggcagcaaacgaagctataaaaaccgtatggctcttagcacattcgaactagagcactttaaagaatggctagtagaccaaggtgcagacgtctacaccaagacagaacaaaacgaacttttgcgatttagattaaatggccaattaggtatttggtatgagtcaggctcaggaaacctactaatgcatgatttggcagataagtatttggagacggcagcatga

SEQ ID NO: 52932 - DNA, 291 bp, Acinetobacter baumannii
atggaagttaataaaaaagttaaaggcttaactaaaaacatcatcagcctttgtatggatataaccgctactggaaatgatgcgttcttttcttaccaagctcatgttggatggcttgaagtgaaagtttatcgaggatcttggaacagaaccagcgatccaatttattcaaaagactatatcgaagttgttatttcagatgatgaacatgcaaatcatgtaattcataagctgaaaagaaccgccgaagaactcactgaaattctagaaggcttcttaggaaagaattag

SEQ ID NO: 52933 - DNA, 267 bp, Acinetobacter baumannii
atgaatgcacatcctgaaattatcgaagtatcaggactgaaaagtcttatcaaggattcagtacaagcccttctccctttatcaagtgaagaagacacggtcatcactgatggtggcaattggattcatcttcgctatgtaggccgtggtaccgagcaaatccaattggagctaggtgatcatttttctatcaagacaaagatttcttacttgcgcgacacgctgaatcgcttagcagaaattaagaaagagttgagaggtgggtga

SEQ ID NO: 52934 - DNA, 393 bp, Acinetobacter baumannii
atgagtgagaagattatgaatataaaagcgaacatagtcaaatcaatgggatttgtaggagtagttagtgctctaactgctgcttatgcatttaccccagctaacaacgaacctgtaaccgttgtggctcctttcaaagttgaatcaatcgaccctgagaatgaacaggctgtacttcaaactgtaaatgaagcttacacgttagaagttgattttgatgctcagtattcaattgatggaaacggctatcaatcatggcgtgatgttgaaattaacgagattaaagacattcgcgtttatgacgaagatggagaggtcttggcttacgttgaccgtttagacgtagttgagattaaagaccttatcgaatcaggaattagagagcgcatttaa

SEQ ID NO: 52935 - DNA, 216 bp, Acinetobacter baumannii
atgatcgctaagaataaaagaaacagttgttgtgcacgcctagatatttgggatgaatctccaataattttagaaggcgagctaaagctgattgtgctggaagcgctatatgctggtgaattagatttagagtggagacgcgagttcttttcagatgccattgaaaagttagaaaaactagcaggtcaccacccaactcctaagcgtgcttcttaa

SEQ ID NO: 52936 - DNA, 231 bp, Acinetobacter baumannii
gtgagtaaaattgtaaatattaattctgaactaattaatttctatattgtcttaaacgatcatgctcttgaaattgatcttaaaaacagtgataggatctgctatacaatgatggatagggatacgataaataaattcatatcatcaacagacaaagaccaattttatcttgataacattaagtcaaatagaaacttccgctcagaaattacacttaagaagcacgcttag

SEQ ID NO: 52937 - DNA, 510 bp, Acinetobacter baumannii
atgttgcttgatagagttttgcaattggagttgatggaaaaaatggcttcaacctaccctttagcttatgatttttcacatgaagtgtaccaacttgaagacgaatctaggaagaaggtatttgcaaatttatattatctacaatcccatgaattattagagcctaaaagtatatttcttcagcttggctttggagcaatacaaaactcaacattcacacttgggtatactcgcttaacccaaaagggtgcagatttcatggctaatgatggaggtttatctgcaatatttggagtggtgacaataaaattcgaagcagaccaatttaaaactatattagaatcaaaaatcatggcaaccgatttaccgcctgctgataagcgcaaattgattgatgggcttcgatcgctttctggcgagagtataaaacacctgacaacgaaaattgtggatttgggctgggataatctagggacactaattcggataattcaaagcagcctggcttag

SEQ ID NO: 52938 - DNA, 210 bp, Acinetobacter baumannii
atggaattggataacgcaaaactaccaatcaatcagattattgctcgcatcaatgatgctgcgaaacatggtgaagctttggtgctaacagccgaagaagtaaagattctttctaaagatattggcgacaaagtctttattcctgtgcttactaatgagcaggtcgtgcagttggtaaaagaaggaaagctaggacagaaaattaaataa

SEQ ID NO: 52939 - DNA, 747 bp, Acinetobacter baumannii
atgaaagttatgagcacaatggttgagcgcattcaggaagcactgaaagcaaagaaattatcatggtctaaagctgccacaatgattggcctgactcctcaagcgccttctaaatggaaaaaaggacagattggcaaagagactttggataagttggccgaacttttagaagttgatgccggatggcttctaaacgggaagaaaaaacaaaatttaaccaacttcaacatgcaagaatttatggataagcacggtctatccaagaaagatgaatcatcatttgatgtgaatgatattcaaagcccgtcagtagttgagtatggtggggatgatggatttatctggattgatgtggtagaggcaagtttttcttgtggcacaggagagtctatagagtttcactttgatgtgatcaatggaaaacagccattcccacctagtttttttaaacaaaaaaatgttcatcctgattgcatgcgcatcatcaaggctaaaggcgacagcatggcggacaagattgatgatggggatttggttggcattgatatatcccaaaccgacattatcgatggtcaaatttatgctgtttactttgagggtgaaggcatgattaagcagattttcaaggaagaaggcgggaaactgattctgcacagcctaaatcctaaatacagagatcgtgaagtcacggagcaaaatggattgaattttaaagttatgggtcgccaattttggcgtgcaggttaa

SEQ ID NO: 52940 - DNA, 267 bp, Acinetobacter baumannii
atgagccttgaaaaaaaatctacgcatgtgcgtttatctcccgaaatccatgaacgagctaaaacactcgcttctgtaaaagaaaaagaccttgccagctatttggctttcttgcttgagaaagaaatcgtaggtgagtggcatgtctttaatttacaagcaaaagcttttcagcgcttgggattaggcgctttagtacgggatatctctactgaaatcagcttcgatgaggaaccagaagggattaacggggatttagataaataa

SEQ ID NO: 52941 - DNA, 1245 bp, Acinetobacter baumannii
atgcctaaaaccgttgtcccacttactgatacaaagataaagaaagcaaaatcagaaaatggaaaatccctgaaactatctgacggttcgggtctctatttgcttatagataaaaaccaaaataaattttggcgttttgattactcacgcccatatacaaaaaaaagaaatactattggttttggttcttacccagaagtaagtcttgcagatgcacgatctaaacgggatgaagctagaactttactggctcagaatattgacccacaagttgaacgtaaaagagttgaacaagaacatataaactcagagaaaaatacttttgctgctgttgctgcagaatgggaatccaaacaagattttgctgagtcaactatccgtggtcataaaagattacttcaagtcataaattccaatattggaaaaaaacctattgataaagttaccccagtagaagttttaaatatctgccgcatttatgagaaacaaggaaaattagagacagcaaaaaaagttaaagtgaaatgcggacaaatcatgagatatggcgttgccactggtaggtgtgagagagacgtaactcaagatttaagaggtgccttaaaaacacctaaagtaaaacatttatcagctttgactgaatcgaatgaatttgctgaactactttatgacatcgatttttatgaaggcacattcattacccaaatggccttaaaaattgctccttatgtatttgttcgtcctggtgagctgcgttatgcaaagtggccagatattgacttagaaattgatctttggagatatacgccaccaaaaacaaaaaataaaactggcgtacaacaccttgtgcctattcctagacaagttaaagtactgttgctgaaaataaaagaactgacttatgatcccgatggggaaagtgagtatgtattcccttctatgactagcaaacttaaaccaatgtcagaaaatacaattaaccaagcattacgtagattgggctatacatctgaacaagtttgcgggcatggcttccgtgcttctgcaagaacaatattagaggaagtacttaactaccctattgaaattattgagcagcaattagctcacaaagttaaagatatgcatggtcgagcatacaaccggacaaaacatttagagaaaagaagagagatgatgcaaagctgggcagattattgtgatcaaataaaagcagattatgccaagactttaccaactagataa

SEQ ID NO: 52942 - DNA, 198 bp, Acinetobacter baumannii
atgcaagtcatgatcatggtttcggaagcgggcaggatggagcacacatgcaaccttcttgccgaaataaataaaaaaggtgaagtcataaagatttatgaccacaatggaaacgagctaaaaattaactttttaaataatgaagtttactttaataagacttggtggcaattcactaatatacaatcacttatctag

SEQ ID NO: 52943 - DNA, 405 bp, Acinetobacter baumannii
atgaaaacattaatgactaaattggaaactttaggattcacaaaagaaaatggcttaaatggtttatctaaagagaatgtatcagtgtctatgcactggtcaggtgaatctgctgttgttgctgtagatggtaaacaagtttttccttctgaaaatgaagctgaaatcattgagtttgttaaagctgaacttgcaaaaaaagaaacctcaaaaactaatgatcaatatgatgctgaagtattggctgctgaagttgctaaagattcagaaatgaaatattacgcagatgaagatagtcgcggtaaagctgaattaattaaaagtgctctaaaattcattaaagaagaaattccagcaactgtgaaatttagtgattttcaaaagctagttgaatctaacctataa

SEQ ID NO: 52944 - DNA, 507 bp, Acinetobacter baumannii
atgagtactcaaactattattgataatcaaatttcagcgcaattagaaggacggactgatattcgtgtagagtgtcttgatacctcaaaagtgttcaatccaaaattgtatgctcaaaaaaaaggcaaaactactctttactggattcaattttttggaacacatcacatttcaaaagcggaatatgatgagttaattgaattatctgaaagtgatgtatttggcaatctgacattcaaagcagattctgaagaagagtttaaaaataagtattatgcgaaaagaccaaatgtaattttggaaaaagttggaattgcattatttggaaaatcttggaaaaaggctttagctgatgcactatctgaaattaagcaagtagatgagagacgaattacgcattggcttcaatgttctagacctatccccaaaaatgtttttaaagatttaaaagtgattaaagataagcgtcttaaagaaattcagagtattgagaaactgttagattaa

SEQ ID NO: 52945 - DNA, 267 bp, Acinetobacter baumannii
atgtcaagaagaaagatcactgaagatattcacctgctctggcaacgtcacgataatgcagaagcaacaattgaaaagttacaagaatggactacagatcgtcgtgattattttttgtcaaagttggattggatggagaagtcaattgatagtggaaaccatgaagcttatagaattgcatttaatcaattaaaattagctattgaaaatcaaaaaaatacactcgataaagttcatgatttgttgatttatgaagttgagaaataa

SEQ ID NO: 52946 - DNA, 543 bp, Acinetobacter baumannii
atgaacatcgaacaatatcttgatgagttaattaagcgtgaaggtggatatgtaaataatcttgctgatcgcggtggtgcaacaaaatacggaattaccgaagcggttgcgcgtgcaaatggttttaaaggcaatatgagagatttgccactcgaaactgcaaaggcaatttatagaaagcaatattggttatcaccacgtttcgaccaagtaaattctattagtccagttgtagccgaagagcttttagatactggtgtgaactgtgggacgggattcgcaaagcctctactacaacgtgcattgaacttgctaaacaatcagggcaaagcaggttggtctgacttatcagtagatggggtttatggtccagctactttaagtgcacttaaaacatttttagccaagcgtggcaaagaaggtgaaaaggtattagtccgtgtccttaatatcatgcaaggtcaacgctatatcgaaatctgtgaacgcaatcccaagcaagagcaattcttttatggctggatcaataaccggatcgcataa

SEQ ID NO: 52947 - DNA, 390 bp, Acinetobacter baumannii
atggaaccagtttcaacaagcggtttaacagcaattttaaaattttatggtgcagcaattatggtgactttagcggttgctttagttgcggcagttgttttaatgacacgaatgccacgctctccacaggaatgggcggttggcttaatctgtacagttgtatctagtttggctggcggatcattaattatcatgaaattcacacttcatgcgtgggctactgacacatggggatggtttgcaataggtggactgttctttgtatgtggattgcctggttgggcattaatcaggtgggtttttaatttcattgataagcaggaaggcaaaacgattgtcgaagtaatcaaggaaattaaaaaggccaagaatgatattacaggtagctaa

SEQ ID NO: 52948 - DNA, 708 bp, Acinetobacter baumannii
atgacccaacatttagatatagaagagcttcaaaatttgttaaagacggtggttgaggaaacgacagccattacagaaaagctggcgaccaaagcgagcaaaattctctcaaaacatgaacctgaaaaaacaaaagatgttaagctttcaggttcagagcgttcagctttgcaaaaagaaattaaaaaagccttacaggaaagccattacagtcaaggcatcggctttgcaagttatagccctgcaacgcaagaagaacaagattattggacactcgaatggtggtataaaaaagaagatcagttacaacaagctaaacttgaaaactatcaaaatgctcagcgatttttagattttcgctcttttgaatggttccataaacctgctcaaaataagagtccgtgcattcatgggccttatgttgactacatttgcaatggcgcatacaccatcacccttgcccatccggtcatgattcgtgatcaatttatcggtgtgattgctaccgatattttagtttccgcactcgaaaaaattcttatgccgaagcttaaaaacattaaacaaaaagcaattgtgattaacgactcttctagagtgattacttcaaatgatatcaccatcagaacaggcacattatttaaaggccaaagccccgagcagtttctgtcacgaccgtgtcaatcttttcaactggtcgtgatctag

SEQ ID NO: 52949 - DNA, 1911 bp, Acinetobacter baumannii
gtgactgtaccggaaggttatgaagctaatgtcatctacgctttaggtgactcaatcaatccaagagttggagattgggacgacaataatattccatctggtccaagcttccagtttcgctctggcgactgccatgacggcatgcattattttggcttaaacacatcaacaaaccgctttgacgagactgtgtcagcacaaggtttgttggtgatgaatcacgaatatattaatcagaccttccttcatcccaaaggtcctacaaaagtggatggacgtcgccctgaagatgaagtcattcgtgaaaccaatgcacatggggtttctgtaattcatattaaaaaagatccaaccactcaaaaagtagaaattgttaaaaactctatttttaaccgtcgtattactgcctcaacagaaatggatttcgcaggtgctgcggctggttcgagcttgcttgcaacacgtttttctccagatggtcgtcgaactcgtggtacgcacaataactgcggtaatggctatacaccttggggtacttatttaactactgaagaaaactttattggttactttgctcgtagtacgactgatgacgcattacgtactccagaagaaattattgcgcttaaacgttatggtttaaaagcaggatcaagttctcgttacggttgggaaacagcaatcggccaagtcgagtcacaagatctatatgatcgctggaatgccgatgtaaaagcagctcaagctacccaagattaccgaaatgggccaaatacatttggctggatggttgagattgatccatttgatgggcgccaaaatccggttaaacgtacttcattaggccgtttcgcacatgaagacagtgcttgccgtgccgtagtaggtcaaccattagcattttatatgggtgatgactctcgtggtgaatacatctataaattcgtttcaaccgctgtgtgggacaccaaagatataaacggtggttatacagctggcgacaaatacatgaatgcaggcaaattgtatgttgctaagtttaataacgatggttcaggtcaatggattgaacttgcttatggcaaaaatggcttaaatgaaagcaacactacctacccgtttaagtcacaggcagatgttgttacatttgcacgcttagcagcggattctgtaggtgcaacaaaaatggaccgcccagaatggtgtacggtcaacccagtaaacggtgaaatctatgtcacactcaccaataactcaaatcgtggtaaagactatgcaactgatgcagccaatccacgtaactacacagacctatatgcaggcacaaaagaacaaaaaggaaacataaacggtcatatcatccgttttaaagaaactgatgacaaaacaactgctgaaaccttcaaatgggatatctacctatttggcgcagaagcatcaatggcttcaaacatcaacttatccggcttaacagataacaatgatttttcatctccggatggtatgtggtttgacccacgtggcgttctctggattgaaaccgatgacggcgcttacactgatgttactaactgtatgatgcttgcagctctgccgggtcaaatcggtgatggtggtacagcaacaacttcaaatggtcagcagaccataacaggtgccaaagttacagacgcaacattacgtcgtttcttagtcggaccaaagcaatgtgaaattactggtattgccatgactcctgactacaaagcaattttcattaatgttcagcaccctggtgaagattcaccaagttacgcgaaaccagaaagtaactggcctgccacacaaaaagacccaagcaataaaactgcgcgcccacgctcagcaactgttgtgattacccgtaaagatggcggcgttattgccggttaa

SEQ ID NO: 52950 - DNA, 195 bp, Acinetobacter baumannii
gtgagtttttccggttttttatttgggtttacaggtgtggttccaccattattagagccagagtcatcatcgttatcattacagcctgttaaagtagaagctaaagtcagtgctactgcaccgcttgctgctttggtgattaaactacgacgactgatgtcagttccacaaataaatcagagtttacacaaataa

SEQ ID NO: 52951 - DNA, 1557 bp, Acinetobacter baumannii
atgcataaaggtatacgtcaatctatggcatggctgcactcgtggactggtttaatttttggatggctcatatttgctattttttttatgggaagtttgtcttattaccgccatgaaattaatttgtggatgcaaccaccccttgcacaatttgaaataaaacaagatgtggcaattaaaacggcatatcaatacttacaaaaacatgcttcagatgctaaatcttggtatttaactgttgctacacctgaaagtccggtaaatacgatgtattgggaaaaaccagatggtagttatgggaatgcaaccctcgatgcaaacactggtcaagaattaaaactttctgcgactgaaggcggtgactttttctaccgtttccattatcaactttttggtgtcccgatattaattgggcggttggtcgtatctttagcagcttttattatgttgattgccttaatctcaggcatcattactcataaaaaaatcttcaccgatttttttaccttgcgtacctttaaatcacagcgctcatggttagattttcataatgtttcatctgttattgctctacccttctttttaacggtcacttttactggcttggctattttcttctatttatatttaccttggggaatgcaaaaactctatccagagaatccatatcaatatttcaatgatatacgtacaaaaacagtcacagaaagtacaacaccgcatcctgcacagaatttaccagttgaaaagctattagctcaacttaaacagcgttggggaaatcaaactttagcaactatgagtgttaaaaatccaaatacgaatcaggctcaaattacgtttattcagcaagaagaccattctattacccgtaatcaagcacaaatcacattagatgctacaaatgttaaagtcttgggtgatacacgtaatcatagtcctattgccacactttatgcgggagtatatggcctccatatggcaacttttgctcagcctctacttcgtttaggattatttttctctggcattttaggctgtgtaatgattgcctctggcttgttgctttggagccttaaacgccaacttcaaaataaaaatagtaagtttcatttcgggcactatttagttgaccgtttaaatgttgctacctttgtaggtttgccttatgcaactcttgcttatttgtatgcgaatcgattgtttactgtcacggccaccactgttaattatgaaatttatagtttcttcttcgtgtggttcatgagctttattattgcgctcatcactaaaaaacaatatttatggcaaactcagctaggtatttttattctactttgtattgcactccctatcttgaatataagttatttactgaaaaataattatattcaaaactttaatggttattgggatttcgcacgtatagatatatttttctggttatttgcagctttagccttttttatatttcttaaaattaagcctattcaacataaagcttcaaataaaattcaaaaaaagctgagtaagttaaatattgaggtgaattcatga

SEQ ID NO: 52952 - DNA, 435 bp, Acinetobacter baumannii
atgtttgaattcgccgttgtagaaaataatgcagcaaatttaaattttggaactatagattttggtgaagctaccacatcttttaaaggggttttagaagctagtttagttaataatggtaattcaggttttcagatcgagtgtgctggtatttcaactgtaaaaataatatttggagcaggaaataatgatagtaatattccagcttcattttcacaaaattattatcatgctttaagtaatggtagagattttattgcttataacttgctctatggtttaaataaacaagtcattaaagcaaatgaagcttttattcttaatgatatgaataataaaaagaatatcgatatttttggtcaagcagcccatgatggtagtcgtatatctaagggtgaatataaagatatagtaccaattacgattgagttttaa

SEQ ID NO: 52953 - DNA, 387 bp, Acinetobacter baumannii
ttgtcgtgtacagagaatcaaaatattaaagtcgtaattgcagaagagaatcgtgaaatcgtagaaaaactacgtcaggcaaatattgcagctgtaagtggtgtagcaaccgaacctggcgttttaattcaagcacatatcatgcacgcacgactcttggtaatttcacctatggatattttagatattcaccgaattgtagatattgcgaagcaattgaaccctcaaattcaggttttaatttgtgcagaaagtaaagaagaagccgcagtgattagagacgaacacattggtgaagtattctatgcgaaagaagaaatggctaagaatatgagccatcatattttaaatcaaatcgaacttgcgcatcagtccacacatcattaa

SEQ ID NO: 52954 - DNA, 1290 bp, Acinetobacter baumannii
atgaccgaacttcccgacaacatccttcacctgccgcaataccaagtactgggctgcaaatcaaccgacgacgaaatgcacttccaggtggacgtgcccgatcccatcgcctgcgaggaatgcggcgtgcagggtgagttcgtacggttcggcaagcgtgacgttccctatcgtgatctgcccatccacggcaagcgggtcactctctgggtggtccgccgccgatacacctgccgggcctgcaagacaacattcaggccccagctaccggagatggtggacggattccgtatgacactgcggctgcatgagtacgtggagaaggaatccttcaaccacccctacacctttgtggcggcacagaccggcctggacgagaagacggtgcgcgacatcttcaacgcccgcgccgagttcctggggcgctggcaccgcttcgagacgccccgcatcctgggcattgacgagctatacctgaacaagcgctaccgctgcattctgaccaacattgaggagcgaaccctgctcgacctgctggccacccgccgacaggacgtggtgaccaactacctgatgaagctgaaagaccggcagaaggtcgagatcgtcagcatggacatgtggaacccctaccgggcagcggtcaaggctgtgctgccccaggcccgtatcgtggtcgataagttccatgtggtgcgcatggccaacgatgccctagagagagtgcgcaaggacctcagaaaggagctgaaaccgtcccagagccggactctcaagggagaccggaaaatcctgctgaaacgcgctcacgaagtctcagaccgggagcgcctcatcatggagacctggacaggcgcgttcccgcaactgctggccgcctacgagcacaaggagcgcttctacggcatctgggacgccaccacacggctccaggcagaagccgccctggacgagtggatagccaccatcccgaagggccaaaaggaagtctggagcgatctggtcagggcagtgggaaactggcgcgaagagaccatgacctacttcgagacggacatgcccgtcaccaacgcttacacagagtccatcaaccgactggccaaggacaagaaccgtgaagggcgcggttactccttcgaggtgatgcgggcacgaatgctctacaccacgaagcacaagaagaaggcaccgactgcgaaggtctctcctttctacaagaaaaccatcggttacggactgccggacttcgcagaggaactcaactacggagtcgatctatcaaccatctga

SEQ ID NO: 52955 - DNA, 513 bp, Acinetobacter baumannii
atgtccatttttggcaaacatctgtcaccgtacgctctgttgtccatatcgggcctgctggcagcatctgatcaggccataaaatggctggtgcaacaatcaatggcatatggcgagtctatttcagtgacctcattctttaactgggtacacgtatggaataccggtgccgcattcagtctttttgcgaatggtggaggctggcagcgctacttttttatcggaatcgcggtagtggtctcgatttttctgatcaagctgatccttgaaaatcgtcataaaggagaagccatcgcttacagtcttatcctcggtggcgccatgggcaacctgattgaccgggtctttcgcggctatgttgtggattcctttgatttctattggcgagactggcattggccggccttcaacctggctgatattgcaattgtcctcggtgccttacttttcgtttccagcagcttgttgggtaaaaaagcaaacaccaatgccgagtcggatggatctgactga

SEQ ID NO: 52956 - DNA, 897 bp, Acinetobacter baumannii
atgagtaaaaactgcggaggcccctgtggcgaccatgcaaggcctgcggcggataccgatatgcaggcctcctccgatgcgtcgggggaatgggtcagtgtttatgccgtgccgaagatggactgtccatcagaagagcgcatgattcgcctggccctgaacggcgttgaggggattcgggtactgtccttcgacttgtcgaaccgccggttgaaggtcgtgcatgacggtgaggtcgagcccgtcacctcgaaactgaagaccttggggctaggcgcctcgcttcaggaaaccgtcgctgcaaatccggagaccatcaaggccgccgagttttcggcagcttctgctaagcaagaatccgggaccctgcgctggttgctcggcatcaatgcacttctgttcgtggtggaaatgactgccggtctgatcgcccggtccaccggcctgattggagaatccctggacaattttgccgatgcggcggtgtacgggcttgccctttatgcggttggacatagcgtgaaaatgcaggtacgtgccgcgcatcttgctggtgtactgcaactgatcttggctgtgggcgtactcatagaggtggtgagacgctttgtattcggtagtgagcctgaatcgctggtgatgatggctatcgcattcgtcgcattgattgccaataccagttgtctgctgctcatatccaaacatcgggagggcggggcgcacatgaaggcaagctggatattctcggccaacgacgtggtgatcaacctgggggtcatcaccgccggcgctctggtcgcgtggaccgggtccaattatccggatctgattatcggcaccatcgcgggggtaattgtacttaacggtgctagacgcattctggcgctcaaggattaa

SEQ ID NO: 52957 - DNA, 408 bp, Acinetobacter baumannii
atgcgtattggtcagttggcacagtcagtaggggtagatacacagacgatccgcttctacgaacggcagggcttgttgccgccgcctggtcggcaggagaacggttaccgtgtctataccgagaaacacgttgagcggctggcctttattcgtcgctgccgcatcctggatctgtcactggcagaaattcacgaactaaagcgctatcaggacgaccctcatcagtcctgtaccgctgtcaatgccttgctcgatgatcacatctctcatgtacgctcgcagataaccgctctacaggcgcttgagaaacaactcgtttcactaagagcgcgttgcaacgatgaccgggaagttaaggcgtgtggggttcttgctggaattagcgagggaagcatgcatcagcagtag

SEQ ID NO: 52958 - DNA, 528 bp, Acinetobacter baumannii
ttggaaaccgttgttggattagaagaagatattcgtgtgttgattatggggaaacacggcactcagacagaataccgttctgataaaattgggtcgcagatcgaaagtatagtacgtgctattcataaacccgtattgattgcatcctttccattccaaaagccactttcatttttagtggcttttgatggtagtccaactgcaagaaaatgtgttgaacgcattgcgtcaagtccattacttaaaggtcttgcagtacatttggtttatgtcggaaatccgaatattgaaatgcaaaatcagctctcttgggcaaaagagcaacttgaatcacaaggttttaatatcacctcgaatacgttggatggtgaagttgataaggcaattatcaattacgctgaacagcatcaaatcgatttgattgtggttggggcttatggtcattccaagatacgccaattttttattggcagtaccacaacaaaagtgatcacaagcactaataaaccagtcctgttactacgataa

SEQ ID NO: 52959 - DNA, 435 bp, Acinetobacter baumannii
atgtctgctaatccaaaagttaagatttatcacaaccctgaatgtggtacatcacgtaatacattggcattaattcgtaataccaatattgaacctgaagtgattgagtaccttgtaacacctccatctaaaaatgaactgattcaaatgatcgcggatgcaggtttaacggtgagagaagcgattcgtaaaaatgttgctccatatacagatttaggaattgatcaagaggattggactgaagatcaattgcttaactttatgcttcagtatccaattttgattaaccgcccattcgtggtgactgaactaggaactcgtttaagtcgcccatcagaactggttttagaaattctgccactcccacaaaagggtgctttcactaaagaagatggtgaacaagtgattgatgcaaatgggcaacgattaaaataa

SEQ ID NO: 52960 - DNA, 321 bp, Acinetobacter baumannii
atggatcaaatcaatttctttaaatgtttggctgatgaaacgcgattcaacatcgtcatgttggttcttgggaataatgagcagtgtgtctgtgatttgactgaaaaactagagttgagccaacccaagatttcacggcatttagccttactgcgttcttctggtcttttacaagatcgacgccaaggacaatgggtctattatagtctcaatcctaatttacccacttggtgtatagaagtcttaaataccgtcaaaaattccgatttacagccaaaagttgctccttcatttcaacaaatcaatagttattgtgagtag

SEQ ID NO: 52961 - DNA, 474 bp, Acinetobacter baumannii
atgaaattcctttttttgtgtactggaaatagttgccgtagcatcctgtcagaagtgctgtttaatagtcgtgccccagagggttggaaagcatacagtgcaggtagtaagccatcagggcaagtacatccattgaccatagaaactttagaaaatcttggtctctcaacagatggtttgtggagcaaaaccattgatgactgtgaacaatatcaacctgacgtggtgattactgtttgcgattcagcagctcatgaagcgtgtccactttatttggggggagcgatcaaggcccattggggcttggctgatccttcacatttagatttgccgaaagaagaaaaattaaaagcatttcaagttactgttgatcatatcaaccgccgcttagatgctttattggcactagatactactcatatgtctcgcccagatttgattgcagcaatcaatcaaatttcgcatattgaatga

SEQ ID NO: 52962 - DNA, 1044 bp, Acinetobacter baumannii
atggctcaacaaagattatcctttctagatcgtaacctcacgctatggatttttatcgccatggcattggggattgcgataggtgtgttctttccgcaagcctccgtcgctttggataaaatgagtgtggattccgtcaatattccaattgcgattggtttgattttgatgatgtatccaccgttagccaaagtggattatgcagccctaccacaagtgtttaaagacaaaaaaactttaactttgtctttggtacagaactgggtgattgcaccagtactgatgtttgcattagccattatttttttgcatagctatccagagtacatgacaggcttgatcttgatcggtttagctcgctgtattgcgatggttttggtgtggaatggtttagcctgtggtgataaccaatatgtagctgcattggtggcattcaatagtattttccagattctgttttttagtacctatgcttggttatttctgacttttttaccaccatattttggtgttgcagggcaagtgatcaatgtcgatttctggacgattactcatgcagtattagtgtatttgggaattccatttttccttggctttattacacgattcactctagtgaaagcgaaaggtcttgattggtatcaaaatgtctttttacctaagatcagtccactgagtttgttggctttattgttcacgattgtggcgatgtttagtctcaaagggaacgatgttgtgagcttgccattagatgtcttgcgtattgccattccattgacgatttactttatcgtgatgttcttcattagcttctttatgagcaaatggatggggaatgactaccctaaaacaacagcaatttcgtttactgctgctgggaataactttgagttggcactggctgtagcgattgcaacttttggtttagcttcacctgtggcgtttactacggtaatcggaccattggttgaagtgccagtattgattgctttagttagcgtgtctttgtggcttagaaaaaagttttttaaagcagaggtgtaa

SEQ ID NO: 52963 - DNA, 705 bp, Acinetobacter baumannii
atgactctcccaaatgtagatatgaatcttctcgatcaacctactttagaaaaagtacaagctaaagagctggatcatccaccgcgtattttgctgttgtatggttcaaaccgtgagcgctcatacagccgattggcggtaatggaagcaggacgtattttggagcagtttggcgctgaagtaaaaatctttcatccaaaaggcctacccttacccgaagatgcagacacagaacatccaaaggtgaaagagttgcatgatttactcgcttgggctgaaggaatggtgtggtgctcacctgaacgtcatggctcaatgagttcgatttttaaatcacaaattgattggataccattagcaggtggtgcaattcgtgcaacgcaaggcaagactttagccttgatgcaggtgagtggcggttcgcagtcctttaacagtttaaaccagatgcgtattctcggccgttggatgcgcatgatcactatcccgaaccaatcatctatcccaaaagcttttttagaatttgaagaagatggcaggatgaaaccttcatccttctatgatcgaattgtcgatgtgatggaagagctgtataaattcacgctattgacgcgtgggcaaagtcagtatctcacagatcgttattcagagagaaaagagtcggcagaagaattatctaagcgtgtcaatcaacgtagcttataa

SEQ ID NO: 52964 - DNA, 954 bp, Acinetobacter baumannii
atgcaaaagagacattctaaattagtaatcttaggttcaggacctgcgggttatagtgctgctgtatatgcagcacgcgcaaacttaaaacctacattgattgcggggttacaacttggtggtcaattaacaacgaccactgaggtagataactggccgggcgacccagaaggtttaactggtcctgtacttatggaacgaatgcaagcccatgctgaacgctttggtacagagattgtgtatgaccacattaatgaagttgatttaagtgtccgtccatttttgcttaaaggtgacatggaagaattcacttgtgatgcactgattattgctacaggtgcgactgcacaatacttaggtcttgaatctgaagctaaattcatgggtcaaggtgtcagtgcttgtgcgacttgtgatggtttcttctataagaaccaaaaagttatggtcgtaggtggtggtaacaccgcagttgaagaagcgctttatctttctaatattgctgaacatgtcaccttagttcatcgtagagacagtttgcgttcagagaaaattctacaagatcatctttttgccaaagaaaaagaaggcaaaattagtattctttggaacaatcaagttgatgaggttttaggtgacaacactggtgttacttcagttcgcttgaagtcaacttcggacggaagcacacaagatgttgaagttcagggcttatttgttgctattggtcacaaaccgaatacaggcatgtttgacggtcaacttaacctacgtgatggctacattcaagtacaaagtggcacttctggaaatgcaacagcaacctctgtggcaggtgtatttgctgcgggtgacgttgctgatagcatttatcgtcaagcaattacctcggcaggctcaggctgtatggctgctttagatgctgaaaagtatcttgatcaattgagtaattga

SEQ ID NO: 52965 - DNA, 1068 bp, Acinetobacter baumannii
ttgactcaattacaagctgaagtcgatgtagtcattattggtggtggtcaggcagcccttgccacagcttattttctcaaacgtaagaaaattccatttgttattttggatgaccaagctcaggcaggcggtgcgtggtcacatgcttgggaatcgcttcgtcttttttctcctaatacgtggagttcattgtcaggttggatgatgccaacaactgaacaaacctacccaacacgaaatgaagtgattgactacttgtctgcatacgagcaacgctatcaatttctaattattcgaccagttcatgtcgatcatatcgaacaaaaagatgactatttagatgtgtatgttggcgatcaatattggcgagctaaagcggtggtcagtgctacagggacatggagtcagccttatattccgcattataaaggacatgaacgatttgaaggattacaaacgcattcagcccattatctaaatccagagccttttatcaataaaaaagtgattatagttggtggtggtaactcaggggcacaaattcttgccgaagtctcaaaagttgcagataccacttgggtcacagtaacaccacctcaatttttatcggatgatgttgatgggcgtattttatttcttcgggcaactgaacgtttaaaagctcaacagaaaggtcgtgtgattgatcaacccgttggtggtctgggtgatattgtcatgattgacagtgtcaaagaggcccgtgaacgtggcgtactacatagtcgagaaccctttacctcatttgaggagcattccgttatttgggctgatggtacaagacaagcagtagatgctgtgatttggtgtacaggattcaaggcctcactggatcacttaagaagtatgaatgttgtggaacctgatcagacggttgctgtgaatgatggacgctcaataaaagtaaatagcctttggttggttggctatggggaatggacaggcatggcatccgcaacactcattggggtttctagaacagcaagagcaacggtagatcaaatagctgcttatttggttaatttataa

SEQ ID NO: 52966 - DNA, 417 bp, Acinetobacter baumannii
atgctgtcaattggggaagaaagtgatcagttaccaaatttggagcatgtcaaagcgtatttggctgattattcgggtcaagctgctgcactcactggattcattaactttttaaatgagaattacggtatttctattgattatttaaaattaaaaaagtcttcttttttaaagactaagcaaaagaaaaaactagaaatggaacttgttgcacttacccaaactgatttaagtgacaatgaacttattctaagttgggtgagaaatgggcttaggtattttcatcaacttccttacattgatgctctaaagattaaaacagaaatgattacagaaatagaagatggttatgatgtaagatttaatggacattcatattggttaccaaaacccatagagcttcaaaaaaacagctag

SEQ ID NO: 52967 - DNA, 801 bp, Acinetobacter baumannii
atgaaaaataccaaaattaacgcacgtcatcttattatcgacctctttctttcttccgcttatcctcagctcagtatcaaacaaattttggttgcagctaaactttttaacttaagtgaaaatggtattcgagttgcgacaacacgcttgttaaatgaaggtatgatccagagcgtagaacgcggaatctatcaactttctccatcagcaaaagattgggcaaaagttattctcaatcgtaaaaatggaattaaacaaactaaagaatggcagcagcattatcttgccgtgtttacaggaaccttaggccgcatagaccgaacagcactaaaaaaacgggaacgtgcacttcgtcaatttggttttaaagagttggaaactggtatttacatccgcccagacaatttagcttatagctttgaaaaaacctgtgatgagcttgttttagcagggctagagaaagaagcaaaaatttgtattattcaacatgtcgactcaacaacgcttaagcaaattttttctttatgggatactaaacaactcgaaaaaaattatgaaatgtatagccgagatattacacactggcttgaaaattatgctcactcccctttaaacgatgcagcagtcaaggcacttcttttaggaagggaaacaattgccttacttatgaatgacccattattacccgcaccatttgtaaatgaatctgctcgtaatcaatttgctcaagatgtacagcaactagatgcaattggccagaaactttggaaaaaaatatatgaacaggaattaaatttatag

SEQ ID NO: 52968 - DNA, 201 bp, Acinetobacter baumannii
atgtcagaaaagcaaagtcgtttgcttgacttgaaggcggttgaattaaaaaccagccttccaaagtcaactatctatgactggatgaaaacaggctacttccctccttctatgttatttggagagggcaaaagaaaaattgcgagatggcttgaatctgatatagactgttggatagaaaagcacagaatggcatcctaa

SEQ ID NO: 52969 - DNA, 213 bp, Acinetobacter baumannii
atgagtgaaaaagcatttaaagatttaaaaattcggttctacatggcaattggtattgcaaatgccactcaggaagatttttaccctcttagtgaattcattgatgaagatgactggaatgcaatggatgaactgcaaaaggaaacatttatttctgattgcgctaatgattggagtcaaaactatttagatttgggaggctgggtggaatga

SEQ ID NO: 52970 - DNA, 609 bp, Acinetobacter baumannii
atgacagatttgaataaggaaagagaggcttttctgaatgccttccaatattacaaaggaagaagagacattatttttagtcatgagcatgaactgtttatgactagatcaaacaatccttctgaagttgctcaaaaagaaataagcaacatgaatagccgttgggatgcttggcttagatgtgcaaagcatcgtgatgcagagctagaaaaagccaaagctcaggcggtgcaacaatcttttgagattggtcgtcttcaagatcgaatcactgaattgcttgatgaaagacaagatttgtatgcacagattaataatgatcaggcggtgccagatactcaacaaaagcttacagatacatattatttggaaggctcagattatgtagttgattgccctttcgaatatgacattgaaatagataagggagaagtgcttgagttgcaaaaatggcaacgtactgagtcaacaaaagtatattttgcaaatatctataaagatgaagataactttgaaattcttcaattcgcttcaaaagccgaagctgaaaatgcagttgcagaaaacttgaagtttttagaagcaagcgaatcgggagcagaacaatga

SEQ ID NO: 52971 - DNA, 762 bp, Acinetobacter baumannii
atggataactacaaaatcattaatactcacacaaatgagattatcaaggcccttaatgaccttggctatgtatggacaccaaagaagtttgatgaacaagattgcttggtaaaagcacattggattctagctaaagagacaggtgaaattgcatattcaagtggtactcacattgattctccacttgtatttaaagaactcaccctccctcagcttcgagaccttgttgtgttgaggcgtaatgatgtgaaggatgcgacacacaagaacttcagaacaaataccccatacctaaaacaaggtgagaatgaatactacatgtttaatggcgagtgggttttgtctaactgcccaaatgacctagagccaatcaccaaaccccaagacccagccttgattagcggtgcggaggcgaagcttgcatgggcaaatggtgaagctttgcagatcaataaaaaagatacccattttggctttattgatataagtaatgattactcattgggcgttttcgacaatgaggattatgaattccgcctcaaaccccaaaccatcaagcttgaactagagctgccgaagtcttttgagccgaaggatggggaaacatactggcatatctatccatcagccgagaaaggttatcacttcgttcgttcgtttgaagatgatgatgtttggtgtcaattcggggcttggcgcaccgaggcagaagtaaaacaagtcgtagagcaactcagaaagatacgaggtactaactcatga

SEQ ID NO: 52972 - DNA, 471 bp, Acinetobacter baumannii
atggaacatggcttaattgatcagcatgagaaatttaaaaaacgagtcgcaagttctgatatttctgggtataaaaaggtttttaaaaatgaacttgtaatggggttccctatagatgaaggtgttctaggatttcaaaaatattacgatgctgctgccgtaagcccagcatacaaaatctttagattaaaacgagaagttaatgtagaatatttggatttgattttgagatctaattctctaagaaaaatatacaaaagtaaaatgcaaggcagtgtagagagacgacgcagtattcctgatgaaatgtttttgaatattgagatcccgaatcctcctgaagaggttaaagatcaaatagtaaaacaacataaactaataaaggaaattgagaatagtctcaaggaaaatcaaaaaaaattgcgtctaaagacagaagcattatgggaacttcctcaaaattacaactaa

SEQ ID NO: 52973 - DNA, 357 bp, Acinetobacter baumannii
atgggactttcatcatttaaccgtgcacgggaaagacaacaaatgacagaaacaaaaattgctgaactcgaagaacaactggcaacgttgaaaggtgaattcattgcctttcaaaatgatccagaagccatgaaagcacgtattgctgagcttgaattgggggcaggtaaacaaaaccctgaaggtgacaaccagcaagctcaagacaaccaaaacgcaggtgatgaccaggtgcaaccaattaactatgcaggtctaaaagttgatgagttgcgtgcggtcttgactgaaaaaggcattgcatttgaagcaggcgctaaaaaagatgaacttttagcattaattccaaaggaataa

SEQ ID NO: 52974 - DNA, 951 bp, Acinetobacter baumannii
atgggcgacacaaaaattgctgatgtaatcgtacccgagttattcactccgtacgtattaaataaaactgccgaaaagtctgcattatggcagtctggcattgttggggatttggatgtagatgtggctttcggaacagagggtggtactactgtaaatatcccattctggaatgatttaagtggggagtcagaagtactttcagattcaacccctttatctgtaaataacatcacatcaggcaaagatattgcgattcttcatgcacgtggtaaggcgtggggcgctaatgatttggctaaagcattatctggtgacgatccacttggtgcggttggtgatctggtcgcagattactggtcgcgtgagtttcaaggttttaccgtaaatacccttaaaggtgtgttcggtgcagccagcatggcaggtaatactcacgatatttctgctggaactggagctgccgctgtaattgatggcgtatcttttgttgatgcttcttataagttgggtgatgccgtagataaattaacggctattgcaatgcattcggcaaccatggctgcattagctaaacaaggtttgatcgaaaccgtacgtgatgctgatggtgtagtgctctataaaacctttatggatcgccgtgtgattgtcgatgacggtatgccagtggaaggtgatgtctttacttcattcctgtttggtcaaggtgcaattggtttccaagatattggggcaccggttggtgtagaaacagaccgtgatagccttgctggtactgacattcttattaaccgccgtcactttgtattgcaccctcgtggcattaagtgggcaggcgatacaggtatagctcctaataacgctggtctagcaacaccttcaaactgggaacgtgtttacgatcctaaacagatccgtattgtggcattcaagcacaagatcaaataa

SEQ ID NO: 52975 - DNA, 1134 bp, Acinetobacter baumannii
gtgaagatagtatatatagtaaatgtggattggttctttatatcccatagattgccaattgcactagaagcaattaatcaagggcacgaagtttttatttttgctaaagatacagggaaaatggattatctaaaatctttaggaatgaatgtatatccaattggtttggagcgaggaagccttaatccattttcttctttaaacttgttatttgacttaaaaagaaagttgtcaagtattcagcccgatgtggtccacttggtaactattaaacctgttctactcggtggtattgcatcaattctagcaaaggtgcctgcaatagtttatgcaatttcaggtctaggttatatttttacaaatacaatgaccaaagcaaaaattttgcgtataggagtaattccgttataccgattggctttaagtgcgaaaaataaagtcgttattgttcaaaactctgatgatttaagaattctaaggcaatatgtgtctattccagattcacaaacagtccttattccaggttctggagtgaatctagagaagttttatgtacagcagatccccttagaaaacaaagtggtacttatggcttgccgtatgctcgttgataaaggagtttatgaattttataaaagtgccatactattaaagcgtaaatatcctcatattcgatttgttttagttggcggcgttgatcctgataatcctgcatctttgagtgaacaacaattaaatgaatggacacaaagtgggattgtagagtggtggggacatcagagtgatatggctgaaactctaagcaaagcaacagtagtggttttgccttcatatcgcgagggaatgcctaaagttttattagaggctcaagctttagggagaccggtcgtcacgacagacgttccaggttgtcgagaggctattgaagaaggagtgactggttttcttgcagaagttaaagatgagaatagtttagctacagcaattgaaaagttgattagtaatgatagcctttgtgaagaatttagccataatgcgcgtcaacgtgccgaagataaatttgatataagacaagttgtaaaaacccattttgaaatttatgagtcattaaagcgaaatgtaggttcacaatga

SEQ ID NO: 52976 - DNA, 939 bp, Acinetobacter baumannii
atgaaaatattaattacaggtagtactggttttctcggtaaatttctttgtcagtacttatctaataaagattattctgtcatcgcacatacacgtacacctcaagtttttagccaatcaaatattgaaaatattaattttgatttaaatcaaaatttggaagaattggacttagatggggtacaggtcgttatacattgtgctggtcgtgcacatgtgatgaatgaaacagcagcttctcctttaaatgcatatcgccagattaatgtaaaaggaacattaaatcttgctaaaaaagcggtacaaagtggtgtaagacggtttatttatttgagcagtattaaagtaaatggtgaggaggctactcagcagaagccatttactgccgaggactcgattaatacagatgatccgtatggcttatccaaatatgaagcagagcaagcgctaaagcagttagcacaggaaacggatttagaagtcgtgattattcgtcccgtgctgatttatggaccaaatgtaaaagccaatttcaaaagtatgatttctctagcatccaaaaagatccctctgccagtaggatgtttaaataataaacgtagtatggtcagtgtttataatttggctgatttgattgaagtgtgtttatctcatcccaacgcccctagacagacttttttagcgagtgatcaagatgatatttctgtgaaacagctgtttgagaaattagcatctttgcaaaacaataaattgattaaattaccaatacctaaaagtttaattttcttattggcaagtcttgtggggcgttctgcaatggcatctcgcttatgttccgagttagtcgtggatacatctaaaaatacacaagtccttggttggaaagctccttattcgactgagcaaagcctagctaaaatgtttagggaaatgggataa

SEQ ID NO: 52977 - DNA, 1008 bp, Acinetobacter baumannii
atggtatatgcgttaattttctttgttctttcttttgtgctgacctatctcatgcggatgtatgccctcaagaaaaatatcatcgatagccctaatgaacgtagttcccatactatgccaacccctcgtggtggtggggtagctgtagtaattagttatcttttgagtttggctggactgatttacctgggatatttaactccctctatcggtataattgtaattgttgcgggatttatcatcgcgttattgggtttcttggatgatcatggacatattaatgcgttggtcagactggcaattcattttatggttgcaattggggtagtggttgccttaggtgggtttacagaagtcactatttttaatggcttacagttgggctttgttgcaaatatcattgctgtcctattcctagtgtggttattgaatttatataactttatggatggtattaatggtattgccagtattgaagcaattacttcagttctaagtatggcattgatatactgggttttaaactcaacattaaatagtcaggtccttagtttaatggctgctacagtatttgggtttatgttatggaatttcccgaaagctaaaatattcatgggtgatgcctgtagtggttttttagggctagttttaggtatatgggcgttatatgcacttaaacaagatataggcttcttttgcgcttggattatttgtttgggtgtctttattgtagatgcaacatttacacttattcgacgtgtcttaaatggtcataaaatgtatgatgctcatagaagtcatgcatatcaatatgcttctcgaaagtatcaaagtcatacgaaagcaactttaggagtgcttaccataaatctattatggttattgcctatggcttatctcgctgtcacaaaagttatcataccagaactggttattgctattgcttattttcctttaattgttttagcaatttattttaaagcgggaaaaacagaaaatgagcaataa

SEQ ID NO: 52978 - DNA, 528 bp, Acinetobacter baumannii
atgagcaataaaaatactttattaattttaggtgcaggaggccatggaaaatctgttgcggaagctgcatctttatctggtaaatgggaaagtattatatttgcagatgatgcttggcctgaaaaaacggagttttatggttacccagtgttaagcagtgtaaaaagattggttgaagcatctttagacgtatcagctgctattccagcagtaggtaataatttggtacgtcaacaatggcatcagttaatacaagacattgggattcctgtagcgaatgttattcatccctcagcaattattagcccaagtgctaagattggaagaggtgtcacgattatggcaggctgtattattggcgtagaaacatatattgatgatggtgttattgttaatatgggaacagctattgaccacgatgtaaagattggccaatttgcacatttgagtgtgggagttaaagtgggaggagagaaaaaaatagattccttttcctttgtacctgctggaggtatcatagcccattaa

SEQ ID NO: 52979 - DNA, 1023 bp, Acinetobacter baumannii
atggctaaaattctagtcactggcggtgcaggttatattggttcacacacatgtgttgaacttttacaggctggttatgaagttatcgtttttgataatctttcaaatagttctgaagaatctttaaatagagttcaagatatcgccaaaaaaagcttaaattttgtgcatggtgacatccgcaatgtagatgagttggatcgcgtatttcaagagcatcctattgaggcggttattcattttgcaggtctgaaagcagtgggtgaaagtcaggaaaagccaatcatttattttgataataatattgccggcagcgttcaactggttaaatcgatggaaaaggcaggtgtctatacgcttgtatttagctcatctgcaacagtttatgatgaagccaatatatctccattaaatgaagaaatgccaacaggtatgccaagtaataactatggctatactaaactgattgttgagcaattattacaaaaattgtccgcatctaatccaaaatggtcaatcgcattgctccgttattttaatccagtcggtgcacataaaagtggccgtattggggaagacccacagggtattccaaataatttaatgccgtatgtgacacaagttgctgttggtcgccgtgagaaactatccatttatggtaatgattatgaaactgtggatggtactggtgtgcgtgactatatccatgtggtcgatttagcgaatgcgcacttatgtgctctcaataaccgattggatacgacaggttgtcgcgcatggaatatcggtacgggtaatggttcatctgttttgcaagttaaggatacatttgaaaaagttaatggtgtgcctgtagcttttgagtttgcaccgcggagatctggagatgtagccatatcttttgcagacaatagtcgttcagttgctgagttgggttggcagccgcaatatggtttagaggatatgcttgctgatagttggaattggcagaagcagaacccagtaggatataaggtagaataa

SEQ ID NO: 52980 - DNA, 771 bp, Acinetobacter baumannii
atgcagaagtgccatatagaagaaggtacaaaagttcctgaatgcaagtatggcaatgggcctgttaagttaattgtaataggagatagtcacgcagcagcaatgattagatcagttgagaaatcacttccattagactcttcagtattagattggacctattcaggctgtcctacagtagagcatattaaaaaattaaatagcccaaattttaaatgtggttacgttatatcaaagtttataaataaattagatcaatatccaaatacaccgattctaataatcaatagaatcaatgtgctgttccacggcgctccagatggggataatgatttaacaaagcctattaggtatatagatcgtccattccaagcatataatcaagaatattataatgctatgaaaatagcttatatagatactctatgtaagatttctaaaaaaaatgaagtttttgttacacgccctgttcctgagtttacatctaatgttccaaaaactttagcacataaagctattattcattcacaaacaagaatgaaaatttcaagagctcaatatatggagcgtagtaagttatcttatgaggcgcaaaatgaagcggctgaaaaatgtggtgtgaaaattttagaaacagctcatttcttctgtgataataattattgttatcctgacaaagacggtatgcctttgtattttgatgatgatcatcttagtatttatggtgcggaccagttaattccattatttaaaaagatttcagaagaataa

SEQ ID NO: 52981 - DNA, 306 bp, Acinetobacter baumannii
atggataactggaaacatatcatcactgcctttgttgtgactattgttgcaacaatattaatccctttattttcaaggcttaaccccttaaaactttttttagcttgttttttactttctactttaggttttggtgtagtagctacctatggccgtaaatctaataatcggggagtagatggtgattggggagcacatggcttatggaaagagatatttaatttagaactagtaactatcagcgtaggtgttggagttttaattactcttacacttatgttagcaatttatttttctaaagaataa

SEQ ID NO: 52982 - DNA, 303 bp, Acinetobacter baumannii
atgttaaatacaattttatttagtattattttgggaatattcacttccatattctcaatttttcttacagaaaaaataaccaatgtattttttaagaaaaaagaattttctgaaaattatataatgctttcaaaagtcttctatatttttttgtttatgattttttcaattttttcctctactctcataggaaaaggttatcctctttattttgaagaaagcttaagacatgtttttataaaaggatacttctcggcctattttataatttttttcatgtttgcttttcgaaaaggtacttaa

SEQ ID NO: 52983 - DNA, 393 bp, Acinetobacter baumannii
atggaaatttcctataaaatcacacaaggcccacaaagctctatcacacttccaattgtttcatcagaaattgaaggtactttgataattaaagttaaaaataaaattatcttcaatgaagaaaatctactattattggaattttccatttatataaaacaatggcttgatagagatgagaagccaaatttttcttattcctctatggagtttgaggaaaaaaatattctcacttttgaaaaagaaaaagatgatttatggagaatcaactcagtttggtttaataaagatcaaaataatatttatgtaatgtatccagaattaataaatgcttgtactagttttataaataaattgaaaaatgattttaaaggtataacctttcagtattag

SEQ ID NO: 52984 - DNA, 273 bp, Acinetobacter baumannii
atggacacatatctagataaatatggatatttaataggattttttctgggatatttagatattcttgaaagtaaccaagatattttgaattattttcaaaaaaattctgatgaaattcatatatgtattgatgagattgcaaagcttctaaatgataatttattagactgggagatcttttcagaggaagcaaatatttattttcaatcgaaaactgattttataaacttttttaattggctcaaagccgaattaataaaaatatctttataa

SEQ ID NO: 52985 - DNA, 297 bp, Acinetobacter baumannii
atgaaaatggtaaatgatgaaatgaaaatatctttattagatgtacaacaagtattcaatgatctgttaaaccataaaattagccgagaggatgctgaagaatgggcaagaaaaagaatgaatgcactggttaatcaagacttaactttcgatcctcctattaaagaggaactcctatggaaagctttagtatatttaagtggtgttgggttaaaaatatctcctgataaatatatggaagaagaaaatggcattaaagaaattttgttaatcatcgaactagaaaatttcgtataa

SEQ ID NO: 52986 - DNA, 219 bp, Acinetobacter baumannii
ttgcttgagacagcaagtagtatttctgaaaactgcccaatgcctttatcggatgcattaaaaatgcctttgagttttgaaagtacttacttcaattcatcagcatgggaaaaccgcaagaagtatttagaaaatgaaattgaacgtcacaacgtattcttaaaattaggtcaagaagtcattaagggattaaatgccctagcaagtagaggccgatag

SEQ ID NO: 52987 - DNA, 288 bp, Acinetobacter baumannii; identical to SEQ ID NO: 46104

SEQ ID NO: 52988 - DNA, 492 bp, Acinetobacter baumannii
atgttcgtgaaaaagggctttattagtccattacaaataaccctagcctctatactttgtctaactattagcggatgtgccaatactcaagttaataaccccagagaggctgttattaattctactcgcggggcggtagatatgttgattatggaccagccagtttatagaaatgcaattgctaacgagaagaacaaggttacaaatgctttactttacacaaccttaaagaaagtgggggttttaagagagcttgagaaagagataggtaataactatgtaattgaagaagatctatctttagcaaaactaaatcaattatgctggacaactaaatttcttcagcattatagaaatgacttatccgccgagtcgcaggctgattatcaaaaagtttacgcttgggtagatgctaaacaatcgctatggataaaaaagctgaatgaatcttttagtaaagatgaactcggtgagaatgattgccgaaattaa

SEQ ID NO: 52989 - DNA, 696 bp, Acinetobacter baumannii
atgtctgataaaaatttaagagatccttacaaccgacatttagcagattcatccccagcatgggatgcttatcctcacgaagaaaaagtatgtgttataaccgaaccactctgtaacgaccatatcaagattcgtaattattatatggcccgaccttataacttcatgatgcgagttaaccaatgggcagaagtagcaaacaccattgaactattaatggctgttcggtttggtatggaatgggacatgaataagtttgacgatcgacttcttgccgatccgggctttcatacccaaatgtacattcgtttccataattacgtacttaaacatgccatgaaagaaggtgcccgaatcgttggtgaattccaacaaacagcctttaaggttcgctttttaagtgcctttgcagttgatgaactgcttgaattacgaaatctgagcaagttcgatcaaggcaaagaaatatatggaaaaattcaagacctcaaagatacatttgcaaagctaaatgctgcaagggctactaccgatttagcacaattaagaatgaatgatgggccattattcatcaatcgtgaaatgtttaaaaaagtctttaatcaagactttaaccctaagatgattcagataatgaaacaaactagagagtatcctggagatcctattaatgttcgtgaaaaagggctttattag

SEQ ID NO: 52990 - DNA, 231 bp, Acinetobacter baumannii
atgctgaagtggtttgaaaaacttgtagatccttatccaaccaaaggtttggatgagcccttaccaacacgctttttcccatttgtttggcaagctactgaaggtgtgcgtccatatttattgctacttattatatgtacagctggtgcagctagctttgaagccctgctcttttcaaaaattgggcaacttgtagattggcttataatagtcagcctgaaagtttcttaa

SEQ ID NO: 52991 - DNA, 267 bp, Acinetobacter baumannii
atgagccttgaaaaaaaatctacgcatgtgcgtttatctcccgaaatccatgaacgagcaaaaatacttgctcatgttaaagaaaaggatctcgcggcctatctaggttttcttattgaaaaagagatagttggcgagtggcatgtattcaatatacaagcaaaatctttcgcgcgtttgggaatgtcggctttagtacgggagttaagtacagaagtcagcttttcagagggatcggaagggattaacgggaatttagacaaataa

SEQ ID NO: 52992 - DNA, 783 bp, Acinetobacter baumannii
atgagtactcttcaagagcgaatgtctttagctataaagcactatgaatctgtgacaggtaaaagattcaaaaatactgagctggctagatttgcaggcgtgagcagggctaatgttgggttgtgggtaaatggcccaacccaagagttggaggggtcaaatttagttaaagcggctgagtttttaggagtttctaaagattggctagctggacaaggtaataaaatgattgccacacagctggatggtggtggtgcacaattaaatgttcttgatattgaagcctttaagcagaagtacaacattccagatagtgaagatgctgttaagtttgttcaaacatcagataaaccattccctattcaaaaaagatacgttcccgtcaaagcttattcaaagatgggtatggatgggtatttcacagatatgggatacgatggaaatgctggagatgggtatgttccaactcactcagcaggaccaagagcctatggtattaaaggcactggcgactcaatgtttccagctatccgtaatggatggtatgtggtttgtgatccagatgcggaactcgtgccgaatgagtttgttcaggtatgcttgaaggatggaagatgcacaattaaagaatttgttggcataaatggcggggttttaagcttgctttctgtgaatggtggtgagcgatttttctttgaaatggatgaggtagaaagcattacagctattactgacatcgtaccaccaagtcagcacagacaagaacatccttattcgcattaa

SEQ ID NO: 52993 - DNA, 216 bp, Acinetobacter baumannii
atggacaattcaaaacgaccaatcaaccagattattgctcgcatcaatgatgctgcgaaacatggtgaagctttggtgctaaccgctgaagaagtaaagattctttctaaagatattggcgacaaagtctttattcctgtgcttactaatgagcaggtcgtgcagttggtaaaagaaggaaagctaggccagaaaattaataacacaaaagattaa

SEQ ID NO: 52994 - DNA, 195 bp, Acinetobacter baumannii
atggacatggtctgtaagcaattatcgtcacctgatgctaatggggtgcagtcatgtcttcaatggggtcaagctgacctttatttaccaccattaagctacgccgaagctacaacaattgggggcgctttttggttatgtctggcagtcgtatggagtttaaaaactatacgagtgcaaatttttgaaaagtaa

SEQ ID NO: 52995 - DNA, 219 bp, Acinetobacter baumannii
atgaacactaaaaaacaagtaatgcttcaacgttttaaacaagctgctgtagttgctacggctgcgggggtaactgctgcatcgaatgctgcaattgatgtaactgaaattactggggagttgtctggtgctcaggttgcgggtgctactgtagctgctgctgcaattttgattccgctaggtattaaagtatttaaatacatccgttctgcattctaa

SEQ ID NO: 52996 - DNA, 1452 bp, Acinetobacter baumannii
atggctattaatgatgatttatattggtataaaaatgttttaagaagaacaatttcaacaacaatccgcttttacttatctctctcaattatcctttcaccaataattctaatgactgaagctaacgccaccgatgatggtgattggtggcttcagcgcgaaattaagttacagcaaaaccgtgaagattatgcaagacgtgtctatgggcgttctgcaaggtctttcactgaaactgaccctgtgacagcaaaaacaaaaacggtaacaagaattgctattgcagaagcatcgcctacagcttcaaaagtgggtgcatctatgttcaagcgtgttgcattctatgcaaagaatccaggcgtacaaatggttggtgttatggcagcgactcagcttattgaagcaattggttgggttatggaggatggtgcatacgtaaagaaaaaacctgctgacccagacaaagacccgactttaccacgtgcatggcattggacaaatattggttattattcgactactaccgcagctgctgctgcatatatggcttatcacaattcaactgctgtctcatcaaaacaggcacgttcttaccaaataaaagacactattaacgctgattataaaacagtttatctttttgattcttctggtgttttagtcggaaacgttactattcagtatgttgtaaatccagattatgatccaaatggagaaccaccccaagatcaaacaattcctttaacacctgagttattaggggctgcaatgatgggtgaaggctataacgatcctgtaaaaccagaacattataatcctattgctaatactggtcttatgaatagctctgtagctgatagctatcaacactcaggtaatggtgttggtgatgatttagctaatgagatggatcagaaattaaagaacgctccacccacacctaataatcaacctgctccttatggttcgcctcaatatgctaatccaccttcagaatctgcacctaatgttaatgatcgcacatgggatgaagatggtggtgctgctgacggtaaagccgaaccgattaaagaccctgaaggaaatccgactggtggtcaatccatatcaattgagtttccagtattttgtgaatgggcttttacggtctgtaaatggtatgacgattggaaaaaaacagatgaatggatgaaagaagatcctgaacagaaagaccctgaaaaagttgaatttgatgaagatgtatcggcaggtactgtaacacttacgggttcggatgcttgtccaaaagactctgttcaattcactttaatgggccagacttatactcttgaattaccttatcaacctgtttgtgatgctcttactttctttaagcctgctgtgttggctgttggtgctattacttcagcttttattgtagcgggtattaatgttaagggagaagattaa

SEQ ID NO: 52997 - DNA, 285 bp, Acinetobacter baumannii
atgagtttagctagtcttctttctaaagtatcagaaacaattttatctagtgccgtctcaaaattacttaaaggtgctggactttctttatttacatacggtgcaacacaaggagcattttccttagctgtaagcactattcaaagttattggggcacattgggcaacgtattgtatgttgttggtctaagtggatttgatcaagctatcagtatggttttatctgctattgccttacgtgttgcattatcaagtatgcaagttggggtacgaaaaagtgattaa

SEQ ID NO: 52998 - DNA, 720 bp, Acinetobacter baumannii
gtgattaatttagtatgtggtcaaccacgtaatggcaaatctcaatttatggtgaaaaccatattagatatgcttgaagaaaataaaaaattagaagaacaaggtaaaccggcaagacaaatttattgtgatattgatggtctgagaatacctgaagttgaacctgctccagatgattggcgggatactccggatggttcaattattatttatgatgaagtacatatgcgtaaagcatatgagtacaagggtaaccaatactctcaagatcagatgattaaggaccttacaattcatggtcattttaacaaggatatttggttaattactcaggatcctgcgcgaattgagaaaggtattcataagcttattgataagatgtacttcataaagcgtcctagttctaaaccgccttatacaaatgtttttgtatttgataagtggttatctagccctgaacctgctgcaaatcgtaatgctaaacataagaagtatttcgaccattatcggtttcattttaaagacgaatatcaaaagctttatcattctgcttctgaccattccagtatcaaatttaagttaccaaaacagttatttatctatgtatcaattattttaggaatagttggttttgtagtgtttggtttaatgaatactaaatcttttaacccgcaaagatttgaggataaacaaagtgcatcagataccaaaaaaagatag

SEQ ID NO: 52999 - DNA, 552 bp, Acinetobacter baumannii
gtgcatcagataccaaaaaaagatagtaaaacgaatgatcaaacggctaatcagaagactgacgaacagaatcttttattagatcagcagtgttctaaacagtatggtttaaccattgagcaatgtgcagacctacgcgatcctacaaaaagaaatgctgaattattggcaaaagaaaagaatgatatgcaaagtattgtgcttcaatacaaccccaacaagccttatgatattgatgctagtcaagtcagttatgagattacgtcaaagcctatgtttagtggttgtatgaagcagaatggacgttatgtagcatatacccagcaaggtacaattttgcatgatgtgtctcaatcagattgcagacgactcttaaaacatgcaggtgatcgaccttttaattattttgctcaaccacgtaatgaacctatgaatacagaagctttgagaaaggattctgttgagcagattccacaacgtcaacaaccgattcaatatgctgaaaactatatacagcgtggcttagagagagaccctaattgggatttataa

SEQ ID NO: 53000 - DNA, 225 bp, Acinetobacter baumannii
atgacaaaacaagtttttgaatatttagaagaaaaagcaagccaagtgatagatacttctttattgcctttggattgtttaaaaaatctaaatgagttatctggtgcagttgatgttttagtgaaatgtggtttcttgactgataaagaaagtattaataaggcttttgatattttggagcaagtaaccacctttgcagataattctttacctaatgagatgtga

SEQ ID NO: 53001 - DNA, 231 bp, Acinetobacter baumannii
atgacaattaaatattatgatcttgataatacaactcccattgttgtcgatctaacattgggtgaattaacagatatttacttcactatttttggagcaggtggttctgataatatgcctgcactaaagaaaataagaactaaatatactccctgtgatatgtgtcaaaatctgattttaaaagaagattttggagcacatttgcagaaacattgggatgaagaacaatga

SEQ ID NO: 53002 - DNA, 138 bp, Acinetobacter baumannii
atgaaacatgatgcacatgtacttaagtttaaaatgcaattttttcctattaagcttttagcttttattgcgatgtttttcttaattacaggtatgttatttggttctttcctctctgtatttaagtgttatttttag

SEQ ID NO: 53003 - DNA, 3099 bp, Acinetobacter baumannii
gtgggtaatataagtccatccgaaataggtggtataaccgcacaagattttctttggttttatagtgatttgacagcaattaagtattataagaactctaagagtggcttagttaatgctctctctgtggattggacttatgagttggtaaatagctcaagaccaggttttacagaagaaaagtcttttaaagttacaagttctaaatactctatagcgaatgctaattcatatgatgtgacttatagctatagccgagatgactctacacatgagcaaacaacagttgttactagcaaagattctgtaactggactttcaaaggcttatacttatgtaatgcatgcatttttaggtggtggtgctgagaacttcttacatgggcttttgaaaaaaattacgataggtgatcgagaagaaagttatacatggacaaccctatctctaattgggcaaaaacctaagactatagatgataactatactgattatgaggatgttcgtttagtccgtcttgctagtaaagcaattagtcattttggtgagtataaaactacctatagtaactttgaccaatatgggaatgcacaatcagtccagatgactggattgaatggttcaagtactgttcaatttccagcaacaacggctacatattttaatgctaatgctgcaagtgatgatgtaaatacaggaaatttaccttggattatcggattaccaaaacaaaaaatatcaggtagttttacgttacaaactactgaatatgatgcacaaggagcaatacgtagtaatactcaagctggtcgtgttaccaaatataaatatgaaacggtatcattctcaacatgtcttggaaatttagcgagctttcaatggtcaaagtttgttagttgcttatcaaattatgtattaggtgatcaacatgtgggtttaccaattgaagttgatgttggaaatggtaaagaaattactcaatttgctggttacaaaaggggtattccaactcaagttaaacttgcaaatggggcgacagaaacaaatattgtagatgactttggaaatataactcaacatactgatgcagatggggttatttcaagaaaacaatatgatgatgctggccgattatatatagatacaccaattgttgggttaaattactctacattcacttatgatggtttaactgtttctagggttgtaactggtggcgggcaactgagccgaatagaaaaatataatggtgatggtttactgatttcgagtgaggataagatatcaaataaatctattattaactctaataagtatgatgcatttggaaacctgatatttaaatccaatcctggttttagtgctataacaagtggaactacaagcagttatgatgtctttgaccgcccaattactgtcaatgataatggaagtgttgtgacatattgctatcagtcctgtggaggaaaaactggtgcaattgtacaaacaacagatagctttggtacaacagaatctaatctattagcagcaggagattttagtgctgatttaaaaacactggttgcacgtaaaggtacagatggatcagtctttcagacaacaactgaatttgaaaacgcacttttaaaaccaaaagttgctgtatcgggtagttctacacaaagttatacatataactctaatacaactttagcaacagaaaaagataatagtattagtgggcaaaagacatttaaatatgatgatactggccgaattacttcaattacccatccagatagttcagtagaaacgatcaaatattttcaattaaaggacctcatcgcgtcccggacatggcgagaagttgagacaacttatagttattctcttgctgggcgtttaaaaacaacgactaatgcaaatattagtgaagcatttgatcttgatacatatggccgtgttataagtcatacacaaaaaatcaatgccaatgataccaataattcatatgtcgtaagatatggctataatcaattaaaccaagttacttcaattcaatatcctaatggtaaatctgtaaatttatctaatcagaatgctttaggggaagtaacatcaataccaaatgtaatacaaagtttgaattataatgcacggcaacaacttacaactgtgcaagccaataccgatactttatggtcatatacttataatgatagcgggttgctgaataatatctctgctacaagtctggaaaagtgtgtcctcaatgttgattatggttacgataaattgaaccgagttaataagctttcggacaaatgtggatcagtttataacgctacaattgaccgttatggtacaggtttgatgagtactgttgagttagatcaagcacgttatcaatatagttataataatgatgacattactaaagttaatatcacttcaaaaagctcgacagtagcaccagctatctatacatataactatgtaaataacacttctcgattagcaagcgtaagtggctcaacttatagctttacttatgatgcgatgggtaatgtaacaaatgatggtgtgcgtactctaacttatgataattatagtcgcctcaataagaatggtaatgagacctatctttataatgctgatggactaagagtccgtgctgtaagggatgatggtttaacagattatatttatgatcttgatggtaatttattatatgacataaattataaatctggttatagccgagcttatgtctatgtagcaggtaagctggtagcgactttagaacgctatcctgatgccaataaaggttttgactttgttaatgattttgaagctgccgaattaggattaacagatctattaggtagctatacagacactgataatgatggattacctgattatttagaacgttttattggatctgatcctaacaatcctgatacagatggagatggacacaaagatggttatgagtatcgcttattaggtgcgaaaggggtattgagctcttcagttaagccagatgttgctgatcctaatgaaaatcttgcagcatggatgactccaatattagccttgattctggaagatgactaa

SEQ ID NO: 53004 - DNA, 1068 bp, Acinetobacter baumannii
ttgaaagtaatagatttcttttctggttgcggtggggcaagtgaaggactacgtcaagctggattagatatcactattggactcgattttgatataaaggcggctgaaacatatcaggctaattttcctgaggcattattctataatgttgatattagagaattagatgaaaaagaattagcaaaagcttttaaagagaaaaacagagaaaaagaaccacttttgtttgttgcatgtgccccatgtcagccattctctacacaaaataaatcaaaaagtgaagatgatattcgacgtacattattggatgaaacacacaggtttatcagcaaattaaaacctgaatatattcttgtagaaaatgttcctggtcttcaaaaaattgataaagaaaaagatggcccttacaagcggtttatcacttttttagaatctaaaaaatataagattacagaattcatcgcaaaatctgaagaatatggcgtccctcaaaaacgtaaacgttttgttctattagccagtaaatctggaaaaatagaaattccagcaaaaacacatggagaaggtttagaaccgattaaaacagttcgcgattttatcggagaatttccagctattaaagctggtgaaatacatcctgatgatttatggcatagatccccgaccttaaatgaacgtaatttagtgcgtattcaaaataccccagaaggtggggatcgacgtcattggccaaatcatttgattaatgaatgccataaggcacactctggacatatggatgtgtatggtcgtatgagttgggataaaccagctccaaccttaacaacacgttgttatagttattcaaatgggcgttttggccatccagatacgaatcagcatcgtgcaattagtgtgagggaagcttcaaggttacaaacattccctcaagactttatctttaagggaagtgtagttgaggcttctaggcaaatcggaaatgctgtgccttgtgaaatggctaaacaatttggtttatcaattcttaagcattatgaagaagtgaaaaataaaaatggcaaagattaa

SEQ ID NO: 53005 - DNA, 204 bp, Acinetobacter baumannii
atgcacggctttaactttaaagaagaagtaaaagaagtcattattgatctgactcattcacatatttgggatgtcacttcggttgcaatgcttgattcagcagtagaaaagttccaaaagaatggcatacaagttactgtacgtggtttaaatgaagccagttcaatcatgattgacaagtatggtacacatgcaaaaatttaa

SEQ ID NO: 53006 - DNA, 606 bp, Acinetobacter baumannii
atggaaaacctcactgcattttcattatttgcaattgttgcctcaattactccaggcccgaccaactttataattttaagtttaagtagtcattataaaatttctaaaacacttcccgttattttaggttcttgtattggagcagccttacttgtattagtggttggtattggccttggctccgctattcttgcttaccctgttattcaaaaaattatgacatggagtggtttaatctggcttaccgttctagcttggaaattatatacctacaatcctgttatctctttagaaaaaaatgaacaataccctcctattggttttaaagctgcttttttaatgcaagcgattaatcctaaaacatggatgatggcttttgcagttattagcgtctatacaaaacagggacaagatatcttgataaatgtctcaattttatcctgcatttttttacttatagcacttccttgtctctacctatgggccttagtaggcagactaagtactcgacttttttcaaaaccaaaacatataaatatttttaataaaataatggctattatattactagccttggtctggtggcccatgttctctatattttga

SEQ ID NO: 53007 - DNA, 216 bp, Acinetobacter baumannii
gtggactacttgggcttaattcgtgacccatctaaaaaagaaacgggtcataaaaacaaaaactttcagcgcagtatttgtgacatatcatacaaattagaagatgtatttacaacatactttaaacttaattttttgatgctctcaaaatatccaaaactcgctcagacatttcgtgcaagttggatcctattggaagccaaaaatgataattga

SEQ ID NO: 53008 - DNA, 393 bp, Acinetobacter baumannii
atgaccacattcaaagactcacaacgcattagatcaaaaccagtggcgcgttctagcgtgccattgaagcatagacaaggtgttagcaagggcgaagcaatgctttgccgtcagctagatgtgatgaagatcgcttatgagcaggagtttagattccatcccgagcgtcgttggaaggctgactttcgaattgaaggatacatgatcctagttgaagtggaaggcggtgcattcagcaatggacgtcacacaagaggcaagggctatttaggggatatggagaaatacaactccgcagcaatgatgggttttacagttttacggttcagcacagagcaagtgaaagcaggcgtggcgattaaacaaattgagcaattggtaggtgaaaaatga

SEQ ID NO: 53009 - DNA, 312 bp, Acinetobacter baumannii
atgccaataacttacctagaccaaagaaatcattatgtctggactaccttgtcaccaaagttcattgcgccatattgctgcaatgtttgctctgaaacgattctgaaagaaggcagttggctttgcgattatccagttaatggaaaaacttgtgatggtgtgctttgcaatgttcatgcatacaagattgcagagcaagtgccaatgaaggatgaagacggcaactttgttgatgatgtgcatgtttgcccagctcactatgaagaatggaaaagactaggacaaccaaagttttgggagcgtgacaaatga

SEQ ID NO: 53010 - DNA, 450 bp, Acinetobacter baumannii
atggataagtgtagagaagagtttgagaagcaaaagtactggattgggctatttagagcagatgtcgactttgatatgactcttgggaaatttggaagatatgtttcaaatggttcaagaagaattgatgcaatgtacttggagtcatttaacgaaaagtgggaagcatgggccaatgcatggcagcaccagcaagcgaaagtggaggagctgcaaaagcaattaagtgaatacatatttgtatcggaaacgcttgatgaaatgtatgtgaaagaagtccagaaaagtgacgagctgcaaaagcgggtggatgcggcactaaaactaatcgaatcatggaatgaaattgcttttgataaaaccactcattggacagaaggttatgaagaagggtgttaccactgtgcagcgcagttagagcaagcgctcaagggggaaggatgccaataa

SEQ ID NO: 53011 - DNA, 333 bp, Acinetobacter baumannii
atgcgtgattttaaagagtttgaacgtggtgactgggttgtctttgatacttcaaagccatattgccgtttactgccaccttgcttaatgaaatttattcagattgaagacggtgatgctgtagttgaatcacaaggccgatggagcttagtaagcctggctgcgttaaaacctgcgtcagaagatgacattgaagcaggccaccgcattgataaaccctcgaattcaagggaattagaaatcctagacaagccagaaaaccacatttcgcctaactgcaaagtaactgaggcgcacattaacgaggctgacaagctcaatagattggggtga

SEQ ID NO: 53012 - DNA, 219 bp, Acinetobacter baumannii
atgtcatgtatgctgactttagaagaaatcgaaattaaacggcaagaactggaaagacatcttgaagatgttatgtctgttgaactgaagaagtggcaaagcgaaaacaagctatgtgtttccgatgtgaatatacgtttggccaatgtgaatagtcttggtggaactaaacataatgtagttactggagtaagtgttgatttagattacaaaccttaa

SEQ ID NO: 53013 - DNA, 1098 bp, Acinetobacter baumannii
atggcaaatcttttatttagatttagttgggaccaccgaccttttgtttataactcatctcaaggtaagcggcaatttatgctgccttttgcttcgggcattccaaacctcactccagactggactcaagttacgggcttaggtacagcggcaacaagaggtgttggagtagaaagcggtaatgtagcagcttatggttcttatggtttatctaacttaggttatggtggatctccaacttcagaagccggaaatgatattgatgctggttataaagcagggagacaaaagactcgttttaagaatgcacccactagtatttatacaaatccctatatagctgcttatgcaccttctatcgtggttactcgtggagaatttacaggtacggagttatttttaccatattacacctcaacacgcgccaattgtatggctgtaattgcatggaattatgtgccatccactgacaccttaagtaaagcagagcaaatcgtttatacgagcaagaacaatatcgtttatacgaccaataacagcgcgaccagcggcaaattggttactgttgagacttctggcgaacttcgctccaaggggttcactgttgattcgaacggggtttacaaggcagcttcaccgattgcaagactatttgctgattcacttgaactcaatgaagatgcctcaaaacagccgattaactttgaaaagttaggtacaggtgactacctgattaaaggttctctgggatttgctaaagagggctggtacattgaaatgcctaaagatgcaaacggtaatgttcttgttgctgtgtcttatgagcagcatgaagatggggatattgcagtaaaaacctacaagaaaaaatttgatatcgaaacagcctcaattattcctgatttcgataatcctgtagatattccagaaactcgctggattgatattcgattgcatgaagaacccgaaccagagcctgaagaaccgttgagtgaaacaccattggagttccagcctactaacttatctcaggcagtagctgcagccttgaatggtgtggaaccgccagtgatctccgacacagatgcaacacattaa

SEQ ID NO: 53014 - DNA, 918 bp, Acinetobacter baumannii
atgagttcaggcgcaaaaattcgattatatgcttgtgaagaagcggtgctgggaacaactccggcaaacccgatctggtacacggttcgccgtgtcagtgatggtttatctgaaaacgtctcaactgaagaaagcagtgaagtagtagattcacgttttcgacaaggtggtgtggttactgaagcagaggtaacaggccagttagagtttgaactatctcttggaacatttgacttattcttaagtgctttagcctttaataactgggcagcaaatgctttaagctttggcggtaccgtacgtaaatctttaacactggtcaaagtatttgaagatatcggtcaggtatttatttaccgtggtgtacaggtgaataccggtgaaatcaccattcaaacaactgggaaaatcactggtaattttggactggtaggtagctcatttacacgtcagcaagtcaatcctgtcactaatcctatagctgcaacaacccgtccactggtcagcatgccaaacgtggaaaacttactggtaaatggacagacgattcaaggtaaagcgtgtttgcagtctcttacgctttcaattaataacaatcttgaagcaatccgttgtatcggctcaggcaagtacacaccagagttctacattgaaaagatgatggatatcgaagcaaatgcttccttcatgttctcggcaactgcggcagggtggattgatgccattaaaacccgagatgtgtttacgctgacctttgatattaaagacagcaaaggcagtaaatactcgtttaacttccctcaattagaagtgatggaagccaatcacccagatggcgggggtgacgacatcattactttagatatcaactttgcccaagtccgtacagcaccaacgattgtacgtgctctcgtgtaa

SEQ ID NO: 53015 - DNA, 1434 bp, Acinetobacter baumannii
atggatcttaagcttcgccttctctccctgagtattgcacaactatgctgtattgcacaactatgctgtattccagctgcttttgcagacacgaacaactcttcaactactcttgcaactatcaaaattaaagcccaacaggcatctgaccagacttataaagtggatagttccagtagtgctacgcgtagtgaaattgcattacaaaataccccgcaatctgtgagcgtagtaacccaaaaagtaattgaagatattggtgcaactcgcttagttgaagcacttgatttagctggtggcgtgactcgtgctaataactttggtggtcaaggtttaactggttttaacgtgcgcgggtttaccagtggtgagttttatcgaaatgggtttccaattaaccgtggctatccaaatgcgccagatagcaacaccattgaacgtgtagacgttttacgtggcccctcttctagcttatatggacgtggtgacccaggcggtacgtttaacttaatttctaaaacaccaaagtccgagcaacaaaccactttaggggcacagctcagtagtgaaggtttatatcgcactaccgtagacacgacaggtactgtacccgatgcagaaaatatcggttatcgcctaaatgtgattgcagaaggtggggatagttaccgtgaccatgtcgaatctaaacgttatggcattgctccagtcattcaatggcaagctactgacgccaccaaagttacttttgaagccgatattttaagaaatcaacatccgcttgaccgtggtcatacacgttatccaacacagaaatcttttaatagctcaccagaaacctatttatgggaaacgggtaaatactacaatcgactctacaatgataacaatatggctcaattacgagttgagcatgatcttgcgaatgactggaagctaaatgctggcgtgcaatatttaaatggcaaattgcatggctatgcagtagaggcaaatggtatccaaaatgacggagaaacattagggcgaaattacaattatcgcgaattaaaatggcaagataccgatgcccaaattaatctcacaggcaatttccagcttttaggtttagcccatactttagtgactgggcttgaatatgaaaattatgattataagtcatacattattcgctcaagcggagatatcggtagctaccctattaatatttataatccggttttagggcaacctttacctgagctcaatcgtgtaaccacacatgaccgtgaaaacttaaaaacaacggccctttttgtacaagaccaaatcgacttaaatgagcgtttaagcgcttacgatttgagcattacgagcacgattacaaaaacctattaccaaatactaccaactggaataccagtcatgatgcatttattccacgtttgggcttag

SEQ ID NO: 53016 - DNA, 699 bp, Acinetobacter baumannii
ttgggcttagtttataaagcaagtgatgacctttcactctatggcaatgctgcaaaatcttttaaaccaaatactggcgccagccgtaacggagaaggttttgatcctgaagaaggtacgacttacgagttaggttttaaatggcaagcacttgataatatgttatcaattgattccgctattttttacgccaataaagaaaatgtcttaacactagaccctgttgattcagcttataaagtcgctgctggcgaagttcgtagccgtggcattgagttaaatattgctggtcaaattacacctgcctggaaaattattggcgggtatgcttttacagatgcggaagtaactaaagacaatactttgcaaaaaggaacagctctagccaatattccaaagaatagttttaatcttttaaatatctatgaatttcaggttggtcctttacaaggcttaggtctaggcatcaatcaaaaatatattgataaacgtgcaggtcagacagctaatagtacctataccatgaaaggttatgcagttacagatttggtttcttattatcaggcgacaccaaaacttcgtcttaacttagatgtgaagaacatttttgataaagtttatgatgaaagtgctttcaatttatatgcttatccgggtgaatcacgtaccgttcaattaggtatgagctatacgttctaa

SEQ ID NO: 53017 - DNA, 294 bp, Acinetobacter baumannii
atgattaaattagagggaacaattattaatgtttttactcagcaaggtggtaaagacaagaaaacaggtgaagcctttgcagatcgagacaagattcagttattgggtgagtttgagcttcccaatggtgataaaaaaaatgaattaatagaccttactgttgaaaacggtaaggaatatgaaagcttaaaaaacaagcgtgtcagcattccatgcggtgcgcttgcttctggtcgaaatgttgttttttatgttgcaaaaggtgcaactccaaaacttttacaccaagtatga

SEQ ID NO: 53018 - DNA, 309 bp, Acinetobacter baumannii
atggaaccaactaatttacaaatcttcgttgctgaagttaaaggcactgccgaatctgaatatatgggcgtttacaagcaagtacctttgcgtcttcgtgcaggcgtttttgctgaagttgaagcacttcaggaaatgatggctcgtactcaaaaggtgtcccgaaataaagttattaatgatcttctcgaaattgctattgatcaggttaagggttcattggatgagaaatctttacaggatttcaatatgtttgcttcccaacactacaatgatttcactggttctggagatttgtcagatgattaa

SEQ ID NO: 53019 - DNA, 225 bp, Acinetobacter baumannii
atggctgtgccacatactacattgcttggctatctaggcaaacacatcacattcaaagttccatgtcctattgagtacaatgagtcaggttttgatcaactcagtgggaaagtcatatctgtatgtattgaattgaatgaaagacacgccttgtgtgtcttgcatgacgaaaagactgacagtgcagatttttacgaatttagtgaaatggtgtttttgtcctaa

SEQ ID NO: 53020 - DNA, 390 bp, Acinetobacter baumannii
atgttgagttttattcatgccaaccttaacccacagaaatatccggctgatattcaacgggcaattaatgaaacacatcaagggttctatcaagtaaataccatgtatcaggcactcggttgggaagagttttcttatccggcaacgttacaaactttattagacagtaattcagaacagattgtgatgaaacctaataaagtgactgctatttcaaaggaaccttcagttaagatgtaccataaaactggctcaaccaacggtttcggaacatatgtagtgtttattcctaaagaaaatattggcttagtcatgttaaccaataaacgtattccaaatgaagagcgcattaaggcagcttatgctgtgctggatgcaataaagaaataa

SEQ ID NO: 53021 - DNA, 294 bp, Acinetobacter baumannii; identical to SEQ ID NO: 53017

SEQ ID NO: 53022 - DNA, 309 bp, Acinetobacter baumannii; identical to SEQ ID NO: 53018

SEQ ID NO: 53023 - DNA, 225 bp, Acinetobacter baumannii; identical to SEQ ID NO: 53019

SEQ ID NO: 53024 - DNA, 297 bp, Acinetobacter baumannii
atgatgcaatttaaaaataaagtgaaaatcttaggcgctaaggctgttgattttaaaactgacgatggtcgtcattatgatcatgtagctttgtactgtgaggttccacttgatcaatcgcaaggtaatgcggttggtaatgcatgtgaggtttttaactggcaagaccgaacaaatctagtgttgcttaagcaacataaatttccgttagaagctgatatcacatttgaaatggttacttcaggaaaatctatgaagtatgtcgttaaacaagttgagttgccaaaggtaatttaa

SEQ ID NO: 53025 - DNA, 1158 bp, Acinetobacter baumannii
atgggtgagtataaaaaacaatcaaaccccacagctttatcggggggattgaaaaatgcgatggttgtaacccccattaataagatgggggtaaagacatctgatacgcaactgcaagacgccgatctcccgtatcaagagcattcgttatacacaattccatacgctcacatggtgatgacatcttcaggtgttaaaccagttcaatgccgtctgcctgctgataatgaaattgccgtgattgactgggtaaatttcacaatcggaattgagactttaggcgacaagtattggaatgaagatgaatacatcatcgatacacaccgttggacggctgctgtagaggaattggaccaccagttacatcacatctttggattctcaacgactgcatgccgtcatggcggtctgaatttctataaagaaagctatgtactaggtgaagatttcggttttgtctgcattggcggtcaacgtaataccatcttaattatgattaatggccgtggttgcaactttgctaaaagtggttgggaattaagactttacaacttcttagtgactattgctaaacgagctaaattaactcgtgttgatattgcacatgatgactttgaaggtaaaaagatcaatgttgattggggcaatatgcaagatggtttaggcggttttagctgtggcaaccgtatgccgaatatcgaacataaaggcaattggaaacgtccaaacggtaaaggacgtactttaatggtcggtgcacgtgaatcaggcaagatgcttcgtttgtacgagaaaggtcgtgctgaaggtgatccgaatgataactggcaacgtgctgaagttgaatttaagtcaattgaccgtgttttaccgttcgatatgttgctagctccaagtgagtatttcatagcctcatacccatgtttcgcatttttatctgaagatattcaacctgcaagaattgaaacaattcaaaaggttgcacgcattaactttgatactgccattaagaatcttaaacatcaatatggcaagtatatcaatgtttttaaacaggtttttgaacctgaagagttaatcaatattatttcttgctctgatcaattcgcttatccgaagcggttagatcatgtgcttataactgctcggagaatgtag

SEQ ID NO: 53026 - DNA, 282 bp, Acinetobacter baumannii
atgttgctaaatcacaaattagatgttataaaaccacaaaatatcatttgtgataaatcatatatgagcacagaacaagcattcgaaatcgtggccaagatcattttcgatagagcctgtactttagttgttgggggaaatcctgcttacgagtcggagcttgttctacgtcacattgaaatgtgcatggtggagtggggctataagtctgccaaagtagcggagtactacgacatgttgaaagctgagaatgataatttccgttcaatggggatttgctaa

SEQ ID NO: 53027 - DNA, 195 bp, Acinetobacter baumannii
atggcagttaccgtaagacttagagacgaagaagaagaaatggttaaagagacaacattagaaatgatgttcgagaccaaaatccggataaaagaatcggacgtacttcacactttaattagaaagtacttaaaagagatcaaaacagaagacgtgatgaaatacagatcagatgtgctgaagaaggacgattaa

SEQ ID NO: 53028 - DNA, 309 bp, Acinetobacter baumannii; identical to SEQ ID NO: 53018

SEQ ID NO: 53029 - DNA, 294 bp, Acinetobacter baumannii; identical to SEQ ID NO: 53017

SEQ ID NO: 53030 - DNA, 1467 bp, Acinetobacter baumannii
ttgtcgtgtacagagattcgcggggatgttcttgcgggtattgttgttgctttggctctaattcctgaagcaattgctttctccattattgcaggcgttgatcctaaagtggggctatatgcttcattctgtattgctgttgtgattgcttttgtgggcggtcgtcctggtatgatttctgctgcaactggtgctatggctttattaatggtcacactggttaaagagcatggtctgcaatatttattagcagccacaattttgacaggatttattcaaatcctagcaggctatctaaaattaggagccttgatgcgttttgtatcaaagtcagtcgttattggctttgtaaatgccttggctattctaatttttatggctcaattgcctgaacttaccaacgtcacttggcatgtttatgcgatgacaatcggtggtttagcggttatttatctatttccctatatcccagtgatagggaaacttttaccctctcccctcatctgtattgtcctacttacgctctttgccttattcattggtttagatgtaagaactgtcggtgatatggggcaattgccggatacgcttccaattttcttgcttcctgatattcctttaaatcttgaaactttagctattattttaccctattcactaggtttggcagccgtgggtttacttgagtccatgatgaccgcaacaattgtcgacgatttaacagataccaccagtgataaaaaccgagaatgtaaagggcaaggtgttgccaatgtcgcttcaggcttcttaggcggaatggcaggctgtgccatgattggtcaatccattattaatgtgaaatctggtggacgtacccgtttatcatcatttagtgcaggggtctttctgttaattatggtggtgtttatcagtgactggcttaaagccattccaatggctgcactggttgctgtcatgattatggtatcaattggaacatttaactgggattctctacgcaatatccgccaatatcctctctctagcaatatcgtgatgatcgttacagtcgtcgtagttgttgccacacataacctggcttatggtgtattagtcggtgttcttctttctgcattattttttgccaataaaattgaacgctatatggcgattcaatctgtatttgatgaatcagaaagcacacgtacttatacggtaacaggtcaagtgttcttcagttcagcagataaatttacttctgcatttgatttcaaagaggcactttcaaaagtggtgattgatgtcagtcaggcacacttctgggatgtttctgcggttgctgccgtagataaagtggtcattaagtttagacgtgaaggaacagaagtcgaacttattggaatgaatgaagctagtaaaacattagtcgataagtttggtatccatgataagccagatgctttagatcgcttaaatagccactaa

SEQ ID NO: 53031 - DNA, 294 bp, Acinetobacter baumannii; identical to SEQ ID NO: 53017

SEQ ID NO: 53032 - DNA, 309 bp, Acinetobacter baumannii; identical to SEQ ID NO: 53018

SEQ ID NO: 53033 - DNA, 534 bp, Acinetobacter baumannii
ttggtttatttaaaagatcaaagcttaattgatttacaattagtatttgaaagagatgaaaatttttatactttcaatgaaataatcaaagaggtagattttttttacgaaaaaattagcgtattttttgatcagctcaatgaaaagattattcgtattggtaatgttgttgagcttagtatacctgttgataatgaaaaaataggttgtgatttgttaagaagtaatgtttcttatttaaataacatgcaggaggatttagaagaaattagttatagaactaataaatcatattttattgacaatattaaaattaatcaggttgttcagtattctaatggtcagaaaatgtcattggtgattgatcctaatataggaattcccaaggctaaagtgcaaaaaaatattctaatgaatatagatgttaatacagatgcttctcatagatctgaattagatttcttaaaattcattccattattacaagattcagtaaaaaaattaataagaaatggaggtacttatgttagttga

SEQ ID NO: 53034 - DNA, 369 bp, Acinetobacter baumannii
atgggtgtaccaacagaggaatacgatcaaaaagttattttaggtgctaggagtatttactgcgcaaaggttgcagatatacttgataaacctctagaggctataaagcttttcaataaaggttcagaaaatttaaatgaatattctatgcaacttgatgtaaggaatcctatttcgacaaaatataattctattttgaaattttctaaaccgccttacgtagtagggcatgaaattattaaaggtatgataattgaaaacatcatttctttaattgatgagcagctttatacattaggcagtcaaaaagaaataaaaaaatcggaattaaaaattttttattctgatgaatgtacccagtatctttag

SEQ ID NO: 53035 - DNA, 1029 bp, Acinetobacter baumannii
atggcatcgactccacgcattactaattatgatgaagttttaggtttacctggttttttagaacaaaatttaattacacccgaaaattttgattcggtgttctctgattatcaaattcgagacagggacatgcattgttgtttagttagtgatagagggctttgtaatcacaaacacaatttcggttatgttattaaattaaaagatggctcactaagtataatgggcaatgattgtgctgaaagaaagtttggagcaaatggaggaatcattcaaggaatcagcctctatgagaatactaaagaagctgagaaaaaattaggtaaagtttttgattttgctattcgtattgatgaatatattgaaagattacgtaagatcgaagttaatttaaaaatcatagaagattattactttaacctaaaacttaatattggctcaagaaattatttaaaactaaatgagcgttacaaagctgctaatacaaaagttgaagtaaagacctataaattaggaaaacccgaccctgataatccgaatgaagaaactctaatttatatggcaactcatacgattggtcatatatcatcgttaaacatttttgatgatagaaatttcaaagagtttgaaaagaaagttttcaaacttcgagaggcattgagagatgctttaaaatctcacaatcaaattattgagggtgaaaagatacaacctgctgcattacgaaaaagggtaaatacaatactaagtcaattgaactcttttgatgaagtagaaacaaccatcaacacccgagtatctgatattgaaaaatttagaagaacagacccagaaattctttgttatttaactgatgattacgaagaatcaaaaatctttgcctcattaagtatggcttttcacggaattgaaaacatgaaagaagaaacatatttaaggagcctagaaattaagtattctacggctttcagatgtcatagaattaaagcagccgatcatagcgttatgcgacgctctattttttattag

SEQ ID NO: 53036 - DNA, 294 bp, Acinetobacter baumannii; identical to SEQ ID NO: 53017

SEQ ID NO: 53037 - DNA, 309 bp, Acinetobacter baumannii; identical to SEQ ID NO: 53018

SEQ ID NO: 53038 - DNA, 519 bp, Acinetobacter baumannii
atgtttgataaattaatgacagatcaagaaattaaagcgaaattatttgaaagaactagcgaaataaagaaatttggcaaactacctcagctcgatgataattatttatcttttttaggtaaatatagagaaatagaaattacacctgatattataattttggggtacgaaacagcattaaaagaaaatcaatatcttcatgaaaattatcctgaaattagtgagaaagtttggataattggtcgtaccggtcaaggtgatgaatggtttataggtaaggaaaaaaataatatcttgttttatgaccataaccaaggggagtatttgaatattaatcagtttatagatatgagaattacttttgaagactttcttaaaatggcattttcttatcaacaacttgaagaaaaattggatataaacgaagagcttaataaagttgaacaagatcaatttaagaaattagtcaattctattaatgaaggtttatatgaaagatatccctttgaatatttttag

SEQ ID NO: 53039 - DNA, 309 bp, Acinetobacter baumannii
atggaaccaactaatttacaaatcttcgttgctgaagttaaaggcactgccgaatctgaatatatgggcgtttacaagcaagtacctttgcgtcttcgtgcaggcgtttttgctgaagttgaagcacttcaggaaatgatggctcgtactcaaaaggcgtcccgaaataaagttattaatgatcttctcgaaattgctattgatcaggttaagggttcattggatgagaaatctttacaggatttcaatatgtttgcttcccaacactacaatgatttcactggttctggagatttgtcagatgattaa

SEQ ID NO: 53040 - DNA, 294 bp, Acinetobacter baumannii; identical to SEQ ID NO: 53017

SEQ ID NO: 53041 - DNA, 657 bp, Acinetobacter baumannii
atgaaaagattaaacgtactggttgcttgtgaatattctggacgtgttcgtgatgctttttcagctttaggtcacaacgctatgtctagtgacttactcccaacagaagcaccaggtaatcactatcaaggtgatgttcgtgatgtgttgtatggaggctgggatctcattgttgctcatcctccttgcacctttctatctgtagctggcaatcgttggtttaacgttgataggtatggggagaaagcaattacccggatgaaaaatcgcgagcaagcaattgcatttttcaatttgtttactgatctggagtgcgaaaaggtagcaattgagaatccaattggatgcatgagcaaaatctatcaaaagccttcacaagtaattcatccctacatgtttggtgatcctgagcgtaaagctacatgcttatggttaaagggattaccagctttacaagcaaccaatgtggttgagccaaatattgtgaagtacaaaaacggcaaagggacggatagtccttggcatttagacacgttaaagctgccagcagaagaacgcagaaaagcgagaagcttaacttttcaaggcattgcagatgctatggcaatgcaatggggtggagacgtgcgtcatttaggtttgagggaagcggtatga

SEQ ID NO: 53042 - DNA, 177 bp, Acinetobacter baumannii; identical to SEQ ID NO: 49448

SEQ ID NO: 53043 - DNA, 252 bp, Acinetobacter baumannii
gtgaatccaaaacaaagagtaatcgcgttccaaaacatttttgacattttgttgttcgcaacgcatgcgactgagcctttcacaatgaaggatttacgtgactatgtgttagatgcacctaacaacactattcaatgctatgtccaagagctaatcaaaagtgggtacctagaaaaagattcatatgcaacctacaaggctacgcaatacgcaaaagacatcctgaatgttaaaggggagctgaaagcatga

SEQ ID NO: 53044 - DNA, 384 bp, Acinetobacter baumannii
gtggactacttgggcttaattcgtgacccatctaaaaaagaccgtgttcaggaagttgcatcaattagccgtgatttaaaagccatggctaaagagtttgattgtccagtaattgcattggctcaacttaaccgtggagcagaaggacacaagccagtagcaagtgatcttaaggattctggacagattgaacaggatgcagaccaaatcatcatggttcatccaatcctcgaaaaagagactaatgcgccaactggtgtaaccgagttaattattgccaaaaaccgtcatggcaagcgtggatctgtgaatgttcaagaccgtttagatatttgccgtttcgttgggatgtcattcccagtggaagagagaggtgcggcgtga

SEQ ID NO: 53045 - DNA, 294 bp, Acinetobacter baumannii
atgactaaattagagggaacaattattaatgtttttactcagcaaggtggtaaagacaagaaaacaggtgaagcctttgcagatcgagacaagattcagttattgggtgagtttgagcttcccaatggtgataaaaaaaatgaattaatagaccttactgttgaaaacggtaaggaatatgaaagcttaaaaaacaagcgtgtcagcattccatgcggtgcgcttgcttctggtcgaaatgttgttttttatgttgcaaaaggtgcaactccaaaacttttacaccaagtatga

SEQ ID NO: 53046 - DNA, 882 bp, Acinetobacter baumannii
atgaatgctaaagtgaatatcacaaatcgtgcaggggcaagctttcctgtacgtcgtatgaactttgattttaatgatgtgccagaatactggatgaatggttccgctggacttacacattttatgacagcgttatccgcgctatttccggctggtgaaaagttctttattgatagtgtgcgtgctgtgcgttatcacccagcaattaaagacaatgaagagctacaaaaagaaattagtgctttcattggtcaagaggcgatgcatactcaagagcatgtaaactttaatgcttctgcccaaaaatttggtcatgatgttgaaactttagaaaagttcaccgatacggctattcaaactgcccgtaaaacttttgcaaagctcgtaaaaccatttggtatgacgcaagaaatggtggacctgactgctactacagcccttgaacattttactgcaaccattgcatctcagcttttagttaatacccatattcaagagttgatgacagataaaacgatgtcaaccatgtggtattggcacgcaatagaagaaaatgaacataaagcagttgcatttgatgtgtatgaaggtgtctttggtaaaggtgtaaaagcttatgctttacgcacaagttcacttgtttttgcaatggctcttatttttgcaattcaatcttcgtttgtggttcgtcttttaaagcaagaccataaattaaacttagatgagttgtttgtgatttataaatatggttatagcccgtcgaaaggcattattacgggtatggctaaagagatgttggcttattttaaaccaggtttccacccgaatgatttagatacggttagtttgttaaaaacttggaaatctaaacttggactgtaa

SEQ ID NO: 53047 - DNA, 294 bp, Acinetobacter baumannii; identical to SEQ ID NO: 53017

SEQ ID NO: 53048 - DNA, 309 bp, Acinetobacter baumannii; identical to SEQ ID NO: 53018

SEQ ID NO: 53049 - DNA, 162 bp, Acinetobacter baumannii; identical to SEQ ID NO: 46834

SEQ ID NO: 53050 - DNA, 357 bp, Acinetobacter baumannii; identical to SEQ ID NO: 46762

SEQ ID NO: 53051 - DNA, 978 bp, Acinetobacter baumannii
atgaaatattctattatgacgtatgctgagggtgatcgctggtttaatattggtgattatgttcaaagtttggctgcaaaacagtttctgccacaagtagatagttatgtaaaccgtgaatgtttaggacagtatacaggagaaccatctaaaattattttgaatggttggttcactcatcatcctgagacatgggttcctgctgataatttaattccattatttgtttctttacatattaatagctctgcagccagccgtatgcttagtgacaaaggagtagcatatttaaaaaagcatgaaccaattggatgccgtgatcattacacagtgcggttgttggaaagtaaaggtattaaggcttattttactgggtgcctaactctaactttagattcttatgcaaagaaggaatcgaataatgatggtaaaatatatatagtagacccattgtatggttttccaaataaagatcgtatttttactaatactaaaagtctaattaaaggtattataaaaggtgatattttagctatgaattcaataaatgaatttatgcaaaatatattttctaaaaatctattagataatgctgagtatatcaaacaagaactaccttctaaaagttatacagaggatgagaagtttaaattagctgaaggtttgttagaaaaatattctacagctaagttagtcattacttctcgtatacattgtgctttgccttgtttggcattaggtacccctgttatatatttaaagggttttgaaaaagagtttgatgcctgccgtatggaaggattgtcagagctatttcatacgattaatgtaaatagaaaaacaaaagaaatatcagcgaactttccagtttcaggattgattgatgaaaatattaatttaattaataagcctgattatttaactttagcaaatgatctaaaggaaacggttagctcttttattaataatgattcataa

SEQ ID NO: 53052 - DNA, 756 bp, Acinetobacter baumannii
atgcaaaaagacattaaaaaacccctgttatctagcactttggttggtggcgataacaagggttcgaattctgttgaagcagatcaacatagagataggataacacgttttggcattttgaaacatagatcgaagcagcaagaaaattatctatggacattggctaagtacaaggaaaactatcagaacgaccaaccaaacgaagagtctgtaagggctactaaatccgctcaaaagttattgggttgcggaaattttctgctattcaaaaatttttacacaattgatcaagttaagctctctaaatttcacgtctgtaatcaacatttgttatgccctttttgtgcaggtatacgtgcgtctaaggcaattcagaaatatacggaacgtgttgatgaagtcttatctaaaaaacgtactctgaaacctgttctaatcacgtttacggtcaagaatggaactgacctaggggaaaggtcatcccacctaatgaaatcgtttagaacgcttatggagcgtcgtagggactatttaaaaaagggtcgtggctttaatgagttttgtaagatcaatggagcaatgtattcgtatgaaaatacctacaatgagcaaaccaaggaatggcatccgcatctgcatatgttcgctcttttggatgattggatagaccaggaagaactatcgcagtattggcattccattactggtgattcttatgttgtagatattcgccgaattaaaaagaaaaaggcttag

SEQ ID NO: 53053 - DNA, 747 bp, Acinetobacter baumannii
gtgattgaaacagctcgtcatcaccgtgcatttattcaagacccagttttaaaacagcgtgttacttcattgattggacaagaggcgattcactctaaactgcacaatgaatataacgatgcacttaaagatgttgaataccctgtcgatttttatcgtttcttgggcgaaaacttctttaaatatgtgtttttgaaattcccgcaaccgcttaaattatcgatgatggctggtattgagcattttacagcggtacttgccgaatacatgatgaaacacgaaaagaatttctactattcagatgatgcaaaaagccgtgctttatggatgtggcatatgcttgaagaatctgagcataaagatattgcctatgatgtatatcaattactcaatggtagctacccactacgagcttctggcttcttcttagcattcttcactattttaggtctaattcctgcgactaccttgtttattccggttttaagaaaaccgcaggaaatgttgactagaaaattctggaaagacgcgcgccgtggtgtaggacttatttttggtccaaaagatggtgtatttggtagcaccattggtcagatttttgattatttacgtcctgacttccacccaaatgaccatgacacgaccgaatatctggagtactacaaaaagaaattacttaacgagggcggtgcaattgcgccttactttgtgaaggaatttacaccaccagttcgcgcagtttcataa

SEQ ID NO: 53054 - DNA, 1011 bp, Acinetobacter baumannii
atggttctcattgaggctttatgggggaaatggagagctttaacgattgatttagacaaaggagtagatgccgaaagattcgatgctctgttatctcatagtatggagtcaaaacagaagatacagcaatcgatgttgagtagcgtcgtttctcagatacagccaaattatgattcaaagcaaaataccccttgggttttatccttgggcacacgaaaccgctcaaatacatcaggtcggcaagtatgtgttgaatgcctgaagagtcatgaaaatccgccttatttgcgcttaatgtggcgtattgggtggcattgtagttgtgttgagcatcagttaagtttaattgaccattgccctgaatgtggtgtgacgatccaaccatttaaagccgatatggagcatggttgtttagcgatctgtacgacatgtggttttgatttaaggcgttgtgaggaaagcaaaaacatcaatttaaatgctttaaacttccaaaataaagcagagcaagtcttaaaacaaaaaattggtttttataatcaatccccagtgactactcaagtatggtttgaaattgctcgttcatggctcagtgagattagatttttggtcaatacgcccaataaaaatgtgattcaattatttgaaagttttgacgtaaatttacatctttcacatccagttaccccattagcatttgaatatctgagtactcaggaacgaatagttttgctttcaatgttggatcagattatggatattccatgtgatttattggtacagcgatcaaatgaatatggagtaagtcgtgcaaacttttgggacaagcgcaagaagttgcctgttcagcttcaacagatgaaagatttaatgattaagcctacaagacgttatcctgtctctcgtgtagcaataactgttactaagccaaaatctaaagcgactgtacaacgtcaatggttaaatttattaagaagaagcaataatagtggagcgaggcatattgactga

SEQ ID NO: 53055 - DNA, 759 bp, Acinetobacter baumannii
atgttagcattagttacaggcgcatcagcaggttttggttatagtatttcaaaaaaactgattgagtcaggctataaagttattggatgtggaagacgcgcagaaaaattagaagaactacaaaaacagcttggcgaaaatttctacccactcgtatttgatatgactgatacagcagaaaatataaataagttatttaaagaattaccaaatgaatttcaaatcgatcaaattgacttactagtgaataatgcaggcttggcattgggtctagagccagcagataaagcggatttagatgattggtacaccatgattgataccaatgttaaaggccttgttacggttacccgattaattttaccaagtatggtaaagaagaaatcaggcttaatcattaatatgggttcaattgcaggtacatacccatatccaggtggtaatgtgtatggggcaacaaaagcttttgtagagcagtttagtttaaatctacgtgcagatttggctggtactggcgtgcgagtaacgaatattgagccagggttgtgtggtggtaccgaattttctcttgtacgttttaagggggatcaggagaaagctaatagtctatacgataagaaaaatccaattttgccggaagatattgcaaatacagtagcatggatcgcatcacaaccaccgcatattaatattaaccgtatagaaatgatgccaacgactcagacttttaaccctttaaaagttgtagaagtggaataa

SEQ ID NO: 53056 - DNA, 291 bp, Acinetobacter baumannii
atgatcaaattagaaggtgttgtaatcaacacatttaaaatcgaagcagggaaaaacaaaaaaggagaagagtacgaggctgctgacaaggttcagctcctcggctctttggaacttccaaacggtcaaataaaaaatgaactcatcgaccttaaggtcgaggattctagtatttacgaatctttcaaaaacaaacttattagcattagttgtggtgcatttcccgcagggaaaaatgttgttttttatgtcagaaaaggtgcaaaacctgtattagctgacgcattatga

SEQ ID NO: 53057 - DNA, 171 bp, Acinetobacter baumannii
atgattaatccaaaatttatttccaagggaacaatggattctcttgaagaagcatctgcttatttcaaacaagttcttcaggaacatttagataataaacgtgacatcacgttgtttgcgattgctgttgttggcggtcgtcttaaagtagtagaggggttaccaaaatga

SEQ ID NO: 53058 - DNA, 309 bp, Acinetobacter baumannii
atgacaaattttgatgacgaaccaaccaaagtagaaatgcttatttctgagataaacaatactggaaagtctgtttataacggtgttcttaaacctctgtctattcgtttacctattcaaacctatgcaaaagttgttgctattgagaattttattggtgctgaaaaaaccagtaaaaataaaattattaatgatttattagaaattgcttttgatcagatttatccgtccttaagtgaatctcaaaaacaagcatttgattctttttcacaatctcttttagatggttcggagtcaggcaaactatga

SEQ ID NO: 53059 - DNA, 537 bp, Acinetobacter baumannii
atgaaaaacattcagaaatcacttcttgcagcattaatagttgctggttatgcggtaaatactcaagcagctgttactggacaggttgacgttaaattgaatatctcaacaggctgtactgtaggtggtagtcaaactgaaggaaatatgaacaagtttggtactttagattttggtaaaacttccggtacttggaataacgtattaactgctgaagttgcttcagcagcaacaggtggcaatatttctgtgacttgtgacggaacagatcctgttgattttacagtcgcaattgatggtggtgaacgtacagaccgtactttaaaaaatactgcttctgctgatgtagttgcatataacgtttatcgcgatgctgcacgtacaaacctttatgttgtaaaccaaccacaacagttcactacagtaagtggccaagctactgctgtaccaattttcggtgcaattgctccaaatacaggtacaccaaaagcacaaggcgattataaagatactctattagtcactgtaaatttctaa

SEQ ID NO: 53060 - DNA, 174 bp, Acinetobacter baumannii
atgatattcaatcgtggttcggcatttataatttcttattttttaatttctttagtaaatgcgggtgaaattggagctaaattaactagtcaaattgaattattgccttcttgttctgttaataataatgttggcagagtaaaacttgaagtgcgacataaaccacctaattaa

SEQ ID NO: 53061 - DNA, 204 bp, Acinetobacter baumannii
atgtcaaaaaaagatgacattattaccactgctttaagactttttaattcatatagttataattctataggggtagatcgtatcatcagtgaatctggtgtagcgaaaatgacattttataaatactttccttcaaaagagaaacttattgaagagtgtttattactgcggcaatctctaaagaagacgaaaccaacccactag

SEQ ID NO: 53062 - DNA, 381 bp, Acinetobacter baumannii
gtgtttattactgcggcaatctctaaagaagacgaaaccaacccactagctcgtattaaagccatctttttatggtattcagattggtttaatagtgaagactttaatggttgcatgttccaaaaagccttagaagaagtattaaaacaatacccgtcaacacatcaaccagcaactttatacaaaatctggttaacacaattaatgcaagatcttcttattcaatatgaaattgaagagtctcgacctttggcattgcttttagtcaatattttagagggtatgaccattcaagctcaagttgagcatggttcagtaaaaattgatgactattggaagcgtgtagagaaactcattgaatttgaaaaaattgcacattaa

SEQ ID NO: 53063 - DNA, 255 bp, Acinetobacter baumannii
gtgagtagtagaaaaattagatcagaactcaagaagaaagggattcccgcagaagttcattgggaatacatgtctgattgttatggtggtggtggtgcttactttattgacatagacgccgatactgaaaacaaactcttagatgcggaccctgattgtgagccacaactcgatgttgggtatgcagagagccttgaagaagctttggagtttattgatcaattgccaagtttaaaaggagccagccatgcgtga

SEQ ID NO: 53064 - DNA, 180 bp, Acinetobacter baumannii
atgagtaataaaaaagacactccagatggcgctacacacttctttacttcgttgggtggtcaaacaagattcttcaaaatagaaagcggcaatctaatgtgttggtacgaagaactaggcgcttggaaacatccggcagcttctaattggcttatgaaaaatataaaggtgattccgtga

SEQ ID NO: 53065 - DNA, 528 bp, Acinetobacter baumannii
atgaatactatctcagctactcttttatatgaacacccgattgagggatgcaccaaagattcaaatggcaatttaaaacctttccctattctcgcaattgataatattccattaaatatatgggttcaccaaaatacccatattactgatctcgcagaaactttagttccagctcaaggttggttatatgattatgatagtgagttggcattaagtaatgcatggaaacttcttaaaccacaaacttatgaaaatgtatctatttcaacagtagttccaattttaatttgccctgatgatttagatctagtgtgcaatgtggttatggtggaacaagttgtttcagcagatcaagtcgtatgggctcgttttggttacgcatttaatcatattcatgatgttgtgacatccgtagtctgggaaaccccaccttctgctccgcagttaagttttccattaagcgaatttgaaaaagcatataatgatttaaaagaattagacaaaaaatggactgaaaattttatctag

SEQ ID NO: 53066 - DNA, 276 bp, Acinetobacter baumannii
atgcttcataatcattcttctatttcacgagatatagttaataagaaagtttctcggcaactatggtttgtggataatttaaatcatctaaatgacgtgaatacagaatttaactcacccgattattttgtagttaatactacacgttttcttcaatttgctttactaaatgctatcaatgaatttatgagtgatctgaagagtggtaacgttccagatatgaatgatcttgctgaaaagctagggaagctattggctgaagtgaaacctgattga

SEQ ID NO: 53067 - DNA, 132 bp, Acinetobacter baumannii
atggccatggctgctgatgtcaccattgctcaggtttctgaagtggttgaactcggtggattagaccctgagcacattattaccccaggtatctttgtacagcatgttgtacaagtacagcccgcacagtaa

SEQ ID NO: 53068 - DNA, 258 bp, Acinetobacter baumannii
atggatattccatgtgatttattggtacagcgatcaaatgaatatggagtaagtcgtgcaaacttttgggacaagcgcaagaagttgcctgttcagcttcaacagatgaaagatttaatgattaagcctacaagacgttatcctgtctctcgtgtagcaataactgttactaagccaaaatctaaagcgactgtacaacgtcaatggttaaatttattaagaagaagcaataatagtggagcgatgcatattgactga

SEQ ID NO: 53069 - DNA, 375 bp, Acinetobacter baumannii
atgatgcgtggtggtcaccttgatattgctgtactcggtgcatttcaggtggcagccaatggtgacttagcgaactggcacacgggtgcacctgatgcgattcctgccgtaggtggtgcgatggatttagcggttggtgccaagaaagtatttatcactacagaccatgtgaccaaacaaggcgagccaaagattgtcgctgagctcacttatccggtaacgggtaaacactgtgttgaccgtatttacactgacctgtgtgtgattgatgtgaccaaagacggtttaaaggtgattgagaaagtggaaggtcttagctttgatgagttacaggctttaacaggtgcaactttgattgatgcgactcaagggtaa

SEQ ID NO: 53070 - DNA, 207 bp, Acinetobacter baumannii
atggctgcatcgaatactaatgctttagattatttaggcaagtatgtttcatttaatcacgacgatatttttgaaatatacggagttatttccaatgtaattttcaatatggatggctctgttgaaatgtcaattggttgggatgatttttatgagctgtctaaaatgaaaaacttaaaaattttgggtgaaattaggctctattga

SEQ ID NO: 53071 - DNA, 465 bp, Acinetobacter baumannii
ttggctaatgaaattatccctataaatttacttaaatatgcaaatgatgatggggacggaccagcgaatactcttcaaacaaaacctaataagcctcaattttgggtcaatgataaaggcgttgagctaccaatttatcttccaagtaaaagttcaaaagatggtatttttaaagtagtaaaagcggatcgagaaggtccatgtcctaataatgataaagataatacttgttatggcggtaatatctatattcaagctagtaatgtatttaataccttcaacgataccttaacttattatgtatatgatgctgatggtaaaatctcaaatgagggtactattaagttgataagtacagcaaccacaactgatgattcacgtggcggtggaggtggcggaagtattggaatcctttctatcgcatcactactaagtttaattgcttatagacgttatcgtaagtga

SEQ ID NO: 53072 - DNA, 225 bp, Acinetobacter baumannii
atggctgtgacagatactacattgcttggctatctaggcaaacacatcacattcaaagttccatgtcctattgagtacaatgagtcaggttttgatcaactcagtgggaaagtcatatctgtatgtattgaattgaatgaaagacacgccttgtgtgtcttgcatgacgaaaagactgacagtgcagatttttacgaatttagtgaaatggtgtttttgtcctaa

SEQ ID NO: 53073 - DNA, 273 bp, Acinetobacter baumannii
atgactcgtcatgttgagccgaaaaacaaggatactgacaacgacgacgaggaggaggtagcgacgaccgacggaggaggcggaagtagacgtggtttggctcaagcggttggacgaggacgggaggattgcacggagggctcgcacggtgaaccgcaccgcccacagtacaaacgcaaaaaacaacgctggcaagtatcaccgtacgtcaaagtacgtgtgaaaaatcgtataagaagatgggatggttatttgtgtgttatacacatgtaa

SEQ ID NO: 53074 - DNA, 246 bp, Acinetobacter baumannii
gtgcctaccaatatcattaaaaatggtcgtattccgggccgttattcaaaacttgcagaccatgcgctcatgaactacgcactcaccacaagtgatgatgtagccaaactcacacttaaccgccttgatcaggatgagctttataccatccctcaaatcgatgcaaagttgttctggctgatgaaacgtgcatcaccaagtttgtataccaagttccttggtacctcttacaaattatttaaataa

SEQ ID NO: 53075 - DNA, 273 bp, Acinetobacter baumannii; identical to SEQ ID NO: 53073

SEQ ID NO: 53076 - DNA, 258 bp, Acinetobacter baumannii
atggatattccatgtgatttattggtacagcgatcaaatgaatatggagtaagtcgtgcaaacttttgggacaagcgcaagaagttgcctgttcagcttcaacagatgaaagatttaatgattaagcctacaagacgttatcctgtctctcgtgtagcaataactgttactaagccaaaatctaaagcgactgtacaacgtcaatggttaaatttattaagaagaagcaataatagtggagcgaggcatattgactga

SEQ ID NO: 53077 - DNA, 207 bp, Acinetobacter baumannii; identical to SEQ ID NO: 53070

SEQ ID NO: 53078 - DNA, 189 bp, Acinetobacter baumannii
atggctgtgccacatactacattgcttggctatctaggcaaacacatcacattcaaagttccatgtcctattgagtacaatgagtcaggttttgatcaactcagtgggaaagtcatatctgtatgtattgaattgaatgaaagacacgccttgtgtgtctttcattcaattcaatacatacagatatga

SEQ ID NO: 53079 - DNA, 162 bp, Acinetobacter baumannii
atgtctgcagagactgtgcctgtacctggcaatgatgtattgcctgcagggtcagttgctgttgcagttactgtatcaccatctaccaggttacctgggtttggtactgaccagctaccatctgtgcctgctaccactgttgcagtggtgccatcaggataa

SEQ ID NO: 53080 - DNA, 132 bp, Acinetobacter baumannii
atggccatggctgctgatgtcaccattgctcaggtttctgaagtggttgaactcggtggattagaccctgagcacattatcaccccaggtatttttgtacagcatgttgtacaagtacagcccgcacagtaa

SEQ ID NO: 53081 - DNA, 132 bp, Acinetobacter baumannii
atggccatggctgctgatgtcaccattgctcaggtttctgaagtggttgaactgggtggattagacccggaacacattattaccccaggtatctttgtacagcatgttgtacaagtacagcccgcacagtaa

SEQ ID NO: 53082 - DNA, 549 bp, Acinetobacter baumannii
atgaatactaaaatcacctatactgctttcactggaagcacgcttattgcgagtgactcccttgttgaacttgcaaagaaactaaaagctcttcctaaaacaacagaaaatattctgatttttaatgatcaaacaggtcaacaaattgatcttgatctttctggttcggagcaagagcttcaacaacgttatgctgaaccggaagaaattaaaaaagttggacgacctaaacttggagtaatttcgcgtgaaatcactttacagaaaaaacattgggattggttagatcaacaaagtgcgagtgcatcagcagtgattcgcaagttaattgataaagagttaaataacccaaattctgaaggcaatattatgctagccaaacaagccatcgaccgctttatgtctgctatgttaggcaatatgccaaattacgaggaagcaacacgcgccttatatcaaggtgatcgagatatatttttaaaaatgattcagagctaccctaaagatttaagagaatatttaactttaaaagctcaaaatgttttctaa

SEQ ID NO: 53083 - DNA, 1020 bp, Acinetobacter baumannii
atgaagttaccgacaccgcgtaaaagaggtgagacatacacaataacagtttctcatcaaggaaagcgctattattgcacccgtgatactgcaaaagaatgtgaacaatgggctgctctcaaactgctagagttaaaggcccagaaaaaaattgaaagtggtgaagaaaaaccaaaatttctattccgtgatttgaataataaatattatcaggaagtaggaatgctaaatccatccaaatcatcaagagcatggattaaagggcagcataaaaattttgaagtgaaatttggggcattagctcaaaaatcaatttatgacattacaccaaaagatttaacaaattggcgaaataaacggttatctgaagtaagtgaaaatacagtattaaaagaaatatcacactacagtgcgatgtttacattcgcgcaaaaagaactgtttttgattgatgaaaacccttggatgcaaatgacaaaacccaaaaagccaaaagctcgggaccgtcggatacatccttcagaaatagatttaatgctaaaggctttagattatgaaaggggcagtgttcctgtattgccacagcactatgttgcatggggctttttgtttgcaatagagactgccttgcgtcgtggtgaattgttggcaatggaaaagaaagatatttatgacggctatgttcacctaccaaaaactaagaatggagattcaagaaacgtaccgctatctgaagaggcaaaagagttattaaaattaattcagcatactgggcgcaatattatccctcagtctgaaaatgcatttcgattaatgtgggaaaaaagaaaagcgagtattggccttaataatcttcatttccatgatactcgtcatgaagctattactcgtatggttagagtcagaaagctacctgttgaggtgttagccaaaattactggccataagaaaattgatgtattggttaatacttactataaccctgatgcaaccgatctgattgaagcatttaacggataa

SEQ ID NO: 53084 - DNA, 282 bp, Acinetobacter baumannii
atgcctgaatttatcgtaacgattgaagcagattcagcccctcaaattgttctcggtcaaatgcttttaggcggtacagttaccgccctaaagctagaaaaacgtaaacttgtatcagtggcagagcttgttgctaaatatggcctttcagatgaaaccatacgcactaaatgcatttcaattaaccaaggcactaacggcaaacacatgtatgatcccgacgcggccgatgcaattctaaaaaatcaaaaggtccgacgtggaccaaaaagaaaaaactaa

SEQ ID NO: 53085 - DNA, 252 bp, Acinetobacter baumannii
atggctacatatattgaaaaattacaggaccctaaaaccgttcaaaagctggagtccttgctaggtgggcacatcatgagcgtgtacagaaatgcaggctttaatccacctgtacctgtttcacatggtggacgtttcatctatgccgatccagcaccagaaaagtatgcacgtcatttacgtgaaggcatgaaattgtttgctcaagctttggatgaattggcagaaaaagatggagggaataatgcctga

SEQ ID NO: 53086 - DNA, 315 bp, Acinetobacter baumannii
atgaaatataaagctttatctgaagctgaagttttggcagttcttgctgaaggtgaattagatgcaagcgatttgctttacacagctaatccaaactttgaaaaacgttttaaacgcttaaacacagcacttgcaaaactccttgatgaagtacgcgagtatttcccaaatgccgaatattactgtccaagtgatgccatggtattactacttggaagttcgcatgctgataaagatggtcaaccacatcaacaagaattggttgcagctaatagcgacgctcttagtgggagaataagtggaggtgactggtaa

SEQ ID NO: 53087 - DNA, 459 bp, Acinetobacter baumannii
atgaataacattgatttagctattgaggactttgttaataaaacactcaatcttgaaggtttaacacttaaaggatttgagaaattagcaatctcaaatggtttttatttcaagcagcaaggcggtgatgaaaatcacggcacttatgcaatttttaaaacttacaacgctcattcagcagcgattaccaaatgtcattgcggtcatatccaccgattagaagacatgtgcattaaatgccatccagtaaatgagaacttaaaaaccctcaatattaaatttccaacgacgtgttcgctatgcgagttttcggaatacatggaaatacaagttgagcctcaaaacacaggctatttatggtcaggcaaagttaaatgcccgaactgctctaatactggtgatttgcattattcagatggcaatgcattcatcaactgggcaatcgatttacctttttaa

SEQ ID NO: 53088 - DNA, 426 bp, Acinetobacter baumannii
atgcatatttgcccattacattcgtattttaagcaaagccttaatgatcaagttgaagcttggttagcacaaggcaatgaaatcaaaaaactggctcatggtgaaagtggtcatgcctggtatttcaacaatcagccaatcagtgctcaatcaactttgcgtgaaatgatgaccaagtctattaaaaaccataaggctaaaaagtcagaaaagaaaagtagtaaacgagctactagagcgcagataaatgaattgatcaaatggcttgatcaaagcacaggccgcggcactctcttaactcaaaagttagaatgttccccttcatttatttcacaaattaaaaacttcactcgtccttgttctgccgagaactataaaaagatcaaggaagcaattttggaaattgaacaggatgaaaaaaaatga

SEQ ID NO: 53089 - DNA, 360 bp, Acinetobacter baumannii
atgagctttccaacctttgacgaatttaaagaaattgatcgcttgaaaaaacagattcaggctcaggttctcaaaattgcaaaagatgcagttgtcttaaattcgcaagattttcaaataagttgtgagattcatggttttgtacacaacattgacctttatgtatttattggtggaagtaacacggattgttcaaatagaactgacattttgagttgctatacacaacctttttcgtatgactcactcactccagcgttttggcaaaaaatccttgatgacttgattgctggtcagaagaaattacgcgaactaaagaaaaatcagattgctgaagccaaaaaggaggaggctgtgtaa

SEQ ID NO: 53090 - DNA, 288 bp, Acinetobacter baumannii
atggtccaaaactcaccacaagttcagcaagaaatcatgaaattagcgggtagctgctttcagctttctaagccaggacttcaaatcaatttcaaactttataaccacacggaagaaattcgtatttacgtttacttcggtggttatcagcacgcaaaaagagattgggaaaaacgcaccgtagcaattgttgtgccctttggaaaatctgtaagtcaattggttgcacgtttacaagaagcacaacgtcaacttatccaagcaattcacggaggtagaaccgtatga

SEQ ID NO: 53091 - DNA, 306 bp, Acinetobacter baumannii
atgaaaaaacataaccctcctaaaacccaattcgacatcattgttgatgctcgactattcgcccctgattttggccagccaaagcgtgattttgatttctatcgtgaaagatcgattgatcaaatcaaatgcgctatttccaatatttcaaaagcctctaatggcaatgaactcgttatcgcgattgcccaggctaatgccttcattgattcagcttacaaccttgaatttattaaccttgttgaaaaggttaaatggactgaagaactaggttctgcttttcatggctcggttttggaggcttga

SEQ ID NO: 53092 - DNA, 642 bp, Acinetobacter baumannii
atggaaaccatcggcaaacgaataaaaagtttacgtaaagctaaaaagcttactcagaaagatctaggaaaattgcttggcttatcggatgtctctgttttaaaatgggaaaacgagacaaatacaccaaaattagagaacatgcatgaattagctttagccctagatacaactgttgagtatcttatgtatggcaaagcttctgaagagtcgagtgtagtagacttcagaccagtttcaagattattgcctgttctcactcacgttcaagcaggaaattggacctcagtgcaaagcataagtaaattcgatattaatcaatggcttccagccccaccaagtgcaggtaaaaatagtttttacatgatcgtaaaaggtacaagcaacgcaccttattttaacgatggtgattatatttgtatcgatccagatgtgcctattgattgtgtccaaactggtgaaatggttgttgttcagcatgaaggtgatgcaacgttcaaagcgcttgtaaaagaagataatagaatgtatttacaagcacttaataaaaactatcatcctaatattattttccttaaagaagatagcatctataaaggtaagtatgtaggtaagtttgaaactggccgaaaattcttataa

SEQ ID NO: 53093 - DNA, 207 bp, Acinetobacter baumannii
atgacacgcgatgatgcaatcaaactacttaactgcacttattcagagcttgcagacaaattagaactaactacggcagcggtttcacgctgggcaaatcgtgaacttccttatgatcgtgaatatgaaattcttgaacttgctgctggccgtattcctaaacgccttttgaaagcagaaaagaatttatcccatgcaaataattaa

SEQ ID NO: 53094 - DNA, 501 bp, Acinetobacter baumannii
atggttttatctttaatcgaacgtcgtgaaaaaacggttatgtcattagagcaagctttgaaagctgctgtttatcgtccaggtgatgaatacctaatggcacaaattgccgaaaagaatggatggaatatcaatacgttccgtagctctatcaatccaacgactcctacccataaggcaaatatttatcatttcgaagctattttagatgaaacaaaagatagccggattatggatagtgtttgtgcaattcatggaaatgcggcttggtttgagttgcccaaaactgacaatttaaataccgctgattttgttatgaaaataggcaaattggcacaagagcagggtgatttatctcaatccgtagctaaagcaattggcgatggatgtattagtgaagatgagttagcagtaattcgtaaagatgcttttgaactcattcgagttgtttcaactattttggctatggctgaggaacaacatagaggtgatcatgcctag

SEQ ID NO: 53095 - DNA, 951 bp, Acinetobacter baumannii
atgcctagaaaaaagaaaggatttgaactacctgatgtaaaacatgctgcccgtggtcaatgggaagatatttttgcacgttttaatattactgttcctaaaaaagatactcatggaccttgtccgtactgtggtggtgaagatcgttttcgatttgatgataaatatgaaaatggtgattggctttgtaatgtttgtacggaaagcaaaaatagagatgggtttgatttaattgggaaagttacaggtttaccgttttctcaaatcattgaagaggttgcttcaattgttggtttagatgcaactagtacaattacgcctcaaatgcgtaaacagtgggaagaagagaaaaaaatacgtgatcgcattaaccaggagatgaagcttaaaaaacagcaacaagtagctagacaagcggcaggtttataccgcaatccttatcctggtgaaataagcccatatcttgaacgaaagcaagtacctgttttacctggcgtgaagattgatcataaagggaatgtactaatccctgcttatgatactgaaggcttcatgtggaatatgcaaactatatatccagatggtggaaagttttttgtttctgatgaagaggacccaaatggaaacaaaaaaggtggacgtactggcggctgttttttccttctcggaaccatcgagcttgttgacccaatcattatttgcatagctgaagggtacgcaactggtgcaagtattcacttggcaacgggctatcccgtggttttggcttttgtagctaacaacattccaaaagtcggtgcagctttaagagaaaaatacccgcaagcaacacttgtttattgtgctgatgatgatagtgcaaaagatgatacaggtgtgaaatacgctcaacaagctgtggctgtcactggcggcatcgtagtactccctaaatttaataaggtggcataa

SEQ ID NO: 53096 - DNA, 1779 bp, Acinetobacter baumannii
gtgaaccaaaaccaacaagtaggacagccacaagcaactttcatcccatcggacttcaatgacctgcatttgatgtttgggttgaaagaggtaaaggctcagatcgtccaggctattaatacgtctattcctctttcccccgaaccccctaaaaccaacaagcccatccatagtgagggtcaaattgagaaaatttctcatgttccaatggttgaggaaaatcttgtggctggtgaatcggggcaagggggcgatatttcggcagaaaatgatgctgtacctgaatctattcaaaaattcattgatcgttattacttaattgaagcaaaaacagatgtttgggataactttgacaaaatcgtaatcaagaaaaatgcttttactgctttgttgggccaaaagcaatacaagttatggttagaccacaaaaaagttattccaaaatctgagtttgaacacaatgttaatgtggctactaacttaactattcaggaattattagataatttcgttgtcctggcaaactcagaggaagcttggaatttagttgagcgtaggacatggctcattaagcatatacgaattgcatatcctaatatttttgacttgtggtttaagtctccagctagaaaaattattcctcgtcaaaaccttatttttgaccctaagcaagaacatgatcatgatgagaattacatcaatatttatcgtggattgaacatagatgtaatacgtgatcagtatggtgaacaattgactcgtgcagaagtctatgaagattgtaagggcatcatgaccttgattaatgatctatgcgatggggaggaggaagctgttatttttttattgaaatggctagcgtttcctcttcaaaacattggcgcaaaaatggctacatgtgtgctgatgcatggtcatattcatggatctggtaaatctttaatgttcgtttcaatcatgaaaaagatttatggtgagtaccatacaacagttgggcaagctcaacttgataaccaatataacgaatggattgaaaacaaacttttcggtgtgtttgaagagattgtggacaataagaaaaaacataacgttatgggcatgattaagcatctcattactggtgaaacgctctatgtcagtaagaaattcgtatcaggatgggaaatgaataaccacctgaataccgtatttttatcaaacaatactcaaccactaccaatcgaagaaaaggaccgtcggttcttagtgcttaacccttgtaaagacttggatggacctttgcatgaaagggtaatgcaggagttaaagactaacggtgtacaagctttttacacctatttgatggggcttgatttaactgactttcatgaacacgttaagccgccaatgaccatagctaaaaggacgatgattgattattcgcgtgcaggctttgacacgttttatcatgaatggaaaaacggtgacacaaaattcccttatgtctcctgtaaatcagagcagctttataaagcgtttggtcaatggtccagaacaactggagagcatcaaatcagtatgaaaagattcattattgagggtaagaagcatggcattgtaccaagtgataaggccaagcattggaaaggtaagcgaagttccggacaaaataaagtcattatcattggagaaaaacccaaagatgaacaagagcagctttggctagggttgcaaatcgaacaatttcaagatagcttagacggggtgaatgatgttcctgaagcaaaatacgcacaataa

SEQ ID NO: 53097 - DNA, 390 bp, Acinetobacter baumannii
atgatgttcctgaagcaaaatacgcacaataagagcttctcatgtgaacgatgtgaatggtcatgtgaaccatttaagcaaatcattcacacgctcaaatccttatacaccaatgcatacaacaaccatgtgaatgatgtgaaccattttcttgcgcgcgcacgtgagagaaaaaaacacctattgcttaaatcaaatcaatttaaatcaaatattgttcacaatttaaacataagtgaaaacgctctcacgcgagaaaacacacataaatcattcacatcattcacatgtaatacaatttattgtttttacttatgtttctatgtgaaccattggtcaaaatcattcacacaaccattcacatcattcacatggaattttgaggattaa

SEQ ID NO: 53098 - DNA, 471 bp, Acinetobacter baumannii
atggaaaaatatttacgtttattaaatcccaaaacaaccaattatgatgcaatcccttcgggtaaccacggtgctttgactgctgctgacgtatgcattgctatgagttatgcaaaattaactcctttgcaggataacttattccgcttgaaatacttgggcgcaaacaacattgagaatgtggagttatttagcaagttattgcttacaaagtatcaagataaatttattcaagcaggtgtgaacatgatctatcacttgccaatcgttcgcgttgctttggttgagttctgtttagtatctgctgattacaagcctacagagcgcaatcgagaaattatttctggttttagtgataccactgtccgcaaccatatgaaaagtcatattgataatgtgttagctgatctaaaacaggcatgtgaattaggcgaagaaaagattttttggcagatcaataaaactaactaa

SEQ ID NO: 53099 - DNA, 186 bp, Acinetobacter baumannii
atggtcattggtaaggtatcgattgaaatgaaaccgtgggtttgttattccgtctatgctctctatttgattgagaaaaagatcggaaaacgaaaactgacttcaaaattgatgacaaaacttttagagcgttgcattcgatttgaagagattgatcatgtccaatcgtccaccacaaagagctaa

SEQ ID NO: 53100 - DNA, 588 bp, Acinetobacter baumannii
atgtccaatcgtccaccacaaagagctaagcgcccatgtcttgtgggcagttgtaaagatttcgcatcgaacaaaggttactgtgaccagcatcaaaaacgaatcaaacaaaaagatcgggagcggggcacagcacaccagcgcggctatgatgcccgttgggaaaaagaaagaacaaaattcttagatgagaacccgttatgtgctgatcatcgaaagcgcggattgattgaagccgcaacggttgttgaccatatcatcccgcacaaaggcgaccaggttttgttctgggataagaacaattggcaaccgctttgcaagtcatgccatgaccgcaagacagcaaccgaagacaaaggcggttggtcatatcaaccaccagttacacaaaagccagttgattgttatgtctttaaagttggtgaattggtgcaagctgcaacggcttatgcaattgacactttgtcctgtggttggactgatagttttgaaatcaaatcaatcgaagataaaaagattgaagtgcatgatgccgatggctttgttcataagctgcatcactcacacttcaaggcggtgactgcatga

SEQ ID NO: 53101 - DNA, 219 bp, Acinetobacter baumannii
atgagttgcgaacgagaaattatattgctcggtgatccggttgtatatcgtgatgacatcaaaggctttgatgaactaggtgtcgttgttaaggctggctcatcattcgaagtactttggaatggtgagacaactcctagaactacaatttacgaaagactacgtggcgctcgacttgatgaagtcgatgctggttgccgactgattgagaagggatag

SEQ ID NO: 53102 - DNA, 297 bp, Acinetobacter baumannii
atggcttttaagcaaaaacagaaaacggtagaagcagagcctgttggggctattttggatttatttgaaacagattttaaatccttacctgattgggtgaagagagcatataaagatcaaaagattctttttggttatgggttactcaaacttatccacgtaagttttacccagcaagcagttcctggagatgttttagtaagccatgaaaatggaaagctagaggtcctacctgaaaataagttttttgaaacttatgaattagtagatgaaacattgccgttacctcaagaataa

SEQ ID NO: 53103 - DNA, 516 bp, Acinetobacter baumannii
atgtcaaacatgggaagacctagaaagtctttacaagaaaaagttttaagtggtggccgtgtccgagaagaccgcgatgaagatgcacaagttgcgaatgctgctgtcgatcttggaatgccaccttgcccagcttggttgaataaaaaagcccgaaaacattgggacacattaggtccgaagttggttcaagcgggtctgcttagtgttgttgatggtgatgtgttcttgctgcactgtgacaacatggccgcttatgaagaagttcaggaaaaattacaggatatcaattcttgggtagcaacgaccccaaataaatttgaggtccaatctgcctggctgcaaatccgaaacaagttgcaagaattaattattaaaactgcccgtgaatttggattgactccagcagcccgttcaagtgtcaaagtaaataagcaacagcagcttgatttattgggtgcggcagcggcaactgaagacgatgaatttgcgggaatgaatattcgccaaagttag

SEQ ID NO: 53104 - DNA, 219 bp, Acinetobacter baumannii
atgaatatagaaaatccattagagtcgatacgaaaagcgattttattcagctcaaatgattttggacagtgtaaacgagatgcgtggatttatggcattgttgttggatggcctgatgaagctatggaagagctagctcaaaagcatcgttgggagccagaaacaattgaaagactaaagaggctacataaagcctttgttgagttaaacaaagattaa

SEQ ID NO: 53105 - DNA, 1842 bp, Acinetobacter baumannii
atgcgtgattattttaaaattgcgctccagtattgccttgatgttcgctctggagtgcgtgtgtctgggcaacttgaaaaacttgccataaaaagatttttaaacgatttaaaaagatcaaattttaacgttgagtcagtcgatgacgaaacacaagaattattaaatcaactgaaatttaaacccagtccagatgttgattttgattatgaattaaatcttgggcgtgtagaccatgcctgcaaatttgttgaagcctgcccacacgtaaaagggaaactggcaaaaataaaacctgatggaactagacaccgattgatattagagccgtggcaaatcttcgctatggtaaatattttcggctggattgattctgacaacaaacgtcgttttttgtatgtctatattgaggtagctaagaaaaatggtaaatcaacttggctggctgccgttgccttatatctggcatttcttgacggtgaaatgggtgctgaagtttatacagcagcgacatcaagagaccaggcaaagatcgtatttgaagatgcgaaaaagatggtggagttttcaccacgcatgtgttcgaaattcggcattgaatattcacaatattcagtctttcagaccgaaacaaacagctttcttaaagcgctatcacaagatcggggtggaacaaaagacggtttaaacgtccatgcagcaattattgatgaattacatgcacataaaactgctgacatgtatgacattgttgccaatggtacggcagcacgtgaagagcctttgattttagccattacaacggctggcgatgatacaacaagcaaatgttatcaagagcgacaaattgttgttgatgtcctgaaagggaaggctacgcacgagcaatatttcggcatggttttctgcttagaccgtggtgatgattggcaggatccaaaagtatggcctaaagctaatccaaattatggggtttcggttaatgaaaaatacctgttttcagtctttgaaaaagtcaaagtaagtccaaaacaagaaggtattacccgccaaaagcacttaaacgagtgggttggtgctgttgatggctggattgctccttcaatctgggaaaaatgctactcagaagttaaatatgaagatttaaatggtcaaattcgctttggcggatatgacttagctagtcgactggatttagcttgttgggctgaattgatcccacgaatggaaacagatggaaaaatccattggtatgcatttgttcactcttacattaatgaacgggtgatggaaaccaaaactgcaattaatggtgaaaagcgtcctgatgaataccctgtttggcgtgaacaaggtgttttaaaagtaacaccaggtgaatcaacagacttcaagcgtatccagcgagatatcgaagatgcccacgtaaaaaatccattttatgaaataggtcatgaccgttatcacgcggaacaactgacagcaaatttgttagatgaaggcatttctgttgttgagattcctcaaactacagaatatttgaatccagcaatgcgttggattgaggttttacttgccgaagggcgtttccatcataacggggaccccctttttaaatggtgtgctttaaatgtcttggttaaacctgatgctaaagacaatattttcccgcgtaagggagcggcaggtaaaaagattgatgcaatggttggggtcattaatgccgcggcccgcgcaaggcattgggacaatgaggaggtttttgatctgattcctggtgataactctgacgattttgactttgatgactatatacaaaatatggtagtggggcgacgatga

SEQ ID NO: 53106 - DNA, 1278 bp, Acinetobacter baumannii
atgacagcaaaaattgcaaaaagtcggctgtttgagtgtcttgaaaaggacaaaatcaatcgggccgtggatgatgcaaaggagagtaatactcgaagtactggtccagcaaatccagggcggggaacactaattgattttccccgctcaaaaagtcggattgctagtacagcgacttgggaccgtgcaatgacactatcggtagtgtttgcatgtcataaagttttagctgaaacagtagcaagtttaccccttgaaatgttcatgtttgacaacgatcggaatcgcaaacaaatatttgatcataagttggcgagtctttggcgtaataaaccaaatgacgagcaaactaatgtcgaatttaaagaaacatttatgctgaatttaatcagtggaaatgtatatgtgcgcaaacatttttatcacaaagagcttaatcaacttgtagtgataaataatgcttctgtagacccaaaattgaacaataaagggaaaaaagagtatcacatcacctattctgatggaaaaaaggaaatcctaacaaataatgaaatttggcacgtcaaattatttggtactggtttggttgggatgtcgccattggcatatgcggccagatcaataggaattggtcttgcaaccgacgataaagttggtcgaatcatggaaaatggagctaagccttcaggtgcgctttcaacagataaatcactgaaaaaagaacaacggcaatcattacgtgaagaaatggaagagctagtttctggtgatgattggtttttaccagttcttgagggcggattgaagtttgaaagatttagcttaactccagaagatattgaacttttagaaactcgtaaatttactgttgaagaaatttgtcgtttttatggtgtaccaagtgtacttgtcaatgacacttctggttcaacagcttggggcagtggtattgaacaaatcgtggaagcattttatcgatttggtttgcgtccatactttgagcgaattgaagagtcagttcgacttaatttgcttgatcgtgttgattgggataagtacgaattcgagttcaagattaaagacttattacgtgcatcaatcactgctcggattagtaataacaaatcaagaatcgaaagcggacaagccacgattaatgaggtccgcaaagaagagggatttagtcctgttgaaggtggagataatttaatgatagctgcgaaccttattacccttgatcgcgctgtagctggagggggacaaaaaaatgaatcttag

SEQ ID NO: 53107 - DNA, 723 bp, Acinetobacter baumannii
atgaatcttagtatgctcacagtgcgtaactcacaagtgcaaaagccggatgttcaaatccggcttttgccattctcagatgtgaaattacgctttgatgaaaatcaagataaaaattcagcattcttatttgaaggctacgctgtccgttgggacagtgtgaattcacatggcgaacaatttgttaaaggggcctttgcagattttattaatgccgtgaaagctggatccatgcgttgtcacatgtattacaaccacggccaccgtcatgactggattagtccagaatatgcaatgcgtattggtaagtggcttgaacttgaagaagatgatatcggttttaaggtatctggccgtctcacacttggcttaagccttgctaataatgttcgtgcaatgcttgaagatggcacgattgatggtttatcgattgccttctttaatccagatccgatggatattgaagatatggggtcttatatacgtattaagcgtgtaagtctttatgaaatcagtatttgtgatgaacctagtgatcgtaatgcacgagtaactgatgcggatattcgtaatattcaaacagaacaggatatgaagctttatttagagcgaaagttcaacattgatgacattgcagcaacaaacttaattaagcgtgctcaagagtttgggcaggtgaaaccaaaacctcatgacccatttgcctttttagacaaggtttaa

SEQ ID NO: 53108 - DNA, 1314 bp, Acinetobacter baumannii
atgaaagcttctcaaaaatcacctgttgctcaatctttaagtgtttatggtgatctttctacccgaaatactacgggtaatagtaatcctgcaccgcgctcattagatgaacttgctggcgatttccaacaacgtttaacacagttggatcagttgattgctgctcgccagcaacaatttgccaatcttcctgaaaatgttcgtcaagaattagaggcacgatcaactgaaattcagaaattagcggcagatattgaacaaattaaaacagatttagtaaatgaagcacgttcactaccacatgatgaacagcatgatatagctgcaatcctaattcgaaataaagaatcagtggaccaagcagaaatcatgtttaagcgttctaagcaagtttctgaatctgtaacgtttgaaggtattaaaacgcgtaatattatcactcttgcaggcattgaaaacaaaacagcaaatgcgaatgctgctaaagatattactagtcgcactgctgtttatcgccctttaaatattatcgatttaatcaactggctgccagttgaaggcgaaaaagcatactacctacgcgaatcaagttttaatattttggctgatattattcctgaagctcaagataaacctgaatctgaattgaagttaggtatgcttgaattaagtgtagggactattgctcactttattcgtgtatcaaagcaagcattaaaaaatatgaatatgcttgcaatgtatattgaatcacgtatggcgtatggggttcgattaaaacttgaatattatgttgtaaatggacatacaccagcttctggacaacaaaaaatctttagcgggttattggaagacggtaactttgttacggtaactactgctacagatgacactgcaattgatgtactgaataaagctaaatataaagctgctgctacatttattcagcctgattgtacaattttaaaccctgaagattgggggaaaattgaacgtattaaaggtggcgatgggcattatatttttggttcacctggtgcagttgttcagccagtattatggggtgttcctgttgtatttagtgcaactatgccagttactaaatattggacaggtcctttgaattatgcttttgaaggttatcttgatgaaaacgttgatattatcgtctctacagaagatagtaataacgtaactaagaacttagtaactgtattggccgaagttgatggttctggtgcagtagtaattcctgatgcgtgtgtttctggtactttgcctgaagtagtagcagaaccacctgctggcggttaa

SEQ ID NO: 53109 - DNA, 315 bp, Acinetobacter baumannii
atgagtgactacataacgcttgatttagcgaaatctcatttacgtgttttgcatacgcgtgatgattcatacattgagttactgatcaaagcggctttaaaagcagtaagaaactttatagatagagattttgcggaaattcaactgaagtggggagttcctacggacgctttaccagaagatttgatttttgcggctttgttgatcattggtgacatgtatcaaaaccgtgcagctcagaccgatgcggccctatatatcaatatagcatgtgagcgtttgatggggccttatgtaaaaaaaggggttaaatga

SEQ ID NO: 53110 - DNA, 234 bp, Acinetobacter baumannii
atgatgtcgagaacatttgttaaaagatttgcaagtacacaccctaaattcttaactgaaagtatttcaaaatttcagcgtcaagagtctgtagagatacaaagtctttcaacatttatcgttgagggagaatcgtggccttatcaagccttggttgtctttgaacgacctattgagttcacaacaagtgaaacacaatctgaagttttgcgaccaccaataaattgccgctga

SEQ ID NO: 53111 - DNA, 156 bp, Acinetobacter baumannii
atgcatgaaaaatttgaagcttggattaaagcccagccgttttatacaaagctgatttatatacatggtgagcgtctctttattcgtgacaatggtgaatatcaaatttttgcaatggaagttgcctatcaagcttggttggtgaaaggggggtga

SEQ ID NO: 53112 - DNA, 327 bp, Acinetobacter baumannii
atgcaaagcggaaaattagatgttttgttcgatgtcttaaaacgtggtactgaaaaaaacagcgctggggaagtaaaacaaatatggtcgagcatcggccagttttatggagatattgaaccaatcagtgcggctaattttgtgcaatcgggtgttcaaggttcggccttagtttgtcgcgtggttatgcgtccagatgatttccctggtattaaggctgaatttctattacgtgatgttgatacaaatgacatctatgcaattaatggtgtactcccaattaccccaagtaaaaaggcattgatgtgtagcttagggaaattgtga

SEQ ID NO: 53113 - DNA, 534 bp, Acinetobacter baumannii
atggacataacacataaaatggttggtctagatgacatgcaaaaacaaatgtcaaatttggtcgatctagctactgaaaagaaaaaaacaaaagctgctgcaatgtatgcggtaaaacccatgcttgatgaagcaaagagtcgggcacctgttgctgaaaaggcgtattaccgttattaccgtggttcttacagacagcgtaagcgtggtaatgcaaagcctagccgtcaattaatgatacccggtaaattgagagctgcaattaaacgtaaaagtgtggagttgaacaagtctgttggtgcggctgtttatgtgggtactactaaggctttatttgatcgtaaatattatcctttttattggcgatttatcgaatatggtacgcccacaatgcccgcaaattcgatatttagaaggacttttgacgcaggaaaagtaattgctttagagcgtttcaaattcagatatagaaaatatatcgaagcaattgttaagcgccgaccagttgagggcctaaacgatgttagtgagtga

SEQ ID NO: 53114 - DNA, 366 bp, Acinetobacter baumannii
atgttagtgagtgagattatttatgaggtccttaaagggccttttaacgatagagttgggccgcatccattgccaaaaggatttgataattcagcaacctatatcacctatcaagggattacaaacataccgttaaatacggttaaaggctggacaggtcacggccgagtaaggattcaaataaacgtctataaccatgaaaaattgcaagcggaaaaagatgctgaagcagtgaaatgggctatggaccaacaaaaatattcaaactgtgaaatcgcggaacaacgtgatggcggttttgatgaggaaacccaagtatggggacaggaaatcgatttttatttatggcaaaacgcctgcaattag

SEQ ID NO: 53115 - DNA, 468 bp, Acinetobacter baumannii
atggctggttgtgttgaaggtttaattgatgctcaaggagcctcaatctcgttccgtgaagagggtgcaacctcttgggaagttactgctgaagtcactgatttgccaatgcctgattcaactcgtccagttgatgatgtaactacggtagattcaaaatttaaaaagaaagcaacggcaggtgcaattgacaatggtgctttagcgcttgagttcttacagatcagtggttcagatcagcaagcaaaacttcgtgattactacaataaaggcaagtgtcttgagtggaaaatcgaactgaatgatgaagctaaaacctcttatgaattttgtgcgtccatgagcaaatttacggttgttcgtgctgctgacaaaaagaaccgtgtacaaactcaactagaaatttctggtgaagtagtggtcaaagaaaatgatgtggtcgttgttgttccacctgtaacaccttaa

SEQ ID NO: 53116 - DNA, 360 bp, Acinetobacter baumannii
atgtctttaattaataaatttttagaaatcactgaaaaaccacgatttgaagttgttgaagttgagcagcttggaaagattggcttgcgcttactaacgattgaaacacgtgacgaatggttagaggcgcaaaaaaatgacccaaaaacagcatttccaattttaatgaaaaatactgtatgtgatcctgattctggtgagctggtattacaagaaattgaaactgaacagttaagaaaattaccagctatggttgagaaggatttattctcaaagatttgtaaggcaaatgggattaaaactcaggcagaggcgaaacaggaagaagagttaaaaaactccgaagccggccagaattaa

SEQ ID NO: 53117 - DNA, 240 bp, Acinetobacter baumannii
atgtccaataaagagtttggatactggaaagcttttaatgttcttgaaccgattggactcttcagagaggatattctttttgctggtttaggacgtaccattacagatgcaatggtgccaaagcatccctttaaacttgatgattttatgatgtttaaagaaaaacagcctatgcctaaatcagaaattcaaaataatttaaaagctttctttagcggttattcaaagtctaaagtttga

SEQ ID NO: 53118 - DNA, 321 bp, Acinetobacter baumannii
atgcaaaagaattcattttgtttaatagtttgttgttttatttttggttcgtcagcacaagccgcttcagatgaaaaagtaaaagattgtttaactttagaaaaattagctggagttacaatggaatatcgccagaaaggcggtgttttatctgatttatataaaatggattttgggtctaaggaccgtaataaaattgttcgaagcttggctgaggaagcatttgaaataccaagatatcaaagtgcaaaggtacaacaggatgctataaaaaattttaaaaacgagaagtttttatattgtttaaagcatttaaagtaa

SEQ ID NO: 53119 - DNA, 2661 bp, Acinetobacter baumannii
atgagaaaaaaagccctgttaaacggggtttttttatgggtgaaatatatgtctgatgttttaagccgtgttcaaattctgcttgatgccaatactgctaaatttgaacagaatataaagactgcccaaaagacttccgaaacgtctttcaacaaaatttcatctagtgccaaagctatggctggaattgttgcaacggcaaccgttgcgggggcggcttctttatataactattccaaagaacaagctaaggtgataggtgagttagagcgtaatgcatttcttgcacaatcaaccgtacaagaatttcaaatggtgtctgttggtgctgaaatgtttggtattcaacaggataaacttgcagatataactaaagactttaacgaaaaattaggggattttttaaccacaggtggtggtgaatatgtcaattttcttgagcaagttgcgttaaaaactgaaggtagtacttcgaaagcattagagcttaccaaagcaatggcccgtttatccggtccagaagctatggctttatatgttagtaaaatggaagaggttaatttatctcaagatcaaatgtcattcttaatggaaagtatggcttcagattccacactattactaccattgcttaaaaataatgctgaagggatgaaactatggggtgaagctgctgaagatgctggcattatactgaatgataaaaccattaaagctgctcgtgaactccaagttcagaccaaaatgcttgatatgcaaatgcagggcatgaaaaatggattaatggcttcagttatgcctgctctagttgatattgctgatgcctttagtactggagataaagaagcccgcggaatggctgatggtggcaaagttcttgcggattcattacgtggtgttgcagctattgcattgggggtgtgggctacacttaacttaatttctaattctattgctggtgtaactagccaagcacttgattcgtatgaattgacaagtaaagccgcccaaaatggtggattcttagataagttccctggtattcaatgggcaaaaacatttattacaacaggtgtaacagctagcgcggaaaatagttatgtcagcatggctggccgtgataatgatgctgttattaaggaattttctgaaaaaacggcaaaaatttttgatgatactgtttctagttcaactaaaaaacttgccgagcttcaagaattagcaaataaaggtactgctgctgcaactcaaggcgtacaagactggaaggataagcaagacaaggttgccgaatctgcaaaaaaacttgctcaggctcaacaggaattaaaccgaaaacttgaggaacgcaaaaggcttcaagattcaataatttatgaatatggtgataaagagtatcaaatgcaactcaattatgagcgtcaagcaaatgatattaaaaaggcttttgatggtgaacaacagcagagattcctaaccattgcaaaaaatcgatacgatactgaaaaagctttatacctatcaaagttagcttttgaaatatcagaacatcggttaactgaagaggaaaagcttaacttccaatatcagattgaccaaaaggaaattgcggccagaactgatgttactgatgcagacaaagcatctttttaccgtgcagcacgtgaaaagcatgaccagtcaatggcttggatgcgtcttgaatcagctcagcgcttaaatgatgctcaagctgctttccaaaatgaaatgcagaatttaactgcaaagtttgaatttgaacgtgagcaaatccgtctaaataagtcgcttgatccggcagagcaaagtactttgatagcatcatcgtacagaactcaagatctggaaaatgaggcttcaagacattcagcctggatggattatcaaagtgctactggtgttgatacttctgctgaggatgcggcaaatagacgagctgaagcaattaaaaatgcttttgaatggcagttgattacccaggaagagtaccaacaaaaaatgttggcttctgaggctcaatttaacacggataaagcagctttaggtgcccaagctgctgctgacactttaagcggtatgactgatctcatggggtcattaataggtgagcagtccggcgcatataaggcaatgtttgcgatgtcaaaggcgtttgcagtagcccaggctattatgaatgctccacaaacgttctctaatgtatatacgtctgtttctgctattccgttaattggtccatacattgcgcctgtgatggctggtgcagccgttgcagttcaagttgctcaagcatcacaaattaagtcagtcagtttggatggtatggcccatgatggtatctctagtgttcctgaagatggtacttggttccttaaaaaaggtgaacgtgtacttgatgatcaacaaaatagtgctttaacccgattcttaaatagtaatggcagtcaaatgaatggttttaatatcaatattaataactatacaggcgcaagagttaataccaaacgtgatgaaaatggcttaaccattgatatcgttgatgaacgtattgctggagcgtttacacgtttgggcactgaatcaaatagttatgaatcgcagatggtgcagcaagcctttaatgttgagcgtagacgatag

SEQ ID NO: 53120 - DNA, 483 bp, Acinetobacter baumannii
atggataaatttatgcttgaacctcttcaagagagttatagctttacaccaggcaacaacattagagaacaggaaaatgaagggggaccgccacggcagtcccctttttttgttggtgctgttcatcgtgttggtgtgactgtatatctggaaaacgatgaagatcgacaatacttttgggcattctggcgcttaaagcaacgtaaacctgaaaactggctttggaatttggctttagatgagggaattcgagaggattgtgaatgtcggtttgcttatgacgttttaccttcggaatcatctcgcaacggtcaagcggtaaaaatgagtttccaggtgatagttaaacctatcaaacgtagtgctgacttagaccgcaacatcgttaatgtgcgtcaaggcatcgaatctaacgaagtaattgatgacattgaaaaagtgctgaatgaatggctgccagatgcgttgggagtaaatcaatga

SEQ ID NO: 53121 - DNA, 513 bp, Acinetobacter baumannii
atgattgaacttacacctgaacaacttgctgtacttgaccagtcagcgggtccaattggttggcttgagtctgttgaaatttctcatccgaattggccgcaagttttgcgttatgtggttaattcgagtgagccaattatattaacacatgaggatggtcaaacatttgaatatgtctatgtaccgttaacgataaatcgtggaggggatgaggataatcttgatcaaaagcttacggccgttatcggtgatgtgggcaccattgttccggatttaataaagttggtccttcaggatgatgaaataactccacctattttaaattaccgtgcatacattattggccgttatgacgtacctgcttatgtagtaagggacttagaagttgtgacggtaacacgtgactatcgtggatctagttttgaagcacaagcaccaggtttaaatgattcagggaatggagaaatctattctgcaagtacagatgaaagtttagaaggtttttatgcatga

SEQ ID NO: 53122 - DNA, 369 bp, Acinetobacter baumannii
atgaatatcagcaaacttttttactgtaagtatgatcctgaaaaatttcactgtgtgcattttgttattaaagcagccgaatatatttatggacaagattattcaccgtgctttgttgggttatctagtccgttaagtgaagcaattaaaacttcaagagaaacggttcatcaaaacaagcggattgatagaccaaaagaaggttgcatagtcctaatgacatatatgaatgaaagctcccatgtggggcttttttttcagggcaaaatttttcatttaagtgaatgcggggttcagcgcatcacagttgaacaagccaaaatttggtttaaacggattcgatattatgagccgaatttacatcattaa

SEQ ID NO: 53123 - DNA, 2826 bp, Acinetobacter baumannii
atgagccgaatttacatcattaagaatgctttagaccaacaagagaaaattacagttgagtctgaaaatattctttttacatttttgcaagaaaaaaccaagcatccccaggcgaaaatctataagggtaatccttgccctgaaaatgatataacccctacacgtgataatcgtgcatctattgcacgtcttatggaaatggatgatgaatgtacgattgttcgttatcctggtgagttgtcctcaacagtaacttggattgctacaaagttgcttggtcaagctgtctctgctttggtgaaggtgccaaaagcaccgacaaataatagttcgatgacaggttcaagtaataacaatttatcgaacccggaaaaccgtcaacgaattaaacaacgtgttccttatattcttggtgcacctaaagctattcctgatttatttgctcctccatatcgatatttcaaagatggggtagaagttgaagagcttttactaagtgtttgtgaaaaccccgttaagctatctcaatttaagaccggcgatacgcctattcaggaaataccaggaacaagtttgtcggcttatggcttaaatcaaagtctggttggtactgaaacaatctttaaatggggagatactttcaccgaacctcctgtaattgcccggcagtgtgattctattaatggtcaaacagctttgccgcctaatagcacacgtgttgaagctggagatatatatttccaatatccgaatatgattaaggctaatgaccagggcacggcagatcgttttaactcattcaatattaatgaagctttgatcattagcggtgcaaactttggtgttggtgatttatccataacaggtcaagttactgttgacccggtaaacaagacgtttgctattgagtcaacacaaaatgtcttggattatcagaattaccgaaaaattaacgtgacttcattgctggtcactgatcctgtaaatgagcagcttgatttagcgggattgtatgatattgattcaatcacatatgcatctagtatctatacaattcatttgagaaatcctgtagccacaaacaccaatttttcaaaagtaactgaggtattaacttccacaatatcggcaaatctaactgcaaacacagcaaacatctttttagatggtgaatatgttgtaacgggtgttgataccgttaataagcagcttactttagcaacgcctagcggtgtaaattccgattggaataagttagcagacttagaagatcaaaaaaccagtaccggcaatattaagcttcgcggaagccaggataactggattggttggtttacaatcgcttcacccaaagcgacaggacttttattaaatttccaagctttaaatggaatttatcaaggttctgatgctaaatatgtggatatctatgttgaatatcaacaagtcgtttctgataatccgaccggagccgtttttaaccaaactatacgattaaatggtaaagcaaataaccgtgatagcgttggtggctcaatgtggattgacttgccgttttctggcgctgtgcgtttccgtgcaagaagggttaatgacaatggtgatgcggtagatttatcagatgaagttaaattttatacggcttatgcaattcgctatttatccaagcttgtttatgcaaatagggttttaatacgccagcgcacacaagcaacacgtgctgcaactgctgttgatacacggcagacaaactgtattgcagagagtctagtttattcatatcgcgggggtgtgcgttctgctgagttgataccttcacgcaatatggctgatctcatcattgacctggctttgaataaacttattggtcgacgcactttaaatgaaatcaatactgaagaaatttatcgtgtatttgatgatgtggttgattacttcggttctgaaaaaatggctgaatttaactatacattagacaatgcaaatcagtcatttgaagaaatttgccgaatgatggcgggtgcatccggttgtaatgaacgtcgtttaaatagggcactctactttgattttgaaagggcagatcggcaaccaatattgttattcaatcaccggaataagaaggctaaatctgaagttagaacatataactttaaggttgagaataattatgatggtgtcgaaataacatatgttgatagtgaggcagggtggattgaaaagactttgaaaatcccgaatgatcaaatcacgaacccgaaaaaaatcgatggttatggaattgcctataaagaacaggctcatatcatcggctggcgtgccctgaataaactgaagtatcagcgaatcaattgtaagtttgactgctttgctgaaggtgagcttacagagcgtggggacccaatcattgtggttgatgatactcgattatcaccagttgccctgggtgatggttctcaaacgtctggagaaattacggcatggaacggcttaacaattgagatcagtcagccatgtactttgacaccaggccatgattacgtaattcatttgcaaaagaaaagtggttttactgatcaaatctcaattagccagggcacaagtgagtatgagctaattttggcacgtccaccgcttgaagcactggtgactgaaggtgaggtgaaaacagtttattcaatcactgtagatgatcgtcaagatgatgagttattcctagtctcaagcaaaaatcgaaatggagtttttgaaaactccatatcagcaaccaatttggatgagcgttattatcgaaatgataaggacatcatcaataacctaatttaa

SEQ ID NO: 53124 - DNA, 2526 bp, Acinetobacter baumannii
atggctgttttaactccagaagattttgataacctcaaaattgatattgaggatgctggtaaatgcccaaatactgattcggtaattaatccgcgttatggtgaaccttttaaatcgtttccaatggtatcgcgtgaaggtgaagaaaactttttatttgccactcagcaaattattgaagcaggattgttagaaggttttccaactgaagctgaattgttggcaagtagacctacagttccaaaaaaatatgcaaaagctaatgatactaagattgtttggttttggaataagccagcaggtgcatcggatggtaattactggataagtactggtttaagtgaatatagtcagtcaaaaaactattttgatcagtatagtgcgcttacaaaaaatgcgactgttttttatccatttacgactactaagcgtaataatgtgaatgaaagcacagtttctacatctcatgaagcttacttaaaaccgtatattttaaatgtcactgtgaatggggcggatcaaaataaattttaccgtatacaacaaatcagcagtcctacaaatccgacggttcctaatcgttgggtttttgaggttttaaatcgaactaattttgatacaatcgaaaccactgaaaaaacaattccagttgttttttcaatagtaaaaaacacagggattcaaactttcagtgtggttgatggtgatgtaaccatcagtgtgacggtcgatacaaataaagtgcctacgggtgatttctactcagttgcttcaggtgatagttcatatacatacattattgatccgagtcgttatattttttcagcatttaaaaaatctgatgcggtcagttatgttgattcgtttagtacactgacaaagaactcaactgttttattcccgtttagtacattaaaacggaataacgtgaatgaaagcactgtaggttcacacgacaatattttacgtaacttcatccttgatgttcgagtgatgaatgctgatcccaataaatattatcgcttgcaacagatgagtagccccgatcaagcgacgaacccgaaccgctggatatttgaagaacttagccgctctaattttgatacaacagagacaaaaggtaaggcgattacagcagttttaccaattgtgaaaaatacggggattaagagcttttttgtaaaagatggtgatctcggtatttcagttacagtagatactaataaaacgccttctaatagcttttattcagttgcatcaacagataactcatacacatatatttttgatccaagtgtgtattcttatgctgccgtaactagctcagacattaatgcggtgaatgcacgtatcaatgcatttagtaagccgatgcagcttaaaaacttacttaatgatttacgtaatccaatccaagatgtgaatatcatatttgcacctgccgactctattacttatggagtgggtgcaacagataatggagcaggtcccaatcctccccatggacctgcaacaacagaaacttatgtgaacatttttcggaattatctaggcacagctttttgcaccagtgaacgttttgatgacactatcttggaaacaggtgaagcgtattttacaagcgaaggtacgagtgttttaagtgctgagcttgcgaactacacatttaagaatagtcttacaggtaaagtatttacactaactgaaatgcaggccttaattggtgtaaatccaagttcaccaacgggtactttccttgatattaaaagtccttcagtcgctggagcagtgacagatatggaatttaactttaatggaaatgcattcacaatcaattacgcaagactcggaaacggaagtgctactgaatcaaatattgatgtttttgtagatgatgttctgcactctagttttaatgtgtatacgacatcaccagcgtttgatggatctacaacaatcagtggattgccagatggttctaagaagattcgcattgccaatcgacttagtaattcaacaatctatgcgcgattggtttcaatcacagcgacacgtaaagtttcggtaatcaatgaagggatttcaggcacaaactctaagcaatggcttgataataactggattccagacaaaattagcaccaaagctaattatgttttcatgatgattggtactaacgatcggcacactacgcagaagatagggacatttaaaaatcaatatcttcagttgattgaccgtattactgcaaagaatccaaaagctcaaatcattatcatgtcaccaccagccgtgactcaaaatgaagatcccaatacgactgtgtataaatttaggattgcagatctgaattatgcattaagtcagattgcgcagctaagaggtcattcttttattagtctctttgaggcaacatccaagctcaaagctaaaggtgaaaactatttgtttgatcaaatacatccaaatgattatggttatggagtgattgccgaatacattattaatcaaatcttgaatgcataa

SEQ ID NO: 53125 - DNA, 264 bp, Acinetobacter baumannii
ttgccagtttctggagaaatgggtatggcagaaccagcaacatcaacaagcacagcaacatacggtttagtaacaaatttagcagggggtgggatggctttatatggcggtctttctacaactgaatggatggctgtagttgggggaatctgtgcctttgcaggtttgataattcagttgtggtccgcttatcgaaaagatcagcgagatgaagagttacataaaaaattgatgggtgaagataatcatgacaaacaagactaa

SEQ ID NO: 53126 - DNA, 549 bp, Acinetobacter baumannii
atgacaaacaagactaaacttttcgtaattggttcaactatagccgcctcaatgggcggtttttttatttttgggcctagtgatcagcaagttcaggctacggccgcaaaagagggttatacagctaaaccgaccatcccggtgaagggtgaccgtccgactattggcaatggcaccacattctacccggatggccgtgctgtaaccatgaatgacccggctattactcgaaagcaggcttttgaatatttgaaattcacaatgaataaagatgctaaagcgttcaataagacattgctaaatattccaatttcacaagctgaatatgacctttatctagattttacttatcagtatgggattggtgcctggtctggctcatccatgctgaaaaatctaaaaagtggaaagtataaagccgcttgtgaatcgttattgaaatggaaatacgttgcaaagcgtgattgttcaatccgttccaatggttgttatggggtttgggtacgtcaagttgatcgttatcaaaaatgcatgggggctaattcatga

SEQ ID NO: 53127 - DNA, 363 bp, Acinetobacter baumannii
atgacttggattttaaataataagcgatggtctttgatcattgtcttgtcaattctttacctaatccaaattggttacaccaatcatctagctggaaaggtaaaacaggctgagcagcaatgccaggcacaaatacaagatattgagcgtaagcaggtaaaagcccttgctgaagcacaaaatgagctaaataaagtgagtgccgattatgagcaatataagtcagagcaacgtacaaaaatcgaatatgttgagcgtgaagtgcaaaagatcgttgaacgtcctgtttataagtctgcttgtgttgacgctgatggcatgcagcaaatcaacgatcttatcaaagccggtaataccagctaa

SEQ ID NO: 53128 - DNA, 279 bp, Acinetobacter baumannii
gtgtctgttgattttaatcaagctatagaaattgccaaagaaaatgcaagaatcctactacctaaagcttcaagttttgatttagaagggattattttaaacaataatgagtatgaagttactttgagttatatgattgattattcagataaaattaaagatggtagtcaagatagtggagttggtttcataatggcagctttggctagaaaaagagaagaaaaagtttttatcgttagcatcaatggaaaatttaaaggtttccggaattctaaataa

SEQ ID NO: 53129 - DNA, 468 bp, Acinetobacter baumannii
atgaaaaaattaataattgatgcaaatttgcttctactgtatgtaattggtttaatcgacaatggcaactatattggcaggtctgatagattagacagatataataaaaaagattttgatttacttattaggcttctcataccatttaaggaaatctatgttactccatatatagctacagaggtttccaatcttattgacataaaagggaaagttaggaaccagatcttcgatatatatagtgctctattaaatggcgtacttttacaaattgactcaaattttaaagaagactcaaatttgcctttttttacaaaatttggcttaactgatgcctctcttactttcttagttaatgattattgtattttgactgatgatgaacgtttatgtagcgttttatatggtttaaaggcagacaatgtctaccaatttgaatttgtaaagcatttagatagtttattctga

SEQ ID NO: 53130 - DNA, 1293 bp, Acinetobacter baumannii
atgaaaccgcgtgttttttgcttggttgatgtaaacaactgctatgcaagtatagaacgtttcttcaaccctcaattaattaataaacccgtaattgtgctttccaacaatgacggttgcgctgttgcacgttctcaagaagccaaagcaattggcatcaaaatgggcgaccctttatttaaaattattgatttagttaaaagacataatgtcgctgtactctccagcaattaccccgtttatgcagaaatgagcaaaagatttcatgcaatcttaaagcagtttgttactgacaaagaacatgagacttatagcattgatgaagctttcctagaactcacagcatacaaacagcactatgatttagacgcttatgccaggctaatgaaaaatcgagtatggcaatggatcggtctgcccgtatgcgtgggtattggccgaagtaagactgaagctaaaatggctaatcatcttgcaaagacttataaaacatttgatggcgtatgtaaccttacatcgttcccaaccaatataagagatttgctttataaacagaccagcgtttctgaagtttggggcgttggccgccagcatgctaaaaagcttgaatcaatgggaattactaatgtttatgatcttatgatgtcaaacccatatcacatggaatcattgtttagtgtcgttatgaagcgtacagtgctggagctaaacggcatcgcttgcattgaaattgaagatacaccaccatctcgtaagcaaatcatttcatcacgcgcatttaagcaaaaaattactgataaagatgacttaaaagaagcaattgcacgacgcacacaagaagcattcacacgcataagaaaagatgaagccctatgcggctgtattattggttttgctcactctagcccatttgatgtgcataaaccctattataaaaaggaattatcacagtcgtttgccgtacctactgacgatgttagaaagcttgtgaaagcaacaacaagaatgatggagtatatttataagcctggtgtggacttcaagaaatgtggagtagttttgactgcactggagagtaagcacacttatacttatgacttactaacagattatagtgaattagaaaaaacagaaaatttgatgcaggctattgaagggatacaagggaaattcggaaagttcaaacttggatttggtgggagtatgtatcaaaaccgatcatggtcgatgtctcaaaatctaaagtctaataattattttacttgggaaggtatgctaactatttctaattga

SEQ ID NO: 53131 - DNA, 366 bp, Acinetobacter baumannii
atgctttcaaaatctaaaattgtgattgactgtattggccaagaatctttgtatgtattagaaaaatctggtagtgcaatttataagacaccaggggttgatactaattttgcaaaagatcttttaaaatcttataaagaagggcttcagaagctaaaaactataattgatagctcaccaagttatgataattcatattatgattttgagtttaagacaatgatttatgcaattgataaattattactagccataggaaacatcaaaagcgaagatgatgagattgaggctgctatttttcaaagctatcttcgaaaacaagatgagtctattaggaaaacaattgaagaagaggaagcgggttaa

SEQ ID NO: 53132 - DNA, 1227 bp, Acinetobacter baumannii
atgaaaagaacagaagtaaaggttggaaaacgcttagctgcgacggtattagataatttagaacccgacccatcagtaaaagaataccgtattctagacggtgacaatctctattttcgcgtccgtgagaacggctctaaatcttggcttctgcgttataaaaaagaaaatggtaaatggtcttggttaggcttgggtaattatccaagtgttagcgcatctatagcacgacgtaaagcttctgagctttctaataaggcaagtaacggagaagtacttaaatctagaaatgaaattcgacaagaaaaggtagaagagaacaaccggcaatttaaagtattaatagatgagtggttagcaaccaaagagcctaattggggctctgatacatttgaaaaagctaaaaaatcaatcaatagacatattactcctaaatttggaggacgtgactatacaaaaataagtcctaaggaatggtttgatttcttccaagggcttcaacgtgaacttggtattcatactcaagttgagaagcttacctcatattgtagaaatgcttatgattgggcaaagttccaagaaaagattaatttcaacccattagaaggcattagcaagcatttagataaaaatgttagcggaaatatgaaatttgtagagctcaatgagttacctgctttaattcatgctattcgttgttacccaagtcggcctttggcaattgggcttgagttgtttgtcttattgttccctagaccagtggaattgcgatatgccacttgggatcaatttgatcttgaaaaacgtgtatggattaaaccagctgaaattatgaaaaagaaaattactcatggtgttccattacctcaccaagctatagcattgcttaaagaattaaaaagttataagactgaatcaaatttgctcttcccgagtagagatagtttaagtaaacctatttctgataatacatttaatactgcacttaatagattgggttataaaggtagacagaatccacatggatttcgtcatatagcaagcactgctttgaataataagtttagcgataaagaacaagttgttgaagcatgtttagctcatatcaagaagggggtaaaaggagtctatgataaaggagcacactttgaagagcgcataggcatgatgcagtggtgggcagactatatagacagcttaatgatgaaaacagttgagcgtaagtga

SEQ ID NO: 53133 - DNA, 717 bp, Acinetobacter baumannii
atgccaagttatttaacgattgatcaagtcatagaaactatacgttctcatctagacaagactttcacctttatgaacttatcagatttagtagcacagaaggtactgaatccagtatttctttataaaggttatattgctgttgttagtcaaaataaagttattaattttgagaacagtacgtgttatttaaaaccaaagatatccaatgatttaattaacttacttgatggtagaaaagaaaaaattactatttcttggttggagagttgtccatatacagtggatggaaattttgataatcgacttttagaaatacttggttgtactgaaacaggatttctcttatacaattacaatgtagaagactccccaatgtccttaccaaccgatttagatttctttttacatagccatccaccatatgttttttctttggaaaggtctatgttgaaagtagaaaaaaaagaattagaattgtttttaaaacgaacagaaaaaaatacctactcacatgctgatgaaaaaaatttacgtatcattggcgctattctaaatgttcttgatcaaaacccttcaagaaaaattaatcagtcctttatagctgcgcagatcgaagagatgactaaaaatactgaggcaggaatgtcatcctcatctttaacgaaagtttttgctgatgccaataaagctataaaacctttcttaaaaaaatag

SEQ ID NO: 53134 - DNA, 282 bp, Acinetobacter baumannii
atgaagaaggctaactttcaattaaatacctatactattctttgcctgaggtacttagcacccgctattccgttagagctagtagctcaagattattttactcatttagatattaagacaataaaaagaagagctaacttgcaagatttacctttcccagtattcaaattggaagaaaccaaaaaatctccttggatggtgagattagaagactttgcaatttttctagacaaacaatacatatttcataaacacgattatgatgctatgcgttcattgtaa

SEQ ID NO: 53135 - DNA, 204 bp, Acinetobacter baumannii
atgaaaaaaagctatttacaagcagctttaagcacagcattgatggctgtaatctatccgagttacgcaggtgtaagttttggaaatagcgatggtgaatacggcaagctcaccgtatcaggctatgttcgcgctactatcaagataaacactatggagagtctgcttctgatcaaaaaattcgttttgatgctgcgcagttaa

SEQ ID NO: 53136 - DNA, 1221 bp, Acinetobacter baumannii
atggctaatggatttccaggtggaaactttagaatcgttaacaaagaaacaggtgcatgtatcgcaagcgcatacggtggacaaacccgtggtgtacacacagtatctagacgtggtgaaacggctaattttgaatattttcatacaaatgaccgactatttacggtacatgacaaggttaaaaacatagacgaagagctttggtattttgctcgtagtccaaatccccatagtcgtggacactataaactttataacaaagttagagatatccgttctagttgggtgcttggtgcttatgtaaagacaaaagtgattggatttaaactgaaagaccatgccttagaaaattttattagccttttaccaaagcaagatgaagaaacacttgcccacttaagaaccaatgatagtcttgatatcgctgatttattaagcgattttattcatattaatggtgaagaaacgattaaatcggaacttgttggtaaacttgatgggactaatctaaatgactttttaaatccagtcctcgctcataagtcaattcgtagcattgagcaaaagttctataaacttgcttccgttccgtttctaggtgtagaccttcctgaatttaaagatttgcctgataatcctttcgctctgcataatgaacaactctataagatcatttttgtctctgtccaattagatgtcttagatcaaaaagattggcaatcagattcagtgttccgattgtatttacgccgttacaatattaatgagcttctaaataaaattaaaaaagagcagcttgaggaattacaagtaaaagcatggacagagcttcaagatgtagaagaccctcaaaaagaagcagtaaaaattattttagagcttagaaaaactctagatttacatactgatgagaaaaatatggatacggccaaaaagattttacagacagcgttaaagtcaagtgagtcttttgaacaactgcaaaccgcattaaaaagtataaatgataaagagactgaagcagttcattggcatagtggcgatattttcttacaaggagctggtcgtgagtaccaaactaagtgggcatttgaagatggttatatctttgtagaaggccaaccagatgcggtactgacacatctctgggattcatatgcaactatcagtcaacgctctacaaatgatccgagacagcgctgggaacttaaaagtgcttaa

SEQ ID NO: 53137 - DNA, 594 bp, Acinetobacter baumannii
atgatttcatggctttttattggcttggttgccactattttacttacccctggcccaacaaatactttacttgcatcatcaggagtacaagtaggccttaaaaaatctgctaaattaattccagcagaagttctagggtatgtgatttcgatttcagcttggggaatgttaatcgggaaagtttctgcaacgcttcctttattacctcctatacttaaattgctcagtgcttgttatattatttttttagcaattaaattatggcacacggcaaatcaacagcttgaactagatcagccaactattcgcccacgtgaattattttgtgcaactttactaaatcctaaggcattactttttgcttcagcgattttccctgttgcagcgtggactaattttcatatttatctcattcatatgctggcttatttagctttaattaccccgattgccttattctggatttttttagggtcagtcttggctgctaataaagtacgttggttaaatcaatcaaatttacaaagaacagcctcgttggttttagttagtttctcaattccaattagctattcggctttattaaatctttaa

SEQ ID NO: 53138 - DNA, 273 bp, Acinetobacter baumannii
atgagtaaagaagtgacagaatttgatttacgcagaccagaattccaagatccaatgataaagcctgagcatttcgaatttgattcagaaggcaatattgttaggaaagatcgttttgaaaagctagcgagaaagctatatggcggactttgcgaattggaactaatgcatccttgggaaaaatggacacctgaacaagtctgggaaataactaagagtgttttagaggaatatcatcaattgaagaataaagcggaaagtatggaggggtaa

SEQ ID NO: 53139 - DNA, 363 bp, Acinetobacter baumannii
atgacagatttgaataaggaagagcaagcttgcttaggtgcatttgaatctatgtgggatggattttgtgaagcatatggtaatgggcatgatcaagccttagctaagatgtttttcatcggagcatggtctcaagccaaagctcaggcggtgctagagaaaaagatttacttaacctgtgagcaattatatgcagcagcaaactttggtgcaccaaacaaagatccagaacttttagaaactgaattaacaattgcttggtttgatgaagctcatagcggcagtggttactacgtttatataagtgagtatccagaagaaggtgcaatgaagctggaaagcgaatcgggagctgagggatga

SEQ ID NO: 53140 - DNA, 2277 bp, Acinetobacter baumannii; identical to SEQ ID NO: 46341

SEQ ID NO: 53141 - DNA, 891 bp, Acinetobacter baumannii
atggatatttatcggtacacagaaaatctttctttattcgttgaaatagcaagatgtggttcattttctgcggttgcacgccatcacggcgtaaacccatcatctatcatacgaaaaattgatatgcttgaagaagtaatgaaagccccattatttacacgcagtacacgtggtcttcatttaaccgaagtgggcgatgcattgtttaatcgtgcggtgggggtactggaagaactcaaggatatgcgagatgaaatcgtttctttaaatgaagcagtgacaggaacattacgcattagttgtttgccaacatttgcaaaacttcatattttcccttggttaccagagtttaaaactcgttatcctgatgtgaatctggttcttgatttgaccgagcaacttgaaaatccatcaatagaacgccttgatgcagcaattcgcattggtaaattaaaaaatagttcattgtattcgacaaaaatagcgcatcagatttgggttgcctgtgcaagtccgctttatattgagcaatatggtatgccgtctggtccagaggaactttctggtcaccatattttggacaagtaccatgatccatacgccgtatcgtggagtcgtatcattgatacggagcagagagaccatcgcttatatatgcgttgtaatgactttgacgcgttacggaaagcagctgtttcaggattagggattgtatttctacctaactgggtggttggagaagaaattaaagcaggtagattggtcaaagtattcgatgacccacaacagaaagttgatgatattcatttcctgcgcgcacttcctaaaatgacgcctaaactcgctgcgtttttacagttcttgcgagataaccttatggctgccatttaa

SEQ ID NO: 53142 - DNA, 1182 bp, Acinetobacter baumannii
atggaaagaacacaaagtagttattttgctctggcttgtctatgcgcttttgctgttgccaatatttactacaatcagcccttgcttgcactttttgcaaaagactttgcagtcgatgaaaagtatgcaagttctgtggcgatgttcgtgcagttggcgtatgcagcaggccttgttttcttcgtgccattaggcgatcgatttgaacgcagaaagctgcttatgattctattgggtgttaatgctactgcttcagcagtagcttctttcacgcaaacgattgaacagttaattgcggtaaacattgtgattggaatgaccgctattggcgcacagatagttattcctatggtatctatcattgcacctgccgagcaaagaggaagagcggtcggaaccgtgatgagcggtttaatggctggtgtcttgtttggcaggattctatccggatttgttggagattatttgggttggcggtcaatgtacattgtcgcgaccttactagaccttactttgctaatgatggttcctaaacttttgccctacagtaaaccaacggcgtcacagatttcctatcctgcgttgctaaaatcgcttgtcacctattttataaaagaaggtgatctcagattatcgtgtttatgtggtgcgttaatgtttggcgggttcagtgctttatgggggggacttgcatttttacttgcacggccgccttatcattttagtagtgatattgtgggtagtttcgggtttgctggcattgcaggcattcttgctaccccttacattgggaaaatggctgaccgttatagccctagagtaatagttttaacaggaagtgttatcgcagctttgggctttatctctgtattcttttcttctcattatttgctggcattaattgttgctcttgtttttctcgatattggaggtcgagcaggtctcgtcggaaaccaactgagagccttagctttatctacagaaggcagaagtcgtttaaatacagttttcatgtgtgcttattttataggtggcgcggtaggaactcgtataggtgctgaaatcagtgtccagtacggatggactggcattgctgtaatgggtttgattgtttcgtgctttgttctcatgctcaatgtaagagaaaagaatgagaataaattggttaatgataccgcctga

SEQ ID NO: 53143 - DNA, 1143 bp, Acinetobacter baumannii
ttgtacagcaaaaaaaatgtcttattaacaggcgcaactggttttattggttcatatttactagcagaactcttagtaaatgaaaatatcggcaaaatttatattctctctagaaaggtagataaaaataaccaaaaggaaagattatttactgcatttgagaaattttctgtgcctcatcctgagcgattaatggccgcaacaaatattgttatgattgaaggtgatattacacagccccgcctcagtatttcagactcagcttatgatgaactctgtgcagaggtagatgttattcatcatattgctgcgcgtgttaaccacattcgaccatatgaagtgttaaaagcacctaatgtcgacagtgtttcagacctcatatgcatggcccaaaaaggtcgaaataaagttattaattttgtttcaacattaggttctgctgcgaagaaagatgcagatggccgttatgttgaagcctttcctgataatgctatccttaactcggatatgggctatttactctccaaatgggaagcagaaaaacttctagaaaaatttcaaaatcaaggtggaaaagttaaccttttcagacttggctatatctcaggccacagccgtactggagcttctctatttgccgacaatcagtttatgttatttatcaaaagctgcattcaattaggctacgctcctatactccctagaacgattaatttcactcctgtggattacaccacggcaattatggctcttcctcaatatatgtctgaaggaggagatgtactcaatctatttaactattctggactgatcaactgggaggatattgtttcttggctaaatttacgtggatataaaattgaaacaatagaattttatgaatggcaaaaaaagcttttagttgatagtgaaaataatgcattgttccgtttccttccactttatggtgttgaaggttcccacaataaaattctcagattcgggcgagaaattgataaatttgatttccaaaatacggtgacagccactgaatgtctggactataagttaccagtactgaaatacgaattactggatacctacttaagatatttacagtcggttgaatttttacctatacctcaagttgtaaatgctgcttaa

SEQ ID NO: 53144 - DNA, 270 bp, Acinetobacter baumannii
atggctgcttatacaagcaatactcaagaatatttacaaagagttagtcatgatagagaacattggactagctcatatacggcgggtgatactgttccagtttcaggtatttacaaatgtcaaggttgtaataaagaaattacaagcaataaggatgatccatttccgccacaaaataaacatcaacatactgcattacagggtaaagtagtatggaagttgattatacgaacagatactaatggcgataattttggtttgagtaaatga

SEQ ID NO: 53145 - DNA, 369 bp, Acinetobacter baumannii
atgactcctgtatttgataaatcatgtaatttagtttgttggttagatgaggacggtcatcatttttttgatttagatcttaaatggattgcatttgttgagggtggaaatatatttcatagtacaactttgaactggctaggaccatatgtagagggaagtctaatagataccactggtaaacctgtagcttggttagaaaatactacacctgtaggtacatttaaaccgaccaaaccatttaagccattcaagccatttaaaccgtttaaacccttcaagccctttgccccatttaagccattcaaaccctttaacccattaggtggctggtctaatttaacatttaagcaatggttggcccaataa

SEQ ID NO: 53146 - DNA, 588 bp, Acinetobacter baumannii
atgccaaatcaatttgaaacacatacttcagatgtgggaactacgattcatttaaaaatgaatggtgagaatttagaaaatttaataatttgggaccgtgtaatagtaactacatatgacattttttttgtatgtattgcttttgaagcatatacagaaaatgaagggattcaaatatttattgtactactattatttttattatttcttttctacaagcactatgaatatagaaaaaataaacgatgggctaagaatgccgaggaaacattttttatttccaaaaataatcttcgcatttccaaagactgccttgggaaaaatttgttaacaaaggatattaatactcagaagattatagagattgtctacagaccttggagtggtggagcatatccaccttttttgccagagttccatcaaggtactattcacttaattggttatgatgatggttgttcatttggtattaatcttaacaaagaagaagcagaggcatttattactgaactacgttctttaattatgcaatgccaagaacctcgacattttattttcgcaccacatatgcacttggcaaaagattga

SEQ ID NO: 53147 - DNA, 543 bp, Acinetobacter baumannii
atgaacgaaaaagcaattagccaatatttaagttttatccttagacacaaaccagaagaaattggtctgacattagatcgcgaaggttgggcaaatattgaagagttaatttcaaaatcacaaccagtcaagaatgtagctttagatgaagagatcattaaaaacatcgtgagcaatagcgataaaaaacgcttccaaatttctgatgatggaaaacttatccgtgctgtacagggtcattcaactacaagtgtagatatcactcttaacaaacttaaaccgccaacttatctttatcatggtacggcacaaaggtttatagattccataaaagagcaaggtttaatttcgaaagatcgtcaatatgtccatctaactgaaaatagagatacggctctaaccgttggtgctcgctatggtaagcctgaaattcttgttattgatgccttaaaaatgcacgatagtggatttgagtttttccaagctgaaaatggtgtttggttgagtaaacatgtaccaatagaatttattgcttttcaatag

SEQ ID NO: 53148 - DNA, 528 bp, Acinetobacter baumannii
atgaatcacttagtgcccgatttgagtaaagatatacttccgtcgaaagaagcagcaggaatttctttaggaatggattttgatgagttccgaaattcggcactatttcgagatgtgggaatggaggaatttgaatctgctcaagagaaaaatatttggttagttcttcatagatatgaattattgccgtggcaggagtggattaacgaaatttattgttcatgggaaagtagtgttacgttaacatttgatggaaattcaaagaaattaatacgaatttttcttggtgaaggatataacggaaaactattaggtcttttagggataggtgatcgcttagatttagttaaagatgattttaatttctatttttcatgtgatgcgcactatttagaatataaacaagatagcgatacgtttggtgaaattattcctgcagaaatatcaacaaattataggactgcttattcagaagaatattcggaccaaattattgaagggattatgatatatacaaattctcattaa

SEQ ID NO: 53149 - DNA, 1098 bp, Acinetobacter baumannii
atggaagtttataaggatgaggacggggagaagcatcaccaagtattaagacacccttattcacggcttccaacttcatatacaaagatggctttcaaatttgtacatgaaggggctgtttatccgtatgttcaaatcaaagcatcactagctaagttgcttcaaggtcataatgtttttgggtcggatgacatagagcagggtgcttatgaaatgatcggcttcttgcatatggcatatccagtattgaccaagatgcttgattggactcgcgcttgggtttctcacatagatgtaacgtactcagccaaattgtcggatcagacaacggctaaaaaggttctggattttctggccaatgtcagcaatggtcaaactagactttctaataagcggtttgatagctcggtatattggggtggtcagacttccaaactcgtaaatcataaatactatttaaagcatgataaatttctttctcagtttgaagaacttaagcaactggcaaagaagaatgacaagtcagctcaacgagttgtcgatgtcatgtctgactcaaggttaattaactggactgtcggacttttacggtttgagtcacgtttaaaaaaacgttggcttgagcgcaatggagtaccaacgaacctttatgaacttatagcatttcagaaggcaaatcctaatttacttcaaacactttggactaaagcaacgcacggaatatttgatgccatgagaggtcaaactgtgaaattgattaatgatgaaagtgttttggaagccatatctaactcgccagttgtcgttaccaatagcggtaaggtttctcaaacatgtatccgaaatatttattctacgtactgtttagtatgtgaacatggcttagagaagctagcagagatgcttcctaaacctacgttttatagacatttatctgaactttgcgattgtggcttttcaaaagcatttttgcagaacttgcatgacaacaaggctaaaaatgtcattccatttatgaagctcgtagaaatcgacttttcccaacaattgcctgagtggtatgagccaccagtatcgcaatttaaatcagtagcttaa

SEQ ID NO: 53150 - DNA, 210 bp, Acinetobacter baumannii
atgagcttagagatgcgtgaaatgtcaaagacttatcgagtcaaaaccgaatatgtgtcattgatacaaaaaacacacatagattttattttaaaaacaagattgcctattgatgaggctgacatagtaaatgcattaattgccaagtatttgaaagacttgaaagcagaagatgtaattgaatggcagaaagaatataaagagaaataa

SEQ ID NO: 53151 - DNA, 285 bp, Acinetobacter baumannii
atgaaaattcataaatttatattggttttaaaccttgtgttcggtgcttacagtattaccaatgatgatgccaatgctcagcaggaatttaaaagaatttgtttgtcaggtgaatacatgcaagccagttgcgattgtatttgccaacagcttgcacaggtgtattcacctcaaaccctacaacgtttaaaacacaccagtttgcaatgtcctgatctcccacaggtctttgctcctaacttgttcagcagcattcaacgctgtgacaaaaataaaatgggctaa

SEQ ID NO: 53152 - DNA, 1209 bp, Acinetobacter baumannii; identical to SEQ ID NO: 46315

SEQ ID NO: 53153 - DNA, 960 bp, Acinetobacter baumannii
atgtctaatttattaactgcagctgaagcatttgcagctcttcaaaaaggtaaaactgttctatgccgtcctattggagacgtgtttgacttttctgacttagatcaattccccgcttctgtttttggtaaaccgggttttgaattctgcatcaaaatcgaaactattgaactggctgggattactttcacaaagccattaactattgatgagtatgaagaaggacaggatgtttttgtaattactacatattcgccttcaatttacatcgtgaattttaaaaccaccgcattaattgaatctattaatagtggttttgttcaacgtgatgccgaaaacgccaagcttcaattaaaagcattttcaaaagcactcggtattgaaatcaacaatgatttaagtgttattcgtcttggtgaggaacctaaaaaacagagaggcaaaaaatcaaaagcagaaaagcctagtgacgttatttctgcagaaactcaaccaacgattgttattaccaaacaaacaaatgtcaccacatctgaggatctgttagttccagaaactaacgagcctaaagtagatcctgaataccagaaggcattagatgctcttcttcagcgtgtaaaagaatcaaaaacacctgcagaagtaaatgcggtttatcgttatacccgcacatgggatgacgaacaaatgaagcctatccttctcgccactcacaaacgtcttgaagagctagaaaaagaaaaggcatctgctaatgagccaccctctttaatggttcaaatccaaactgcaccagaccttacaacgctagatgctttggaaatagacgtggctgcacgagatccgcagattcaaccgaagctaatggggtatgtgagaaaacgccgctatgaattagagaatcctacacctactcaacaagaatctacccctgattatttattagtggacggtttctaa

SEQ ID NO: 53154 - DNA, 1488 bp, Acinetobacter baumannii
atgcgcacatctgaaaaacaagtaaaacctattgagattgatgatatcaatatcatcgagaacgaaaaaaccaaaaaagcgattactgcagctgcattaggtaatgcaattgaatggtttgatttcggagtttatggttatgtggcatacgttctcggtaaagtatttttcccagatgcttcaccaagcgtgcaaatgattgccgcgcttgctacattttcagtaccttttattttccgtccattaggtggtcttttctttggacatttaggtgacaaatacggacgtcaaaaagttctggccattactgtcattattatgtccatcagtacctttggtattggccttattccatcttatgaaacaatcggtttatgggcacctattcttttactcatcgtaaaaattgtacaaggcttctccattggtggtgaatactcaggtgctgcgatttttgtagctgaatattctccagaccgaaaacgtggctttatgggaagctggcttgattttggatcgatagccggctttgtatttggggctgcaactgtcgccttgatcacacacgccgtgggtgaggcacgttttgccgagtggggttggcgtattccattctttctcgctctaccactgggcataatcggtttatatttacgaaaccgccttgaagaaacccctgtatatcaacagcattcagagcaacaagcacaaaaaagcaaacctcaaaaatttagtttcaaagaaatttttgttaaacataagcgtagtttattggtgtgcattggcctcgtaatcagcactaacgttacttactacatgttgctaacttatttaccaagctatttttcgcataacttaggctattcagaagcacatggtgcagttattatcattgcggttatggttggcatgttatttgtacaacctgtgattggttatttgagtgataagttcggacgtcgcccatttatttttattggaagcttttctcttattttcttgtcctatcctgcctttgtattacttaactctggagtaaattatcaaatttttataggcttacttattcttgctttatctctcaatatgtctatcggagtgatggcatcaactttacctgccctatttccaactgaaatccgttatagcgctttaggtattgcctttaatttctcagtggttattgctggtttaaccccaactcttaccgcaactctagttgaaactacccataatctgatggttccagcttattacttgatgatttgcggggtggtaggtattgctactgcaatgtatttaaaggaaacagccaataagccattaattgggggcgtgcctattgctcacaatatagaggaagcacaagagttacttgaagagtttcatgaaactattgaacagaaaattgaaaatattgatcagaaaattcaggagcttcaacaaaaacgtcaaaaacttgctgataaacaccctgatatagcatga

SEQ ID NO: 53155 - DNA, 204 bp, Acinetobacter baumannii
atgcaacctatccgtgttacttataaccaagcatgtgaattactagcaattaaaagagatgctcttcgcaatttaactttaaacgatgcaacttttcctaaaccttataagtatgggaaatcccgacaagccccagtatattttgattatgctgatttagtgcaatggcataactctcagaagactaaccgtgtggttgggtaa

SEQ ID NO: 53156 - DNA, 318 bp, Acinetobacter baumannii
atgacaaaaattattttatttagacctcttgcaactaatcttcagcaaggctattctaattttgtccaacaaaaagcagttggattagctttggtcggctataaactcgttagcgtacaatccgcaatgtgcggtttttttgtgcgtataatctctatgcattcgcatatctctatggcgaagctggggagggacacttctacgtgtgcaggtatcctaacgagcctgtcgaccaacccttttcagctttgccaccctcatttggtcgtgaatggcaaagcttctatcaattcgttaggagtatttcctcatgtctag

SEQ ID NO: 53157 - DNA, 249 bp, Acinetobacter baumannii
atgtctagacatacccaaaagatcgatcttactgatttccaagatcatgctgaaattagccgagatcaaataaaaaaactgtgggcattatttagccaaattcaatttaatttaaaacaagaaaagatacatccatcgaccgttcaattggccgaaattggtaatttccttgcagatatgtgggcctatgataataaagaactttatgaccaaataactaatcaattggaggaaactccgaatgagtaa

SEQ ID NO: 53158 - DNA, 345 bp, Acinetobacter baumannii
atgagtaatattaaggttgatatagtgcaagaaatgatgcctttttgcattcaaaaggtatcaaaaagagaagggccattttcagcatacgatagcgcaatgcttgcagttgattacgcgaatgcattgattgaggctttaaaagataaaagtgatttgcatagacgatttgcaacaaaaatgttgcctatagcttctaaacaaatcgatgacagaaatagtgcagcatatcgagttttaggctcatatgaggttaaacagccaattaaaagaagtgcagaattagctgtctcttttgccgattcaatggtaatagctgtggatgagggaaatttaaatgattga

SEQ ID NO: 53159 - DNA, 2682 bp, Acinetobacter baumannii
atgattgattctatctccattctcaaacactcggctattcctttggctaagacttggcgtattgatggtagtgtcactgcctatcaagatgcaaagtatttttccttaatagaaaagccgataagtaatctcaaggatttatctggggttcttcatgaactcgaaggtgattctaaagcctgtgttatacgcggtatgtataagggggatgattatgctagacaagtagatagtgaatttaaacaaggcaatgtccgtcgccagaaaagattgtttgaggacaaaccccatcattgggtacttattgaaattgatgattttaagccattacttgctgatcctatcttagcgcctgttgaagcaatcaatgaatacatcacatcatgtttaccggattgttttcatgaaatttcctaccattggcagttatccaatagtgcggggcatcttaagaatatcgataaactaaaggcccatgtttggttttggttagaaaaatcttatacaagtgatcaattaaaggcttgggcagagcaaaataatatcgctttagataaatcagtatttaatacagtccagatccactataccgcatctccaatattcgagagggggatagatgaccctgtacctgtgcgtagtggatttgtcgaggggttatttggtgacgtagttagtttagaaattctacttaaaagcgtttctactgaattatttaaagtgactactgtagatgatgccattaatgacccatttgcagggatagaaccgaaagttgggttaactttaagtgacgcgatttctctgatcaggtttattgatagcaatgattaccagacatggcttaaagctggtatggcattgcaccatgaatttgatggtagtagtgatgctttagctttatgggatgaatggagtcaaggctcatgtaaatatgaagggtatgacgtttgccaagagaaatggtccacgtttggaaataatgggcacaatcctgttaccgcccgttggttattaaaatacggtggagaggcaactaaaaacgcagagaaccaggaaaagcatcgggcaatggatgagatgaagcagctcattcttgattgcaatgatagtgttgttttaattaatgatatcgcgaaaaaagcgggtttgaccgctgttggcgatattgctatgcgaaccgaattgaccggtttgatccgtgctcaatttaagaggattaccaaaacctcattgcctttaccggatgcgcgtatggcaatgaacagtgctgttccttctaaaacaaagggagtggatggacgccatgaaatgactgagttgggtaatgtaggacgaatgattgaccgctatggtgatgatcttatgtttattccccaaacagagacttggtattcgtggaatggattttattggcaaccaatcacagcagttgagattactcagtatgcaacagcaacaattaaagccctaccagatgagttaaaagatattcccgacgatgatacgcggtcaaaacatagaaagttttacattgatagccaaaaaataaaaatggctgaggcaatggtgaaatgggctcgaagtgatgagcgtttacttaggaatattaaaactttggatgctaatgctaatttattggggtgtgctaatggtgtcattgacttaacgacaggtattttactcactccagatcgggaatatatgatttcttatagtaccggtattgaatatagcctaagtgcacgatgcccggtatttgaacaaactgtactggatgcattctttggggatgctgaaatggtcacattctttcagcgcgtgattggctacattgctttaggtcagccaaaagaaagtatcattcttatcccttatggtagcggtaataacggtaaatccacaatttttaagagcatcgcacttgctctgggcgattatgctaagacagcaaatgccgatacatttttgggtgatggtagaagcaatagcggcggtgctcgtgaagatattttgcgtttacgtggatcacgctttgtttattcaactgagcctgatgaagggaaggagctaaaagaagggctgataaaagcgatgacgggtggcgaagctctacctgcacgtgggctgtacgcccgacatacagttgaggttcaaccaacttggacagtggttatgccaacgaatcataaaccgattattaaaggcgatgattatggtatttggcgtcgtattatgcttgtaccctttacacggaattacgatgatgatccgacaattaaaaaagatgtaaatcggcctgcaaaacttttaagagaactaccgggcattttacggtggattgtcctaggagctttaaaatatttgcaagagggcttaaatccacctaaaggggtagttcaggctaaagaagagtatcgggatgaaatggatctgcttagggactggatgagtagctgttgccttttgggtacagatatacaaacaacttcagaagacttgtttcaaagttggaaaggatatgccgaaagaaatggtgtgttaagacttataccttctaaaaatcatctttcgagaaagttagaacccaaatttaaaaagaaaaatatcggtgaaagaaagttaaaaggttttgttggaatcggtttacgaagcgattttgagggagttgctgatgtttaa

SEQ ID NO: 53160 - DNA, 516 bp, Acinetobacter baumannii
atgaaaaaaatttatatatttcttttttttcttttctccttgtctatccatgctgaagaagttgtttcagaagatgctgcagattctaaggattttcagcaagactttaaggatgagctgtttgggcctaatacaggatatagttggatgggtgtaccaacagaagaatacgatcaaaaagttattttaggtgctcgaagtatttattgtgccaaggttgcagatattcttgataaacccttggaggctataaaacttttcaataaaggtgcagaaagtttaaatgaatattctaatcaattaaatgtcagaaattctgtttcaacaaaatataattctattttgagattttctaaaccttcgtatgttttaggaagtgacgtcattaaaggaatgataattgaaagcatcatatcttcaattgatgagcagttttacacattaggcagtgataaaaaagcaagacaatctcaactaaagattttttattctgatgaatgtacttcatacctctaa

SEQ ID NO: 53161 - DNA, 1029 bp, Acinetobacter baumannii
atggcatcgactccacgtattactaactatgatgaaattttaggtctaccgggttttttagaaaaaaatttaattacacctaaaaattttgattcagtattttctgattatcaaattcgagacagagacatgcattgctgcttgcttagtgatagaggactttgtaatcataaacacaactttggttatgtgatccagctaaaagatggcactctaagcataatgggcaatgactgtgcggaaaaaaaatttggcgcgaatggaggtattattcaaggaattaatctttatgaaaatactaaagaagctgagaaaaaattaggtaaggtttttgactttgctatccgctttgatgaatatacagaaagattaggtaatatcgtagtcaaattaaaaaatatagaagatttttactttaatttaaaacttaatattggttctagaaattatttaaaactaaatgagcgctacaaagcttctaatacaaaagttgaagtaaaggcctacaaattaggaaaacctgatcctgataatccggatgaagaagctctaatttatatgggaactcataccattggtcatatatcatcattaaatatttttgatgatagaaatttcaaagaatttgaaaagaaagtttccaaacttcgtgaggcgctgagagatgctttaaaatctcacaatcaaattattgaaggtgaaaagatacaacctgctgtagtacggaaaagggtcaatacgatactgagtcaattgaattcttttgaagaggttgaatcaataattaatagtcgaatttctgatattgaaaaatttaaaaaaacagatccacaaatcctatgttacttaactgatgattatgaagagtcaaaaatctttgcctctttaagtatggcctttcacggaattgaaaacatgaaagaagaaatatacttaagaagtttagaaattaagtattctacaactttcagatgccatagaattaaagccgctgatcatagtgttatgcgacgtccacgtttttattaa

SEQ ID NO: 53162 - DNA, 384 bp, Acinetobacter baumannii
gtggacactgaaaaattaattgctgaatgcaaagatttggtagatacattggctgagtcaaaaaagaagttgcaagatctaatttctattaaggcaaattattatgcattgtcgggagagtctgtggaggcaatcacgcaggttgtcatgtttgattgtgacacaaactttaatttacttaagcaggaaatattcgacttctacttgaaacgttatggaacagaatcttttatgcacttagttgatgcggaattggaatccataaaagaggaaatgaagttgagctccatgaaaatagtgttaaacactcgagttcaagaaaaaattaaaagaacggaagaaaagcttcaacgcactaaagaggatacatctaagtattcataa

SEQ ID NO: 53163 - DNA, 255 bp, Acinetobacter baumannii
atgactaccgaaataaaatttgttttgataacagctgacgaactaacaaaattattggaagaggcatgtgaacgtgcagttactaaggtattagctaatcaggaggatgagttacttaatataagtcaaatatgtgagcgaatacctggtatgacttactacctttttaaaaacctctgcaaagaacaaaagattaaaagcatacgcggccgttactcattaaaaagggtaaaaaccgcattagaatctacctaa

SEQ ID NO: 53164 - DNA, 297 bp, Acinetobacter baumannii
atgaaaaagaaatacatcattactcttgaaggcgatgtcccacccaaactcttcttaggcgaagaaatagcaggttgcaggatcattgaattaagatcagaagaactgccaagaagagttgatgctgcatggctactagaacggtactcactttcaagaaaatcgcttatagaacacctccgcgtatttaataaagggaatgaaggtaaacatctttatgatccaaatgaagttatcccaattttagataacttacatttgctaaatataaaaagagatgctcggcggaaaaactag

SEQ ID NO: 53165 - DNA, 945 bp, Acinetobacter baumannii
ttgatcttaaagagtaaggctggtctaagtaatgaaattaatgttcttagttatgttgcacatgtaggtttaaagggaggtattaatgtggctaacgatctaaataaatttataagtggtattcgagtatttgctcaagaagtacaagacttcttgaatagagatgaagtgaaaacttttgctattaaagttatatcaggcatgcaactattaggtgaatttactcaaaaattttatacatatagccaagatcagaaaaaaatgtatatcgaaatgagtaaatttggctggtttccttcatacataaccttcaaaacaccagtattagaaggcgaaactgctgataattatatggaaaggtgcttaactgaaaattatgaggatataaaaagtattattttagagagctatccaaatagaaagtacatattagatgaagcttttaatttgtttgaagaaaaccgttatatagcagcaattcctttgttcattagtcagttggatggactaagtgctgaatatggattatctccatatttcactaataccaatcttccaaaatctcaaagaagaaatcttagtgaggatcaattatttaaacttgaaaaatttcccatatatttaaaagaggctttaaagaatgaattattaggtcaaagtcaagaaattatttcatattatgaagaagttattgaaaatgcatgtaattcatttattttaaaaaatacgaattctgttgatacggacaatcctataaatattttgaatagacatggtattctgcatggacatgagagttttttagattatggtaacaagagaaattgtttaaaaattatttctttatttttgtttgttgatcatattctatcattacttgataaaaatttagatcaagtagctaaaactgaaaaggaccccttaactaggaaaaatattagataa

SEQ ID NO: 53166 - DNA, 282 bp, Acinetobacter baumannii
atgcgaactttaaatatagaagaacttgaaactattggtggtggtgctgatgattctaattctgctgcaaaaggtaaaatagttgatggtgttgttgcatgggctctcggagaaatgggagaaaaaacacaagaatatgttgaagcgtatgatagaggtgggatgactagtgtaattgttgaaacaccagcattccaagccataattggtactacatcaatgattggtgaagcattaaatgctggtactgactattgcggtggcagtacagattatagttaa

SEQ ID NO: 53167 - DNA, 1218 bp, Acinetobacter baumannii
atgatctctcaaattttatactttaaaactttatactttttaagaattatttttatgattaaacttgatatctcacctgataaatttcggaatgaattccaaagtaaaaaaccatttcttgttagaaattcttttgtccctcaaataactgatcaacaaattgatgaagtagtgctgcgtgcagatattattcaagatgacttcaaacttaattttgaagggaaagttctaccaaagaataaatatgttgaaagttttcaagatgtaggaaaaatacgtcatcgatttataaaagcggcgctagtggattatatgagacgtggcgcgactcttattgctaataaattatataatgagcctttaatatataactatcataaacaaattgaagaaatagcgaatagacctgcattatcaagcctatatatcagttacgggaatgaagatgatagttctttccgtgcccattgggatacacgcgatgtatttgttttacaattagtgggtcgaaaaaagtggatattgtatgagccaaattttgaatatcctttaccaagccaacaaagtaaagatatggaacacgtagtaaaatgtccaactactgaaccttatatggatgttattttagaggaaggtgatttattatatgttcctagaggatggtggcatgatccagtaccatgtggagagcgcactgttcatttaagtgtaggtacatatgccatttatagaaatgattatttacattggattatacaaaatatcttgccaagttatcctgaagctagaatgcatttagattcatataattctattgacgacttgactgcatatgcaaatctcatccatgagaaattaactgatccggaattattaagaaattttcaccgcatacatgctgttgaacattatagaacaaatgatacattaaatttaaatagtttatgtgaccctaatattgaagaaatacctgaagaaaaatcactatatattaatttatttcattgcgtggaggatttagaaaaagatattattgctaatggtacttttttaaaaattgaaagtaggcctgaaatgagaaaagttttacaatgtatacttgatcacaaaggtatttctactgatacactgcttaaaaaaataccaaatcttgacaaaaagtatattaaaaatatgctttttaaattagcttgttttgatattattcgttttgattaa

SEQ ID NO: 53168 - DNA, 174 bp, Acinetobacter baumannii
atgtttgtaagacacaataatgtaattattaatacatcaaagattactttcattacagtccgtgagcccttgaaacacttgattgttcattttgaaggggacagccaaaaaacattagagtttgaaagtttggaggctatggaaggtttttatcaatacttaaatgcagactaa

SEQ ID NO: 53169 - DNA, 471 bp, Acinetobacter baumannii
atggaaccacgattcgtcatcaaaaaccattctgacatcaactatgtgacgaactatttaaataaaaaccatgcagaagcggcaattgaagggaagcctttggttgttactattaagcctcaaagcacgaaacgatctctaaaccaaaatgccttgtattgggattggatgcaagaaatccagaataagacagggcaagacaaagaagactgtcattttgaatttaagaagaagttcttaattcacattcttagacgtgatgatcaagaatatgccgagatgtgccatgcaatcaccatgctcaagcagtctgaatcagaacaatatgaagcagtggctaatggtgtaattagagagacctccacaacaagactaagtacaaaacagttctctgaatacatgggattaatacaagcttatgcttcaaaagagttgggtgtatttcttaaatcgcctgatgatccaatttaa

SEQ ID NO: 53170 - DNA, 273 bp, Acinetobacter baumannii
atggaaattaatgggaaaacagttccttttactgctactcactacaatagcgagacaggcgagttcttaaggataggtaaaggcgaatatgcccaatgtctagtaaacggcagattttgggtagagtgcgcgactttaagaaatcaccaattacctttagataacttcatcccaattagctacaaatatcgccgaatatttaaaacaggtttatcacgagatttatgtaatatccgcttgatgtggattggtagtagttatcgtattagatga

SEQ ID NO: 53171 - DNA, 186 bp, Acinetobacter baumannii
atgacacttgataaaattaagatagaagcgccaccaaatgccactcactacagaataaataaagctggtaatgctcgctattatcgaaaagattgtagtgacaattggatagtttatgttgattggcgttacccaatgcgatgggaaaccacaaatttaatagacaacatcaagccactcaattga

SEQ ID NO: 53172 - DNA, 276 bp, Acinetobacter baumannii
atgcgtgatgcaaagcgtcttgctgcaataagaaaattaccctgtgctatgtgtggtagaacaccagtagatgctgctcacagcaatcaaggagcgcacaacaaaggcatgggattgaaggcttgtgattcaaagacaatcccactttgtaggcaacatcatatcgaatacgaccaactgataacaatgacaagagagcaagcagttatctggtttgatgcaatgttagaaaaaacagagcggatgcttaatcttaaagatgatgaggttttttga

SEQ ID NO: 53173 - DNA, 168 bp, Acinetobacter baumannii
atggaatttagaatagaatttgaaaatgaaatgcgagattggataacagctcttgggcgtccaacttgggatgaagaagcagaagtttacaaagaaagagagtggcaactagcatgggctgcttatatcagatgttggaaaaagtatgtaatgaagaaggatgattaa

SEQ ID NO: 53174 - DNA, 426 bp, Acinetobacter baumannii
atgaccacattcaaagaggctcaaagggtccagtcacaaaaggcagctcgttctaagcgatttaatcgagtgcctacagaagatcaagaacagatgacgctcatgagttgggcgcatcgtgtgaagtatggttcaggtcgtttgagtgattacttattccatattcctaatggtggctcaagaaacatccttgaagctgcaaagtttaagaagttgggcgtgaaggctggtgttccagaccttcagcttatcgttccaaatggtgagatacacgggctttggattgaattgaagtcaaagaaagggaagttgcaaccaagtcagagacttatgatccagcgcttagaagaacagggttacatgtgcaaagtctgctttggtgcagatgaagccatagatgaaattaaaaagtatttgatgatttga

SEQ ID NO: 53175 - DNA, 180 bp, Acinetobacter baumannii; identical to SEQ ID NO: 53064

SEQ ID NO: 53176 - DNA, 369 bp, Acinetobacter baumannii
atgaaaccagaacagtttattcgtgacttcggcgaaaagaaggcgagagaggttgttgatggggcgcctagcaatgctgagagcttccaagatggctactacttcagaacaaaaccacagtttgaatttcacaatggcattcatgaggcttggaacttaactgataacgatggcgagtacttcaagaagcgtggctttgaaccagtaaaaatcaatgacctgaaaatgatattggaaagcctccgcatcgtggaccagtttggtggaatagaaaaagcaaagctagttgcggaaactaaagacgggatgggttatttgaagggatgcatcaaagaccacgaatcaatatacggaggcggggatgagtaa

SEQ ID NO: 53177 - DNA, 228 bp, Acinetobacter baumannii
atgagattagcaaatgataaaaaaactctagattggattgaggaaattggcggtgagcagtacgaagctaaattcactcatgggacagtctacggatataacaaatttaagtgccgttgtgagttttgcaaggaagctaaagcgctaagtaatcagcgtgcagctttgaagcgtgctgttaaggctaacccacctcaatcagttttgattgttggaggtgcagcgtga

SEQ ID NO: 53178 - DNA, 225 bp, Acinetobacter baumannii
gtgagcgtacaagtgcaagtaacttcgatcgatcgccagaagatgcaattcaacgtagaggcgatagatggttcaagagtaattctcaaacgcgcattcaacttcaagactgaaacgaaaaagcatattgagtcagtgattaataaagaacttaagacattcaacaagccttcgtatggcggtattgagattgtctttatgtgtccagtaggagtgttctcatga

SEQ ID NO: 53179 - DNA, 1320 bp, Acinetobacter baumannii
atgtcgaatattcataacatccctatggaacaagcagttcttacagcattgatgactgtagacaaatcatttgatgttgtaagtaacgatcttgatgttgagtgcttctttccagagcgccataagcaaatcttccaggcgattgccgaccttgcaaacgaaaacaaaccttatgacttcgttatggttgagcagcagcttaaacaaagaaacgtaattcatttgatgggtggttctgaatacctgcttcaaatgagcagtgaagcgccttcaagcttttacaacctggagtcttatgttgcagaactaaacaagttcaaggcacaccgtgaagttgagcatattggtcaaagcattgcagagattgcaaaagacctaacaatccctgacgttcacattgctgccgaaagcatcctagatggaaagaaaacttcaaacgatgttgaaaagactagcttcacatttgaagaggctttgaaccgcgctacagatcgtttaatccaaaaggctgaggctaaagctaacaaacaatacacaggcgtaaagttcaacttaactcatttggacaatctggttggattaattcaaaaagggcacttctgcatcgttggtggtcgtcctggttctggcaaatcaactcttgctcaaatgttagtaattcaaacagcagtgcaatacaacgagcctgtattggttgtgtctgctgaaatggatgtagagacattcgcaaaccgttgtatctcagctttaacccaaatcccttacgacaatattcacaacgctgaactattcgatgggatgttagctcaatttgcagaggcacaaaaacgattcagttcgttaccaatccacatcgaagacaagcagaaaccaacaattgcagaaatacattcttgggctcgtaaagctaagcgcaaatacaaaagactaggatgcatcgttattgattaccttcaattggttcgtgacccaagtaagaaagaccgttaccaggaagtaagttcaattagccgtgatttaaaagcattggctaaagagtttgactgcccggttatcgcattggctcagcttaaccgtgagtctgagaaaggcaagcgccctaaagcatcagatctaaaagaatcaggtcagatcgaacaagatgcagatcaaatcattctggcgaatccaatcattggtgaagacgacctgccatcaggtgtcaccgaattaatcgttgctaaaaatcgtcatggcaagaaaggcgtagttcgagttatggaccgcttagatatctgccgttttgtgactattcgagaagaagagagaggtgcagcgtga

SEQ ID NO: 53180 - DNA, 840 bp, Acinetobacter baumannii
atgggtgcattaagagttttgcctttggagaatgtagacattcacccaagcacagcaaaaagaatcgagcaaaaagccatgtccaaaaaagaagatgggtacacaccattgcctaactttgtttgtgatgaggggtatttggctgttttaagtggtgaagcaattaaatgtctagttttgcttaatagacaaatcaaaggctttcatgaagaaaacaaggctattggtgaatccttaattttaaaattaacaggctttaaagacaaaagaactgtcagaaaagcgatgtctgatttagcgaaatacaacctagtaaaaatcactaaaactttgggtaaagttacaagttatgaagtgacttttgaagatagattatctatagaactagtagcatcaaatgatactggtgcatctaaagtagttacatcaaatgtacctagactagtagcatcaaatgatactggaactagtagcatcaaatgtcactctgtaaaagaaaagaaaagaaacttaaaagaaagtgagcaacaagaaaatccagttgatgaagttctgaatatctggaaaccagatttacaacaattgaattcttggatgcaaagatcaggtttaccaaaaatcaatcaagctcaagttgaagaattacttcttgaaatcaacccacactacgaaaacaaaatcatcactggtgcagtaacaagcactcagatgtattcaaatttcgtgaagtgggtaaaacgtgatttcaaacttgttgaaaaacttttcaaacaagcagaacaaaacaacactcaagcaatcaatcctgaaaatctcgaaacagaaatgggggattggtaa

SEQ ID NO: 53181 - DNA, 399 bp, Acinetobacter baumannii
atgtgtccactatgggctttcatcactacagagcaacctgctgccagtgccgaagcagtgtcaccgcccgcagttgagaatgctaaaggaaagttacttgctccaaagactgcaacaggaccaacaccgattttaatctggcgcaggtctgggcgaggtaaaggctggcgctcaggtaaagcagtatcaatacgggcacctaaaaaatcaccacggcgcaatactttggcaaacaaacgcatttgcccactggtacgggcacgttcaccttgtaagcgtgcaagtggcaaagcggtttcctgtgacacgatttcaagaaaatctgtacccaaagcatcgagctcatcggcaatattttctaaaaaaacagcacgctgttcaggtgtggtatggcggtaa

SEQ ID NO: 53182 - DNA, 672 bp, Acinetobacter baumannii
atgattgacaaaagtaagtcctcactaagcgaggttctatcgcagattaaagatggtgcaaccattctgattggtggtttcggtaccgcaggacaacccgctgaactcattgatggtcttattgaactcggtgttaaaagcttaaccattgtcagcaacaatgccggtaatggcgattatggtctggcgaaactacttaaagccggttcaattaaaaaagtgatctgttctttcccacgtcagtctgactcttatgtgtttgatgagttgtaccgtgctggaaaggtcgagcttgaagtcgtaccacaaggtaatctggcatgtcgtattcaggctgcgggtatgggattaggcgctgtgtttaccccaacaggctttggaacacttttggctgaaggcaaagagacccgtgagattgatgggaaagattacgtactcgaatacccaattaaggctgactttgccttgattaaagcctacaagggcgatcgctggggcaatctggtttaccgtaaatctgcacgtaactttggcccgatcatggccatggctgctgatgtcaccattgctcaggtttctgaagtggttgaactcggtggattagatccagagcacattattaccccaggtatctttgtacagcatgttgtacaagtagcgccagcacagtaa

SEQ ID NO: 53183 - DNA, 1113 bp, Acinetobacter baumannii
atggataaatttttagagcctgttcaaaaagataagttaatagtccatgtgattactgatttttctggaataggtggtgctgagatgatgcttactaggttaataaagcatactactaatgattataaacatattattatttctctaatgggaatttctgatgtttataaagacactttagatcaatgtcaagaatattataatttaaattggaatggtttaaatacagttaaaataatttttaaactgaaaaaaattataaagaagatttcaccttgcactatacaatgttggatgtatcacgctaatgttttaactacaataagtcaattaggtagaaccgataaacctgatattttttggggtattcatcactcgttatcatcactacatcaagagtctataagtacacgtattgctctagctttaagtaaatatttttctaatcaggcatcaggtattatctattgtgctcattcttcattaaaacatcatgagcattttggcttaaagaataataaagcaaaagtcatacccaatggagttgatttaaataaatttgatcagcattcaaaaattaatgataattgtataataggttttgctgggcggtaccatcctgctaaaggctatcaatacttatttgaagtaatatctgaattaaaagaatttcctcttatatttaaaatagcaggtaacggtgctaatttagaaaatgctgaaatagctaaatattttagaaaatatgctttagatgaaaataaggttatattacttgatcaagtatcaaatatgagagagttttatagctctatagatttatttttgatgacttctataacagaaggctttccaaatgtacttgttgaagcaatggcatccggtgtcccttgtgtgagtacagatgtgggtgatgcaaagtttattattggaaattatggttatgttgcgccttctagaaatattaaagaattaaaagaacatattttaacttatttaaacctaagtttagatgaaaaatacaaactaaaaaaattaactcgcatgagagtagaggaaaattttagtattgaagttatttctcaatgctatgttgatttttggagtaaataa

SEQ ID NO: 53184 - DNA, 903 bp, Acinetobacter baumannii
gtgtatttaatatttgataattttggtaaaatactattggttcttaattctggatatttagctctttatgacgggcaaagtgaagactatgaagctcctatatctttagtaattaatagtttagctgtttcttgtttagctttgctttttgccttaaagaaaaaagatactcaggtaaataaatattttattatattgttttttttatatatatttaagttgatgatggcgattggtacaggttctagatcccactttattgcgggcgttatacttcttatatggtatattttttatgatcgtacattaaattttaagcactacttattattattattgtctttttttgtaacagctttaggtgtcaactctttagcctcgttaagtggcgcacgagtggttaataatgttgaacttggttttttagaaaaaatatcttttatattttataatcaaggtatttccttgatggtttttgatattagtctaaagtattctgattatcctgttttagggtatttaaaggttatactacctggagttcaagttttatatagtttttttggtgtaaatgagaggaaggattttaattggtcttcttatgtggtttataatgaaaatatttctgcttatttaaacgggaatggtttgggttggtctttatatagtgatttttacgcatttagttttggttttctccctattttttgtttgttagtttttttgttttctaggttaattgtgaaagcaacttatagtaatagtttatactataatggaattgtttttgttcttgtcggtactttgtttactataaacagatctagtgtctcaggtttaatttttatcattattttttatagtgtcttatatttattttttgttaagtcgcgagttaaataa

SEQ ID NO: 53185 - DNA, 894 bp, Acinetobacter baumannii
atggatactttaaaagccattcaggtctttgtttctattgcacaacacggtaatttaactaaagccgcagagcatcttaattattctcgtgcaatggtttcgcgttatcttgagcaccttgaacatacgttctcaactcgactatttcagagaaatacccgaaaaatatctcttacacccgcaggtgaaaaagctctgctctactgcgaaaatattttacagcagcaacaacttttacaagaactcgcagcgcctgaacaacacaacggtacaatccgttttacatgcggattatttctatttgaacttggggttgcggaatgtattcggcaatttaagagacagcatcctcatattcagtttgatgtatacctgactgaaagtacgatggatcttatagatgcacaagtggacttggcactacggattactcaaaaagtcgcagatggtttaattgcacggccagtttgtcaaattgaatccgttttctgtgctcatcctgattatttaaaacagcacagtcccctactccatcctcgtcaactcattcaacatgaatgtattgcacatcatagccaacatcaattctggacactttttgataatgaacaacaacctcagaactatcctttaaatgtcacttttaaaagtaatgatgtgaatgcactttacgacatgtgcttacatgcacagggagttgcaatgttgcctacattattagttgagagagatttaaaagaaaaacgcttaaaagctttatttaaaaattttacggcccccgagttaagcttgtcggtcgtgtatgcttctagacaacatttaccccggattactcaagaatttatagcttttatgatcgaaaatttagatttttacttaaaaccgcaaaattaa

SEQ ID NO: 53186 - DNA, 336 bp, Acinetobacter baumannii
gtggggggtattccggtatcttcaggtattcatttatggatggcagatacacctaaaaccagagatcgtgtggaagttattcaatctttagaaagcatcaaagcactacaacctaaaattgttgtacctgctcatatggttgagggagctccacaaggtttagatgctgttaacttttcgattaactatttaaatagttatgaaaaagcagctaaagcaactaaaaatgctactgagctgagcaagctcatgcagaagcaatacccaacgcttcaaagtgttgatagcttagagctcggcgctaaagtggtaaaaggtgaaatgcagtggccataa

SEQ ID NO: 53187 - DNA, 546 bp, Acinetobacter baumannii
atgccattgattattggaattgatccaggttcacgcttaacaggttacggaatcattgaaaaagatggtagtaaactacgttttgttgatgccggtacaatccgaacggaaactcaagagatgccagagcgcttgaagcgtatttttgctggtgttgaacgaattgtgaaatttcatggtcctactgaagctgcggtcgagcaagtctttatggcacagaaccccgactctgccttaaaacttggtcaagcccgtggagctgctatagccgctttagtgaatttagatttacaagttgcagaatatactgcacgccagattaaacagtctgtagtgggatatggtgctgccgataaagaacaagtacaaatgatggtgatgcgtttacttaacctgaccattaaacctcaagccgatgcagccgatgctcttgctgctgcaatttgtcatgcccacgcttcaggaagtatgagcaaactaaccgtcttgaatgccttaggtggtatggctcgtggacgaagtcgctctagtagccgtagacgctaa

SEQ ID NO: 53188 - DNA, 780 bp, Acinetobacter baumannii; identical to SEQ ID NO: 15299

SEQ ID NO: 53189 - DNA, 924 bp, Acinetobacter baumannii
gtgattgcccatgcccaaaataggctcagcctttttgctgctcagagcgggctaaaagcagtagctgcgcaaggtaaggtagaaatacaagcccagtctgatgctttagatgtgcttgctaataaaggtattacgatttcttcgacagaagactgcattgaaattagtagtcctaaagaaattgtaattactggtgcaagttcacaaattaccttaaatggttcaggaatctttccgaaaactggtgggaaattccaagtcaatgctggacagcatgtgttccaaggcggcacatcggcaagtgttaaatctagtttgccaccaccaccaaaacgtgcacaaggtgtacttgagcttttgcacgactattcacatggagcttttgttaaaggagctggttataccgtaactgataatttgggcaaagtcgttaatggaaagctagacgataaaggatttgctcgtgtttcaggtttggcaacgggctcagtgaaggttctttttgatccagatccgcgtaatccttgggatgaggcaagtgattttaaacgcaaggtagagtggccaaatcaaaatgacgtagaaggtagcattggtattgaatctggcagtaaagggttaactgaaacattgaaaaatgactttaaaaagttgagtcaacttgcgagcaatgtgaaatctgtgcagcagaagattgaatcggttaaaaaaatcaaagatcaaggtgctaaagcattattgccaatggcgatggaacaggttttaggggggagtgatggatctaagttaagtcaatcatttgttagtcaaaatagctttatgccttcaagtcagcagagtaacccactcagaagattggctcaagcaagctctgacaaaacagcaataacaaaaatccaatcaccttttgaaacgtttgtataa

SEQ ID NO: 53190 - DNA, 495 bp, Acinetobacter baumannii
atgaaatctaacttaatcactcggtcaggccatgacaaattagttgctgaattaaaacaactttggcatgaagaaagaccagaaattacgaaaaaagtaaattgggctgcaagcctcggtgaccgtagtgagaatgcagattaccaatataacaagcagctccttagaaaaattgatcgacgagtacgctacttaggaaagcgtttagaagagttaaaaattgttgattactcacctgagcaagaaggcaaagtttactttggtgcctgggtcgacattgaaaatgaagatggggagcaaaaaactttacgaattgtcggggtagatgaaatttatgatcaccatcctcagcatatttcaattgagtcacctatggcacgtgcactcttgagtaaagaagtcgatgatgaagtagaagtacacacgcctttgggcaaaaagctgtggtatatcaatgcaattcgctatgaaaaacctaaaaatgatgaaatttag

SEQ ID NO: 53191 - DNA, 1113 bp, Acinetobacter baumannii
atgcacagtaattcaagttctgggtcgaggcttggccttagctctttattttcttctctcccattgaaagttcttgcgctcagcactatgttttttccctttcatagtatcaatgcaggaaaaaccctacagtacaatactgtagttaacacaaacacattaacagtggttgctgtagaaagcccaacgactgtttttaaagaagaccagtttttacacggcttcggttatgacttagcgcgtaactatgcacaaagcttaaatgtaaagttggacttcaaaatcgtgacagataatgccacggcgcttaagtgggttcagcaaggtaaagcaaatcttgccatgacaaccgcaagcttaagttcaatcgagaacaaaggtttaatgtctttttctgcaagttgtggtgatatcgtaaatttgcaaaaaaatggattaaatccgaatctaagctgggtgtttaaacaagcagatgacccgcttacacaaacagcaagcggttttgtttgtcaaagcaaacaaaatggcctaactcagcaacttgcttctttttataaccgtaatgttgtaaaaccagaagcttggtctacgattcaacgtgacttaagtgcacgtataccgatttacaaagcaagctttaaacaaagtgctgctcagtacgatttagactggcatttgcttgcagcgattggttatcaagaatcgtacctaaagccagagtctgtttcaccaacaggtgtacgtgggttaatgatgttaaccaatagtacagctcgggcaatgggtgtgagtaaccgtaatgatccagcacagagtattcagggcggtgcgaaatattatgatctcatgttaagtgagtatgatgatattcctttcccagatcgcaactggtatgcgcttgtggcttacaatatgggtccaggtgcagtgaaccagattcaaaagcgcttgcaagcccaagggaaagacccgaaccaatgggttaatctctataattatttgcagagtaacaaaactcgcaatggtcgatacaaacaagcagttcagtatgtgactcgtatacgtgcttatcttgagcacattaaaacggcacaaacgcgaattaatatctag

SEQ ID NO: 53192 - DNA, 1098 bp, Acinetobacter baumannii
atggcaaatcttttatttagatttagttgggaccaccgaccttttgtttataactcatctcaaggtaagcggcaatttatgctgccttttgcttcgggcattccaaacctcactccagactggactcaagttacgggcttaggtacagcggcaacaagaggtgttggagtagaaagcggtaatgtagcagcttatggttcttatggtttatctaacttaggttatggtggatctccaacttcagaagccggaaatgatattgatgctggttataaagcagggggacaaaagactcgttttaagaatgcacccactagtatttatacaaatccctatatagctgcttatgcaccttctatcgtggttactcgtggagaatttacaggtacggagttatttttaccatattacacctcaacacgcgccaattgtatggctgtaattgcatggaattatgtgccatccactgacaccttaagtaaagcagagcaaatcgtttatacgagcaagaacaatatcgtttatacgaccgataacagcgcgaccagcggcaaattggttactgttgagacttctggcgaacttcgctccaaggggttcactgttgattcgaacggggtttacaaggcagcttcaccgattgcaagactatttgctgattcacttgaactcaatgaagatgcctcaaaacagccgattaactttgaaaagttaggtacaggtgactacctgataaaaggttctctcggatttgctaaagagggctggtacattgaaatgcctaaagatgctaacggtaatgttcttgttgctgtgtcatatgagcagcatgaagatggggatattgcagtaaaaacctacaagaaaaaatttgatatcgaaacagcctcaattattcctgatttcgataatcctgtagatattccagaaactcgctggattgatattcgattgcatgaagaacccgaaccagagcctgaagaaccgttgagtgaaacaccattggagttccagccgactaacttatctcaggcagtagctgcagccatgaatggtgtggaaccgccagaaatctcggatacagacgaaacactttaa

SEQ ID NO: 53193 - DNA, 360 bp, Acinetobacter baumannii
ttgaaaaattgtaggattcaatatgatgtatatacacttgatttttttctaattttaactggtttttttgttttctttatttttcagtttaaagaaacttcaaaaaatgaaaaacaggccatttcaaattcagctgtgaatcaagcatcactgaaagaggaaaaaagaggttacggttggtctagtgctgccattgtatttatgactttgtttttattcgtcttttttacaagctttaatatgacagcaatggcagtatttctagccggcagtatgatttgtagtcaacagtcttatgagcgttttcaacgtgcaaaatatttatcaagattagaacatcttaattacacatctttttag

SEQ ID NO: 53194 - DNA, 429 bp, Acinetobacter baumannii
atgttgatacaggccgaagggaatattaagcgttatcagttttgtgttttctttgtaatgatgtttagtgtaccaatgtcttatcttctactatatttgaaattcgatatttatcatgtttggtatatgttgctattcttaaatctaattcttttgttattaagaatatattttgtaagtgaaatagtaggcagtaatttttttcaaaattatttaaaaaaggtgatgttaccagcttttatatttttgtttatgagctcattaatttttttaatgctaagttcattcaacttaaaacaaagtttattaaatttgattgttttaaatatttttggtgttttttttatagtggtcttggcattttttctattattggattctcaacagagagaaagtatttatcaacttaaagtgaaattgcgaagatga

SEQ ID NO: 53195 - DNA, 1077 bp, Acinetobacter baumannii
ttgaaaaacgtttgcttcttaattggaaatttaaataattcgggtggcacagaacgtgtcaccactttggttgcgaacgagctttcaaaaaggggagggtatacaatatcaatcctaagtttggtagatggcttaaccccttttttttctttaaatgaaaatataaagatttattctctttataaaaaaaagatttcatttaagaataatttttttggcgctatatggtctatcagaagctttgtaacaaagcataatattcatactttaattgtggttgatagtatttcatgtgtttttaccgttcccgctttatggttcaaaagtataaatcatatttgttgggaacattttcattttaagaataataatggagtagcttatagaaattttggaagaaaattagctgcaaaattttgtaattatgtggttacattaactaataaggatattggttactggttgatgggcttaggtaaaaccaaagccaaactgataaatattccaaatcctagtccttatatgaccgttaaaaataagcctaatcttcaatacaaggtggtattaacagttggaagattaacccatgttaagggttatgatttattgttgcaagcatgggcagatatttgtgtagaagataaggaatggcaattatttattgttggaggtggggaagaagaagagaatttaaaaaaattagcaaataaacttaatattattaatagagttgtttttgctgggacgcaaaatgatgtaagtattttttatgagaaaagttctattttttgtttaagctcaagaaatgaaggcttaccaatggtattattagaagcgcagtcatatggtttacctatagtttcttttgattgcgatactgggccgagtgagattgtaactcatggtgaaaatggatacttggctcgaatgggagatataggtgaaatgtctttctttttaaaaagtttaatgtatagtgaaaaaaataattatatttctttttctgaaagtgcaattaatagttccaaaagttttcatgtggataatattataaataagtggtgtgaaataatatga

SEQ ID NO: 53196 - DNA, 738 bp, Acinetobacter baumannii
gtgagaactagttttattaaatttcataattttttattgatttttagcgtatgtattacttcaaatgctacagattataaaccagaacagttagatgagaaaacaatatatagtaatagtgagcatgaactgaatagtgtgtattcagatataaaaggctatatcagtgataataaaaatgaagttaaatatcttgttgatactcaacgtttttggttgaaaaatagaaatttaaaatgtaattttaatggaaaagaagcaaatagtggaaactataaatgtttaagtgattttaataattctaaaataaaagatttgaaaaattcatatttggaccttgataatttagaaggaaagctaataaaaccatttagatatacaaatggtatcatgaaagagttggaaacaggtggatgttattgtagtgaaagtacaattaagattttaaaagataaaatttatatatatcaagcttgtgatcaaggtttaaaggagccacgtatatataatattgttggtaagaaaaaagatagtttttctgtagaatatcaaattgacactaataataaagttccggaatttaatttagcatttgttactaacggtaaaaatgtttggaatatagttccgaaaatttttagaaaagaagatttaataaatttaaattttggaattaattatataactgatatgaatataaaaaataagaaaaatgattgtcatgatgatgaagagtaa

SEQ ID NO: 53197 - DNA, 357 bp, Acinetobacter baumannii; identical to SEQ ID NO: 46762

SEQ ID NO: 53198 - DNA, 1011 bp, Acinetobacter baumannii; identical to SEQ ID NO: 46934

SEQ ID NO: 53199 - DNA, 522 bp, Acinetobacter baumannii
gtgagcaacaatgccggtaatggggattatggtctggcgaaactgctcaaagccggttcaattaaaaaagtgatttgctctttcccacgtcagtctgactcttatgtgtttgatgaactgtaccgtgccggaaaggttgaacttgaactggtaccgcaaggcaatctggcgtgccgtattcaggcagcaggtatgggccttggggcggtgtttaccccaactggctttggaacacttttagctgaaggtaaagaaacccgtcatattgatggtaaagattacgtgcttgagtatccgatcaaggctgactttgccctgattaaagcttacaagggcgaccgctggggcaatctggtttaccgtaaatctgcacgtaactttggcccgatcatggccatggctgctgatgtcaccattgcccaggtctctgaagtggttgagttaggtggattagacccggaacacatcattaccccaggtatctttgtacaacatgttgtacaagtacagcccgcacagtaa

SEQ ID NO: 53200 - DNA, 678 bp, Acinetobacter baumannii
ttgattggacaagaggcgattcattctaagttacacaatgaatataacgatgcgcttaaagatgttgaataccctgtcgatttataccgtttcttgggtgaaaacttctttaaatatgtgttcttaaaattcccgcagccattaaagctttcactcatggcgggtattgaacattttactgcggtacttgccgaatacatgatgaagcatgaaaagaatttctattataccgacgatgccaaaagtcgtgccttatggatgtggcatatgcttgaagaatctgagcataaagatattgcttatgacgtctatcaagttttaaacggtaattatccgttacgggcaacgggctttttaatggctttcattaccattttagggcttattccgacagcaactttatttgtacccctactgcgtaagccaaaagaactgttaaccagaaaattctggaaagacgcgcgccgtggcgtcaacttaatttttagtccaaaagatggcgtatttggtagcaccattggtcagatttttgattacttacgtccagacttccatccaaatgatcatgacacgaccgaatatttagagtactacaaaaagaaattacttaacgagggcggtgcaattgcgccttactttgtgaaggaatttacaccaccagttcgtgcagtttcataa

SEQ ID NO: 53201 - DNA, 546 bp, Acinetobacter baumannii
atgaaagagaatgaggaatataaacgggatggtaaaaaagttattagacaaggatttaaaaatggttcaactaaagtttgggaggttgaacaagaaattaaaaaacatttaaccgaaggtataaaaagtcaaaatttagagaaaaattataattgtgcatacataaatcatactgagataaaaaatactcagaaaattaatttggaaaaatttgctgaaattttgagaaagagagctaaagaaaaaagtcaacatcaatgtgcaaagtatgtaagaattgcattagaggcaggaggagccgacacttcaggacatcctgtcgcagcatcagattgggggccaactctcaaaaaaataggttataaagaaatacctgaagagtttaataaacctcaattaggtgatatttatatcatcaccaaaactgataagcatcaatatggccatattgcaggctatgatggtagccaatggatttctgattttaaacaaaaaggttatagaatttatagcgatcatgttaactacagatattttagaatgtaa

SEQ ID NO: 53202 - DNA, 327 bp, Acinetobacter baumannii
gtggcagccaatggtgacttggcgaactggcacacgggtgcaccagatgcaattcctgcggtaggtggtgcgatggatttagctgtgggtgccaagaaagtatttatcactacagaccacgtcaccaaacaaggtgagccaaagattgtcgctgagctgacttatccggtgacgggtaaacactgtgttgaccgtatttacactgacctgtgtgtgattgatgtgaccagagatggtttaaaggtgattgagaaagttgaaggtcttagctttgatgagttacaggctttaaccggtgcaactttgattgatgcgactcaagggtaa

SEQ ID NO: 53203 - DNA, 162 bp, Acinetobacter baumannii
atgtctgctgaaactgtgcctgtacctggcaatgaagtgttgcctgcagggtcagttgctgttgcagttactgtatcaccatctaccaggttacccgggtttggtactgaccagctaccatctgtgcctgctaccactgttgcagtggtgccatcaggataa

SEQ ID NO: 53204 - DNA, 180 bp, Acinetobacter baumannii
atggattctgctcaagatactttttttatcagtgagttcgttaaaaaagaaattgaaaaaaataaatatcaaggtataaatatttttgaacttactttggctcaatggagagattctgatgatttcagttttatgtttttgagcgaagatgaggtgaataaatttgtatggccaatttag

SEQ ID NO: 53205 - DNA, 702 bp, Acinetobacter baumannii; identical to SEQ ID NO: 50932

SEQ ID NO: 53206 - DNA, 129 bp, Acinetobacter baumannii
atgagtagccgtattaatatatgtgacatcgtatttggtcattttaggactttgcgtcaaaccagtaataataaaattggtttgttagagttgctcatctttttatacttcctatcattttatctatag

SEQ ID NO: 53207 - DNA, 915 bp, Acinetobacter baumannii
atgcactcactagctccttatactataagaacttatgatcctgactattttagactacataatgcataccctcctttggataaaataggagggagatttgatttgtatcaaatatttaaggatttttttgttgaacagggcagtggttttcatattatagaaaatgaaaagaaaatttttagaattctaaatcttgtaacagatgataaagatagaactattaaaggttttctacaacaaggaaactatggtttaaaatcagatattatcaatattgaaactggattagtagattatgctaaaacagagaaaaatgctgagctcataaattattatttttatttaaagattcctgtctcatataacgaagggttagctttatttcaagtctataaaggatttagctctaaaactttgatttttaatatattgaataaatattggaaaggtaaaagtggcttaaacttacaatttaactctttaactgatgataaatcttttgagaaatggaagaatgctcaagtaaaagaaattaaactaacaaaatttacaggtatagaagataaatcagaaagaatatctaaacttggacataaagaagatattgaaacagctttaactgttaaacctaaaaaaggtaactttggaacgttgaagaattttttaaataaaaatactgatcagtttaaagcagtagaggtatgggaagaagattgtcagcaagttaagacagttgttaatttagatggaaaaagtagaacatttacagttggacgtaaaaggacaacagcattatgtgagattgaagcgccagatgatatagaattatctggaggattgcctacactcaacgctttagatatatggtttaaagaagtagatcaagaacttacaagcagtttatataaaccttaa

SEQ ID NO: 53208 - DNA, 750 bp, Acinetobacter baumannii
atgcatgagattaccttgaacgaagtgcgtcaattaatcgcttctcttcgcactgtttacgctgctcagttcaataagcaatttccagcaacaggcgaaagtgcaattcctctgtcagtggttgagcaaatcgcacttaaaacactggttggcgttcaacaaaaccaatttaacaacgcacttggtcgtttacttacagcaggtggacgctttatgccgtcatttgccgagtttcgcacctggtgtatcggtgaaagttggatgtctccagaagaagcttggtctcgcgcatgtaagtttacgactgaccgtaccgtggttattacacaaattacaaaatatgcattagacgaagtgatgtatttgatcgaagccggccaaatgcgagcagctcaagataatttcttcgggacctacaacgtgatggttgctaaagctcagttaaaaggccgtcagcaagagttttacactccaccgctacaactagagcataaagaacctgaacacaccccagtaagcaatgacgaggctcaaaagcatctcaaatcattgatggaaagattaaaaatcaatggtcgtaaacctgcaccagttcaaaaacttgaggcaaaagaaaaagagcctgagcttataaaagagttgggccctgatcctttcgataatccacacgaatacgcagagatgtgccgccgtgaaggtatgccaatccctagaaatattcagcagttaattgatggagcgaatgtatga

SEQ ID NO: 53209 - DNA, 5676 bp, Acinetobacter baumannii; identical to SEQ ID NO: 50777

SEQ ID NO: 53210 - DNA, 2007 bp, Acinetobacter baumannii; identical to SEQ ID NO: 45772

SEQ ID NO: 53211 - DNA, 555 bp, Acinetobacter baumannii; identical to SEQ ID NO: 48633

SEQ ID NO: 53212 - DNA, 795 bp, Acinetobacter baumannii
atgacacaatccttacatcctgccgctcaaaaaggcttcagctctgctgctgagctttatcagcaagttagaccaaattatcccgtagaaatagtaagttggctacaagatcggctccaaatccatgaaaattctactgttatcgatcttggatcgggtactggcaaattcttaccttacttaaaacagacacatgccaatattactgcagtagagccaattggcgagatgttacaacagcttcagcaagcctatcctgatattaaaactatacaagcctttagccacaatattccggtaaatgaccaacaaattgatgctgtcatttgtgcccaatcttttcattggtttgacaacatagaaacattgaccgaaatccatcgagtattaaaacctcaaggacatttaggacttgtttggaaccagcgcgatgaaagtacagactgggtaaaagccttagcggattttctactaccacttgaaggtgatacacctcgttaccatagtgaaaggtggaaaaaggtttttgaagagcaagatttatttacttttgacaatttaaatactttttcgcaatcgcagcatggtactgtcgaacaagtggtgagtaaacggttactttcaacaagttttattgcagcaatgactgaaaaagatcaactacagctcaaagctaagtttgaaaaaattgtttatgattttactgggttaggcccacaagatcagattgtttttccatatattacatatgcatatcattttcaaaaaagtacgtcgtcaaatcatagagaatag

SEQ ID NO: 53213 - DNA, 519 bp, Acinetobacter baumannii
atggctggtattgagcattttactgcggtacttgccgaatacatgatgaagcacgaaaagaatttctactattcagatgatgccaaaagccgtgctttatggatgtggcatatgcttgaagaatccgagcataaagatattgcctatgatgtatatcaattactcaatggtagctacccactacgagcttctggcttcttcttagcattcttcactattttaggtctaatccctgcgactaccttgtttattccggttttaagaaaaccgcaggaaatgttgactagaaaattctggaaagacgcgcgccgtggtgtaggacttatttttggtccaaaagatggtgtattcggtagcaccattggccagattttcgattatttacgtcctgacttccacccaaatgatcatgacaccactgaatatctagagtactacaaagacaaattactcaaagaaggcggcgcgattgcaccttactttgtgaaggaatttaccccacctgtacgcttgtcttaa

SEQ ID NO: 53214 - DNA, 378 bp, Acinetobacter baumannii
atgacccagttccagtcttctaggctgagttcgtcaaatttaccgcctaaacctactccagcattattaatgacaagagtcacaggatgcccaaataagatttcagcagtttcagctaggtggttaacttgttcagcgtcacccacatcacagcgcatagcaaaagcttttgcaccctgttgttcaagcaacgttacagtttcttctgcagcttctaaattaatatctgcgcagactacgctgccaccacgttttgccagttcaactgcaaagcttcgtccaatcccactgcctgccccggttacgaccgcatatgcgtttcggctcggctggtctttcttaccaaataaaatcatagtaaatcctaaaaaattttag

SEQ ID NO: 53215 - DNA, 5241 bp, Acinetobacter baumannii
atggtacaagtatcattaatggcaaataatgcttcaaaaaataatacagttgatattaatgttggccaaacaaaaaatattgtagtagatccgaaggtaatcgcaaaaattgatattaatccagaaaaaattgcttcaataacaagagatggtaatagtgcggttatccatctaaaagatgggactgaaattgttttagagaacttttttattagtgaaaatccacaaattcttttaaatgaggggcagatttattgggctgctaatttagctgaagatgctacaggacagaccactgttaattatttagaattaaaagagataccaaaatatatagatgcttcatcttctgtacctatctggtcttgggtggttagtgctttagctggtgcaggaacagttgcattattatcccagcaagacgccaaagataaaacacctccggaaccaggtaaattgtctttccaaaatcttttagattcaggggagttaacacaagatcaaatcacgaatgataacaagtttaatttaaaactcagcggacaggaaaagggaagtagcgtaacgtatttaatctctaccgatgaaggtaaaacctggcaagagacgacattaaatcaaaaagatttagctgacggtatttatctttataaagctgtagtgacagacgctgctggcaatacctcggaaacggctgtacaaaaagtagttgtggatactaccgcgccgcaagcaggtgaactgactttatctgacttgagtgatacaggtatttcagcaacagatcagatcacgcaagataaaaacttcaatttaaagcttgaaggacaggaaagcggcagccgagtaacatatttagtttctaccgatgaaggtaaaacctggcaagagacgacattaaatcaaaaagatttagctgacggtatttatctttataaagctgtagtgacagacgctgctggcaatacctcggaaacggctgtacaaaaagtggttgtggatactaccacaccacactcaggtgaactgactctatctgacttgaatgatacaggcgtttcagtaacagatcagatcacgcaagataaaaacttcaatttaaagcttgaaggacaggaaactggtagccgagtaacatatttagtttccactgatgaaggaaaaacttggcaggaaaccacggtagtccaaaaagatttggctgacggtatttatcaatataaagctgtagtgacagacgctgctggcaatacctcggaaacggctgtacaaaaagtggttgtggatactaccacaccacaagcaggtgaactgactttatctgacttgaatgatacaggcgtttcagccacagatcagattacgcaagatcaaaacttcaatttaaagcttgaaggacaggaaactggtagccgagtaacatatttagtttccaccgatgaaggaaaaacgtggcaggaaaccacggtagcccaaaaagatttggctgatggtgtttacaaatataaagctgtagtgacagacgctgccggcaatacctcggaaacggctgtacaaaaagtggttgtggatactaccgcaccgcaagcaggtaaactcactttatctgatttgaatgatacaggtgtttcagcaacagatcagattacgcaagataatagttttactttaaagctagttcaaccgattgtgattggggaacaagccgctttactagaccactatgaagtttcaaaagatgaaggaaaaacttggcaagagacaacagctgatcaaaaagatttagctgatggtatttaccaatataaagctatagtgacagacctagcaggcaatatctcagaatctgctatacaaaaagttgttgtagataattccttaaatgttgaatcaaccacagtgattgtaaagccgattactgaagacaatacaataagtctagttgaaaaagatcaagttatttctataagacttgaaatagctaatttacccacagatttaaatagctcactgacatcagtaaatacgacattagacaatgttacttataactttcattttgatgaagtcacgcaagaatgggttaccgaaattccagcagagtttctttggtcagtagagccgcaaaccaatatatcaattgatattagtcttactgatcaagctggcaatacagccattatcacacatacccaaaattataatgtggatcatactccgaattcaccaaccctagattcactaactttcaacaatatagatggagctatcatttcaggtagtgcatataaaggaagtaaggtcgatatctacaataaaaatggtgattggcttgcaagtacaataactaatgaagaaggtaaatttactttacaagatctttcaattaactcaaatcaagaagtttacgcagtcgctacttataatggttatagcagtgaaaattcatcaattgggttagttactgaagttccagctattagtattacacgaattagtccagaaggcgtgattagtggttatgcgactgaaggtagtcattttattgtaaaagatcagaatggaaatattctacaagaatttaattctaatgtatttgatagctctggtattacaccatttagtgtaatggcattaggcgaagtaagaccatttattttgtccctcgatcagcctttagaggaaggggctcaaattattatctctacagataaagataatatttcaggccatccacaatatattactgcagactatactccagcagtatttttagaaactccacaatttgatattagtggtgagactttatcagtacatgttaatgaacctaacagctttattcgtgcattttctggagaaggcaatttaattgctacaggttttaccgatgagcaaggctttgcaagtttacaagtgttccaatttttaaaagaaggcgaaacggttactgtacaagtagtagataaaaatcaaaatacgagtgaaaccctaatcgaggttccaaactttgcttatattccacatgttgaacgtattacacaagaaggcttaatttctggagttgctgaagataatagtacggtaattgtacgtgatgctgatggcaatgaattaggaaaggttacattaggtgatgataatagttggagtgactttagtcattttagcttgagtgtaaaccgccctttaattgatggagagaaaatttccgttcaaattattgataataaagggttaatgagtcctgagcaaaatatcatcgtagatctgactcctccacctgctccaacggagttaaatttcaatgatgctggtgatttagtttatggtcatgcagaacctttctctgaaattttagttaaagatgggcaaggaaatattcttaataaatggttttggaataactggaccgatgagagtggaagtttctcaatagaactaggtacatttttaaccaatgctgagacggtttatgtcacggctaccgatgtaaatggaaacgtaagtttagcagctcagatacaagcacctaattatgcctttgctccatatgttgatagctttacttcggatggcgtgataagtgggcaagctgaaaataatagtactctcgttgttaaagacgccaaaggtgacgttgtagccgaaattaaagttggtgaagataacggttggaatggatcgagttattttaaactccagcttgaccgtcctcttgttgatggtgagcagtttttcttatcaattaaggatgctcgtgggcaagtaagcaccgatactgtaattaccgctgatacggttgctcccgcaccagccagtaatttagttttctcagaagatggttcatatcttacgggtgtagcagagctgaatactacgattcaggtttttgatcataatggtcagctagtgaatatatggaataacaccattaactctgatggtacatttactatttacttaggtagcaacaatttacatggagaagcattcacagtcactgttaaagaccaagccggaaatgtgagtgaagctatttcaataaatgcgccacttgacgatattgcaccgaatccaattaaaaatattttacttgatgcaaatggtcaaaactttacagcacaagcagaagcaaatagtcagatcgaagtttttgattcattgggtaatcagacaggttggggttctacagatagtgcaggtaatgcttctggttctttcaatcaaacttatttacacggtgaggaactcacttttgttgttatagatcgagcaggtaatcgcagtatcgaatttaagcaaaatgctttaattgataccattgcaccaaatccgattgaaaatatcatcttcaacgaaaatggccaaagttttacagctcaggcagaagccggaagttctattgatgtattagatcagactggaaataagattggttttggttacaccgatagctcaggtaatgtatctggttattttcaacaagtttacttacacggtgaggaacttacttttgtcgtgatcgatcgagcaggtaaccgcagtgcagaggtcaagcagagtgctttgaatgatgacgtcgcaccaaatccgattgaaaatattgtattagatctcaatggccagaactttacagctcaggcagaagcaaatagccaaattgaaatcaaaaataataacggtgacgtcgtaggttatggatcagcagatagtgcaggtaatgtttcaggatatttgtatcaagtgcatttacatggcgaagagctcacttttattgtagttgaccgagcgggtaaccgtagtacagaggttaagcagaatgccttgattgatgatattgcgccaaatccgattgaaaatattatattagatatcaatggtcaaaactttacagcgcaagcagaagcaaatactcaaattgaagttaaaaatgctgttggtgagattgtaggttcaggttatgtggatggcgctggtaacgtgtcaggttatttatatcaagtctatttacatggagaagagctcacttttattgtagttgaccgagcgggtaaccgcagtacagaggtcaagcagaatgccttgattgataatatcgcaccaaatccgattgagaatattttacttgatgcgaacggacagaactttacagctcaggcagaagcaaacactcaaattgaagtcaaaaatactgctggtgaagtcataggatctggttcaaccgatagcatggggtaa

SEQ ID NO: 53216 - DNA, 1188 bp, Acinetobacter baumannii; identical to SEQ ID NO: 50936

SEQ ID NO: 53217 - DNA, 237 bp, Acinetobacter baumannii
ttgtcgtgtacagagagcttatttataaaaactcgaaaaaacgaaaaaatcaaattaatactcgaaccttgggcagaagaatataatattgaatcaaattctgaagtagagattattgttgaaggcgatatagaaaaaggatatttaatgattgaatcagagatagatcgtgttgtcatctatggttggcaaggaagtcttattcaagtcttcaaaaatgataaacttattgactaa

SEQ ID NO: 53218 - DNA, 915 bp, Acinetobacter baumannii
atgatcttaatttattatatttcaatacatttaaaaaatgaattagctgttcttaaatcccaagatttttctgtttctggtgtaggaattttaaaagctcgtcaaaaagcaaaggatttgagaaatactaaaccctatgtattaaagacagatatatcttctttttttgacaatattgatcgagcaaaattattaaatgagataaaggatgtaatgccaccagatatactttatttattccagtcaattatttattgtgatccaagcattccttatgaatataataaagattataaaaaactaatttactctaaattaaggaaaggcgtaaggcaaggtatgcctatttctccactccttgcttctttctatttaaatgattttgatgaatggttaattaagaagaaatacaagcatgtacgttatgctgatgacctaattttttttcttgactcagaaaagcaatgtaaagaagtctatagagaagtttctcaagagttacttaaattaaatttaactttacccacacttgaagaaaatacaaagactcaaattatttctcctaaagaaacagtcaattttttaggtttagatctgcgttatgaaaatgaaaaatataattggtatattccaccccatgtaattgaaaatgtaaaatataatttattacatctaactaatattcaaaataatctcaaaatgaaattaaatttctccaaaactataagtcgtatggaacaaattatttctggttatcaacattgttatagtgatgccgattctttaaacttaaaagatttcaataaaatactaattttagaaaagcaaaaagctattaatttactttttaaaaatttaggaattgatattagcacagtacattcacaatatttaaaatatttattagacaattaa

SEQ ID NO: 53219 - DNA, 2019 bp, Acinetobacter baumannii
atgtacatagttaaaaaaggagatacattaacatctattgcaaataaaaatgggtgcacagttgagcaaattattaagcttaatagtataaaaaataaaaatttgatatttgtaggacagaaattaaaattaaaaaatacgcctacgcctacgcctacgcctacgcctacgcctacgcctacgcctatacagaatttaggaggtaaggttggtatagctatagttaataaaaaaggagaaccaatttcaaatttcaaattaaaaatacaagtaggaaataatatatatagtaatcagctaaccaatgcgagaggtgttgtaacccttccaaggcaaaaatcaggagaaaatataattattcaaggatggtctaagacaaataatagctataaattaattagtaatagatttattactgagaatagaaaccttggtataggtatttcattagatactattaaatttgaaacaaaaacagacaatcataaaaagcctataaataataatgtaaataataatggccaatcgacgacaactaatggaagtaatagtcaaaataatcctatagctagaacttctgtagagggatgtagtaattgcacaaaaattacagaaaatgagctgaaacagatatttacacaagctaattctaacgatataaaaaaaataattgatgtttatacgaatttctcagaaaaatttggaatgaataattgtttaagtaaggcacatttttttgctcaagttttagaagaagtgggtaaaaagatagaagttaaggatggagaaagcttaaattatcactctgatattctttttttgtcttatacaaaaataaaaagaaaagagtatataatagaaaaaggtaagcgagttgagaaaatgactcatggtgggccattttcagcatttagaggaaatagacagttatgtgataaatatggaagaaatgataatcatcctgctgatcaagtaatgatagctaatattgcatatgcgaatagaaatggaaatggtgatattcaatctggtgatggttggaaatatagaggtcggggaattatacagataactggtaaagataaatatgataaaattaataaagcaataaaagataattatcccaatgtaggaatatctattgatgcaaataatattaataatatttatgaagggacattggcttcaatggcttattggaaatcttttggtctatcaaaactagctacacaaaaacaagtagatattaggactcaattagaagttgtagattctttaattgatattattaatcgagatacagcatcaagatcagatagaaaaaagaattttgagtatataactgcgaaagtcttcaagcttaatgaatgtaaaaattcaattgtagaagcgaacttactaagtaaatctacacctacacctacacctacacctacacctacacctacacctacactgagtaatgttttaaaggaaataaagcaattagtagatagaaacataccttattcgcaaactggtgcaagaggtgctggaagtaataaaaatgctacctcagtaattactgctaatgatttaaaaggattagactgttcagaaactgttgcaatatatcttttaaagttaggtgttactgataaattctattctatacatactggtgttatgctcactgaaaatgattttagaaaggctatacgttcaaataaaattgagtatgttgttggaagtaaagatcttaattttatccctcaaattggggatatatttgtttggcgtaatggtggtgggcactgtggtatagtgtatgatgttgatagacaaaatgataccgttactattttagaggctataggtgacgttggaagtgctgatgaaaattttaatataaataatgggggcgaaaaaaaagtagggtgtacgcgaacagctgtatatagaagatctggaaaagctttagcccagcatagaggatgggtgggatattttaggccaattattagtggaaaaaaaatatga

SEQ ID NO: 53220 - DNA, 324 bp, Acinetobacter baumannii; identical to SEQ ID NO: 48570

SEQ ID NO: 53221 - DNA, 243 bp, Acinetobacter baumannii; identical to SEQ ID NO: 46178

SEQ ID NO: 53222 - DNA, 276 bp, Acinetobacter baumannii; identical to SEQ ID NO: 19894

SEQ ID NO: 53223 - DNA, 543 bp, Acinetobacter baumannii; identical to SEQ ID NO: 8085

SEQ ID NO: 53224 - DNA, 861 bp, Acinetobacter baumannii
atgcatacgcggaaggcaataacggaggcaattcgaaaactcggagtccaaaccggtgacctgttgatggtgcatgcctcacttaaagcgattggtccggtcgaaggaggagcggagacggtcgttgccgcgttacgctccgcggttgggccgactggcactgtgatgggatacgcgtcgtgggaccgatcaccctacgaggagactctgaatggcgctcggttggatgacaaagcccgccgtacctggccgccgttcgatcccgcaacggccgggacttaccgtgggttcggcctgctgaatcaatttctggttcaagcccccggcgcgcggcgcagcgcgcaccccgatgcatcgatggtcgcggttggtccgctagctgaaacgctgacggagcctcacgaactcggtcacgccttggggaaagggtcgcccgtcgagcggttcgtccgccttggcgggaaggccctgctgttgggtgcgccgctaaactccgttaccgcattgcactacgccgaggcggttgcggatatccccaacaaacgatgggtgacgtatgagatgccgatgcttggaagaaacggtgaagtcgcctggaaaacggcatcagaatacgattcaaacggcattctcgattgctttgctatcgaaggaaagccggatgcggtcgaaactatagcaaatgcttacgtgaagctcggtcgccatcgagaaggtgtcgtgggctttgctcagtgctacctgttcgacgcgcaggacatcgtgacgttcggcgtcacctatcttgagaagcacttcggagccactccgatcgtgccagcacacgaagccgcccagcgctcttgcgagccttccggttag

SEQ ID NO: 53225 - DNA, 1149 bp, Acinetobacter baumannii
atggcaaatcttgtatttaaatttaattgggaccatcgaccgttccagttgaactcagctcagggcaagcggcaatttatgctgccattcgcttccggcattcccaatttaagccctaacttttcacaagttcaaggaactgcagcaatctctcaaggtggtacaggggcaaccactgcagcagaagcgcgaaataatcttggtgctgctgaaaaaggtgtaaatactgacattactgaaatgaaaggtttagctactccactttcagttgcgcaaggtggaacgggtggaaactccgcaattagtgcgaaagttgcattaggtttgggtgatgcaggtgttttgggttattcagcaaacgttgtagcttctctttttgataaatcacaagtttcacaatgggtaacggttctgggtctaaatcgtttagtgaacatctcccatggtgactggcaagggggaagtacatcaaatcctctattaatgccaatgcgttacggaacccttatgggttaccaagcgaatgattcgattggtacttattcatggcaactatttaaaggtgtctctggtcatcaaatgtcttaccgttatggtgcgggatctgatgcttggtctacatgggggcatttaaagaccagcttcaatacatcagttgatgcaaacggattcttaaaatcagcctcaccagtagttaagttgtttaacgaccatatcgaactcaatagtgatgcagaaaaacagccgattgaatttaagaaagttgatgtaggcgattatttacttaaaggctctttaggctttgcccaagaaggttggtacatcgaagtacccaaagacgcaaatggaaacacgatcgtagctgtggtgtatgacacattggaaaacggtgatctatctattaagacttataaacgtaagtttgattttgaacttgctgcagttgttgcagacttggaattacctatagatattccagaaggtcgctggattgatattcgcttgcatgaagaacctgaaccagagcctgagccacctacaactgaaacaccttttgatttccagcctacaaacttatccgaggctgtggctgctgcaatggctggggtggaaccgccggaagtctcagataccgatgaaacactttaa

SEQ ID NO: 53226 - DNA, 918 bp, Acinetobacter baumannii
atgagttcaggcgcaaaaattcgattatatgcttgtgaagaagcagtattagggacgactccagcaaacccaatttggtacacggttcgccgtgtaagtgatggcttatcagaaaatgtctctacggaagaaagcagtgaagtagttgactcacgctatcgtcgaggcggtgtagttactgaagcggaagttgctggtcagttagagtttgaattgtcacttggtacctttgatttattcttaagtgctttagcatttaataactgggcaacgaatagcttaaccattggcggtaatgtacgtaagtctttaacgctggttaaagtttttgaagatattgggcaggtgtttatctaccgtggtgtgcaggtaaataccggtgaaattaccattcaaacaaccgggaagatcactggtaactttggtttagtaggtagctcgtttactcgtcagcaaacgaaccctgtagtgaatccggttgcagcttcgactcgtccgcttgtcagtatgccgaacgtggaaaacttgcttgtaaacggccagtcaattcaaggcaaagcatgtctacagtctttgaccatttctattaacaataaccttgaagcaatccgttgtatcggctcaggcaagtacacaccagagttctacattgaaaagatgatggatatcgaagcaaatgcttcattcatgttttcttcaacatctgctggttggattgatgccattaaaacccgtgatgtatttacactgacctttgatattaaagacagcaaaggcagtaaatactcgttcaatttccctcaattggaagtcatggaagccaaccacccggatggcggtggtgacgacatcattacagtagacatcaactttgcccaagttcgtacagcgccaacgattgtacgtgctcttgtgtaa

SEQ ID NO: 53227 - DNA, 1179 bp, Acinetobacter baumannii; identical to SEQ ID NO: 46091

SEQ ID NO: 53228 - DNA, 918 bp, Acinetobacter baumannii; identical to SEQ ID NO: 46092

SEQ ID NO: 53229 - DNA, 708 bp, Acinetobacter baumannii; identical to SEQ ID NO: 46630

SEQ ID NO: 53230 - DNA, 459 bp, Acinetobacter baumannii; identical to SEQ ID NO: 46717

SEQ ID NO: 53231 - DNA, 300 bp, Acinetobacter baumannii; identical to SEQ ID NO: 45476

SEQ ID NO: 53232 - DNA, 300 bp, Acinetobacter baumannii
atggatgcatgcgcggcccacttaatcgaagactggaaaggtgtggtatttgccgaaatcgtagacggtaaaactgttgagtccgaaaagccatatacacctgagaatgcctcaaagcttcttaatcttggtgatattggtatttcaatctggctattcattaaagaacaggcccagaagattcaggaagacgcagacaaggacaaggctttaattctgggaaagtcatggagctctacaaataccaaaaaacgtatgcgtcgaaaacgccgcacgaaatcgagcaaatcaagttcttag

SEQ ID NO: 53233 - DNA, 444 bp, Acinetobacter baumannii
atggcctcacgtttaactttatttctcaaaagtacggtggttaagatggcaatgactttagagcaaacaaggcaagctattattgatcgtatgcaaagctttactggtattgcgcaggacagaatacagtatccaaatgctccaggctttaatgtacctaaagatggtgtttggtgccgcttaacgattgcaggtggtcccagttttaattctggcattgcagataagccatgtactcgccgtaccggtaatatcatgattcaatgctttgcacgtcccaattcaggaataattgaaatcacaaaattgagtgatgcattacttgctcattttgaatatttcacaatcgaacacttagaatgtttgaatggccaatctatttatgcgggtaaagatgctgatttcattcagtataatgtgagcattgggtacaaggtgaattga

SEQ ID NO: 53234 - DNA, 369 bp, Acinetobacter baumannii; identical to SEQ ID NO: 46136

SEQ ID NO: 53235 - DNA, 444 bp, Acinetobacter baumannii
atggcctcacgtataactttatttctcaaaagtacggtggttaagatggcaatgactttagagcaaacaaggcaagctattattgatcgcatgcaaagctttagaggtattactcaagacagaatccagtatccaaatttaccaggctttacggtgcctaaggaaggtttgtggtgtcgcttaacgattgcgggcggtccaagttttatttcaggcattgctgataatccttgtacacgccgtaccggtaatattatggtccaatgctttgctcgtcccaattcaggaataatggaaatcacaaaactgagtgatgctttgcttgcccattttgaatattactcaatcgatcatctagaatgtttgcaaggacaatcaatttttgtcggccaagatgctgatttcattcagtataatgtgaccattgggtataaggtgaattga

SEQ ID NO: 53236 - DNA, 441 bp, Acinetobacter baumannii; identical to SEQ ID NO: 49901

SEQ ID NO: 53237 - DNA, 294 bp, Acinetobacter baumannii
gtgtctgatttcggattttatattataactttagcttttgtatttatgggaactatatatgttagagttgtaataagatataaacatctacaaaaatatcaattaataatggatattttttttatagcaatcgtggcaataattctttattttcgagagaaaataggcatatctgacgtgtttgaaattcttaaaagttatactgttatatattttatttatagtcttttattaattttaggtattttattttttgttttaaaagaaatgaaaaatcaaaatattattaaatga

SEQ ID NO: 53238 - DNA, 477 bp, Acinetobacter baumannii
atgacagagtttgtgaatgcattctcagacgtcaaaaattttaaaattgaatttaaagtttcaactattggtaaatttaaatcaaagtcaaagtattcaggtatttataaatataaatttgtgaaaaatatctttaagaaaattattgacttaaccgtaaacgaagaaaaacccgaaacaaagataaaaggccttaaaatcacaggttatcctcatgtgagccgtttctttgaatataaagaaattctagaaaatcatcctgatgcttcacatgtattgctaactgatgttcgagacgtttttttccaaagtaatccttttaagaatcttagcaaaggtttatttgtcggaatggaaaatccagactttacgataggtactgagcaatataatcaaaagtggattttggatgcatacggagagagtttttataatcttgctctgtacacgacaaaaatagataactcattgaaataa

SEQ ID NO: 53239 - DNA, 594 bp, Acinetobacter baumannii
atgaatctggctttattcgattttgatggcacgatcacccataatgataccttcagtttattccttaaattttctttgagtaaaaaaactcaaatattaggtggcatccgtcttgcaccttatatagcgggttataagcttgggtgggtaacggataaaacgatccgtactaagctctgccaagtgggatatatcggctatgatgcagcttctttgatatacaaaggacaagagtttgctaaaaaagtaattcctaactgtattcgtgaaaatgctttagaacgcattctctggcataaacaacagggagatcaggttgttgttgtatctgcttcattaagtgtttacttggaaagttggtgtaaatctttagatctggatgttatctgtaatcaacttgaaatagataatggtattttgacaggttattttattgatggtgattgtggttatttagaaaaagtaaatagaataaaaaataaatatgacttaactcaatatcctataatctatgcttatggtgatacacctaatgattatgcaatgttggagttagctcatagaaaatattataaatggcaagagattaattaa

SEQ ID NO: 53240 - DNA, 1071 bp, Acinetobacter baumannii
atgcctaaaaatatttttaaaaatgcaaatagtgttatcgaaggaaattatgataatacactcttaggtgccaatacatatttgctaggtttaaccagtttatttgatgaaatgggtttgcaaggccattcaatatccgatgttttatctggcacgaatatttcaacagatgagataaatcaatcctctttatatatttcccaagtccaaaaaattcagctatttcaaaatattcaaaagctatcacatgatccactcattggtctgcgcgcagggcaaaagcagcggttgtctgattttgcggtatatggctatgcgttatattcctcacgtaattttagacaagcggtagagcttggtatccgacacattaagcttgcaggacctattttaaagaagtcattttatattcgagatgatgttgcagtttttgaagggcaggacattattgcacttggtaagcttctgcccttggtatgcgagttttggtttagctccatgcaaaccttaattgaacgggtgcttgaaggaccatttcaagcgaagaagcttttattgccctatccagcgcctgactatgcagaagaatatgaaaaagtttttcattgtcctgttcagtttaatgctggggtaatgcaatggcactttgatttaaaatggctcgatgtaccttgtccaaatgccaacccgattactgcggacatgtgtaagtcgttttgtgagcggatgctaggtgctgctgaacttgaggagcctgagttggtgaaaacgattcgtttaatactattggatggaacagggctttttccatcagctcaagaaatggctgaacgtttacatatctcaaagcggaccttacaccggcgtttggcaggttttgatttaacctatcaggaactgttagatgaaactcgtcgccggcttgcggatgagtatttgcgagagacaactttaaccgtagacgaaattgccgagagaattggcttttcagatacctctaattttagaaaagcctatcgtcactggacaggcatttcaccaaatgagtatcgtgagaaattagttttataa

SEQ ID NO: 53241 - DNA, 1626 bp, Acinetobacter baumannii
atgaaaagttttaaagttgcccttgctcagttttctccgcatattggcaatattgactcaaacacccaaaagatgattgagcaagcaaatcaggcgaaaaaacaagacgctgacctgattatttttcctgagctttctgtgattggttatccagctgaagacttattgttacgtccaaatttaaataagcggatgcaaaaggcttttgctcaacttagtgaagttaaagatattgtgatggttttcggcttcgtaaaccagacagaagatggccaacgttataattcagctgctgttatgaaagacggtcaggttttaggtgtctttaataaacataacttgccaaactatggcgtttttgatgaaaaacgttatttccaaaaaggccatcagcacttggtatttgagtacttaggccataagtttggtgtactcatctgtgaagatatctggtcaatcaatacagtaaaacaattaagccaattaaatgttgatactgtacttgtgcttaattcatcgccatatgaagtgggtaaaccacagcatcgtaaacagacattaagtgagcttgcaaagcagcttcatttaaatattgtttatgttaaccaagttggtggacaagatgatttaatttttgatggcacaagttttgtcagcaatcaaaatggtgaaattgctttacaagcgcctagctttaaagaagatctctatattgctgaatttgaccgcgatacaaaattatataaagttgtcgagtctgctcctgcattagaaacttttgcagagatctatcaaggcctagtcatggcaacacgtgactatgtagagcgctcaggttttcctggagtaattttaggtctttctggtggtattgactctgcccttacgcttgctattgcagttgatgcaatcggtgcagagagagttcaagctgtgatgatgccatatacttacacttctcaaattagtgtagaagatgcagcggaacaagctcgccgtatgggcgtgactttcggtattgccgaaattcattcaatcgtaaatagcttcatgcaaactttgtatccgttctttggtaattcaccagccgatgcgactgaagaaaatttacaagcgcgcgctcgtggcacattgcttatgggcttatctaacaagtttggtaatttagtcctttctacaggtaataaatctgaactttcagttggctattgcacactttacggtgacatggtgggtggctttgctgttctcaaagatgtttataaaacaatcgtgtttgaattagcaaaataccgtaatagcttaagtgaaactccggttattcctgagcgtgtaattactcgcccaccttcagcagaactgcgtccagatcaaaaagaccaagactctttaccagcgtatgatgtattggatgctatcctttatgcatacattgaggaagatttaggtcaggcagacattattgccaaaggttttgataaagaagttgttgaaaaagtcatccgtttagttgatcgtaatgaatataaacgtcgtcaaggtgcgattggcccgagaattacttctcgtgcatttagtcgcgaacgacgttatccgattgtcaacggttggacagcgaatgactga

SEQ ID NO: 53242 - DNA, 891 bp, Acinetobacter baumannii
atgaatatcgcctttatcggtctaggtaatatgggcggcagaatggctcaaaacctactaaaagcaagactcaaagtttatggttacgacctcagtgaagtcgcgattcagcacttcgccgaggcaggtggtgtggtttgcgacagcccacaggacgcagctaaacaagcagatgtagtcattaccatgttgcctgccgcaaagcatgttaaagaggtttacttaggcgaaaatggtgtcttggaagtgctaaaagcaggtagcttatgcattgatagcagcaccattgacccgcaaaccattaaagacattgctgctgttgcacatagcaaaaatattaaaatttgtgatgcaccagtttctggtggaaccattggcgctcaagcaggaaccttaaccttcatggtcggtgccgatgagcaaacctttaatgaggtgaaacctgtgctcagtcacatgggcaaaaatattgttcattgtggtgatgtgggtgcaggtcaaattgccaaaatttgcaataacctgattttaggaatttcaatggctgcggtggccgaaggcatggcactcggtgtgaagctaggcatcgacccacaagcattggcaggtgtaattaatacttcaagtggccgttgctggagttcggatgtatgtaacccatggccacatattaatgaaaatgcgcccgcatctcgaggctatcaagatgggtttgcgactcagttaatgctcaaagatttaggactcgctgtagaagccgcaggccaagtgaaacagccggttttgttaggtggtatggtgcaacagctttatcagcaaatgtgtatgcgtggtaatgctcatctcgatttctcgagcattattcaacaatacctgccacaagaggcataa

SEQ ID NO: 53243 - DNA, 342 bp, Acinetobacter baumannii
atgagcaaccttaaattcactttcgaatgcgacttagacggaaatagtaatactcagcgctttaatacgttatcaagcaaatttggtgacggttatgaacaaaacattgctgtaggtatcaataaccgagctggtgaatggacttatcaaagaacggcttataaagccgaaattatgcaaatcaaagcgttcttcgatcagcacaagggagctgactcgtttctttgggattcacctttagacggtgaggtccgagtaaaaacaggtgaatatcaaccccgctgtttgggtggtgatgtttggcaaatctcaacgactttcacccaagtcttttacccttaa

SEQ ID NO: 53244 - DNA, 543 bp, Acinetobacter baumannii
atgaacatcgaacaatatcttgatgagttaattaagcgcgaaggcggttatgtgaacaatccagcagaccgtggtggtgcaactaaatatggcatcacacaagctgttgcgcgtgaaaatggctggaatggcaatatgaaagatttgccgcttgaatttgcaaaaagtatttatagaaaacaatactggttggaaccgcgttttgatcaggtaaatgcacttagtccatctgttgctgaagaattgctagacacaggagtgaactgtggtactggattcgcaaagcctctattacaacgtgcattaaacttgctaaacaatcagggtaaagcaggttggtctgatttatcagtagatggggtttatggtccagctactttaaatgcacttaaaacatttttagccaagcggggcaaagaaggtgaaaaggtattagtccgtgtccttaatatcatgcaaggtcagcgctatatcgaaatctgtgaacgcaaccccaagcaagagcaatttttttatggttggatcaataaccggatcgcataa

SEQ ID NO: 53245 - DNA, 198 bp, Acinetobacter baumannii
atgtcgcaagtcatgatcatggtttcggaagcgggcagaatggagaatacttgcaatctacccgctgatttagataagaacgggaatgttcttaaaatctatgactactcattaaaagagttgccgattaatttggatggaaccgtgacatttaatagacgccgttgggaacttcccattaaagtagatttaaaataa

SEQ ID NO: 53246 - DNA, 11172 bp, Acinetobacter baumannii
atgaataagaaccgttatcgtattatttttagccatgctcgcggtatgtttattgctgttgctgaaattgtaaaaagtaaaactaagcaagcagggcaaagtcagggacaagtgggaacagattcgactatagattcggttctacctattcattataaaaaactaaatccacttaattttgctgtaattggttgtttgggagcattggtaattagcttaccaatgagcagtgtggctgaaactcagattattgccgataaaggtgcgcctacatcgcagcaaccgactattttaaatagcgcaaatggaacaactcaggtcaatattcagacaccaagtgcgggtggtgtttcgcggaatacctatacacaatttgatgttggtcaagaaggtgccattttaaataattcacgaaataacacccaaactcagttaggaggctgggtacaaggtaacccatggcttgcaaaaggcgaagccaaagttattttgaatgaagtgaatagtaataatccaagtcaactcaaaggctatattgaagttgccggaaaacaagcacaagttgttattgcgaatccatctggtttgatctgtgatggctgtggtgtgattaacgcagaccgttttactttaaccacgggtcaagcggtaatgaaccaaggttatcttgaatcattccgagttcgtgaaggtcaggttacgattgaaggtaaaggcttaaacggaagtttaaccccttatacggatatttatgcgcgtgctttaaaagtaaatgcaggcttgtatgcaaatgaactcaatactgtacttggacaaaatgatattcaagtcaaagaccaagtagctcctcaaatcacggcaacgacagcagctactaccacacctccgccaaactttgctttagatgtaggccaattgggtggcatgtatgctggaaaaatctttttggtgggaacagagcaagggttaggtgtacgtaacgcaggtacgataaatagtactcaaagtacgcttacgctgaatgcaaatggtgatttggtcaataatggtaacttgatcgcgaatcaagatcaggtacagctgaaagctcaaaatactaaaaatactggtaatgtcagtagcgcaacttcacaaatttctattgaaagtcaaagtctagataactctggtttaatcagtagtgctgatgagttacgtcttaatcaacaaaatagtttaagtaatagtggcacattgaatgctgctcgccttgttattgatgcgggtagtctaaaaaatagtggttctatcgaacaaacaggtttgcaaggacttgatttaaagtcaggttcaatgacaaaccttggtggtaaaatcggaattgctaaaaataccacaggtggtggtagtggcgggtcgacaggtggcagtgttccgacagttccaactgatccatccaaagatggcggaagtttagaagttgctactccaatagatacgaccccaaaaacttatgatcaaggttatattcatgttaaggaacaactaaataatgaccaaggggcgatcattgccaatggtggtgtagatttagacagccaaaatggtctagataaccaaggcggtcaacttaatctgggtgctattcatattaaagggaatagctttaataacaaccaaggtgagctcacagttaaaagtgctgatattcaaacctcaagttttagtaaccaacaaggattactgcaatcactcacttctttagatgtaaatagccagtcgattgataatcagggcggtaaaattaatgccttgaataatattagtatgatctcgagcggaaacattctaaatcaagcggggcagatcgcgagttcgtctgaactttatttacagggattgggcctaaataacagtgggggtgatctggaagctgaacaattattaaaacttaatctttcaggtcatttgaataaccagaaaggaaaaatagtcactaataataacttggatagttcgctttttggtttagataacgaccaaggtgaaatttctgcaaaaaatattacgattcaaaacaaagatcaggctttaaataatggttcaggaacgatttatgctgaccaaagtttaaaaattcaaactggatctttaaataatgcagtcaacggtacgttatctagtcatgaaaatctgcaaattgatagtcaacaactcaccaatcagggctatattcgtgctgatcaacaattaaaaattaataatacaagtgttatgacacagcaaggaggtgttctttcagcctacggtaatattgatttaacgagtcagcgtcttgttagtgatgaaaaaagtgttattgcggttggtatcaatgctcaaggtgagcaagatcaaaatgctcaagcggatttaaatattaaaacagagcaggcacttgagcatcacggaaaactactggcaagccataatattgatttagatggggcaaatgtagatttatcacaaggaactgcagcagctcaaaatataaatattacagctcgtgatggagatataaataatcagtctggtatgttgcaggctgacactatccaattaaatgcagtacaaaaccagcaaagtctgattaaccagggtggtcaaattcttgcgaaaaaattgaatttgaacattgggaaagatattaataaccaacaaggtttgattcagcacactgcatcagatgacctgaatttaactattcagggagtcattaataaccagcaaggccgtattctcacaaatgcaaatcagttaaatattcaagcacagggactcaatagtgactctggtgtgatcctgcattcgggccaagctggcttaaatatggatatacaaaatatccatgcgcaaaaggctgaattgagaactaatggcgcacttaaacttacgaccgatcaagcactattagaccaatcaaaagtgtctgctactcaagccaatattcaagccaaccaatttactgaccgtaatggtgaaatgttgtttagtgcggtaaatggtcaaagttcaattcgtgtaaatggtgactaccaacatcaaggaagtgtattacaaagtaaccatagcttagacattcaaacaggttcgcttagtaaccaaaatgggaatatcttagtcacccaaaatggttcatcttcacaaccagtacagttaaatattgtcagccaaaacgatattcaaaatgatttgggtaacattgtgagtgaaggccaactttcattgaaaactggaaaaggaataagcaaccaacaaggaaatataattagttctaatacgcttgagcttacaacagatcagttaattaataaccagtctgggcagatacaagcgaaggatattaagctctctgcatcaaacttagacaatagttcaggagtaattgctgctaaaactggtgatgtatcactcaatattaataatcagttgattaatggtcgtgttgagcagggtaaatcggctggtattattcaggcagcacaaaatatagatgttcagactgggttattagacaatagtggtctgatttatgcgggtcaaaatcaacaactcaaagttgctcaaaatcttaaaaatgctggacagttagctgctcaaaataacttaaatatacaaacggcgacactgtcccagacttctgcagggagcattattgctggtttaacatcagatggttcattagcaaatcagggtaatcttaacattgatgctacaggtgctataaatgcgcaggggcaactcatcgcgggcggtgatttaagtagtcaggccgctaaccatgtcttaaaccaaagtcttgttcaagcaaaaaatatttcgctcaacagtaaatctggtcaattgagcgctcaacaaagttctatacaggccgcacagcaactcaatttaaccactccagatacgctagatactcaacaagccaatttaaaggcgaataaagttcaaattaatgcaaaagacttaaataaccagtcaggacatatccagcaaacaggtttagatgatactcaaattttgttgacgggtgatttaagcaatcaaaacgggcaaattgacagtctaggccaaaaactacaaataaatgccaataatttaaataaccagaatggtctcatccaatctggtacagcagacagccaacttatactcgctatagctaatacgctcaataataatcagggcaatatcaaaactgctggtagtttgcaaacgaatagttctgagttaaacaatgatgctggaacgctacttagcttcaatggctttaacatcaatacacagcagcttagtaatcaagcaggtcaaattgttgaggctggaacacaagacaatattgttaaccaattaattgttaaaaaccttctaaacaatagtaatggcaagattcagacaaatcataatcttgaaattcaggctggtgcgttaaaaaacaatacgggcagtattgtgaccgcaggcacagcaggtcttaacctcaacacagcatcacgactcgataaccagtctggaaatattcattccagtggtgatctaaatataaaagctcaagacattttgaatgatcagggacaaattcttgctgccaaaaatgctcagtttaatagccaaaacaccttaagtaaccaagcgggattaattgcagcacaacaacaattaatgattcaaagtgctgctttgaataaccaagcgggtcaaattgggtcggtagatgcgggcgtaaatatccagacgactcagcaagcattgaataatcagagtggtaagattcaggcgaatcaagcgattaacctcgatgtacagggccttgataatagtctacaaggcttgattagtagtactaaaggtgatcaaagcaaaattcagattgatactcaccagcagagcctgaataaccaaaatggacagattaatagcggtaatacattacagattagtaccaatagtctgaacaatcagcaaggtctaatcactgcacagggtgatcttggtataaacgccgtgcaactgattgataaccgacaaacctatttaaatgctaccttgccagagttggcccaaggtattcaatctttaggacaagtcttattacaaacgtccgaattaaataatgaacaaggtcaggtcattgctggaaatggattaaccattcaagcgcctaaggtgaataacagtaatgcgggcttgttagccagtggacaagacttactgatcgacagtgttggacaagcaggtacgattaataatcagaaaggcaaaatcagtgctaaccaaaacattagcctcaatacaggcctgatgagcggaagccaactcgataatagtcagcagggcttcattagtgctgcaaagcaagtcaaaattattagtcaaaatattgataattcaaacaatgaccagaaccaaggtattcaggcagggcaaatagaaatagctgctagtactttaaataatagtgctggacgaatctctgctgagcagcaacttaatttaaatattttagataatttaaataacaccaaaggcttaattagtagtcttgatcaattaacaatacaaggtcagcaagataataaccgtctaatcgtaaacaatcagcaagggactattattgcaggtgaagaaggctcatcaactgcaggtttaaatattctggccaaaggtttaacaggcgacggtaaggtcttaagtcagggacagttaaatcttcagctcaatgatgattatgtacaagatgctcaaggtcagttgcaggcacagggaaatttaaaccttagctctaagggaaaagttaccaatcatggtgcaatcaaaagcaacggacagttatctatttcagcaaatacaattgaaaatgctgtagatggcagtttggaaagccagcaaactcaacttgaatctgtaggcgtgctcaataattatggactcattaatggttcaaatacatatgttaaggcaggccaactcaataatattgccggacgtatttatggtgaccatattgcaattcaggcgaatactttaaataaccaaagcctcaagggtttagcgccagtcattgcctcaagaggtgatctggatctgggcgtacaggttttaaataatctggaaaataatctaaatcatcaaagtggttcgcaaattattgccatgggagacttgcgtataggaggttcgcttgactcacagtggcatgctcaaggaactgctcagcaagtcaataaccgaagttctgtaattaatgcgaatggcaatatcgacttgaatgctgatattgttaataaccagaatgtgttttttacaaccaaacaacagcagaccacagagcaactggattactggaatatgtatatttcagattcgcgtgccggatggtataaccctggtcctcagtccttaattactcaggaaatctatagccagaatccagatttatttactaaattaaagcctgcacaacaacttgtgacttcctatgacaacgcaacgatgcaggattatttaagtcgtcctgatggttatttcttcattgtaaataactatgacgatagctcagccggcaacatgtttaaaggctatgtcgtttataacggacagctctacagtactgaccattatgaaaatgtgaaaagtacccaaactacgactacgactgtagcagatgagtcagcaccagctgtgatcagtgctggaggaaatttaagtttcacaggcacaattaataatgacaaaagccaaattatggtgggtcaaaagctgattggagatgcaaacgcaattcacaatgtcgatgccaaaggtcctaaaattacgcatgaaacaggaacggtaacgccgagttatggaagttatgggggcaaggggcacgatagagtctgggcttctgctgaacaagcttataacccagcagatgttaccaaaggggtggatttatttatctatgaaaatccaaccagtgcgacccctgttaaagtgcaagaccaaacccagcaagtcaataaagacaatttgactgaacaggcacttagtcaaaaccatgactccaatattattggtcagcaaaatacacaggttaatcaaacagaaactgttcaacaaactacagctcaaacagatcgtattcaatcaaatgaaattaaaacaggtcaggcacagcttaaaggcgtagttggggcaaacactaccgatcataaagccatgagtaatcgtgcagtcgatcaaattcaaaacactgatactaaggctgcctctgttcaggggcaaacaacacagattgatggtagtggtttcgagattcgtaccaacaacgctaacgttaaagtcccaaataatgcgttgtatagtaaaaatccagacagccgtgctaactaccttgttgaaacagatccagcgtttagtaactatcgcaactggttatcttcggattatatgttgaatgcattgggacttgacccagcacttcaacaaaaaagattgggtgatggttactatgaacaacgtatggtacaggaccaagttgctcaactgactggttaccgtttcttacaaggatatggttctgatgaggagcaatataaagcgctcatgaataatgggctgagctatgcaaaacagtacaacttacgccctggtattgcactcactccagaacaaatggcgcaattaagcagcgatattgtttggttggtagaaaaagaaactaccctaccagatggtacaaaaaccaaagctttagtcccgcaagtttatgttaaagcgcgtgtaggtgacttaaaaggcgatggaactttaattagtgccgatagtattcagctcaatttaagtaaagatttgaccaatgcgggaacaattgctggacgacaagtggttcaaattaatagccaaaatttaaacaaccttgctggaaacatccgtggtggtgtagttagcattagtactgaaaaagatttaaataatattggtggtatgattcaggccgatcaagccatgaatttgcaggtaaaaggtaacctgaatattcagtcaaccacacagagcagccaaaatgcattaggccaaagtaactatagctggacaggaatagatcgtattgctggtctttatatcggttcagcacaacagcaagcgttgagtgatcagccaaccttggtgatgaacgttggtggtgacactcgtatattggctgcaaatatccagaataacagcggtggacgaagtattatccgtacgggcggtgaccttaaagtcggtagcctgaatacggaagtgaccaacaatgtggtgggtagctcaaaagcttatcatttagatacacgacaagtcgaagtcggcagccagattaagagccaaggtgatttaagcttacaaggcaataatattcagattcatggttcacaaatcagtagttcagaaggcctaactgcgttacaggctaaagagcggctacagattgaagagggccgaaacaaacttgatcaacaagatcagtcaagctttagtaagaaaggtaaactgagtagctctacgacaagtgactttagccatcgtagttcagatattgcggtcggtagcattgttgaaggcaaaaaagtgctattggatgcaggaaatatcaatgtccgtggcagcaatattgtttctgatgagttgacgcagattcaagccaaagacaatgcaaatattgagggagctcagaaccaatacaacagtcaaactaatagtgttgttaaaaactctggtcttatgtccacgggtggcattggttttagtttaggtaaaaaacaagaaactactttaaaaaccgagcaacagcttactaatagtgcttctcaggtgggtagcttaaacggtaataccaatattgtagcgggtaagacctatcagcaaacgggaagtaccgtttcatcacagaaaggcgatgtgaatatattggcgcaacaagtcaatattgaagctgctaaagaacaaagcacaagtgattataagcatgagatgcaacagaaaggtttaacacttgcagtaaatgttcccgtagtctcggctgtacaaagtgtagcggagtctgctaagcaggttggtcaaagcaagaatgatcgtgtgaatgcaatggcagcagccaatgctggctttgatgcttataaggctggacaggctttaagttcattacaaggtgcattatcaaatgcaggttcactcaatggtggtgtagaagttggtgttagtctgacttatggtgaacagaaaaatactgaaacaagccattcacaaagtaccacggcgagtcaaagtcaggtcaatgctggcggaacgacaaccattgttgccacaggtgcaggggatcaatcgaatattaatattgttggttcagacgtattggggcaacaaggtacacgcttggctgccgacaacaatgtcaatattaaagcagccgaacagaaccatattgaagaaagtaaaaatgaaagtgcaggctggaatgccggagttactgtaagtaataaaacaggctttggtgtaacggctggcggcaacttgggtaaaggtaagggtaatggtaccgacacaagttatgtgaatagccatgtgggttctaaagatagcctaaccacgataacaagcggaaaaacgacgaatattattggcggacaagtacaaggtaaaggtgtacagattgaagccgataacttaaatgttgaaagcttacaggacaaagcgacatataagagcaaacaacagaatatgtcagcacaggtaagtgtaggttttagtggaggtaatgtatctggaagctttagcaagtctaatgtagatgcgaattatgcatctgtaaatgagcagtcaggtgtatttgcaggcgatgacggttaccagattaaggtgaataaaaacactgacttgaaaggtgcaattattacctcgactcagactgcggaaaacctgaagaaaaatagcctagatacaggtactttaacgtcttctaacattcaaaatgtgactgaatatgatgctaagggcatttctgtaggtggtggttttaatgccggaaaaagtggtacggcaggtaacaaagaacctggcacggtactttcgacaccaaacaaaattgatcaacatgcttcaacaacagtaggagtaagtaaatctgttgggtttggcctagacagtgataaagacagtagtgtgaccaagagtggtattaatacccaaaacattacaattcgagatgaacaaggtcagcaagcgttaacaggtaaaactgccggacagattaaatctgagatattgacgtctgtaactacagatacagcacgtgagaatagtggagcactgcaaaacaactttgataaggataaagttcaaagtgaaattaatttgcagatggacgtaacgaagaactttgatgccaaccgtcaggaagcaggcattacagttgataatattgtaaaggcgctggaagtcacaggacaggcaatagagggtgctaaacagacactagctatagccaaacaagcacaacaagaaatccaaaaacttagcccagaagatcaagtaatatttgaaaatttcttgacagaacttgcacaaagtcaaagaacggatagaacagacacttattatcctcttgttttggcagctggagaagggttagcgatggctgcagcggcatgtgcaagaagcccggcttgcgctagtgcgacagtaaatgtattaggtgcagttggagttgcaattttaaatgaacagtccgatgacaagaataaaaaaactaccccaaaaccattaccttcaacatctgggaattctgcaacaggtatgcctcctaacaaagatgataatgaacgagattttaaatatgacaataaacaaataggaaaaaaattaggaaagcatgttagtgattttggccgaaatccagctaatgcaactgatagagaatatgtattagctcaaattgaaaatattgcaagacatcctgataaagttgtaagaggaacatttgcaggacaaggtccaatgaatacaagaggcgcggtccaattcagaataaaaggccaagatgtcgttgtaactaaacctgacggaacttttgttactatattgagaaatgggattaataatccttcagttaagcaagcattaaatggagctaaataa

SEQ ID NO: 53247 - DNA, 435 bp, Acinetobacter baumannii; identical to SEQ ID NO: 48819

SEQ ID NO: 53248 - DNA, 399 bp, Acinetobacter baumannii
atgtgcaaaggtggtgctatttcttcgggccttgaagctgttggcaatatctcaaatgcgcttatggcagatgctacagctaagggtaatgcaaaaacaattcaatccgtctccaaagttcaaagcaaaaagattaaagaacaagggcagcgagacgcatcaagcgctatggctgcggccgctgaaaatggcttggatgtaaatgtaggcgttccagcattaatcgaagatgagattttaggggatgcagcatataacgcatcaatgaatatcagtcaggctggttatagtgcttcagatgtattgcgacaaggaaagatgcagcgtaataactatggctataaggctgcaagtgatgttattaaaacagcagctcaagcgtatgatgggtggaaataa

SEQ ID NO: 53249 - DNA, 192 bp, Acinetobacter baumannii
atgcagacattgcctagcaccattattacaccttcggctaaaacaaatagttttatagcgagcttattaaaagcaaatcgctttaactattcaatcaaatcagataataaatatgcatcatataagtatgatttgaaggggttagatttggtctatggattagcaaaagaaattgttgaattaaataattag

SEQ ID NO: 53250 - DNA, 2394 bp, Acinetobacter baumannii
atgtcagtgccagagcaaataccatatgtcggatatgtcgcaaatggacagacgacagaatttccaattacttttgatcttcatgatcctgagtatttgattgtaacaatgaataaagaaattcctgttgttgggacatatgcagttgatatgaatgctctaaaagtagtgtttgcaactgcaccaacagatggaacacaagtagaactgtatcgagaaacagaactaaaccgagatacaaattatcaaaaatatgacaactcattccgtcctgaagctgtaaattacgacttcgataagatttggcatgtcttacaagaacaagacatgatcgatgcagaattattagcgcgacttaaagcggaaattgaatggagacgcacgcatgacgctaattttgatgaattggcaaaaatgcgtgatgcgcaaatattcacaggactaaagcaatatatagatacatatattgcagcaacaaatccaaatatttttgaaggcattactgcaggcattgtcttcgctttagataaaaaaagtgttcaaacacacttagaaaatatttatcaagagcttattaaatctaatcaaagcattgccgaagaaaaatctcgagcagaaggagctgagcaagagttagaaggcttgatttctacgcaacaagccaatttgaaggcagaaattcagcgcgctataatttctgaagcagcaattgatgcaaaagttaatgcaaatggtgtaggcaacagagcttacaaaacttatgcagatatggatgctgataaagctaatattcctgcgaaatcaaaagtcacagtcaccaatgatgctactccatctaataatggcgactggcaatgggatggaactacttttacaaagtcaatttttgatccagtttcacaagcagcggccgatgcaaccgctaaagcgaatgcagcagaagcaaatgcaaaaaactatgcaaataatcgaattccattagatgcatatgacgcacttgacatgcgggaagacattgcaggttttgtttatgcatacacaacaaaggatggccaattaaaacttgtagggatgagtggcggagttcaagagaacatcaacaccctagtttcacagattttttcaagagatgatggtgttttaaatacttttcttgataaaagtggaaacgtagttgcttatacagatttaagttcaaatctacatgttgctggtcagatttttcaaggcggtgaatcactatcaaccattgtaaaagagacgccaaaaaatttagaccgcaccgcatgtctagcctatcagtctagtttgattagcaaatatccaccacgttctgagttcacatctgtaatgactcgtgcagaatcaaatggtcttcgaaaccgtatgatttctgctattaaagtcccgactgggttgtttatggtttggcatcaacaaactaaagccgagtatgatggtgatggctcagggtctgcattttggtgtggttttgctgatattgatagtagtcaaaacatcacaattcgagataaaaaactatttatttacccagatacagatgcgggtattgttaaacatccacatttgggtcgcacatcagataatagaattattcttgtttatgagaaatcagttgggtatgcggaggcgacagcacagaatcctgtaaattacatcagatatgttagatattcatcagatgagggtgttacatggactgatcctgtggctttaacttttactaacaatccgccaacaacagcattaaaagcgttaggaacaacatccgaagtattaagacttaaatcgggaagattgattgtcgctctttattcgacgctgggacaatgtggatgtatctattcagatgatgatggcgcaacatggagttattcacagcaatggatacgcgaatcaaattggggtacagagccgtgtattaacttagatagtaatgggcatttgataatgtctatgcgcccaatgcaatcgacacagatgtttgcagggtttgcacgtagtgttgatgagggcaaaacttggcaattagttcacacaaacaagcttgtaagtgtcgtgagtcaatcatttttgctctatgacgatgcactaggcttgcatatcgaaagtcacgatactaattctttaaatcaacgaactagattccgtttatcgctttcttatgatgattgcaacacatttccgctccactacgcaccctttgctgatactcgttatgttgggtatacgcaaataattaaatggactgaaggggtatatctattaatgatggaatataacgataagtggagtggtgttaatagtaatgaagatttgggtattcaactttttacaatttcggagattatgaacaatgtcagtcgtaattaa

SEQ ID NO: 53251 - DNA, 903 bp, Acinetobacter baumannii
atgtcagtcgtaattaaatcaaatcgagcttcgctcaaaaactttggtacttacgcatcacttatcacaactgcatctgaagcttacacagcatataaaaatcgtgtagaagcagatggcggaacagttatgaatgagaatgctacaattgcagcatttgattttctaattaaaaatggactgcttggtgcggcaagaacgtgggtgtcatcttcattcgggttaaaattaagtggctctaatattcttaaagcttacagtttgagcggagaagatttagtatctgttagttttggttctggtttactaccaacattaaataacggtataaagtttaataacactgtttcagacaccgtgaatggaacaattttaacatctttaaataaaatagacttgcgtggtaaaggaacttttattgggcatcagcgttttgctcaagccccttcaagaaattttttaactattgatgcagctttaacattgcacaatggtgaaccgaatgcttccccgctactaactcttcaaaccccactgaatagtaactacacgcgtttgcgcaggcaggttggaaataatccaaaccaaaataattcaggttctgctgcttatgcaaatattgacttgaattcaagtacacaggcagatgttagataccagcatagaacatcagagaatattgggacaggtataggttatcgtgatggtttggcagttactcttccaccattaagccccgccaactttgatggatttaaagcttacattgatattggaggggctaactatcaaactgggaattcgccaacacgttatttttcagatacaacatttaagcatttttatatgtttgatgaattaacagaagagcaggtaaatgcacttgtgaaattagtaatctga

SEQ ID NO: 53252 - DNA, 357 bp, Acinetobacter baumannii
atgactgaaaatgaatcgtatgggttgagatttgaaaagaaaatcgactccattcagagtgatattcgcatgttgtcagatcatgttactcgactgactttcattaatgaagcgcacaaagagactagcgaacagaacaaaaaagatatcgatacattggatatcaaagtcgccaatttagaaaaccgcacagcagcgcaagatggtggaatttctgtgctgcgtgtattgctgggaatatttgcaggcatcgtattttcattgtgtgcgtgggttggatcttcaattattcaattaagccaagaccagtctttaattaaagagaaagtatcacggttggaggaagcaaaaagatga

SEQ ID NO: 53253 - DNA, 219 bp, Acinetobacter baumannii
atgaacagtgaaaatactcgcgcatatctagctttcgcattagtgggactgatgtttgttttagtgattgctttattttttgtggatatgccgcgagaaaacagcaatctgatcaatacggcattgggttttattgctggggctatgacaactgcatgtgggttttattttggtagctctgagttagagaaaaagaaaggtgaatccaatgacaactaa

SEQ ID NO: 53254 - DNA, 702 bp, Acinetobacter baumannii; identical to SEQ ID NO: 48678

SEQ ID NO: 53255 - DNA, 528 bp, Acinetobacter baumannii
atgactgacaaagtgaatattgcagaaattatagaacggctagaacagttggaagcacttaatgccattcgtaactgcataaaccgttatatggaaatctgcgacgagctcaatgcaaatacagatctttatgagttgatgaatctttttgatcaagactgtatttgggaaggtattggcgataaatattccaaatcttttggtcgttatgattcttggcagtcgatttatgacatgttcaaacgctatacacaaaaagaatctcactttgtcatgaatgcacactttgtaaactcagaacaaatttatgtaaatcaaaatgatgcaaatgcttcatggctgatgttgcaaacttcaacttttcaagatggccgtagtcatctgaatgcggcaaagctcaaggtgaagtttcagaagcaagcagatggaacatggaaaattaaacatttccaaacacagaatattttcagtcgtccggtatcgcattggcacagtgaagccgagttgccggtaccttcccaggaatga

SEQ ID NO: 53256 - DNA, 609 bp, Acinetobacter baumannii
atgaacattctccagcgtagtgaagattggcattcagaacgctgtggcaaagtcacagcaagccgtgtaaaggatttaaatgcaaagcctaataaaggtaaagctttaaatgcactgggtttaacaattctagctgagcgcctcactggcgttcagaaggaaatcccaactaattcagtaatgcaatggggtatcgacaacgagcctcatgcaattgcagcttatgaaaatgagacaggtaactttgtagttggaacaggtttaattgaccaccctttcattgaaatgttcggggcttcaccagatgggcttgttaatgaagatggtcaaatcgaagttaagtgcccagacactacaacgcatttgaataccttgctgactaagcaagtgccagatgagtacatccctcaaatcactagtcaattggcttgtactcgtcgtgaatggtgtgactttgtgagctatgacccacgtttaccagaaggactacagatcatcattattcgtgtgtttgcgaaagacttggctatcgaagcactagagcaagatgttcgcaacttcaacaaagctatagatgacgcaataaaaacactgaaggtggcagcatga

SEQ ID NO: 53257 - DNA, 441 bp, Acinetobacter baumannii
atgacagatttgaataaggaaagagaggcttttctaaataccttccaatattacaaaggaagaagagacattatttttagtcatgagcatgaactgtttatgactagatcaaacaatccttctgaaattgctcagaaagaaataagcaacatgaatagccgttgggatgcttggctcagatgtgcaaagcatcgtgatgcagggctagaaaaagccaaagctcagacggtgccggagaaaaagatttacttaacctgtgagcaattatatgcagcagcaaactttggtgcaccaaacaaagatccagaacttttagaaactgaattaacaattgcttggtttgaggaagctcatagcggcagtggttactacgtttatataagtgagtatccagaagaaggtgcaatgaagctggaaaccgaatcgggagctgagggatga

SEQ ID NO: 53258 - DNA, 381 bp, Acinetobacter baumannii
atgaatgaatgtctaaaatataatatttttcaacaacattgccctgctcgactgttttttgaaaaaattgcagacaaatgggttttactcatcttaaatattcttgagcatgaaactcagcacttcaacttacttaaaaaaaatattgaagggatttcacctaaagtcttgtctcagaagttaaaaatgttagagagagacggttttatcgaacgaaaaattcaggatacttcccctattcgtgtcgattattccctcaccccacttgggcaaaatgtagctgctatggcgtatcagttaaaagagtgggctgaaactaatattgagcaagttttagcagcccaaatcatctatgacgaaaagatactagaacaagcttga

SEQ ID NO: 53259 - DNA, 834 bp, Acinetobacter baumannii; identical to SEQ ID NO: 52489

SEQ ID NO: 53260 - DNA, 1161 bp, Acinetobacter baumannii
atgaaaagaaaaatatttactccacgaccagactggcaagtggagcatcaaaatattggttttgattattttaatttaccttctctcgatggctcaatttactggtctgaaggggttgcgtatgagtttactcttaaacagattgaacaactcgaagatgcggcaaatgaactgcatcagatgtgtttatcggtagtaggagacctcattcaacgaggaaactatcctgcttactttcaaattccagaaacagccataaaccatattgaacattcatggaaacaaaatgctccgatgctgtatggccgctttgatttcgcttacgatgggcgaaatatcaaaatgctggaatataacgccgacacaccgactggcttacttgaagcttctgtcgcacagtggctgtggatagaacaagtctcgggcattgcaaaccgagaccagttcaatagtattcatgaagacctgattaaacgctggaagacaattttaccgcgtggtagccatgtgcattttgctgcctgtcaggaagctggaagggaagactggggcaatctcgagtatttgatggataccgcttaccaagctcatctacaagtttccgagctttctatggagaacataggttggaacgggcaagattttgttgatctccataatcagcccattcaaaacatatttaaactttatccatgggaatggatctgggaagaagcattttctcaatatatccacccacaaacacagtggattgaaccttgctggaaaatgctactttcaaataaagcgattctggttgagctttggaagtgttatcccaatcatccattattgatcgaaacccatacctatgactcgcaacaaagtttgtctggcaaatgggtgaaaaagccgattttggcaagggaaggggccaatattcgggttttacaagacggccatgaccaaggcgcggcttctggtagcttttattttgatgactatgacaaatatggttatgtcgtacagaaatgggtagataccccattattttcaggacaactacctactcttggtttatggatggttggacatcaatgtgcaggcatgtctattcgtgaagattgttatgacatcattggtaatgacgcccactttgcagcacattattttgtcgagtaa

SEQ ID NO: 53261 - DNA, 414 bp, Acinetobacter baumannii
  misc_feature (364)..(373): n is a, c, g, or t
atgtttaatctcattatagccatttggctaggtgcaattctaaatattggtttttatcatcaagttcatactttaactccatattttggaataaaggctattttgtttttagctgctactctcgtaattcttgttgctacctattatgcggttttacaaatcttaaattggaaatggactgccaaaatctttgcaattttattgatatttattggtggctttagctcttattttgtaaacacattgggtgtcattatttcacccgaccaaattcaaaatatggtgcagaccgatgtttcggaagttaccgatctaatctctttacgctttgttttatggacagttttttttgttattttacccnnnnnnnnnnagttaaatttaaacaagaaaaagtatcacggttgttattga

SEQ ID NO: 53262 - DNA, 3120 bp, Acinetobacter baumannii
atgtttaataatatttttcagatcttagagagttttggttttctctcacagcatcgttcggtgtatctccagttttcagatgcatccctgaatagtcaggtttttttacaacgtatagatgggcaacattatcttaatcagggcatgacagccgagctgatttgtttatcaaccaatgctcatattccactcaaaacatttattggggtgcaggttgctgttgatcaagtaacagatcgaggaagttttttccgtactacaggtattattactggagcatcacaagggcaaagtgatggtgctttaactttatataaacttgctataagtgatccaacttatctctggcataaacgcagaaatagccgtgtgtttatgaacaagagtgtgaaagaaattagtgaaattctgtttcaagagtggcaaggaaaaagcccattatttgcttctagtctgactctagatttgagcggcttgaaacagacctacgatgtccgtccttttgttatgcagctcaatgaaagcgactatgactttttaactcgcttatggcgtagtgaaggtattagctggctcattgatgaagcagagcttaccgtggcgagcaatatggacaatattcagccacaaaaattacgtcttattgatgataataaccaatatcaagctctgacaagaagagcgattcgttaccaccgcagtagtgcaactgaacaatttgatagcatgaccagcctaatggctgatcgcagtttacagccgacttctatatttgtgcagcgttggcagccagacgtattacaacaaacagatggggcaggtagtgtccaaagtaaacatcagcatagtactaactacgacaatcaaagcttaagtcttgaagaagcatggcactttagtccggcatggatgcaggatttaaatggcgaagatggggcaacctcagcaagtaatcaacaactagaaaagtttaaccagaacctaagtgcttattatgatgctcagtctaagcagtttattgcaaaaaccacagtacgagatacacaagttggctattggtttgaactcaatgaacaccctgaaattgatcagcatgaaagcacagataaagagtttttaatcataggtaagaattattataaccaaaataatttacccaaagatttaaaccagcaaatccaaactttagttcaacaaagcgattggcaagcgagtaataccgacgagcgtcaagcgaatcagttaattttacaacgtcgttatattccaacaacaccagcttataacccacagactcatagccccgttgctcatccacaacgcgcaaaagtggtggggcctgaaggtgaagaaatctatgtagatgaatggggtcgtattaaagtccgcttcctgtttacgcgtagtgatgaccatagtcatgatgggggcgcagggaccaataataatgacaccgattcagcttggattgacgttctaacgccgtgggctggagaaggttacggtgcgcgttttttaccgcgtattggtgaaattgtcgttattgacttctttaatggcgatatcgaccgaccgtttgtgatgggtcgaattcatgaggcacagcgccaaccaaccaaatttgataacaaaggaaagcttcctgatactaaaaagctcagtggtatccgttctaaagaagtgtcaggtggtggttttggacaactcaggtttgatgatacatcgggacaaattagtacccaactccaaagcagtcatggtgcaagccagttaaatctggggaaactcagtcaccctaaagataaagcagaaagtgaagaccgcggagaaggttttgaactacgtacggatcaatggggagctttacgcgcggggcaaggtctattggtgtccacccataaacaggataatgccaaaggagaccacctagatgccgaagttgcgaaaaagcaacttgaaggtagtcaaactaacagtaaagcgctaagtgacattgctaaaaaccagaaaaccgatgaaatagaatcgattgaacagttaaaagattttgcctcacaaattcagcagcaaatcgctaaatttgaaaaagctttacttcttttgagttcaccggatggtatagctctaagtagttcagaagatattcacatctcggctgatgcacaaattaatcagattgctggagacagcattaatataagtactcaaaagaatgtgattgcccatgcccaaaataggctcagcctttttgctgctcagagtggactaaaagctgttgctgcacaaggtaaggtagaaatacaagctcaggcagatgcactggatgtactgagtaaacttgggattactatttcatcaactgatgataaggtcatcattagtagcccaaaagaagtcaaaatcacgggcggctcatcgcaaattactctaaatggttcaggaatctttccgaaaactggtgggaaattccaggtcaatgcaggtcagcatttgtttatggcaggagcaagtgcaaacgccagtgctcctgagttgcctaaagctaaacctatgcagggagcattggagctacttcggagttatggtggagataacttcttcaagcaaaatagctataaagtcattgattcattaggtaagcaaattacgggcaaactcgatggaaatggttttgcacaagtaacaggtattgcacccggaccagctaaagtagtttttgagaaggataatacaagtgcatggctacaaagcagtgattttaaacgtaattatacgtgggctgaaccagtcaaaagtgttcaaggattaatgaaaaatgctctagaagcagtggggcaaaatacgatgtctcagttgcaaaataatcttctttcaacggataaaaatagtttcaaaaacttaggtaagaatactttagctaatttagctggccaaacagtaggccagattaaaaatcaggtaactaatactgcccttaatactgtttcaaaacaacttaatctcaatttatcggccgatcaaatgaaaagtcttggccaaatggcgacaaatccaagtcaatctcttgaaatgcttaaagagcagggcgatttagatacttttgtacggtcaaaacagtag

SEQ ID NO: 53263 - DNA, 378 bp, Acinetobacter baumannii
atgacagatttgaataaggaaagtgaagttaatctacgctttgagcaagatgatggtgctgtttgggtctttgatggtgatagtcaatttggcaccgaaatcagtcatttaatgatgatgcatgcagatgaatataacgaagatgaattacgtgttatttgtcaccatgcagcatgtgaaattgacagacttagagcagagctagaaaaagccaaagctcaggcggtgccagaggggtatgttcttttaccaagagtaccaactgaaaagatgctccaagcatatgaacgatattcagtcgcgccgatgtcgacgctgagtaaaaatggatataaggcaatggttgaagcagcaagcgaatcgggagctgaacaatga

SEQ ID NO: 53264 - DNA, 1893 bp, Acinetobacter baumannii
ttgcctttcacaattcttagacgtttggaatgtgtactagaagaaaataagccgaatgttcttgcaacttatgaacaattcaaagatcaagaccttgctcttgatgtgattctaaagaatgcaagccaacgtcctttttataacatctccaattatgacttagcttcattaggtggtaataaaaccaaagccaaccttgaagactatatttcaaaattctcagaaaacgtccgtaaaatttttgaaggttttaagtttgctcaaattattgctgatctagatgctgcaaaccttttacttctaatctcaaaaaactttgctgacatcgacctacatcccaatgtagtacctgaccgcactatgagtaatgtgtatgaacatctcattgccaagtttggtgctgaggtgggtacagggtcggaagacttcatgacaccacatgatgttgtgcatttggcgacaaccttattactacaccctgataatgaattatttgaacaaaatcttggacttgtcagaactttatatgatatgacctgcggtactggtggcttcctaagtgacatgatgaatcatgttgaaacctataaggacaaatataaagttgctcctgtattagtgccacatggtcaagaattacagcctgaaactcatgctgttgctttaggtaatatgctgttaaagcgtttggaaacagacccaagccgtgatctatcagcaaatatcaaacttggtagcaccttaagtaatgaccagtatgaaggtaaacgcttccattaccaatgcgctaacccgccttacggcatgaaatgggataaagactctgctgccgttaaagcagaacaaaaattaggttttgcagggcgttttggtgcaggtgttccaaagagtagtgatggttcaatgctattcttacaaaatttggttgcgaagcttgaaacccctgagaatggtggtgggcgtggtgcaattgtgctttcaggttcgcctttgtttaatggtaaggcaaactcaggtgaatctaatatcagacgttggatgcttgagaatgatttgattgaagctattgttgctttacctacagaaattttcttccgtactggcatcacgacttatatttggttgatttcaaaccgtaaacccgctcaccgtcaaggtaaagttcagcttattgatgcatcaggtttgggttcatcaatgcgtaaaaatgaaggtaacaaacgtacttaccttgatgaaaactctattgcagaaatcacccgtatttatgctgactttgaagaaagtgaaatcagtaaaatcttcgattacactgaatttgggtatcgccaagttcaggtacaacgccctctacgcatggatttccatttcactgaggacaagcaacgcttgcttcaagatactaaggaatttaataagcttagtgctgttgaacaaagcgaagtgttgaaatttattgagcaattaggaaatgaggttaaaccgttctcatggtttgaatctgagtttcttgaaaagctgcctgtcaaaaaattaagtaaggcattcaatcaatctctgcttatgatttttggtgagaaaaatcctgatgctgagattgtttcgctgaacggtgagattttatttgatgcagaattgaatgattctgaaaatattccattaaatcaagatattcatgaatacatggcgaaagaagtattaccacatgcccctgatgctgttattgatgaaaaagtggtagatgctcaagacggtcaaattggattggttggatacgaaattaactttaaccgttatttctataaatttgaacaacctcgccatccaagtgaaactttagctgaaattaaagagctttcagcagaagttgctcaactattgggggagatttaa

SEQ ID NO: 53265 - DNA, 180 bp, Acinetobacter baumannii
atgatgatttgtcctaactgtgaagaacatattgtgcttgaggattatgaagatactgccccatttcaatgtgaacattgtgacacttggttggagcttgagattgatgaaggcacttatttaggtgctaaacatacagctttacgcattgttgatgatcaagatttgggtgaggtgtaa

SEQ ID NO: 53266 - DNA, 1323 bp, Acinetobacter baumannii
atgaattttaaacagtacccaagttacaaagatagtggtgtggaatggttgggtgaagtgcctgagcattggtctgtaaaaaaatttggctatatatttcgagaaaataaaattaagaatagtggtctgatcgaaactaatgttctttctcttagttatgggcgtattaaagagaaaaatattgaagataataaaggtctgctacctgaatcttttgaaacttatcaaattattcagcctaatgacattatttttcgttttacagacttgcaaaatgataagcgaagtttaagaagtgcaatttccaaatttcatggaattataacttccgcttacataggagttagaactactgcgaatgcagagttttataactatttatttcgtgcgtatgatcaacagaaagtcttctattcaatgggagatggaatgcgccaatcattaaaaattgatgaattaaatcgaatgccgattgtttttccgagcgatgttgagcaacagcaaatcgtttcattcctcgactccgaaacttcccgtatcgacaacttaattgcaaagcaagaaaagttaatcgagaagttagaagaacatcgtaaatctattatctctcatgcggtaacgaaaggtttagacccagatgtacctatgaaagatagtggtattgaatggttgggtgaagtacctgagcattggaagcttttacaaacacgacatatttttaattttggtaagggtctaacaatcactaaagaagatttgagtgatgaaggcataccatgcattaattatggcgagattcattcaaaatacggatttgaatttaatcctttggataacccgctaaaatgtgtttcccatgattttattgaatccaataaaaactgccttctcaatgaaggagattttatttttgctgatacatcagaagacttagaaggttcaggaaactttagctatctcaatcaaaaatctacagttttcgcaggttatcacaccattattgcaagacctaaaagtggattaaaccatcgctatttagcctatatgttcgattccaatgcttatcgaggtcaagttagaactgaaatgaagggcgttaaagtctacagtgtttcacaaggcgttctaaaaagtcgtttagcttggctacctccaattgaagaacaagatcaaatcgtgaagctacttgatgaaaaaacatcaaaaattgatactttgatagcgaaacaaagagaattaattgcaaaactcaaaaactaccgcacctcaatcatttcccatgctgtaacaggaaaaattgatgtacgtgacctagttgcctag

SEQ ID NO: 53267 - DNA, 3285 bp, Acinetobacter baumannii
atgaacatgctactttcagacaaagcacactatgagtcacacttagaagaatatatcgtgtctaaactcaaggcgcagggttggcttgttggtgaaagcaagaattatgacactgacacagctttatataccgaagatttgattggttggattaaagatacacaacctgagaaatgggacaatctgtttaataacaatggtgaaaatacagaaaagaccattgttagtcgtttagtcgctgaaattgaacgtactgacaacatcagtgtgttccgtaaaggatttaaaatggcgggagcaggtacaggcggtattattcacctgactgaaacagcacccgaagacaagcgtaatgaaacgaccattaagaactataaagccaatcgcctacgtgtcgtccctcagcttaaatacaatccgacccgtgatttccgtattgatttggtctttttcatcaatggcttgccaatggctacggttgaaatcaaaactgattttaatcaatctattgatgccgctaaagatcagtacagacaagaccgcaaaccgattgacccgaagactaatcgtaaagagccgctactgttaagcaaacgtggggcgattgtccattttgccttatcagactcagaaatctatatgaccacctgcttagatggtgataacaccttcttcttgccatttaacaaaggtaatgatggtcacgcaggcaatccacctgtaggtgaagatggtgaatatcctgtcgcctatttttgggattatatttgccaacctgacaactggctcaaaatcttccatgatttcgtctatatcgagaagaaaaagaaagccgatctaacaggtaaatacaccgttcaagaacgtctgatcttccctcgttatcatcagtttgatgctgttctaaaaatgctgaatgatgctaaaacaaatggcgttggatttaactacttatgtgaacatagtgcaggttcaggcaaaacttcaacgattgcttggacaagtcacggcttaatccgtctaagacaagacgatggtactgcctactttaactctgtgattgtagtgacagatagaaccgtacttgatgatcaacttcaagaagcgattaagcagatcgaccatcaaaaaggtttgattgctacgatcagtcgtgaaaataaagaaaacggtggtggaacaaagagtaagcagcttgaaaatgcgctgatttcaggcacaccgatcattgttgtgaccattcaaaccttcccgcatgtgatggaagcaattcttacagagaacagtctaagtgaccgcagatacgccatcattgttgatgaagcgcacacctcacaaacaggctctacagcatccaaattacaggctacgcttgccttaaaatcaagtgccgaattggagaagttgtcagttgaagagttactggcgcaagtacaaaaggcaagaggtaatatcaaaaatattagccatttcgctttcactgcaacgcctaagcattcaacttacatgctgtttggtcgtaccaaagatggtaagcctgcaacagatgacaatctaccattgccatttcatttatatacgatgcgtcaggcgattgaagaaggctttatccttgatgtgctgaaaggttatgtgccatataaaaccgcattcaaacttggtggtgaagccgttgataatgatcaacgtgtcgaaagcaagggtgctagacgggcattggctcgttggatgtcgctacacgctaccaatgtcacgcagaaggttcaattcatcgttcaacacttccatcacaacgtagcgcatttactgaatagccaagcgaaagcaatgattgtgacaagttcacgacctgctgctattcgttacaaacttgctttagagaaatatattaatgagaaccctgaatacagccaatatcgtgttttagtggcattctcaggcacgattaaaggtagtgctgtaaagcatgatgatgataccgatgctcatgacattttcaatttcagtgatgatattgagtttagtgaaaaatcgctaaatgaagataatccgtgtgctgatttaagagatagctttgatcgtcctgaataccgtttaatggtggtcgcaaacaaattccaaacaggctttgaccaaccaaaactgtgtgcgatgtacttggataagaaaatcgccaaccctgttgaagtggtgcaaaccttatctcgacttaaccgtactaccacaggtaaagatcaaacctttatcattgacttcgtaaatgaccctgagtggattcgtacttgctttaaacaatacgatagcggtgctgagatgtataacattcaagaccctaacgtagtttataccatcaaagataccttggatgagttagagttatatgatgaagacgatctcgaagcctttaaaaaggcgaagtttaagaccattcgggatttaacgaaagatgctcatgatcataatcagcacaaagcgttataccaagcgactgataagccaacacgcttgtttaactctaagttaaaaaaccttaaagaagcgattgatgcgcaagaagagttgcatcaaaaggcaagaaaggatggtaatgcaagtggtcaaagccaagcagagttagagcgtaaaattttagatgtggagcttaaaaaactcctgaactttaaaaatgacttgctcaagttcggcagaatttatagctacattgcacagattattgactttgctgaccctgaattggagaactttgcagcattcagtaagttggtgggcaaacgcttaaatggtattgcagctaaagaagtggatatttcaggtcttgtgcttacaggctatggcatcttcaagaaaaaagatggcgaaactgagggggacgcagaaggtgaaatttcaactgttcctgttgttccaattacaggctcaggttcaaccgaccctacaccaacggctttattctacctgcaagaagttattgatcgtatcagtgccgcctttggtgatatttcaactcgttatgagcaagctgtttttatcaatcacctcgctgcaattttacgtgaaaatgaagtggtaatggctcaggttgaaaacaatcctaaagaagttgcattacaaggaaaccttccgactgccgtaaccagtgccattattcaagcaatggcttcacatcaacagttgtctgctcatctgctcaagactgatagccaagcgatgcaaaatatccttttggcgctctatcagatgcttaaagatggtgaaacgcttgatgttgaaaaaatgaagggataa

SEQ ID NO: 53268 - DNA, 1365 bp, Acinetobacter baumannii
atgctaaacatactgcaattggatggtgctacacccacagatattcgacatgaagatggttctattattatttcaatagaaccatctgatgatgctgtagcgaagcattgtcacaattgcggtgctaaagtttataaacatggcaaacgagtcaatcactttgctgatacaccaatgcaaatgcagcctgtgagtctagaggtgactcgcactcgttatcgctgtgcagagtgcaaaagcatgtttatgcctgaatttacgttcttggatgataaaagacgggcaaccagtcgattaattgatgcgattaaaaaacgctgtttaaatagcacatttacgcatttatcagaagaaactggcttagcaattaataccatcaaaaatattacttctgattatattactgaactagaaaatacggtcaattttgaaacgccgaccattatggggattgatgaacttttattgggtggagaataccgttgtgtaatcaccaatttaggtatgaagagcttgtatgacatgctgcctaatcgcagacaagaattgctcattccgtattttgagaagctttctgatgcagataaggttgaatgggtctgtaccgatatgtggcgaccttacaagcgttcatttcgagattatttacccaatgcaacattgatcattgataaattccatgtggttcgtattgcaaatgaattgatggaaagagagcgcaaggttttacaaagtcaattaactaaagttgcacggctacatgccaaaaagaatttacgttggttaaccttaaaaagacctgatagcttgaatgatcaggaacttgagatgcttgaggacatggaggaaaccatgccaaagcttaagcttgcctatgatgtgaaagaggatttctacaagatttatgattgtgaaaccaaagaagcagcagaaaaagcatttaaaaattgggctgataatattccaaccgatctacctcaatttaatgatttagtaaaaaccgtatccaataattatgatgacatttttgcttattgggatgcaccgttcagtattaccaatgcttatactgagggacataatggactgaccagagttgcaaacagacttgggcgaggttattcatttgaagtgattcgagcaaggatgttgtacaacaaaattgcgagatcagtaacaagcatttcaaccaaaacaacttcaaccaagccattaactgttacacccaatagtcctgttactactgtatcaaataaagatttgaactttagtttttcaaccaaatatagaaaaatgaaaacagaatatggagcacacattccaaccttggttgaattgtttgaagaagaatatgagattaagtaa

SEQ ID NO: 53269 - DNA, 1494 bp, Acinetobacter baumannii
gtgtcaggtggtgggtttgggcaactcagatttgatgatacaccgggacaaattagtacccagctacaaagcagccatggtgcaagccagttaaatctcgggaaactgagtcatcctaaagataaagcggaaagtgaagaccgtggagaaggctttgaactgcgtacggaccaatggggagctttgcgcgcggggcaaggtttattggtatccacccataaacaggataatgccaaaggagaccaccttgacgccgaagttgcgaaaaagcaacttgaaggtagtcaaactaacagtaaagcgctaagtgacattgctaaaaaccagaaaaccgatgaaatcgaatcgattgaacagttaaaagattttgcctcacaaattcagcagcaaatcgctaaatttgaaaaagctttacttcttttgagttcaccggatggtatagctctaagtagttcagaagatattcacatctcggctgatgcacaaattaatcagattgctggagacagcattaatataagtactcaaaagaatgtgattgcccatgcccaaaataggctcagcctttttgctgctcagagtggactaaaagctgttgctgcacaaggcaaggtagaaatacaagcccagtcagatgctttagatgtgcttgctaataaaggtattacgatttcttcgacagaagactgcattgaaattagtagtcctaaagaaattgtaattactggtgcaagttcacaaattaccttaaatggttcaggaatctttccgaaaactggcgggaaattccaagtcaatgccggacagcatgtgttccaaggcggcgcatcggcaagtgttcaatctagtttgccaccaccaccaaaacgtgggcagggtgtacttgagttgttccatgaatatgcacatggtgagtttgttaaacaaggcggttatacagtgactgattcgttagggaaacagttcaaaggacaactggatgataaaggttttgttcgtgtttcgggtttagctacaggttcagccaaaattgtatttgaagaggataagcgtaatccttgggatgaagcgagtgattttaaacgtcctcctatgtggccaagtgataatgatacgagtgctcaaactttaatgggtaaagcagatagtgttttgaaaggtgcagtgacagaagctaaaaaagctttaggtcaaactttcacaaatccaagttcgattatgagaacaatcgatactgcaaagcaattaaaagaaaatggtgcaagtgcattgttgccgatggtgcaacaaggtgttgaatcacatttaacgagtcaattgactaattttacctctaaggttttaagccaaagttcgacagggcaaggatggatgcatgggaaaactaaccccgttgctccagttaccagcggattaaatgtaaatccattaagggctcaagactcgaaaaatacagagactgctcttaatcctatgagttttaagtttaaataa

SEQ ID NO: 53270 - DNA, 753 bp, Acinetobacter baumannii
atggaaatttataaaaggctgccttttcttttaattagttttttaatgacaaacgtgacatatgctcaatctcaaatggaagaattaagctcaattcatataactgggaatgtgcttctggcaaatcaatacaactttcgcggtgtatctatgactaataggaaaccagctatacaaggggggattaatttctctcataagtctggagcttatttgaatttatgggcgtcaaatcaaaatgtctatcctgaaagctctatagaggctgatatttttttaggttacatctggagtttaagtgagcattcctacttagacatcggagttgtagatgttaactatgtgggttcaccaagtgaattgaatgctgacttcaatgagttcaatttaatttataaccgggtcaatttgttcatggccaaggataaacttagtgccgcactttatttttcaccagattacacaaccagttctgggaaagaatattatacaaatatttcatatagttaccctttaaacaatacatttaacttatttggttcagccggttataccttacttgaaaataaggaaaagtttctacaagtgtttggtggtgagggaactcaaaaagcttacgtcgattacaaaataggagtccgcgcaacacttaaagggttagacgcggaattatcatggattgataccacgattgatacatctaataaaaatatgcaagggacgctctacttgagcgttgggaaaagcttttag

SEQ ID NO: 53271 - DNA, 447 bp, Acinetobacter baumannii
atgcatactctttttgaaccagaattaaacgatttagaatccttagctgaaatttttaatgcatatagggttttctaccatcaagaaccaaatatagatttagcacggaaatttattcatgagaggattactcaaaaggattcaaaaatttttataaagaaagatgaattcaataacattcttggttttatccaactttatcccacgttttcatccgtttcagcaggaaaagcttggattttaaatgatttatatgtacatgaagtgaatcgtcgacaaggtattgctgaagagttaatgcaacatgtaattcaatttggtcaaaatacgaatgctaaatatctcgctttagaaacacattttgataatgtagcagcacaaacactttataaaaatatgggatttatcgaacaagataaaacaaagctatttgaatactcttactaa

SEQ ID NO: 53272 - DNA, 612 bp, Acinetobacter baumannii
atgattattaggctatcgacaactatgctcgatagctacctttggggcatatcgaatgatgatatgacctcagaggaactcgctaaagagttgttcttaggaaagacgcagaatatggcaatgaagtgcggcacagcttttcatgcccttcttgaacatgatcttaattatgaagtcacaaaagaaatggggtttaactttttgtttagtgaaggcctagacgggactctagaacttggtgatgttcgtgaacaaaagtatgtcacacggatttttgatgatgttgatttggttgcaaaaatcgatgctgagactagttcaaagctaattgaccacaagcttactgctgcctttgatccagataaatatatggatgcattccagtggcgtgcatatttattagttaagcaatacgacaactttaagtaccaagtatttgaacactcaggcttagataaagttgtggatggtttaacagaagtaaaaattaagagctaccacgaattacaccagcactcatatcaaaacatggaatcagatgttaaggctcttgttcgtgaagtagctgactttgctaaatattggaaaccaaaattaggagtggcagcatga

SEQ ID NO: 53273 - DNA, 933 bp, Acinetobacter baumannii
atggcactaaaaattgttacagatcaagagccaatgcgtgtagagaccttaattacttttatttatggtgatccaggtattggtaaaacgtctttagctttctcggctaagaatcctatcctttttgactttgataaaggcgcacatcgtgcaggcaaataccgtaaagacacagttcaggttaataactggtctgaggtttcatcattaactgcaaatgatcttttaggttatgacacagtaattgtagacacagctggtcgtatgcttgatgtgatcattgctcacctagttaaagatcaaaaaaactgccgtcgtaattcaaatgaattatcaattcaaggctacggcaccctaaacagaacattcactcactggtttaatcttttgcgcagctttggtaaggatgtaatccttcttgctcatactgccgaagataaaaaaggcgatgacattatttttcgccctgacatggtaggtgcaagtaaaaaagaagcctacaaggttgcagatatgatgggatacatgacaactcatcaagggcaacaaggaacccaaaaagctatttattttgcaccaagcacagcatttcacgcgaaagactcaggagcaattggaaaccttattctcaatgatttagatgtacaaccagatcaacttgattcgattctaaatcaggccaagaaccacattaatagtctaagtgagtctcaggctaaagcacaaaaagaattggatgattgggattcagaagtgcttgctgccgaatcacttgaagactttgaagagcttaaagccaaacttccacaaggtcatgtatttgttcgtcagatgtggaacaaagctgttgagcaagctagacaatatggatttgcttatgacaggcaaaccaagacatttactagtgttcagcctcaggagcaaacagcatga

SEQ ID NO: 53274 - DNA, 234 bp, Acinetobacter baumannii
atggagactaaatacgattggtcgaatgtgcctgatgatgtttgctggattgcaactgatgaagaccataattcatggggatttgttactgaaaatgaaccattcattggtggtgaggatgaggaccaatgggtaagcaaatcatttgcacattcatgcaaacacattggtttcagaattttttcaggcgactggacagattcattagaacaacgcccagtagaaaagaattag

SEQ ID NO: 53275 - DNA, 279 bp, Acinetobacter baumannii
atggtgaatgtcatgaatgcacatcctgaaattatcgaagtatcaagacttcaaaatcttattaaagattctgtaaatgccctgcttccactttctagtgaggaagacacagtaatcactgacggtggcaattggattcatcttcgctatgtaggtcgtggtactgagcaaatccaattggagctaagcgatcagttctctattaagacaaaaatcgcctacctaagtgaaacgttaaaaagattggctgaaattagaaatgagttgagaggtgggtga

SEQ ID NO: 53276 - DNA, 969 bp, Acinetobacter baumannii
atgaaaaatttaacccttccaaattatgaagatgtcgcagccgctgctgaacgtataaaagattttataaataaaacccctgttttaacttcacgtacggtgaacaatgaatttgaagcagaagtgttctttaaatgtgagaattttcagcgtgtaggcgcgttcaaatttcgtggtgccatgaatgcacttttgcaatttaatgagactcaaaagaaagcaggtgtagttgctttttcttcgggaaatcatgcacaagccattgcgctttcatcaaaaattcttggtattcctgcaaccattatcatgcctaaagatgcacctgctgcaaaaatggcagcaacgcgagaatacggcggcaatattgttgaatttgaccgttatacggaagatcgggaaaaaattggaaaagagattgccaaaaaaaatggtctgacattaattccgtcttatgaccatccgcatgtgattgcaggtcaaggtacggctgctaaagagttatttgatgaggtcggtgatttagattacctgtttgtatgtttaggtggcggcggtttactggcaggttctgccctgtctgctcgccagctttctccaaactgtaaaatatatggcgttgaacctgcgctaggaaatgatgggcaaatgtcttttagaaaaggcgaaattgttcatattgataccccaccaaccattgccgatggcgcgcaaactcaatatttgggcaaattgacttttcctattattcaacagaaagttgatgatattttgacggtcacagacgaagaactcattaacgctatgaagttttttgctgaaagaatgaagatggtggttgaaccgactggatgtctcggatttgcggctgcccgtaacttaaaagatgagttaaaaggcaaacgtatcggcattattattagtggtggcaacgtcgatatttctaaatatgcggagtttttatctgcctaa

SEQ ID NO: 53277 - DNA, 1299 bp, Acinetobacter baumannii
atggatttcaatacccttgaccaagaaacggtacagaaaaaacaaaagtttcatcaaattttgtatgtacaggtcatctttgcaattattttgggcattttaattggtcatttttacccagaacttggcgagagcttaaaaccgcttggtgatgcattcatcaaaatcgtcaaaatgattattgctcccgtaatctttttgacagtggttaccggtattgccagcatgacgaacatgagtcgagttgggcgagtgacaggtaaggcaatgctatatttccttactttctctagtcttgcgcttgtggttggtatgattgtggctaatatcattcaacctggtaaaggcttaaatattgacccggcaaccttagtcaacgataaagtaaatagttacgttgaaaaggctcatgctacaaatatcactgactttttcatgaatattatcccgcaaacattagtgagtccgcttgctggtggtgaaattttgcaggttctatttgtagcagtcctatttggtatttctttagctgcattgggtgaccgtgcacgtccaattactgattttttaaataacctcacggctccggttttctatttggttggcatgttaatgaaacttgcaccaattggagcttttggtgctatggcatttactatcggtgcgtatggaattgaatcaatcggtaatttattactattgattatgaccttctatatcacggcagtgctgttcgtattaatcattttaggggctgtagcacgctacaatggcttttcaattatcgatttaattcgttacatcaaagacgaactctggttagttctaggtacaagttcttctgaagctgctttaccatctttaatggataaaatgcaaaaagcaggttgtgaaaaatctgtagtaggtctagtcattccgacaggttactcatttaaccttgatggaactaacatctatatgactatggcggctttatttattgcacaagcatgtaatgttgatttatcaattggtgagcaggttgcattgcttttagtggcaatggtgagttctaaaggtgcggcaggggtaacgggcgcaggctttattacactcgcagctactttatcggtagtacctgctgtaccagtggcaggtatggcgcttattttaggtattgaccgttttatgtcggagtgtcgtgcattaaccaatttaattggtaatgcatgtgcaaccattgtggttgcccgttgggacaaagctctggacaaggatgttctagataaagcattacgcaaatcgaaaacgaattaa

SEQ ID NO: 53278 - DNA, 726 bp, Acinetobacter baumannii
ttgtactattcatatgttttctctcgtaaggatgatgtatttcaggataaaccagtaaaccgccatgatattactgtaagtggatttaataccaacccaaatggaacactaagtgtaggggtaagctatatctcaaaaatagatgaaccagatagccattcaggtacttcatttagcgttcagcataaacaaaaactaggtaaactcaacaataccttggcctttcaatatggttatggtccaggaactggcttaagttataccggtgatacaagcttatcgagtaaggataaaagctggcgtgtagtcgaatttattgatgggcaaattactgaaaactttagtgctcaagcggagttgatttaccagaaagatgaacgtgaagaagcttcaaatgaacaagagtggtattcagttggtgtacgaccggtatatgccttgaatgatcaatttaagttagtaggagagttgggttttgatgcagttaaacgtgataagaccgcgactttaactaagttaacctttgcaccaacatggtcaccaaaaggaaaaggattttgggatagaccagaattccgtttgtattacacctatgcgatttggaacaaggaagcccaagagcgagctgatctgaacaatgcaggttctacattatcgtcaacgggtaatttcgggacatcacgtaatggtagcaatttcggattgcaagtagagtattggtggtaa

SEQ ID NO: 53279 - DNA, 282 bp, Acinetobacter baumannii
atgctttcatgtattacgttaacttataaagtttctggtgagatcattcgtaatcatcttgaaagccacaaagcatggttgaaggaaaatattgatttgggtcatttcatcttggctggacccatcgagaatgaaaacgctggttttattttaagtacaatcgttaatgaagaccatcttcaagatgttcttaagcgtgatccatttgttgaatttgatttggtcggaattgaagtaaagaaattaccttccatcattaaaaataagaattttctattctga

SEQ ID NO: 53280 - DNA, 543 bp, Acinetobacter baumannii
atgaatattgtcataccgcttaacggcacggaaggtaacgatgtactgaatggctggaaaggtaaggacaatctgttgggcggtcttggagatgacaccttaaatggcttagctggagacgactggctggaaggtggagctggcaatgatatcctgaacggtggtgaaggtaacgatcttcttgaaggcggagcgggcaatgacacgctaactggcggaattggtgctgatactgcaattttcaaaattttagcaggttttggaaatgacgctacgggcggtaatggcgttgatacatggtcagactttaatatttcccaaggagataaaatcaatatctctgagttaattattgggccagctagtaaagaaaatctcaatcagtttgtatcatttgaaaagagcggttcaacagttacgctaagtttagatagagatggaaatgatataaattattcagccactaagctattaattttaaataatcaaacaaatgtaaatagtttgaatgatttaattaaagctgatgtatttatagtttag

SEQ ID NO: 53281 - DNA, 834 bp, Acinetobacter baumannii
atgattttatttggcaaaaagaaagttaaaccaagccaaaaagcttatgccgtcgtgacgggtgcaggcagtggaattggacgaagctttgcagttgaactggcaaaacgtggtggcagcgtagtctgcgcagatattaatttagaagctgctgaagaaaccgtaaagttaattgaacagttgggacaaaaagcatttgctgtacagtgcgatgttgggcaagcagaacaagtacagactttggctgatcaagcagagcagttacttgatcatccggtaactctcattattaataatgctggcgtagggctaggtggcaaatttgatgaaatgagcttagaagactggaaatggtgtatgcatgtaaacctgtggggtgttattcatggttgtcatgcatttgtgccaaagttcaaaaaactagattacggtgcaatcattaatgtggcttctgccgcatcttataccgcagcaccagaaatgagtgtctacaatgtaacgaaagcgggtgttttggcattatcagaaaccctttcagccgagcttcgcaaattcaatattaaagtcaatgtactttgcccgactttggtgccaaccaatatcattaaaaatggtcgtattccggggcgttattccaagcttgcagaccatgcactcatgaactatgccatgacaaccagtgatgcagttgcggctttaacattgaatcgattagatcgtgggcagctctacaccacgccacagatcgacgccaaattattctggcttatgaaaaggacatctccaacgctatatgcaaagttccttgggctttcgtatcagttatttaaataa

SEQ ID NO: 53282 - DNA, 258 bp, Acinetobacter baumannii
atgctaagagacaatgcaggtaccaactatcatccgtgctgtacatgccgtatggggcacgatgaaatgagtgtggttgatgagtttggccgtgttcataccttagacaatgtgcggattgtggatgcatcgatcatgcctgagatcccgagtggtaatttgaatgcaccgatcattatgatggccgaaaaaatggccgatatcataaaaggtactaaatctttaatatcagatactgattattttaaagtggcataa

SEQ ID NO: 53283 - DNA, 1260 bp, Acinetobacter baumannii
atgcagaaaaaatcttataaagttctaagtttagtatttcttgttgcgagcatgatggctattactgcctgcaatgatagccaaaatcagcaatctacagtagtttccccaacacctacagatacccgtgaccagcgttttctaacagcaaaaacaaatgacgtaattcaagttacgattgctgatttgatcccaacgcagggtgcaattggttatgatcaaatttattataaattagggcgttggcaaggtgatttacagcgcccaacttggcaagcagatccagtcaatcaattaatttatttaaataaaaccattggtaagaagtttagcgattattgtgaagcgattggtgcaaaaggtcgtgatgattttacaagtctgcaagacctacaaaaggccaatttaaaacaattggagacatttaactgtcaagaacaaccgggcactgaaacggctgatttgaaaacagttgttgttggttatgatgggcgcctttatttgaccgatggtcatcatacaatgaccgaattccgtgagctgcctgatggcggtggtcaacttaaagtatgggtgaaagttgttgggaattatagcgatagtaaaactgcggatgagttttgggcgaaaatgcttgccaatggccaagcatggttaagagatggaaaaaaccaaccgatttcatatcaacaattacctaaaaacttaggcctgaaatctgcaactaaccctgacggtatgcaaaataatccatatcgttcactggtctatttcacacgtgatattggttatagcaaagttgctaatgcaacggactatactgagtttttatgggaagattggtttaacaagcaaatcgctaataatctggttcatcctttaagtttttatcataccgatgcgagtgtgtatggtgctgtagatgtattggcaactactgaaataaaaagtgacttaactgtatcgggcagtgcaacaggctatcaggcagcggttgctgattattccttactgatgggaagtaccaaaccgactgatattatttatggtacttcaactgccgcagatttgggcgcattacagcttatgaaaaatgccgctaaaggttctgttacggcgacttcaatttctaatcttgcagatttgacccgtgacgaaattaagaaagataaaacgcctcgtacaggtggaagtatttggtatgcggtaaattacaagttatgtggaaaaccggctacaggaacgtgctggggttggtaa

SEQ ID NO: 53284 - DNA, 1344 bp, Acinetobacter baumannii
atgaataatggaaataatctgaaaaaaggcagtctaggactatggacggtcgtattttttgttgttgcagctgcatctccattgactggagtcgtgggtgcaatgcctttaaattttatgttaggaaatggagcaggcgtacccggctctttcattgtagctgctttactactgattattttcagttttggttttatagctatgagtaaatatgtcgtcaatgctggggctttttatacgtacattgtacaaggtttaggtgttggaccaggcatttcgggtttaagtgttgctattttggcatatacggcaattcaactatcagtgacagccatgtttggcttctttactcaacacttggtcgtttctcacttgggaattgatatatcttggtgggtttatgcattggctatgcaaattgtggtcatattactgggtattgcaagagttgaaattggaggaaaaattctaggcctcttaatgattcttgaagtgggtattattttgctaatagatattgcgatattccagaagcccataaattttgaatttacttcatttcaaccaagtacaatttttaccaatcattttggtatttcaatggtatttgccatctgttcatttataggatttgaggcagcggcaatttattctgaagaatgtataaatcctaaaaaagtggtgtctagagctacttttattgctgtaggtttaatcgctatattttttgtatttacctcttggagctttatcctttatagctcatctggagctattgtagcaatagcaagcaaagatccgggaatgtatgtgtatgatgtggctaccgctgttttgggtaaatggtcagtagacgtaatgtcggttttattattaacaagtctatttgctgctactcaggcttttcataattcacttgcacgatatatgtataccattagtcgtgatggcttattttggtcaaagctttcaaaaactcatgctaaacatcaaaccccatatattgccagtattgttcaaggcattatcataatgatgtgtattgtcgtattcgcagttatgcattttgatccgatgattgatatcttctcatggtgttcggcttttggaagtatggcaattttagctttacaatttggcgtaagcttggcggttatttcatattttattaaaaataaagacctcaaagttagcatgtggagccgcttaattgctccaactatttcaagcataggaatggcttttattctttatcttgtgattaagaatttagatatcatgagtggtagtaatagtcctgtctcttatacacatctgacgctgccgacgaatagagaggtgtag

SEQ ID NO: 53285 - DNA, 654 bp, Acinetobacter baumannii
ttgggacaaaaagcatttgctgtacagtgcgatgttgggcaagcagaacaagtacagactttggctgatcaagcagagcagttacttgatcatccggtaactctcattattaataatgctggcgtagggctaggtggcaaatttgatgaaatgagcttagaagactggaaatggtgtatgcatgtaaacctgtggggtgttattcatggttgtcatgcatttgtgccaaagttcaaaaaactagattacggtgcaatcattaatgtggcttctgccgcatcttataccgcagcaccagaaatgagtgtctacaatgtaacgaaagcgggtgttttggcattatcagaaaccctttcagccgagcttcgcaaattcaatattaaagtcaatgtactttgcccgactttggtgccaaccaatatcattaaaaatggtcgtattccggggcgttattccaagcttgcagaccatgcactcatgaactatgccatgacaaccagtgatgcagttgcggctttaacattgaatcgattagatcgtgggcagctctacaccacgccacagatcgacgccaaattattctggcttatgaaaaggacatctccaacgctatatgcaaagttccttgggctttcgtatcagttatttaaataa

SEQ ID NO: 53286 - DNA, 654 bp, Acinetobacter baumannii; identical to SEQ ID NO: 53285

SEQ ID NO: 53287 - DNA, 297 bp, Acinetobacter baumannii
atgagtcgcattgctgagttaaagcaaagcttaaaaggctacaccaaagttgaactcgaacatttttacctatgtttagaaggctgtttggctggacttggcgcaacggtcatctcaatttatatgattgaaaaagagcttgagtggaacttactgaaaaaaaattcacctgttgtgcgagataattcagcctattttttactttctcatagtgcttttgaggaagatccacgcaaaaccatatttttagaatggctaaaagcagagatgaatgagagtcaacataaattgctctag

SEQ ID NO: 53288 - DNA, 594 bp, Acinetobacter baumannii
ttggctgatcaagcagagcagttacttgatcatccggtaactctcattattaataatgctggcgtagggctaggtggcaaatttgatgaaatgagcttagaagactggaaatggtgtatgcatgtaaacctgtggggtgttattcatggttgtcatgcatttgtgccaaagttcaaaaaactaggttacggcgcaattattaatgtagcttctgcggcatcttataccgcagcaccagaaatgacggcttataacgtaacgaaagcgggtgttcgtgcgttgtctgaaacactttcggctgagcttcgcaaattcaacattaaagtgaatgtgctctgcccgaccttggtgccaaccaatatcattaaaaatggtcgtattccggggcgttattccaagcttgcagaccatgcactcatgaactatgccatgacaaccagtgatgcagttgcggctttaacattgaatcgattagatcgtgggcagctctacaccacgccacagatcgacgccaaattattctggcttatgaaaaggacatctccaacgctatatgcaaagttccttgggctttcgtatcagttatttaaataa

SEQ ID NO: 53289 - DNA, 1080 bp, Acinetobacter baumannii
atgcgcgcgtacaatttctgtgctggtcctgctgcattacctactgccgttttagaaaaagctcaacaagaattgttggattggcaaggtaagggcctatccatcatggaaatgagtcaccgtagtgctgactatgttgctgttgcggaaaaagctgaagcagatttgcgtaagctcatgaatattcctgaaaactataaagtactatttttacaaggtggcgcgtcattacaattttcagcaattcctttaaatctgcttggaaaaaataacaaagcagattatatccatactggcatttggtctgaaaaagctttaaaagaagcaaaacgttatggcgatattaatgttgtagaagctggtattaaagtagacggtaagttcgcaatttctgagcaaagcgactggaacttgtctgatgatgcagcttatgtccattatgctgataacgaaacaattggcggtttacagtttgctagcgttcctgatgttaaagcaccactggtatgtgacttctcatcaagcattttatctgctccacttgatgtttcgaaatttggtctcatctatgcaggtgcgcaaaaaaatattggtcctgctggtttaacaattgttattatccgtgatgacttactggatcaagctaaagcagagattccaagcattttaaaatatgccgatcaagccaagaatggctctatggtaaatacaccatcgacttatgcttggtacttgtctggtttagtatttgagtggttactagagcagggtggggtagatgctatccacaaagttaaccttgaaaaagctcagttactctatggctatatcgattcaagcgacttttataataacccgattgccattccaaatcgttcgattatgaatgtaccatttactttggcagatgaagctttagaaaagcaattcttgaaagaagctgaagcgaatcacttattgaacttggcaggtcaccgctcagtaggtggtatgcgtgcaagtatttataacgctgtaccattagaaggcgttcaggcgcttatccgctttatggatgattttgctaaacgtaatggttaa

SEQ ID NO: 53290 - DNA, 255 bp, Acinetobacter baumannii
atggatttagcggttggtgccaagaaagtatttatcactacagaccacttcaccaagcaaggtgaaccgaagattgtggctgagctaacttatccggtaacgggtaaacactgtgtggatcgtatttacactgacctgtgtgtgattgatgtgaccagagatggtttaaaggtgattgagaaagttaaaggtcttagctttgatgagttacaggctttaacaggtgcaactttgattgatgcgactcaagggtaa

SEQ ID NO: 53291 - DNA, 759 bp, Acinetobacter baumannii
atgttagcattagttacaggcgcatcagcaggttttggttatagtatttcaaaaaaactgattgagtcaggctataaagttattggatgtggaagacgcgcagaaaaattagaagaactacaaaaacaacttggcgaaaatttctacccactcgtatttgatatgattgatacggcagaaaatataaataagttatttaaagaattaccaaatgaatttcaaatcgatcaaattgacttactagtgaataatgcaggcttggcattgggtctagagccagcagataaagcggatttagatgattggtacaccatgattgataccaatgttaaaggacttgttacggttacccgattaattttaccaagtatggtaaagaagaaatcaggtttaatcattaatatgggttcaattgcaggtacatacccatatccaggtggtaatgtatatggggcaacaaaagcttttgtagagcagtttagtttaaatctacgtgcagatttggctggtactggcgtgcgagtaacgaatattgaaccagggttgtgtggtggtaccgaattttctcttgtacgttttaagggagatcaggagaaagctaacagtctatacgataagaaaaatccaattttgccggaagatattgcaaatacagtagcatggatcgcatcacaaccaccgcatattaatattaaccgtatagaaatgatgccaacgactcagacttttaaccctttaaaagttgtagaagtggaataa

SEQ ID NO: 53292 - DNA, 945 bp, Acinetobacter baumannii
atgttaaagggcgtgattttgtctgtcatggcatcattaacttttggtgttctttatttttatacccaattactcggccagcttgatagtgaacagactttcggatggcgtattattgcgactttgccgtttttaactttatttatgtggtggagtggtgatttaagccatattaaaaatatatatcaacgtattttggcaaaaccttctttatttctattactcattacaacatccgttttaacctcagtgcagttatggctgtttttatggggacctatgcatggacgtggtttgcaagtttctttgggatatttcctgttaccgcttgttttggttttagcggggagtgtcttatatggagagaaaatatcgaaatttcagtgggtcgctattgtccttgcaattattggcgtagggcatgagatttttcgactaggaagtattgcttgggaaactgctttagtggctataggttattccgcttatttcttgttacgtaagaaaattaaaacggataatttagggggcttttggtgggaccttctgattattatgccagttgcaatctatctgacacatacagggttattgccatatagtaagttcctcgatcagccgacactcggattggttattgcgggtttaggtgtgcttagtgctataggcttgggatgttatatattggcaagccgttatctacctttggttgtgtttggtctgcttggatatcttgaaccggtgttacttgctttagcatctttagtgctaggggaaagcattggtaaagaagaatggtttacctatcttccaatttggtgtgccgttttcgtattggttttagaaggggcttttcatctttaccaacagcagcaaaaagccaaaaatttgcaattaaatatcgaaaaatatcaaaaaagattaaaaaatgatgctcacgattag

SEQ ID NO: 53293 - DNA, 897 bp, Acinetobacter baumannii
atgaatttagaagtccgttgggtagaggatctcctcacattagaacgtgaacgttcaatctcaaaagcagcagagaaaagatttattagccagtctgcatttactcgaagaattcaacaaattgaagaaatgattggtgctgaagtcattattaggaacaacaaaaacaacatcgaatttacagacattggtcgaattttattagtgatgtctaaaaatattgaaaaacaggtagaggagaccgcaaaactaattaaaaatattaaaaatgaaactgaatcgaccattcgtttctgcgttgttcattctttagcctctggatttttaactacttttttaaagaaatttcctacacttattcgtgatttaaaaattgaaattgtcgcaacgaatagtggagaaggcctgtctttgttaaaagaaggtgcctgtgactttatgatttgctatgcagataaaagcaatattagaaaagttggggatgatattttaagtggtatcaaaattgctgaaacggttattgtaccggtttctgcaactgaacctgaccacagtcctaaacatacaatacaaagtaattttgctctgctagcgtatagtaaacacgcgtacttaagaaaattggtagatcaactgattgaaggtaagcttgtatataaaacgttatatgaaacagataatgccaccaatttaaaagagctggttttacaaggtctaggagttgcttggattccaaaaattaatgttgaagaagaccttgcagccggaaaattagtcattttagaccaacaagaatattgccttgctcaagatatttatatcttcaaaaataatttgagtgataataagtcggtacagaaaatatggaatggttttaaaggtcagcaagatctataa

SEQ ID NO: 53294 - DNA, 927 bp, Acinetobacter baumannii
ttgtttgatctagacagtagattattaaatattttttatcatatttatcggttcaaaagtgtttcaatggctgcagatgctattggtttgacacagccgagcgttagtaatggtctaaacaaaatccgccaacattttaatgatcctttgtttattcgagtcggtaatgaaatgattccgactgaactggcaaagcaaatttttccactcattagtgaagttattgataaggttgaaagcattaataattttaatgtgaactttgatccgttgacctcagatcagttgtttacgatcgcgatgactgatgtatctcatttggttttgttgccgcaactaaccaattatttaaaagaaaaagcacctttgattcgtttaaatattaggcctattacaccagaaactagctatcaaatggcaaacggtgaaattgatctagccataggttttttaccgcagttagaagaaggtttttatcagcagaagttttttcgtcaacactatgtcgtaattagctcaaaaagccatccacgtttagacccaaataatttcactttagaggattatatgcgtgaatctcacatcgatattgatgcgggtattgggcattatcacattaaaaatgagctgcagaataaagggctggaccgaaatattttaattcgcttaccaagttatttaggtgtgggattggtcgttcaggaaacagatgctattgccactgtgccatattatttaagtcaggttttattggttagagagaacttacagattttaccggcaccgcttgattttccaacttatgatgttaagcaacattggcatatgtcttgtcaccacaagagtagccataaatggttccgtcaaacttgttatgaactatttaaaacctgtctcttatacacatctgacgctgccgacgaatag

SEQ ID NO: 53295 - DNA, 141 bp, Acinetobacter baumannii
atgaaatcatggtctcctcagcactataaaattgaaggcaaaaaaaataagattgataaagaaattattgatagtgcattagaacatgctaaaagaattagatctaaaaagaatttttattccgcatcctcaacttgttaa

SEQ ID NO: 53296 - DNA, 381 bp, Acinetobacter baumannii
atgtatattcctaataaagtaaattaccatcaattattaaaaacctgtattattggttgcttaactgcaatgtacgacgtacataaattaggaaaggtagaattccctcttatacgtaagcgtcaagattttgctttatggttgaagattcttaagcaagaatcttttgcttatggattgcaagaagatcttgcaagttatactgtacgatcggattcaatatctgcgaataaatttaaagcagcccaatataattggcagttatatagacatattgaaaaattgccattattaaaaagttgctattatttttttcattatgcggtaaagggtattattcgcagcaaatttccaaaagtagctgatttattaaaaatttaa

SEQ ID NO: 53297 - DNA, 348 bp, Acinetobacter baumannii
atgggattcgtaggagtagttagtgctctaactgctgcttatgccttcacccctgctaataacgaacctgtaacggttgcagctcctttcaaagttgaatcaatcgaccctgaaaatgaacaagcagtacttcaaactgcaaatgaaaagttcactttagaagttgattttgatgctcagtattcaattgatggcaacggctatcaagcttggcgtgaagttgaaattaacgagattaaagacattcgcgtttatgacgaagatggcgaggtcttagcttacgttcatcgtttagacgtagttgagattaaagatcttatcgaatcagggattagagagcgcatttaa

SEQ ID NO: 53298 - DNA, 162 bp, Acinetobacter baumannii; identical to SEQ ID NO: 49124

SEQ ID NO: 53299 - DNA, 306 bp, Acinetobacter baumannii
atgtcccaagaggcttttaaagattatgttgaagcaagtcatgttccagaaaaaccactaaaaactcaggaagattttgaaaatttcgttcgtaaggaggcttatcctggtcttcatccttgtggcacatgtcgaataggggaagatgaaactacctcagttgtagatcctgaattgaaagttcatggcgtcgaagggctacgagttgcagatgcatcggttatgcctaatgtaatctcaggaaatttaaatgctgtaacgattatgattggtgaaaaagctgcagatttaatcttaaatggttaa

SEQ ID NO: 53300 - DNA, 1440 bp, Acinetobacter baumannii
atgtcaaaaacagcacaaattaaattaccaaaacaactttggaatgatgaaagtattgatttaacacgtcatagctatcaggggaaattactaaataaaagccaaggtttcaaattaggtaaggctcaacgtaaaaaagttccacgtgaacagctaacaaagctttctgaacgaccaaaaggtacaactgccttaacggtctatgattggagtaaccaaggacgtttagaaaagctcaagccgattcgtgcaaaacggatgagtgtttctccatttacattttatcgtggcatgccttctttgatgctatttgaccaagcgtgggagcagataaattcaggcttatttcaacagatttgtggtgattgtcatttaagtaattttggaggttttgcaagtcccgaacgtaatctgttatttggaattaatgattttgacgaaactttagttgccccgtttgaatgggatgtaaagcgtttagcaaccagttttgtgattgcggcgcgtgatattaatcttgcagagaaagtcgggttaaaagcaattaaaataatgctgaatagttatcgtcagcacttattagaaattacagaactttcaccactccaagtttggtatgaaaaagttgatgccagtacattattagaaaatactgagtgtcgaaaactaagaaagaaacgcgagaagcacctcgattcagcacacaaaagaactgcgtactctgttttgccgaagcttacccagcaagatcaagatacaggatttcgtcattttgtggatgatgcgccgttattatggcatccaagtgcaaatgagccatttgctaaagatgttgatgtattctttcaacaataccgtgattctttgaaatatgatcgccaagtgctttttgatcgttatcaacgtacagatgtagctttaaaagtggtgggtgtcggaagtgttggtacacgatcagcgattgcattatttcaagatgcagatcgggaaccgctaattttacaaatgaaagaagcgaatccatcaattcttagcccgttatttgtagacaaggtaaatcacgaaggtgagcgtgtagtgcatggtcagcagctcatgcaggctgcaagtgatatatttcttgggttctcttccatatcaaatcaacattttcatgtacgtcagttacgtgatatgaaaatttcggttgatcttagtgacatggatgatgagtatttctatgagtatgctgaaagttgtggattagccttagctcatgcccatgctaaatctggaaatgcagatgtacttatgggataccttggcgaaggtaatacgatagtagaagtattacaaacgtatgcagaagaatatgcagaacgtaatctaaatgactatgaccaatttatgaatgaagttgcagatggtaagattcagctcgctggagatgatgcactttaa

SEQ ID NO: 53301 - DNA, 747 bp, Acinetobacter baumannii
atgtttagtaaaattatgtctggtttgggtcttcaaggtgtgacggtagaaactgttttacagaacccaagcttgcaagcaggcagcacattgcatggagaaattagctttaaaggcggatcatctgataaagagattaatggtctttatttgcaattggtgacgatggcagaagttgaatctggtgatcatgagtttaaccagcctctagttttacaagagtggttagtgaactctcgattcctcttgccggcacatcaagcgcattctttcccttttagtattcaactaccatttgagacaccgattacagaggttgcttgtcgacgaaatggtgcacgggtttggattcaaacccatatggatgttgattggggactagatgcgactgatcgtgattatctaaaggttctgccaactccagccatgcaaatgtttctacaggctatgcagcgatgtggcttcgttctatcgacagtagatgtagaaaaagggcagctgactgcgcgaaattttagatcaacgattggttgttaccaagagcttgaatttgtctcttcacatatgtttagcggatttaatgaggttgaagtttctttcattgcggaatctaatcaaactcacgttatgcttgaagtagaccgccattttcgatcagatcagctattaacgatgacgattccacatcatatgcttgatgaaaaccaaatggtgcaacaaattcgaagcctcttaaagcttggataa

SEQ ID NO: 53302 - DNA, 252 bp, Acinetobacter baumannii
atggatgatcagaatgagaccgaagaaaagaagacccgtaaagctaatcttcttgaagaatttggtgggcaactgattgacggcttcatcacacttattggtgaactcttcatttacattatttttttattattttcaggtgctttactcggtattatctttgccgctattttctttggttggggcatactatttttactattaccttttgcttttctggtttatatcctttttaaaaaatatagtcgttaa

SEQ ID NO: 53303 - DNA, 981 bp, Acinetobacter baumannii
atgactaagtacgcatcagatgctttacttgcagctacacattcgtcatgcagcattcaacctatttgggcttacgatctgattggttctgagaagtcagcaaaagctcttgggagatcaaaaactacgagcatgtttgcaaaacaaaattctcaaaatagtaatcaggcattatctctcagtaaacctgttgagttgattagatcagcatatccattagtgacaggctcccctgtcactaatgggatgttatctgttcgactaaagccagagaacgaattgtttattcagtttattaaacatatggggcctatgcttaatggggggatttactgccacgatcagtatttttctaatcaaattacgggctaccaatatatgctcaacactaggcagtttagtgaggatttaacagcttggaatacagaacaaagtcgtgctgaagagttatttgattcgacaatgaaggttctattcagagactacgcaggcttcgaaacacatgagctatatttgccaatgctatttacgctttcagcgaatactccaatgtattcgaaacaacaatatttagatcagcagaaaaaagagatgatcgccattttccttaatgaaggtggaaataatgaaattattgccgtattttcgaaatgggaacttacaccccaaggacaattagcacttaggctggtgtttttactggaacgccagttcatagatgatcctgttggttcttctgatgaaaatgctttcattgccttacgaggtaatctggaaggcctatttaattgcaaagcatatcctgtatctatgccattaaacgggtttatgcaaactaatcatttttttaaaagtgatccaaggtgcaaagatcttattaagctgctcaaaacgtacctgataggcagtgatgcagtccttcgaatttgggatacacagtccaattttgatgtgttgtattcaaagtttaaaactaactag

SEQ ID NO: 53304 - DNA, 1113 bp, Acinetobacter baumannii
atggcaacttcagctaaaaaaaatgctaaggctaaacaagaaaccacatctacgagtaacatcaaaaaacttattggcttaattgaccaacttgaagaacatattattaaaagacataaatttccctatggtttgccatcagcctatgccgaacactacaaagcttatttacccgaacaaatggaacctatcagtgaagaaatgacggataatgaccgaaagtggttttatgaacagcttgaccaaggtttattagatgaatcgctggaacaatctgaactacgcaaacaaacttggagattacccccaccattacttcgaggtaaatcggaaatttacatctacattcccgaagaggaccgacttgcccgacactatggcgaaatcgcgactgaaattcgtaaattcaaaaacttggtatcaactaaaaccagaatattcaaaaaaacagcacaacaagctgagaaacattttgaagaagcatttcgtctctactccaaacattatgattgttctttctatatctacacgctaccagaagatatctataaacagattagacaatctcaattagcccgaaacagccataaaaaatcccagagggtaaaaaaaacttacctctcacttgttcaacgttttattaccagtaatcaaaaaacttactcaagtatggatacggttctaggagccattgagcagcaagctatctcaaaaattccagaatacctcactcaagaatacaatgctgaaatagaacattgtttacgaaaaaaagaagaagctgaatattttctttttgcagctcgaaatgatctatctacagctgaagtcaaagaaattgaagaatatggtaaaaaaactgtaatcatacaagctcagaaccgtgatcaacccctaacttcttttgcaggtcgccctatcgaacgttataaggaaataagagtattttatcagaaaaagatttctgacttagaaactcaaaaaagtaaaattagagacttcgaccaaagattaaaattactgaatggagctaaatcttggttaaaggaaagcgaaccaagcctatataatgcgctgaacatttttatagaaaagaaaggtagaaaactttag

SEQ ID NO: 53305 - DNA, 261 bp, Acinetobacter baumannii
atgaaaaataaaattttgatgggtgtggtgggtatcagttttctgatcttgaatggctgttcttccgattttgaaaagggcgtcaaacatggctgttacaacatgggtggcagtcgcagctattgctcttgtgtctatgacaaggtcgaagaacactatggacgtaaagtcatgcggcaagttgagcgtatgagctaccttcctgccgatctggaccgtgtgatgtaccagtctggtgagcaatgcgtagacaagttttag

SEQ ID NO: 53306 - DNA, 1068 bp, Acinetobacter baumannii
atgagcatatcggatcgaatccagaagagtcagtgggtgcccttattgcgatgtagcgataatatttatttttcaccagtcattcccaataaaaagttgcaaggtgccatgacctatctcccacatggtgtaagtcccaatgatgtcttgatgctgattgatgacactgtatttggtagtgccaaggctggaatgtgtctcacggcaaaggggcttttctataaagaaagctttgaagatgaacaagcttatccgtttgaacacatccagcgaatagaggctgatattggaatacttaccagttctattttgatcaatggtcatgatgaactgaactttagtcaactcgataaaggtgtggtaaaaactttggtggcattcctaaatgaatgttgtcagggcaagcaagcaaccaagcaaacgaatgtaaatattgatgccgagatgcagatcatgattgatctgtttgcttactttattacctttagtgcgggtcagtggaatagccgatcaaaagcagcggtatccgatcattttactaaattgaatgataagggtgtgcatcagtatgttgaaaaactactgaatgaacagacgcacttcgattatgacgacctgttgcatcgtctgacagacctgaaagataagctggcctataacttccgtagagagatgattgagcaactggtctatgcaatggcactgggacaagttgagcagaatcaggcggatctcttcatgacccatttatgtcgtgtatccaatgtttctaaagccgtatttccggatctggtcaaaattatttatcaatgtctggctgatgaagtgaatcagtctactacttctactttcaacggtgaacaacttcaagcgtgcaaacttcttgatattcagcctaattcactgactgaacaaaccttgcaaattgcttaccgaaaaaagatggctgagttccatcccgataaataccagaacttacctgaatctgttcgtcagttgattgaaagtcaggcacagcaactgaatgaagcaagagcagtattaaaaagctatttggacaataactga

SEQ ID NO: 53307 - DNA, 702 bp, Acinetobacter baumannii
atgatggatttaaatagaagaatctttggtatttgtctttttatcctttttttatctttaagtggctgtgttttagtaaagacaaagccagttaatctttatactgaaaaagttcaagagaaaaatgaaaaatcttcaaaaatagaaaatgattctattggtgaactcattcatgaaatcccagatttacctgctccattagaggtgaaaatagtgggttatgtaaatgtggaccttttagaagtatttccttctacagaaaatctaactgcaataaatcatgtgacacgaggtacaaagttattaatttttgatactaaaggtgactgggctaatatttcagcagatattgagtatccgtattgggttgatttagcaagtatttgttttacagaaagatgttgggttaaaacaaaaagttattcacctcaacatggcttaatcaaaaatactaaaaatagtcttcaatcaattgaagaaaaagcacaaattcatacatcatcaaataactacagtaagacaaaaaatatgggtaatggtagaggctataagaatgtagatggaaactatatatcaagtccaaagaaatctaagacacaaccgacaggtgcaactgcaaaatgtagagatggtacttggtcttttagccaaaataggagaggaacttgttctggtcatggtggggtagctgcttggctttag

SEQ ID NO: 53308 - DNA, 891 bp, Acinetobacter baumannii
atggaaaataaaaattatcactggctaatcttatttgtcattctaattgcagtaatcactgcttggttaagttttcctattttttttgagtggttgataacgaagcattttcatattaatcctgaagattacgggaaaaaatttggagcagtaggcgatacatatggaagtttgaacacacttatttcttctattgcattatgtgctgtagcttattccacatggttacaagtaacttcattaaaagaaacacgtgaagtaaatgcgaagcaattaacccttgctaagcaagctcatgatgaacagatgatcgaatctcaaaatgctatttttgctactaaattttattctttacttaactttaaaaaagataaattgaatgctctaactatacaaaaaagagttaagaacgatgaaaatgaatggcgattagctcaagagccaggaatgcaagcaatcgaaattatcgctaatgagtttattaaactaaatagaaaaaataataagttatatattggggtgaagggggatgatttatttgacgcttaccgagcagtatgtagtgaactaaattatggttctgtgtcttcgctagtatcttatttctatatttatgaggatttatgtcaattaattagaaaatcgaaaatttctgatgaagatagaaaattttataaaagtgttttatctagttcgatgactcaggctgaacaaattttgttactttggatatgtccaatgtttaaaattgatattgaagattcagaaatatttacattaattgcatgtacagaagtttttaaagagtttgcattcgaatttcataaatctagtcattttaaatcagttaaatggaaagatgtctttagtaaaattcaaaccccagcctaa

SEQ ID NO: 53309 - DNA, 216 bp, Acinetobacter baumannii
atgcactcaacactagatgttaataactataagaaaatgatggctgaaaaaatactagaagaaattgaatatccacctgagaaccttcaaaacttatttttcgccttttcaaaaatgaaagtcgatgatggtttaaaagaacaagaatttagcaccataatcaacacgcaacatcaccaagtggtcaacattaaatgcgcggttcatgccaaatga

SEQ ID NO: 53310 - DNA, 1365 bp, Acinetobacter baumannii
atggttgaaaccttagaatatgctttggcattgagttatggtaaccagaatattttgattgattcaattcgggcaattgaatcattaaaagtattagctactcaagaaaacccacaagcactgtttgaacttgctctgttttatgatcacgagaggggggattgcatactgcctcgtaatatatattttcgtgaccaatatctacttcatgcggcacatttgggccatgctcaagccattatcacattatttgatttattaaaaagaaaaaatacgattttcgatatagggtattacgacgaaaattatactgatcaaatctttggtgaattacatcagattacagatcaattaattgcgcagggaaatactcaagcgttacttatcaaagctaagcatggagttgcttatccagacactgaaagtatgcagtatctgtatcaggcctggaatcagggtgaaaagctgagtgccagtttgtatttgtcaagatatgatgatgaagaattgaagcagcttggattatttgatgccacggcatggaacgattattttgagcatgcgcagcaagacctaatgcagtatctggaacaagcttttcaacgaggccatatccagaaaattattgaatttcttcgaactgatgaagccagttatatatcagaacaaaaccgagaacagttgtggcagtggcaacagcagttttatcaacagcaagcgactttaggtagtgcagatgcatggctgcaattgtcaaggctgacagaaaattcgttaaactatttaaaaaatgcagcagagttgaatcatccagccgcaatgtatgcctatgcctatgagttagatcaaaagcctgatctcggtaatgatgagttagatgaaattgaaaaatattttactattgctgcggaacataaacatgcacaagcattatatgaaaaaggacgttattacattgaggatgatccagagcttgctagacaatattttcagcaagccagcgaattaggctgtctggacgcggttgaatggatggttgctttaactgagcagtgtgaacaggcgcagtgggcagaactggcttttaaatatggtagcattgacaataaagttgcagaggtcttaattgtggcattgagaggtggttttggaattcaggaaaatcatcgactggcagatgaactgaaattacgtttggaggcgaccagttattgggatcaggtcttttcgtttgctttacctgctgctcaacaacactatgagaaacagatacaaccgcaaatggaagggctttttgatgaaattgcagaacagcctggttttagaagcaggatagcatcacatataaaaaactggtttaaatag

SEQ ID NO: 53311 - DNA, 957 bp, Acinetobacter baumannii
atggcgagtcattatgaaatgttcccagcggttgttactcgtgtggaacagctaacccctttaatcaaacggtttacgttcaaacgtcaagatgggcagaactttcctcgatttagtgggggaagccatattattgtcaaaatgaatgaacaactttccaatgcctactcattgatgagctgtacgcaagatttatcaacttaccaagtctgcgttcgtaaggatgtggaaggtaagggtggatcagttttcatgcatgatcagtgcaatgaaggctgtgaaatccagatttcagaaccaaaaaatttattcccgctagctgaaacaggcaataaacatatcttgatagctggtggtattggtattacaccattcttacctcaaatggatgagctggcagcacgtggagcagagtatgagctgcactatgcttaccgttcacctgaacatgcagctttacttgatgagctaacacagaaacatgcagggcatgtatttagttatgttgactcagaaggcagcatgcttaatttagacgaattaatttcatcgcaaccaaaaggcacacatgtatatgtatgtggacctaaacctatgattgatgctgtgattgattgttgtaacaagcaccgttaccgcgatgaatacattcattgggaacaatttgcctcaacagttcctgaagatggtgaagcatttacggtggtacttgccaaatctaatcaggaaattgaagtacaaagtaaccagactattttacaagccatcgagacattaaatattgatgtggaatgtctatgccgagaaggggtttgtggtacatgtgaaaccgctatcttagaaggtgaagcagaacacttcgatcaatacttaagtgatgccgaaaaagcttcacaaaagagcatgatgatttgtgtatcaagagcaaaaggcaaaaaattggtattagatctttaa

SEQ ID NO: 53312 - DNA, 399 bp, Acinetobacter baumannii
atgatgcagtatatgattgagtggttgagaactaatcgaaatgatatcttaaaaaaatatcctgaagcagagcctgaattatctttctttatggactattttgttacaggtagtggaggatatagttttgttgatattctaaaaagatctattaaaggtgagggtgttagtactcaagagacctccacttattttctcatggatagtatcgtcgatgagggacatgttgttgatgcagccgaattttatttttacgatgaacttgatggtaaagtgccatttaaagtttttgcttcggttttagaattaatagcattagcatatgctgagcataatcttgaggaaaaggaacaaattattcatttaatgccacggcttaaaaaagtttatgatatttga

SEQ ID NO: 53313 - DNA, 384 bp, Acinetobacter baumannii
atgaattcaacaaatcgcagtagtaagttctttcttgcagtttttctgatgatgagtctttcaaatacatatgcagcaaagacacaggttgaagaggttgacgcaatggaagctgctggagcagaagtggcagaggcgagtggagcggagattggtagcgtagaggttggatgtcatgctgatgaagcttgtgatgctgtaacttctgtagctcctgtttctgaggatgaaatgtacggtggtattgaacaggaatatgttgtaaaaggctgtaaagtaacggtttacaatgatgggccagtgaaaatggtcgatgtaaagacggatcaaccatgtgatgctccacttcctaaagcccataaattctctaaaaagaaccattaa

SEQ ID NO: 53314 - DNA, 615 bp, Acinetobacter baumannii
atggtttcaccatatctgcattcttttgctttatttttctctttgctcaatccttttttaatgagcatttatatgattggcctcatccgccattcagaaaccaaggtatttaacaaagccttaattcaggggagcttgattgcttatatcgtctttatgctgtttgcatggggcggtgaagcaatctttagtaaatacctgaatgtacgctttgaagctttccagatttttggtggtcttatctttttggtgattggttaccgctatgtgtttcagggtgcagataccattggtgaaatgcgcggtgcaccagaacatttagccggcaccatcgctatgccttttatgattgggccgggtaccattagtgcagctgtggtgacaggtattgaaatgtcgattggtgctgcggcacttgtgatcgggtttaccatgtttttaacatgcagtattttgatcttgatgaaattttcacatgatcatttgcggtacaaacatgcaaaatatatcgatcgctatttcgatattgtcgggcgtttatctgctttattaatcggtacgattgctgttgatatgattattaatggcgttaccggactgatccataaagtatag

SEQ ID NO: 53315 - DNA, 192 bp, Acinetobacter baumannii
atggaaaagcgcctagccgatcttgtaacgcaaatccaaaacgctcaagtactgcaccgtggtggggagatccaatacagacgaggttttcgaccatatgaatccattggtacatattttgtttaccgtaaaacagtgcgctacgggaaactagtccacccatactatgaccaattaaatcaatgctggtaa

SEQ ID NO: 53316 - DNA, 312 bp, Acinetobacter baumannii
atgaataaatcagaagcgttggaatttgcaaataatattaatgcaacacatattttcgaaaataaatacactgaactcggctggatgttttttaaaaagtgtggtgggcacaatccgattatgacgcttgaacaaaaaaaattttttgtgacattaaaaaatccactcgaaagaattgtatttatggctagttgtttctgtgctaaatcagatttgtattatgacgatgagaataagcaatggtttgctgaattaaattactcacattctgatcgtagtattatcccaagagatgcaattattgtgacgtaa

SEQ ID NO: 53317 - DNA, 900 bp, Acinetobacter baumannii
atggcgaatgaaaataaaatcacgactgcgtttgtaactcagtatcacaacgcgtatgaagttgcagcaatgcaaaatgattcacgcttactgaaaacggctgtcaatcgtggaaaaattcagggtgaatcattcactatcaatgatatggggcaagttgaaatgtctccatctggtaaccgctttggtgatacaacgtggaccattccagatgttggtgttcgtacagcactgatggcagattatgacttgttcatcccaattgaaagccgtgatttaccaaaacttaaagctgtaccaactgataaatacatgaagaacttgattaatgcgcgtaaccgcaaaatcgatgacatcatttatcaagcacttgttggtggcgtaacacgtacaactgtaaacgatgctggtgttaaatctactggtactgtgaatttgccggctgggcagatcattctttcaggctttggttctttgaaacagcaaatcatcaaagctaaatcaattttccgtgcaaacgaatgtgatgagcataatggtgaaacgcttaacatgatttacaccgcttcaatgctagaagacatcttaggtgatactaccttaacttctgctgattttatggcagttaagatgcttcaggaaggtgctgtgtcaggtaagtggttaggtgtgaactggatcccttacgaaaaacttaacaatggcgctggtggtgctaccgaaaaacgtactgtgatgtatacaagctcagccgttcattttggtgatgctgatattactggcttcgacatttcaaaacgtccagacaaaaagaacatttcacaagtaggtggtgttcattcatttgcggctggccgtgcaaacgagcaaaaagtagttgctatcgacttcttagtgtaa

SEQ ID NO: 53318 - DNA, 342 bp, Acinetobacter baumannii
atggctgcgaataaacgagaaattaaaacacctggtgtgaccgctgaacagaatcaagaacaacaagcacaaacaccagatgcaaaccaagacacttcaactaaagatcaggctgatgctgctttaggccatatcactggtggtgatgatcaaaacacaggtgaaactggtccaactcaagaagaactaatgcgccaagagttagcgcagatgcgtgctcaaattgctgagctaaagaagtctacgcaaccagaagcgccaagtgccgctggtgcagtacagcctaaaaaacgcatttctgttttgactgaaaagggctggtcaactaaggaggcggactaa

SEQ ID NO: 53319 - DNA, 180 bp, Acinetobacter baumannii
atgaacattgacgagattaagaaaaatgcgccagatggggcgacacactatttgtcaaaagtgtattaccgaatcatctgtgatttggaagtgtatgtgcaaaatgataatggtgaatgggtgttcttatgtcatgcagataatggtatgcctgctaatttaataaatatcgtgaattaa

SEQ ID NO: 53320 - DNA, 408 bp, Acinetobacter baumannii
atggataagaaagcactattagaacagtttaaggctgaggttgaggcatctggaacatccttaacccatatattgaagatgtgtgagtttgatgaagttagtaatgactttaggtcagacacaatacatgactactcaataggttgtttgaatggagcttggtggatgtttcaaagacagcaagcgaaagtggaggagctgcaacaagagaacctgcgcttagcttatggcaatacaagctactacaaccaagcagttaaacagaacgagataattgacgagctgcaaaagcgggtggataaagcgctagaactaatgcaaaagcctgtaattgtgggtgagcctgcaaagtatgtttgtgcaaggtttaaagagatagagcaagcgctcaagggggaaggacagtga

SEQ ID NO: 53321 - DNA, 207 bp, Acinetobacter baumannii
atgagtgagtttaaagaaaataaaggaatcgaaggcattttaaaggatgtggttgaacatggtcacggcttcgcaatggtgtcaattgaaggtgttgagcaggtatctattgctcaagtaattaagccatttccttgtgaagagcttggcgacgacttccccatagaaaaccgcatttcgccgaattgcaaagtggaggatgtttga

SEQ ID NO: 53322 - DNA, 198 bp, Acinetobacter baumannii
atgacgaaggtattaatttgggtaggtggcagaggtgcaggaaaagcatcactcatgcaggcgattgcactaggtgagccagagccaatacagccacatcaggagttttgcgctgtaaaccctcgcgcatattacctgcctaaagaacctgaagattggcaaggtcgcggcaaacgcaagaaacctaaaatcaaataa

SEQ ID NO: 53323 - DNA, 315 bp, Acinetobacter baumannii
atgaaaccagaacagtttattcgtgagcaggggctagatgccattaaggattgcattgaagaggctgaggcatatggcggcttatatgtgaatgctaagacgttagagctttctaaacacatcccttcatacgatgcggtgtcaattacagacctcaagcgtctggtggagtcggttgatttggtcgaatcatggggcggcattgatgatgtaaagctatatgacttgtctcattgcaaaaacaggcctgaatcggctggatacaagttgcttcaagcaatcaaagaccacgaatcaatatacggagaagaataa

SEQ ID NO: 53324 - DNA, 405 bp, Acinetobacter baumannii
atgcgtgttgatagtacagcttttacagacaaccctcgcgcacgcgcgcgttttctcgaaactaagaaaaaagctaaagaattcttgcgccaacgccgaggttataagcgtccagacttcaaccgcatgattctagatttacgcaaccttggatggtcacacgaaaagattgcatacgttcttgatgtgtcgggtggcagcactgtttcttcttggtctactggatccattccagagtacatacacggtgagcaattcatcatgttgtggcaagagcagacaggcttagagcgcataccacgtgaaggtgaatggcaaacatataaatacgatattgggcagcttgatctacttggaacgttagacgtattcgctgctcagttagatgaggaattacaacaatga

SEQ ID NO: 53325 - DNA, 507 bp, Acinetobacter baumannii
atgagaataactgaacaacaactagaagcaattcaaaacaagcgaaatatcgcacaaaaaggcacattacagccacgtttaatccaaagtgatgtgtatgtaccacttaaggcaaaaatagctgatacaagcgaaataagagcgctttacgaagatggcttaaaagtaattttagattgtgaaattaaaactgcaccaccgtcagtaaatcactactggatagcttctggaaaaagaagatttcttagcaataaagcccgtgattttcatgaattggttcgtcaagttgtgcctgctcataaatcaactgcacgactcaaattagaagtgacttttcatttccctacacgtcaatgtcgagacatcgataactacctaaaagcgactatcgatagcttagtgaaatgcgggctatgtgtggacgatgaacagttcgatgagcttcttgtaaagcgtggaaatgtcatcaaaggcgggcttattaagctcaaggttagcgaggtctag

SEQ ID NO: 53326 - DNA, 366 bp, Acinetobacter baumannii
atgaagaaagtagatgcattagaacaatttaaaagttgcggcatgtcttacacagaaatgatgaagaactgccaaatctattcagttggtatcagaagcgaagagacccggttagctaaaaatgtttatgggaatttaagacgtcatggattgttagatgaagttcgccctaagagtgaactaggcaatcctaaagttgatggcatcccttatacagaaatcttgcgcttaagaaaggaatatgtgcagggcattcgtacagatgaaactaaaaaagcaaatgcaatttatcaaagaatgcttagacgtggttgggcaacaagattaaaagaacgttgtaaggggctaaatcatgagaataactga

SEQ ID NO: 53327 - DNA, 891 bp, Acinetobacter baumannii
atggctagagctagaaacatcaaaccatcattttttacgaatgatgatcttggtgaaattaatccactggccagattgctttttataggcatgtggactatcgccgactataagggatgttttgaatacaaaccgaagcgtttaaaagtccaaatattgccgtatgacaactgtgatatcgagcaactcgtgaatgatctagaaaaatctggatttatctcgatttattcggtacgtggacggaagtacatcaaagctattaattttaccaaacatcagaacccacataagaatgagagggaaggtggaagtgaaattccagatatagatgaagccgatattgaagaagaggaaaaatccttaaaaaacaatgagtgggcgaatatcgagaataatctagagcaagacggaactgatcgtgctgattcccttaacctgattcctgattcccttaacctgattccctctaccccagagccgaaaatcgggaagacagttgacgaaatgttcactgaattttgggaaatatatccaaataaaaaatctggaccaaaagcagccaaggaaaaattcaaaaagattaatttcaaaaaacacagctttgaattaatcatgacttcacttgaaaaacacattcagtcacttgattggatcaaagaaggtggaaagtttattcctcatgccactacttggattaatcaagaacgttggaatgctgatattggatctactcagcaaacaagtggattcaactcaaactatgggtaccagtcttcacatcaacaaaccatttctgaacaagcgaaatgggataagttcctaaatcaaaatcagatttgggatgtcacaccaaaaaagccgttactgattgagggggtgggtcatgcgtga

SEQ ID NO: 53328 - DNA, 204 bp, Acinetobacter baumannii
atgactacctggagtcaaataattagtgatttacaggacaaggaaaaagggaatatgacccagcaagaaattgctgaaagtgttcactgttcccaaaactatataagcgacttaaagaaggggaaaaaaggaaaacgcatttcccatgaaattgcacaaggactaataaaccttcatcagcaaaaaattgttgcagaagtttag

SEQ ID NO: 53329 - DNA, 687 bp, Acinetobacter baumannii
atgtctgtaggtgatcgtattcgttctttacgaagagagaaaaattggtctcaaccagtccttgctaagcaagctggtgttacgcaatctactatttctgatttagaaaataataaaaaaagcacttctgcagaaaatatggaatcaattgccgaggctttaggaacaacaacaagctatttaataaatggcaattcaaaatcgcaatatggaagtgtggaggcttgggattcaaaaactccacttgaagatgatgaagtggaaattaagttttttaaagattttaaagttgcatgtggttctggaacaattggagaagctttgaaaagtgagtggcgtagattgcgcgtgccgaaatctactttgagaaatttggggattagcaaagataattgtgttgcaatgactgctgaaggcggctctatgaaaccgaccattaacgatggcgacactgtttatgttgatctaggtcgtaaaactgttaaggacgaaaaaatatttgccatatgtcatggaggtttatttaagttcaagcgcttgtataacttgccgtttggtgggattcgtattgttagtgataaccacgaagaatatgatgaagagcacttaacagccgagcaaatcaaagagcaagaatttgagattattggctgggcttggtcgtggcaaagaactgaaagctggtaa

SEQ ID NO: 53330 - DNA, 582 bp, Acinetobacter baumannii
ttgagattattggctgggcttggtcgtggcaaagaactgaaagctggtaaaaaaataatgatagacaatttactctcgcatgcacttatctttaaacccaagaaattaaaagagccttgggaacataagaaaggttttcaggtggaatatgatgtaaagtctgctttgaattttatagaaaagcagcgtgaaagctttaaaaagcatgttccaataaaaaccaattttcaccaaaattctgattataaaactcttagaattttagcgaaaaaaagactctacgaaattgaatctagcttaaataattatattgaagttatttgttgtataggcggattattcttaactgtttttgcaattaatttgctatcaacaatatggaattatccaactaaagaaactgtccaattatttcttttatcattggcagttatcgttgctcttttttttatttatcgaaggaaaaagtcgcatgacttgaatctggtatatgattttctaaatatagaagatgcactttttagaattgaatatggtgaaagccaatatcaaacaccatttcaagtaaaaagccaccaataa

SEQ ID NO: 53331 - DNA, 384 bp, Acinetobacter baumannii
atgaatatgttggcccttaaacccgagctgctatgcccttctttcccaatgcttcaagtgtctggtgagtttgaagttaatgacaacacagttttatttgaactggaaagcggttgcgcaactttgaaatgcaagatagttgccgatgttgttaagcaagttcgtgtggttggttctctaatgaatccagaggacagcaaagaccagttttacgaccaactcgtagtagatgaccgcacacatgttgaagtggttggcgccgaatatgtagaaactcctatcggtcttctatttcaacttacatcaacacaagtaagcagcttaaacgagcagcttaaatactacgccgaagaattggcagatgaagaagcgggagtggtgtga

SEQ ID NO: 53332 - DNA, 336 bp, Acinetobacter baumannii
atgtcgtttgaatacattaacaagacctatggagtaaatgctgaacttggtcgtcgtgtaatagcagatggcaagccgggcattatcactggaacccacaatgctctcattgttgtaaatcttgatgaagataagccggggcagcgtacctactggcaccctacttggaatatgcaatatctaggcatgggcaagattagaaaaatgactgctggtcaaagacgatatcaagaatttctagatgcagattggtttgaagggaactttgcacaatggcttggtgtcgataaagaaacacgcgaacgtcgtgaattttataagaagtatgggtattag

SEQ ID NO: 53333 - DNA, 390 bp, Acinetobacter baumannii
atgaaaaaattagatgtccaaataagcaagataacagaagtaaaaaatcctatttactatggagatgatctcttacacttgtatattcatactgaacaagcaagctatattcagtttttttgcttggatttgttttactacacagacaatattaatgagttacttgcatgtattcttaaacaagaaacaaggggaaactattcatttagagaatggattgttaatacagagtttaaagaaatatctatccaagaattagtaataaaaactaatggtctaataaatcaattagatatgattttaaagggatctccagagaacttaggtgccaaactcttgaaagaatacttatgtactttaaattttgaaaataggcagagtaaaacttga

SEQ ID NO: 53334 - DNA, 1020 bp, Acinetobacter baumannii
atgtttaataaagtacctattatgttaaaaaataaatttatgattttggccatccttccttttatgttgagtgcatgtggaggcggtggttctagtgataataattctgcaaataacacaacagtagagtcgaatgattcaattaaaaatggatcacgatactatgaggtaaattatcaagtacttggagaaaataatgatagcttatcaataagttattatgagattaataataaacgtatttatggggtagatagcaatcaacccttgaatcgatatattgtgacgcaaaatcatttatatacccctcaagataggtttacttcaataattgacgtaaaatcaatggatgagtggactttgaatgttatagataatattaaaactgattggaaacttgaaaaagttaatctagcgggaaaaaatatttttgacacagtattgccgggttttagaaaatatggatttgatacaagtaatccatattttacagctagaaagtttttaagttcatacggccaagatacttttcctacaggtagtacttgttatcgtttgtcttctatcaaaaataatcaagagtttataaattttaatacaaacaatcctctaaattattcttttgatctcatacatgaagacaatcttctaactgcgcagagctttcaaacagttgctcctgatctagcaatagtgaacaaacaaggacagtttatgggaatagattggaccactttgtatagtacgaaaactggagcagagttagatgggttttcagtgattcaatataatggacaagtttttgatgatgttagttataatggagttcaggagcagacccgtacagcacagatacaatttcttaaagatataatatcttcgaatttattgtctgaaaatcctgaagcattaagagaaatcaaatttgatcttgaaaatttagataaaggttgttttttatacaatcaaactgctgtcaacaagcttgaaagtcttaagttaatcaattggaatcaatag

SEQ ID NO: 53335 - DNA, 1368 bp, Acinetobacter baumannii
atgaataaaatcattaaaaacggtatgtttttagggttgtcgactttgatttcaggttatggaactcttctccatgcggaagcaagtccaacaaatttacccgcagtttcacaaaaagcgttaatcattattgatgggcaaaccgagtggttaaataaggtctataaagacattcatgaacaccctgaacttgggtttatggaaaagcgtacttctgccattgttgccaaagagcttaagtcactaggttttgacgttaaaacgggaatagccaaaacaggcgtggtcggcattttaaaaaatggtgaagggccaacggttatgtaccgtgccgatatggatgccaacactgttgaagaggcaactggtctaccatacgcgagtaaagtgcgcgtaaaacttgatgatggaaccgaaacgcctgtagcccatatgtgtggtcatgatgcacatgtgacatggatgcttagcatggcaaaaacattagtcgctttaaaaaaggaatggagcggaactattattttagttgcacagcctgctgaagagccaataacaggtgctaaagctatggtgactgacggtttatggacaaaatacaacttacccaaacctgattatttctttgcagtacataccacacctgcacctgtgggcgtagtcatcaatgcaccgggaccacgtatggcaggaaccgatcagcttgatgttttatttaaaggtgtgggtggccatggctcattaccaatgctcaccaagaacccgattagtatggctgcaaacgcagtgactcaatatcaaaccattatgggtaatgcagttgatccgcaacaagcggcagtgttatcgattggctcaatccaagctggaaactcgaataacgtgattccttctactgcattggtcaaaatgaatttgcgctggtttgatcctaaagtgcgtgaaaccatgctaaataatattaagtctatgagtgaaggtgcggcccaaatgcaggggatgggtaaagatcaattacctacctttacgtttaaaggttcgagcacacctgtagttaacaataaagaattttcggcacgtttaaatgggcctttaaaagcactattgggcgataaacatgttctaactgagtatcccgcggttatgggatcagaagatgttcatcatttattaggcgaccaaaaagacattccttttaactttatgtttattggtgtagcagacccagttgtgtttgcaaatgcagtcaaacaaggcaaacctgtgccttatattccacatagtccaaactacattgttgacttaaaagctttgccagttggtgccaaggtcactacagtttcgatgttagaactactcactaaaaagtaa

SEQ ID NO: 53336 - DNA, 1161 bp, Acinetobacter baumannii
atggctgacagaacaagctcaaaatcgttacctcaaggcgtgcggatcagaaatggcgcagtgcaaatctatttcgagcgaaacaaacaagcctacaacatcacgttaccgcaccccgcaagtgcagaaggcatcacggcagccgctaaaattagagatcaactaattgttaaggctgtatggggtatcttaactgaaaaagatattgctgaagccaaaggactggataccgacgataactcagttatcgtcggagaaggtatactttttcagaatgctgcacagcaatatttgaaattatgcgaaagcaacctagacacaaaaaagggctataaaaatattctagagcatcactggatgcctgatttagcccttataccaattcatcaaatcacttctgaagatattaaagaactcattattgagcgtgattttaagactgctaaaaccctaaacaattgcctcatccctttgcgcggtgtttttgagtatgcatttgagaataaatatattgaaagtaaccctcttgaagcaattaagaataaaaaaattcaggtagatattcccgatccatttaatcgtaccgaaatgaatgcacttctcgaatatctagaaaaaaatatggtagatgatgaagagttttaccactggtattatgaattagctttctggacaggctgccgaccatcagaactgattgcactgcacgagtctgatattgacctttttaatgatactttccgtgtcacaaaaagccgtgtacgtggtattgaaaaaaatgtgacgaaaactcgcgttgcacgtgaagtttacttaaatgaaagatcaaagaaagcaattgaagaacttttaaagttcaaaagaaaaaatagttttaaaggtaaacatttgttgatttgccccgaaactggtgagccattttttaatgaaaagccacctaggaaccgtttagttgaagcaatgaaggcctgtggtattagacatcgtcctgcttataacgcacgacacacttatgcaactatgcttttaatggatggggttaatcctgtatttgttgccgatcaactcggtcatagccttcaaatgctcatgaaacgttatgctaagtggattcatggtgataagaataaacttgaaatagcaaaacttaagacagactaa

SEQ ID NO: 53337 - DNA, 459 bp, Acinetobacter baumannii
atgaataacattgatttagctattgaggactttgttaataaaacactcaatcttgaaggtttaacacttaaaggatttgagaaattagcaatctcaaatggtttttatttcaagcagcaaggcggtgatgaaaatcacgggacttatgcaatttttaaaacttacaacgctcattcagcagcgattaccaaatgtcattgcggtcatatccaccgattagaagacatgtgcattaaatgccatccagtaaatgagaacttaaaaaccctcaatattaaatttccaacgacgtgttcgctatgcgagttttcggaatacatggaaatacaagttgagcctcaaaacacaggctatttatggtcaggcaaagttaaatgcccgaactgctctaatactggtgatttgctttattcagatggcaatgcattcatcaactgggcaatcgatttacctttttaa

SEQ ID NO: 53338 - DNA, 429 bp, Acinetobacter baumannii
atgcatatttgcccattacattcgtatattaagcaaagccttaatgatcaagttgaagcttggttagcacaaggcaatgaaatcaaaaaactggctcatggtgaaagtggtcatgcctggtatttcaacaatcagccaatcagtgctcaatcaactttgcgtgaaatgatgaccaagtctattaaaaaccataaggctaaaaagtcagaaaagaaaagtagtaaacgagctactagagcgcagataaatgaattgatcaaatggcttgatcaaagcacaggccgcggcactctcttaactcaaaagttagaatgttccccttcatttatttcacaaattaaaaacttcactcgtccttgttctgccgagaactataaaaagatcaaggaagcaattttggaaattgaacaggatgaaaaaaatgaataa

SEQ ID NO: 53339 - DNA, 201 bp, Acinetobacter baumannii
atgaattggttcgatgcggttttaaaagtacgccaggtaattaccgataagcatggagtagaacgccctgctcaaaccattaacggcacattagattgcccgatctgcaatgaaggtgaagtgatttattcaatcagctcacataacggtcatatctctggtcaatgtgacacagcaaattgcgtcaactggatggaatga

SEQ ID NO: 53340 - DNA, 642 bp, Acinetobacter baumannii
atggaaaccattggtttacgtatacaaaaacttaggaaagaaaaaaaattatccaaagtaaaacttggcgatctagttggagtatctgatgtaacagtcggtttttgggaaaaagacgtaaatgagcctaaatacgaaaatttagaggctttgtgtcaggtccttgatactacaattgattatttaaaatatggtgttaataataatgagcaatctgttaaagactttagaccaattacaaggatgctgcctgtgctcgattatgttcaagctggaaactggaccaatgtaagatcaattcaaccacatgaaattgaactatggttacctgccccaccagaagcaggaagaaacagtttttatatgattgttcagggcacaagcaacaccccacacttcaaagatggggatttaatctgtattgatccagatattccacttgaatacgttcaaacaggtgaaatgattgttgcaatgtgtgatgatcaagcaacattcaaagctcttgttagagagaataaaaacatgtacttacaagctttaaatgggaatttccatccgaacattatccctcttaaagaaaattgtatttataaaggtaaatatgtgggtaaatttgaacctccaaaaaaattcttataa

SEQ ID NO: 53341 - DNA, 213 bp, Acinetobacter baumannii
atgacccgtacagaagctctagagctacttaattgcaaaaaactttatcaattagcagaaaaactcgaattgaccacttctgcaatagctcaatggggtgatgaggaagacatccctgattatcgtgaatatgaaattagagaattagcggctggccgagttcctaaacgcctccaaaagagcaagcagaatttagtgcatgtaaataattaa

SEQ ID NO: 53342 - DNA, 234 bp, Acinetobacter baumannii
atgaatgagattcctaaaccgcctcgaccacctgagccaacagaagtaataggaaatgatttcattcctaaacgtccagttccaccagatgttgcaaggccaccgattcaaattctatatccagatgagacaagctattctgatcgttggaccataggtttttattggggcgcttttatcggttttggatttggaattatttttataaaaatccttatcaaacttgggttttag

SEQ ID NO: 53343 - DNA, 522 bp, Acinetobacter baumannii
atgtcaactatgggtcgtccaccaaaagggctacaagaaaaaattcttagcggcagccgtatccgaaccgatcgggatggagacgcgcaagaagctaatgcatcggttgctttaggaatgccgccttgtcctcgttgggtaaaagggggcgcaaaaaaacattgggatactttgggacctgtattagttcaagcgggtttgctgtcggttgtagacggtgatgtttttggtttgcattgtgacaacatggctgcttatgaaaaggcccttgaaaagcttgaagagatcaattcatgggtgactacaacgccaaatggttttgaagtccaggcagcttggttgcaggtgcgtaataaattacaagaacagattattaaaactgctgctgaatttggattaacgccaagagcgcggtcaagtgtcaaggttaataaacaacagcaattagatttgttgggtgctgatgctggtcagaaagaagaaaatgacccttatgcaaacttttcaattcgatctagttag

SEQ ID NO: 53344 - DNA, 1839 bp, Acinetobacter baumannii
atgcgcgattatttcaaaatcgcacttcagtattgccatgacgtgcgctctggagtgcgaacggcagggcagctagaaaaatttgctgttaaacgttttttaaatgacttaaatcgttccggtattcctttaggttcaggtgatgaagagttagaaaaattacttacatcattaaagatcggcacgaagccaccagatattaattttgaatttaaatttgatgtagagcgcgcacaacatgcgtgcttttttattgaaacctgtccccatgtggaaggggaattagcacgattaaaacgtgatggaacccgacatttattagtgatgtcaccgtggcaggtttttgtcacggttaatatttttgggtgggtaaattatgaaggtttacgtcgcttcacatacgtctatctggaagttgctaagaaaaacggaaaaactacgtggcttgcggctgttggtttgtacatgggattcattgatggagaaccaggtgcaaatgtatatgctgccgcaacgacaagagaccaagccaatattttgtttggcgcagcaaaaacaatggtcgcttattcgccaaagatgcaagaacgctttggtatcactaagcaagagtattcgattttccaaacgacaacaaattcgtcgtttaaagcgctatcacaggatcgggacggatcaaaggacggttataacgttcactgtggcctgattgatgaattacatgctcataaagattcgggcatgtatgacattgtatcaaacggtattgcttcacgaacgcaaccattactttttgcgattacaactgctggaaaagatacgacatcggtttgctatcgtgaaagaaaagttgttgttgcaattcttaagggtgaagcaactcacgaaagatatttcggcatgattttttgcctagataagggtgacgactggaaaaaccctaaaaattggcctaaagccaatcccaactatggaatttcggtaaaacctgaatatctgcaaggaatggccgataagtgcaagatttcaccatcaaatgaagcgatttttcggcaaaagcatttaaatgaatgggttggcgcggtagacggctggcttgctgaatctgttgtgtcaaattgtgaggttgaagtctcctataaaaaatttaaaggcgttgtaggttttggcggctatgacttggcaagtcgattagaccttgcctcatgggtggagatgaggccagattttgaagatggaaaaattatttggtatgtctttgctcatagttacatcaatgaaagagtaatggagtcaaccgaagcaattaacggtgagatgcgaccggatgattaccctgtttggcgggatgaaggttggttgatagaaacaccaggtgcttcaacagatttcaaccgtatcaaagaagacattcttgaacatcataatgactacccattttatgaagttggtcatgacccatatcatgctgagcaggtaactgctgatctactcgatgcgggtttaaatgtaattgaagttcctcaaagaactgaatatttaaacccggcaatgcgttggattgaagttttgatagctgaaaatcgcatacgtttttgcggtgatccagttttaaagtggtgcattctcaatgtggtagttaaagaggatgcaaaagagtgtatttttcctcgaaaaatttcacgcgccaaaaaaattgatgctgcggttgggatgattattgcagcttcaagagccatgtactgggataaggaagaagtttttgaacttgtaccaggcgaagagaatgggaattttgatgattttctgagtggtatgattaaggtatctagacgatga

SEQ ID NO: 53345 - DNA, 1272 bp, Acinetobacter baumannii
atgagtaaaaaccgcaataaagctaaaggtcgtcaaaaagatgacctaaaaaagctgaaagtgcggggaactggaccaatacaagacagaacggggacgaccttaattgatcgtccccgttctgctgtaaggacggcaaagcccgttacttttgatagtgcaatgacgcttagtgcggtttttgcttgtgtcaagattcttgttgagtctgtagcgaccctgcctttacagatgtttaagttaaatgctgatggaagtagaacaatcgtaaaggatcatccggtaattcagcttttaagtaataagcctaatcgttatcaaactgctgtcgagtttcgagagcaatttatgttgaacctggttgctggaaatgcagtttgtaaacgtgactatataggtaaaaaattggtcagtttgcaggtcattaatagtggttcggttgatctaaaaattaaagataacggtgaccctgtttatgaatgccagatcaatggtaggaaagtagagctgactgaaaaacagatttggcatgtaaaaatgtttggtactggtttatgggggatgtctcctattgcctacggtgctgcttcaattggtgtgggtttatctgcaagtgataagactactcgtttaatgtcaaatggtgctaagcctactggtgcattaaaaactaaacgaattcttaaagatgctcaaagagatacgttaagaaaagaattggatattttagtgaatggcgatgatggtgatattgctgtcctagaagatgatatgcaatttgagcaaataagcttaacacctgctgatcttgagctaatcgaaattcgtaaattatcggttgaagatgcatgccgattctttggtgttcctccgattcttgtctatatgtctgatggatcgactacgtggggaagcggaattgaacagattatcgacggtttctataaatttggattgcgcccatatctggagcgtattgaagagagtattcgaatccatttattagaacggcatgaatgggatgaatacgaatttgagtttaagacaaaggacttgctcagagcttcatatttacaacgcattgcagctaataaagatcgaatcattagcggccaatcttcaattaatgaaattcgtcgagaagagggtgatttacctgatcctaatggtgatttcttacttgttccggtcaatatgactacggctgaacgtatgaaaaaaggcaattttaaggtgaatgaaaatgggaaaacaactgcaagcgcggaataa

SEQ ID NO: 53346 - DNA, 729 bp, Acinetobacter baumannii
atgggaaaacaactgcaagcgcggaataaattttcgcctaacttgccaaaagtacagtgtcgatttattcctgctaattcggctgaatgtcgatttattaaaaaagatgcgaaaacaggcgcagtcattgtaagtggctacgctgtgaaatgggattctattaactattacggtgaaaagttccttaaaggtgcttttgccgatgtctgtgcagcatttaaagctggtacaaaaaaagttcattgttattacaatcatggctggcgtcagtggtatgtcgattcgactatcacgatgcgtatcgggaaaattattcgacttgaagaagatgatgttggtttactacttgaagttgaattaacaccaggattggcacttgcacaaaatgttggagcaatggttcaacacggtactgttgatggtttctcggtagcattttatccccctagtgatatcgatattgaggataaaggaactcatattgaaattaagcgggctgatctatatgaaataagcattgtagatgaaccagccgatggtgcagcacgaattatcaatgatgatgcaatcaatgcgattgaatcggatgatgatgtaacagagcttttgcgctcagttttaccaggcggctacgctgaaaagttaatggcccgattggcaaatttaaatcaacctaaacaaactccagagcctaaaaaagacccgtttgcttttttagacaattactaa

SEQ ID NO: 53347 - DNA, 1269 bp, Acinetobacter baumannii
atgactgcatatcaaaaattcccaatcggtgcgcctttcaatgttttgatggcacgtgatgcttctgcatcactaacccaaattgaagaaatggcaaaacagcttaatgctcgaatgactacacttgatagcttaattactcgttatcaagatggtctcaaaaaagttgagggtattcccgataatattaaagaagaccttgaagcccgtgctaaagaagtcaataaattagcaggggaattatctgaactacagcaaaaattagttgatggtgtcaacgagcgtggaattgaccctaattcagttgcttctgttctaatccgcaataaagcgattcttgatcaagcatcctcaattcaacggtctaagggtaaattccaatttaatgatttgaatgcccgtaacatcgttacattaacaggtcttggagcgacagctcagtttgctgctaatgatttagggcgtactgttgagcgtgccttaactttacttgattggattagttttactccagtcactgctgaactggtgcctttgttacgtgaatcagcttatgaaatcatggctgatcttgttcctgaaggtcagacaaaaccagaatcaaacttaacctttggtgttgttgacttaaaggttgggactattgcccactggattaaaatttcaatccagcttatttcagatatgcctactttggcggcttatattgaaggtcgtcttgcttatggtgttcgcttaaaactagaagcaaaaattgtagtgggtgatggtgttacttctggagcgcgttcatttattggtttgattgaaacaaatcaatttgaagttatcacacctggagcagatgatactgcaattgatgtgattaaccgcgctaagtataaagctgcttctactggtctcttacctgaagccattattttgaatcctgaagattggggtgcaattgaacgtataaaaggtactgatggtcactatatctttggttcccctggtgcagcggtccagccagttttatggggtttgccagttattctgtctgctgcaatgacttccggtaaatattgggttggtaaccttacattaggtgtctctgccttcattcgtgaagatgttgctgttgagttatcaacagaagatggcgataacttcgttaaaaacttatgtactgtccgtgctgaaatgcgtgcttgttgtggtgtggcaattccagatgcttgtgctggtggtgacttgccagctacagcaacacctccagtgggtggttaa

SEQ ID NO: 53348 - DNA, 300 bp, Acinetobacter baumannii
atgagtgactacataacgcttgatttagcgaaatctcatttacgtgttttgcatgcgcgtgatgattcatacattgagttactgatcaaagcggctttgaaagcagtaacaaactttatagacaaagaattttcagaaattgagcagccagatggttcattacctgaagatttgatgtttgcggccttgttgatcattggtgatatgtatcaaaaccgtgcagctcaaaccgatgcagctctatacgtgaatattgcgtgcgaacggttaatgtttccttatcgaaagatgggggtttag

SEQ ID NO: 53349 - DNA, 360 bp, Acinetobacter baumannii
atgcaatcaggcaatctaaatcaatatattgaagttcagcaaaaaatggttgaacaggcacaagataaatctggtgatcgtgaggaagtttgggtaaatatttttcccatttacggccatattactgattcatctgtacgtgatctgattgcagcgggtaaagaacaatctgctgtagcttgtcgcattctgattcgtcaatcagatgttttgcctggtacagattggaccaaatgccgactagtttgtgatgggctttattatcgaattatccgaccattgcgtgacaataaaacaggcaatgaatatttgactttagcatgtgagcaaggggtctataaatggcaggattccaactag

SEQ ID NO: 53350 - DNA, 489 bp, Acinetobacter baumannii
atggcaggattccaactagaagggcttgatgaagctctaaaaaaaatggatgaaatggctaaaaacatccaaaaaaagcatttaaagaaagccttgcgtgaaggcgcaaagattgttcaaaaatcagctaaagaaaacgctcaaaaaattaatgatcctaaaaccagtgctgatattgcaaaaaatattgttattcgcgctggtaaaacagcagataaaaactctgtaaaggttcgtgtcggagttaaggatggtggtgaattctggcgtcagaacaagaatgttcagcgtaaaggtaagaaacgacagaaaaatccgcattacacctttttagaaaatgatactcgtcacttttggttggttgagttcggaacatccaaaactagagcacagccgtttatgcgccccgcgttagagtcaaacattgacagtgtgacagaagcggtagccgctaagcttaaaaaggatattttgggggatataaattaa

SEQ ID NO: 53351 - DNA, 369 bp, Acinetobacter baumannii
atgttgattatcccattaattgaaatttgtgaaaatgataccgaattagttgggcttttgactgatgaggctggtttaaaagtcagtgaatttgatgccaataatacaaatggcgctccatatatatgctggcaaatcattgatgcaaatcctgagcaatatttatctgaagcttcagatatggattcaatatatgtgcaaattgatgtttatgctgataccaaagcctcatcaagacatatcgcacgactgttaagaaaaaacattgaagagtattgctatatcgaagattacaccggagtcgtgcacgattccgaaaccaacttataccgtattcggatagatagccgatggtatgaagaaccttaa

SEQ ID NO: 53352 - DNA, 519 bp, Acinetobacter baumannii
atggcgcgtcgtacgcaaggcactggtgtttggtttgtggatgaagtccctgcaacacctggtacttttgaattggttgaagttgactgtcctttaaactttaaaccaggcacagattcaaaagatcgaattgaaacaacctgtttaaaacaagaggaaaataaaacttatttggaagatggtggtctaaaagaccctgggcaagcaacctttgatgtaaatgctgacccgcaaaagccatcacatatacgtttatataatctatctttatctggtaaagaagttcaatgggttgtcggatgggcgggtaagactaaaggtagtgttaaaaatattgttcctaccgttgatgcaagtactggtgaaataacattaccaacaggtcgaagctggaataagtttaaaggctatgtagatacattccctatggatgttgatgctaatactgttgttaaaagtactgttactattcaacgaaatacttcagttgaatggattcctgaaacaacgaccccttaa

SEQ ID NO: 53353 - DNA, 474 bp, Acinetobacter baumannii
atgaccatactaactttagatgatattaaatctggtgcattggtagacgtacctgaaaaaattgaagtagaaattatggttaagggtcaaccccgtaccattgaaacttttattaaaattatggattacacgacagctattgcccaaatggcagcaaataaagctgggcgtgagggcttggctagtattttggctgactgtattgttaaggaaaacggtgagccagaatttacagaagagcaaattcgaaaactttttaataagccattaattgatgctatttgggaaaaaatagttcagaaaaatctcttgggaaaggtgattgcgacgaagaagctttcagagaagaagaaatctgggcggagctcgtcatcaacggcatcgcgggcaaaacgatcgctgaagcaaaaagaaaccttagccacagagagttctgcttctggagacagtacattgaaacaagaggaagcttaa

SEQ ID NO: 53354 - DNA, 504 bp, Acinetobacter baumannii
atgaaaaaaattatttttgctgctttaagcgtttttagtatgacagtctcggctcaacaggttcctatcagtgaatatgttgaagtggttgaattacctaatatgaataaaaaccagatttttaattcatcaaaaatttggattgcgaaatcattcaaatcatcgaactcagttgttcaatatgaagatgcggcaacaggcactattgtcggtaaagggaatatgcaatttccttgtcaaggtacttggaattgcatggctagaaaggatgatttattagccttcacaattaaagtggatactaaagataataaagctcgaatttcgtttaatgatatgactgtaaaaattaatacaaaaggggctacaaagtttgttcctactggtcaggaaattcagacagttacagaaaaggataatgaaattattcagacaggtctgaaaggtattgttcaagattttaaaaaaggtattcaaagcgagtcatctagtacagattggtaa

SEQ ID NO: 53355 - DNA, 2712 bp, Acinetobacter baumannii
atggcatctgcatcacttgggcgtttaactttggatttggttgctcagattggtcaattcattgggccaatgactcaagctgaaagaaaagccaaagagtctacagacaaaatgggaaaagctttctcaagttttaaagatcaaatgaatgaatctttaagcggttcacaaataggctctgcgattgaaggtataacggggaaactaggtgttcttcgcggtggtgtattaactgcaactgctgcggttgcgggtatggcagttggtggatcggttgttgcggttgcgggtttatctgcaatggcgattgaagttgcaaaaagcaatgttgaaatgatgcaatttgcaactgttgcgaatacttcaattgaatcatttcaaggtttggctggagcagcaaaaacttttggggttactcaagaacaactttcagaccaattaaaagattttaatgaaaaaattggtgagtttgctagtgttgggtctggcggagcaatggactttttcgagcaaattgccgttaaaacggaaggcggagctgaaggagcaaaaaaacttgctgtagaaatgtcaaagcttgatggcgttgaagctttacaactatatgttgataagcttgaagaggctggtgtcaatcagcaacaaatgtctttctatttagaaagtatgggcagtgacttaacaaaaattgctcctttattggtagacggtggaaagctctggaatgaataccaaactgctttagaagatgctggagttatcactggtcaagctgctatggagcaatctatggcattggcagctcaaactgaatcattacaactacaatttggggctttgaaaaatcaattagctcaagcggtcatgcctgcgttaagcagtgtaataggttactttcttgatggttctggaaaaggtggacaatttgcgggcattgttgatgctgtaggaattgcagctaagggtgctgcaattttaattgttggtttggctggtggcatcaaaaatattgttacggttgtttctggagctttaaaagttttgggtaacttaggtgagaccgttgttaacttttggacagctccgacttttaaagataaaggtatggctctggtcgatggttttgtcaataatggcaaaattcttgttaatacggcaaaacaagttgttgataccagtaaaaatacatatggcacaatttcaaatgtggttactgctcaaactggtaaatacgatgctttgactcaaagtattttgaataatcaaagagcgcaacaggcttgggctaaaaacaatcaaggtaaaggtattacttctggtgtggatcagaataagacccttaacccggatgctaaaaaacctaaatcaaatactaaatctaaagctgaagcagaagctgaacgtttaagaaaagaagcagaacgtttggaggaagcgcggggtaaattagctaaggatgtattgtatgactatggtactgaaataacccgtatttctgctgatctaaccaaagaattagagcgtataaatgaagcatctttagcaagaaatagtgctggtactggtttcgcaataagtgaaagtgaaaaggaaaaactaatcacagaggcaaaatcactaagcgaagcccgtaaaaaagtgtttttactggagttcgataaaactaaaaattcttggttatggactgaagaagaaaagctagcgaagagtgctgaaattgataaggcccgtattcaagcaacacgtggtatgactcaagttgaacgtgatctccgaattcaatcaattgattctgtttatcgttatgagatgaataagttaagtgaaaatagaatgaaggagattcagcaagcacaacaagcctgggcgggtatttatacccaaattaatggcggtggtgatcagtacaatttagagcaagaacgctttagtcgttatgatgcttctcagaaagtttttgattcaaaacttgcagatattgaagctcaagagcaagacccaaatgcagatttaaaggctttggctgttgaacgtgaagcgctttggcaagagcataaccagcggatgcttttgattgatgaaacatatagtcgtgataagaatgcattaagtcttcaaacagctactgaaacattaagtggaatgaccgatttaatgggttctatgcttggtgagcaatctggagcatataaagcgatgtttgcaatgtctaaggcatttgcagtggcacaagctattatgaatgcaccacagacatattcaaacgtttatacatctgcttcattaattcctatgattggtccttatattgctccagtactagctgctggtgcagtgggcatacaggtagctcaagcagcgcagattaaatccgtaaatttaacaggtatggctcatgatggtattgattcagtacctaaagaaggtacttggctgttaaataaaaaggagcgtgttgttggtccacgattaaaccaggatttgacgaattatttagcgggtcaaaaacagcgtggcggtggggttaatgtaaatattaatgttcctccaggctatacggctagagagcgcagatcatcaaatggtgacgtgacaattgatgttgtgagacaagaagttgaacaagcttttacccggttaggaacccaggcaaatagtcatgagtcacaaatgatgcaacaaggttttatggtcgaacgaaatagggggtaa

SEQ ID NO: 53356 - DNA, 471 bp, Acinetobacter baumannii
atgctttgccccttgcaagaagggtatggctttacaccaggtaatgatattcgtgaacaaaaaacagaagggggcatgccaaggcaagcccccttttttgttggctccccgcactcggttaatgtctctgtcttattaaaagacgatgcagaccgccaatatttttgggctttttggagaacaaaacagcgtaaaccagaaaattggaaatgggagctatcattagaccacgggataattgaagagtgtgaatgtcgcttcacttctgaatcattacctggtgaaacaaagcgaaatggcgttgtagtcatggttagctttcaagtgattgttaaacctattaaacgtagtgctgatctagaccgaaatatcgttaatgtgcgccaaggtgttgagtctagcgaagtaattgacgatatcgaaaaagtgcctaatgaatggttacctggtgctttaggggtaaatcaatga

SEQ ID NO: 53357 - DNA, 693 bp, Acinetobacter baumannii
atgcaagaaataaaatcacttttagaacagttaaatcaacttgaacccttaccagcaaaggatagagaaacgtatttagaaagccttaccagacgaggttataaatacatgactgctattacaggggtcttatttttaatattagttatactagcggtatggcacaaggtatcaccttttacggatcaaggaagagaaatcgcaatatggtttgctctgttaactatgtttataccaacgatttatatcattatcgatatatgcgttggcttagtatctatattcaaattcaaatcgcgaagttttgattggttaatacttgaaattgagcatgataaaaaagctatagaattactaatcaagtacaaaaaagaaactctattagaggtgcaggattggcttcagttaaagtgctctcgactcagtaatagaatttcaacatttattggaaactcggataaatatgctgtgttttcattaataggcttaggttggtctgtatggaaagatttgtcaaagacaccgtctatttcattttcattaagtaatgggaacatagtccaaaccttgctgttgtatggcacagcttttctaacaggaattgctttaggtgcaatgattgtcaactatcaaatccaacgctacaaataccaaatagaacttattgaaatttccttaaagcaaaaaaattaa

SEQ ID NO: 53358 - DNA, 936 bp, Acinetobacter baumannii
atgtctgcattactccgttttactcagtttgttcaaaagacgtttgccctatgggtaattatttttgcagctctggcgctatggcaacctgaattttttgtttggctcaaagcgtacatcccatggattttgggcattattatgcttggcatgggaatgaccatgaccgttgatgattttaaaggggtactacaaagccctaaagccgtgttaattggggttgttgcgcagtttgtggtgatgccgggcttggcatttattttatgtaaattatttaatttgcctcctgaaattgcggtcggcgttattttggtaggttgttgcccaggaggaacagcttcaaatgtcattacctatatggccaaaggcaatgtggctttatcggtcgcctgtacctcggtatcaacactcttggctcctgtgttaacacctgcaattttctatctacttgctagccaatggctaaagattgacgcggcttcgatgtttatttcgattttgcaagtcgtactacttccgattgtgattgggctgattttgcgaacttggcttaaacgtcaggttgaatcctatattcaagtcatgccattagtttcagtgattgcaattgtagcgattgtggcagccattattggtggcagtaaagcagctattttacagtcgggtttgctcattttggcggtagtgatattgcataatgggtttggatatttattaggttttgccgcagcgcgtttctttaaattgccttatgcggacagtaaagcaattgcggtagaagtaggaatgcaaaactcaggcttgggcgtggcgcttgcagcagtgcattttgcggcttccccgattactgccgtaccaagtgctattttcagcctttggcataatatttctggtcctgcacttgcgacttattgggcaagtaaacacaaacaataa

SEQ ID NO: 53359 - DNA, 960 bp, Acinetobacter baumannii
gtggtttatgtcgcacttcaagttttactctgcccagctttgtctcaggtcactgaaaatgcgtataaggttttattatcagatagtcttttcttcattcttaaaattattttgtcctatcttctgatttatggtgtcgctttattttcaattccgccactcggggcgataggggcgttgttagccactatcattgtacggtggtttatgttggtcgtttattacctgttttttctagagaaaaagtacatctttattgaacatccagaacggtcagttgaagatagctggcaaagtctgcgtatgattttaaaaatagggatacccacagcgatcatggcattgatggacgttattgcattttgttcagttgctattctgattttaccttttgggagtgtggtatctgcagcccatcaaattgtcgcgagcactggcggtttcatgtttatttttccttcatcaattgcctcggcttatagcattttggtgtcaagaactatgggcagcggcaacatgaaagaagcagacaaaattgccagacaaagtatatgggtcattatggcagtgagtggcagtttatccttgtgtttatgggtggagaggggcttaattgtcacgttctattcagatgatttggctgtacagattttggctgcatcactgctcttgattgtctgcatgtctcattttcttgatggcttaatgacgttactaacctctttgctgcgttgttgggatgtgtcgattttacccatgctgatttttttagtcgtggtgctatgtttcggattgggcggtggttggtggatggcttataaagggctgcactgggggagtcactctatatctgcaatgggaatttatggtttctggagtatggcagccataagctatttagtagcttgtgtattgagtgccttctgttttcgttttagaaagcaattaagaggtttttga

SEQ ID NO: 53360 - DNA, 1179 bp, Acinetobacter baumannii
gtggcggtatttttagacttcaaaagacagctcaagctttggttagaacatatcgttcactatgtttcagaccttcaagaagaaactattttatttatatcatttggccctaaagatcacagatgtagcgtatggcatagtgaaaaaacaatgctttcacaagcaaccttacaattatttaattttattgatgatcagttttctccagatcaacttccagactatataaaaattgatgttgcgtacaatttagaaaagcaaagttggaaccaaatagagcagcaggttcatcaccaatttcacaataatcattatcgcagaggtattggatttgatgattcctgttcggtagcttttctggagcaagaaatatatggaaaagccattattcggggcttaagttatgacaagccgaacttttttgatgaaacaaatctgaactatgcaattaaacaaaaatatcgtgcaacaaagccggaaattaaacttcagtcactacaagaagtgtggactttcgatacctatgcaattttttatgaaaatggacaatttattaatttagcgagtcgctacgatgcaaatggtattagagccattgctagcaataaaaaacagcactttagagacctcattgaaaaaaatgcagcgtttttacatagccagattcaagaaaatggcaaattcatttatggatattttcctgcttatgatcgtgatatacggaactataatacggtacgtcactgtacttcgctttacgcgcttttagagacttttgaagtacaagataaacctgaatactggcctaaaattgttgcagcaattcaatacgcacttactactttctataaagaaaaagacccaataactgcttttatgattgatggtaaagaaggggagctagaaattaaattaggtgcaaatgccgcagctattttaatgttaacgaaatatcaagaaatcacaggaaaagatgattatttaaaatatgcagagaaacttgctcatggtattttagaattagtagatccggatggattaactactcatgtattaaattatccaaattatgatttaaaagaaaagttcagaatcatttattatgatggagaagcagttattgtaccaatgagcttacaaaaatatgtcctgaagaaaaatattttatttttggtttaa

SEQ ID NO: 53361 - DNA, 741 bp, Acinetobacter baumannii
atggttagtcttactgataaaaaatacaatgatattgacattaagtttttaaactacttagataaattccctattaaactagataataaaataattttattgaaagatttgttagatgaggtaaaaaatgaaaatataaaaaccttatctgtataccataattatggaaccgctattattagcagcacaccccccgaaaatattatttcaaatgaatcaaaaagagggctattccacattataaaattcctcattactaaaaatggtttctattattctgaagaatataaatcccatgaattagaaattataaatttcaacaaaaatgatattcaaccaatatcaaatactctactaaaaaaacatttattgcaaaaaactcgaggtggattatataacattggttgtagaattatttttccagcatggggtatttttagagaattatcaattaaagacaaaattagctgggctgatatttatagatactcctcatataaatcagatctactaattttacctttaaacttcaaatacaatttaacagatgaaaaattttatgaagaatctgaggattttgttaattggatatttgagcatagaaaatatgaaggaactaaaattgaagatattaggaaattaaataaggaattaattgaacatatccgtaagatccttcaagatagcgatcttgaagaagaaaatataaagaatgaatctgatatagaggtattgaaataa

SEQ ID NO: 53362 - DNA, 840 bp, Acinetobacter baumannii
atgtttaaaactgaaaattattatcacgtagagtattggggaaatcagggaataactcaaacctgtctaatgagtctttgtaatttaattcaaactcattcagatttaacctatgctttgcttcttaccaatgagcagactcatgcctttattattaaagacgaaaatgagaacttttatgtactacgctcaggttttacctcaggatatatgggtgaaggccctagagacttagcaacagcactaacattattaaaaagacatgagattgaaacagaagagatattggtaagttcaaaaattttaagaaaggcaaataattcaactttgaatgactcagagattgagcttctatttaaacaaaaaatcatccgcccaatcagattacacgattatatctatccatttacaaaagaagtttctgaaactcataaatctaaacgctactatcctctggaactaccttattcaattttagatgatagaatttttgaccttgctctgctttttaagcacgatcctgattcagctcttctaaaagcttataaacgtctagaagatattattagagatcgtactggcttaacggaacatagcagtaaactattttctcaagcttttaactctccaaactgccctcttacatggaatttaacagataaatccgaaattattggtcgagcgaacatattcattggaacttatcaagctttcagaaatgctcgagcacatcgcgaaaaagaagaaaatataacacaacaatatcgagaatttttattgattaatgaactttaccaacttgaatcagaggcaattcaactatcctgtgagaaaagttag

SEQ ID NO: 53363 - DNA, 1536 bp, Acinetobacter baumannii
atgattatccgaggtattttagaatattcattgggtggtcaactatgtattcgtggttttgcacctttaggtgaacttgctcgtttatctcagccagatgaaagctatcaacgtgcatatattcaagatcgtgaacaagacctacagaattatcttaaaaatgaagaatatttgtttttttcagaaattattttgagcttggaggttaagcatactataaaaaatgaaggagatgttccgcctttccatcaattgtttagtggtacgaaaaaggcatttatatcaaatgtcgatggtacgcagttaaaacttaagcctgttccttttaaaagcacaacagatataagaaataagacagaagtacaacttgttgaactatcaataaatgacactttaatctctcaaggaataaggccttttaatcgtattgatggaaatcatagattatctgctgttgagcatcttaatagttcatctgtttcagatagaaatgcgccattttgtattgtattgagtccagtcatacaggcagaagatgggagtgttatccaacaggaaaacaaaaaagctgagcgtgttatatttaataatatcaatgctaaagctgttcctttgactatggaacaaaatctcaaagctattgtttctcaagatagttgcgatagttttaataatgaggaattaaaggataaatttgattgggcgacttttgcagttcgagaattaggtattgcttctatcaataatctagccgatgtatatccaaatttaggtcaagactttcttaattgtccattaacattctccaaaaaaattatagatatagcactcacagaaaatgtgattgttgagttagatgaagaaataaataaaattaagcaagctctgagagaagtaaaccaaattttgggaaatgaaaatctgacagaaatatcagtagatattgtagtagcttgtgtctttattcaactctcacaaatgaaattaccaatatttatcaattggctaaagagaaatcatatttttgacttggatcaaatacactcgacatctcttataaaaatttataaaaaaattaaagaggttaaaagtaaacaagtctttatttcaatgcagttttcagatgatactcaaccgcactatgatgctattaaagaagctgttcacacaattaatcaagaatttggtcaagaaattctattgcgtgaaattagaattgatcaattaaatcaaggatattctcacaatattaatgatgaaattttagagcttatagaagatagtggattattaattgctgatatcagtcatcaaaatggtaatgtttatcatgaaattggttatttgatggggcttaatcaaggtaaaggattagaacaaaagaattttattttgatcaaaaatgatagccctccatttaatacaaatagagtcggatttaacttaaccgatattaaacagattaggtttaaagatactcttcgattaaaaactgagttggttaaagctttaaaagtttattatcaattagcctaa

SEQ ID NO: 53364 - DNA, 1359 bp, Acinetobacter baumannii
atggttcaatttaaatcatcagctggaaattcaaatatttttattgtaaaccgttctgaattgaaaggtagatgggaaccattattttattcagaaaagtatcaacaagttatagataaaatacattcaagcccttggattgttaaaactgtaaaacaacttgcaaagcgtattgctgatggaccttttggaagtgatttaaaagtagatgaatatcaagtatcaggtattcctcttctcagggtgtctaatattcgtactggtgaaattgatggtaaattagtttatatttctgtcgaaaaaaatgagaagttaaaacggagtaaagtatatccttacgatgttgtattgacaaaagcaggggctattctaggttactcagcagtttttcctccgcatttaggtgaaggtaatattacctcacatctagtaactataagttgttctgaagaaattaatccatattacttatctttattttttaaatctgaaatggggcaatctcagatttatcaatggggtaataagtctactcgtcccgaacttaatacgggagaggtaaagaaaattttagtacctgtccctcctttaaatattcaaaaagaaatcgtagaaaaaagcactaatgctttggaaataaggaatattaaattagctaaagctaaagaaaaattagcgtctatcgatgcttatttactagatactttagggattcatttacctaaagaagattattcatttcctaatagaatattcttgagaaatttttctgaaattgttggtggtgagtgggatcctatttcaatatctagagagaaatttaaaattgaagggggaatctatcctaacaaaaaattatcagagatatccagcattcaaaaaggtcaaagtattacatctacagatgttataagtggtaattatcctgtcattgcaggaggtaaaacgagcccttacgctcataatcaatataattacaaagatgaaactattaccgttagtgcttcaggagcgtactctggttatgtttggtaccatgattatccaatatttgcttcagattgttgtgtaataaaagtcaaaaatgttcatgtattagcattatatctagctgaactgttaaaggttaagcaaaaagaaatttattatttacaaaaaggggcaggacagccacatgtttatccgagtgatttagcaaagttaaaaatagcaattcctccgttgtctattcaagaggaaataatttcacatatccaacgaattcgagatgaagctaaaaagttagaagatgaggcaaatttggtgcttgaaaatgtaaagcaagagatagaaaaaatgattcttggggaagcagtatga

SEQ ID NO: 53365 - DNA, 2214 bp, Acinetobacter baumannii
atggacaattggattcaacaaggtttgcaagcaaaattaattgagttgagtgcagatggctcaactattacttatgtaaagcaaggtaaatcaagaaattttaataatccagaagaaaaagttcaagtagaagcatttattcgtttagttctagaatttggttatccagttgaaaatattaaacaattcgtaacagtaactcttggatcagataagcgtgaagctgacatgattgtctatgaggattcttcacatacgaagccaatcataattgttgaggctaaaaaacaagaagttacacaggcagaatttaatcaagctattaatcaatgctttagttatgcaaatgcactttctggtacagtgaagtatatttgggtgtattcaacattacttagtgaaatttatcgcttcaacaaggaaaaaaatacacgtgaagctttaacagatttgcctcattttggttcggatactgtagcaccttatacctttgttaaaggtggggggaagcatgaatatactgatcctaaaactgggaaaaaagttacacaagaatttaaagatataaaaagagttgcagaggatgagttaacacgtcgttttaaacaagcacatgatgcactttgggctggtggtcaattaaacccatcagaggcttttgacgaactggataaattaattttttgtaagatctgggatgagcgttataacttagagggagccactaaaaaaagaagaaagaagggtgaaatttataaatttcaggttattactgttcaaggtaaagatgaagcagattcaattaggaaaactaatcaagaacttgcagatcgtataaagcatatttatgaaaagggtaaagatttcgacaaagaagtttttaaagatgatattcgcttatctaatgagcgtattcgtactattgtaaattatttacaagaaatcaacctaagcgaaacggaccttgatagtaaaggacgagcttttgaaacattcatgggaagttttttccgtggggagtttggtcaatactttacacctcgtcccattgtaaaatttattgtggatgtcttaccgattaaaaatacatcacgagtgttagatacttcttgtggtagtggtggttttttattacatgctttagataaagtacgtcatcaagcagatttagaatatcctgactttgaaaccgataatgaagattatcgtgcatggcatgaatattggcatgattttgctgagaaaaatctttacggaatagagattaatgaacaaattgctcgtactgcaaaaatgaatatgattattcatgatgatggtcatactaatgtgatttcatcagatggattattaaatgagcaaactatagaaaagaacactcacaacaaaggctttaaatataactcatttgattttattattactaatccgccatttgggtcggctgtaaaactcactgagcaagcctatttaaaaacttataatttaggtaataatgaaccaggttggctggatgtaaaaaattctggtgtaaaaaatcgtgactctcaaagcactgaagttttatttatagaacaagcatataacttcttaaatgaaggaggttatttagctgtagtcattccagacggcattttaacgaatagtagtttacaatatgttcgtgatcaaattgaagattggtatcgaattgtagctgttatttctatgcctcaaacggcattctctgctacaggagcgggtgtgaagagttctgtgctgttcttgaagaaacattcagaggaacatacagcagacttaaaacaacgtaagttaaatattcaaaataatttgaagaatcagtatgcttatgaaaaccaattgaaagcttgggataaagaaaaagccttaatcatcaagaaaatggaaggatttgataatccgtatgatgacgatatgacattaacggaattgaaaaagactgaagaatacaaagcatggaaagcggaaattgatgctgaataccgtgaaaaaattaatgagcttaaagaaaagttagaagatttgtatttgcagaataagcaaaatggattgcctgattatccagtctttatggcgattgcggaagatattggctatgacgcaacaggtaagcagacgcaagtgaatgagcttgaactgatctcgactgaattagctaaattcattcaggagattgaaaatggttcaatttaa

SEQ ID NO: 53366 - DNA, 3189 bp, Acinetobacter baumannii
atgttaaaccacgcaatgtcagtgcaatctgacttttcgataggaaaatcattattaacggtagacaaaattgtcgaagctgcaaaaggcttaggctattcatcggtcgcaatcgttgatgacatgtccttacatgcattggtagatttttcgaacaaagccaccaaagccaatatcaaaccggtgtttggttgtcgtttgcgtgtatatgacgattctaaatatcgtaagccccctgcctcatctggtattgctgaaaaacgcaacttgatgttctgcccaaaagtctacataaaaagcgaaaaaggcattaaaggcttattcaaacttcttacagacgcaaactctaaagagcaatattactaccacagccgtactgatctggatgctctatgcaaattggaagatgtggtcgtaacaactggtgatatgtacggtctgtttagtcaccctgatcacgaaagaattttaaatgtattaaaagcgagatttggtgatgatttatatattgaatttagtccgatcaatacgccattgttcgaccgcttaaactacttaggctatttggcgtatgaacgcgaaaaaattaaaaccgtcgtcacttatccttttaactatcttgagaatgaagatgcggacactttggatgtattgagcgctatcgcaaccaatacccaacttgatttgcactatcgtcctattcaatacgtaaaagattttggttttaaagagccaaaattcattttagaccatacaaaagctgctattcagcgtatggctaaatatgagcgcgtcaattcagcggaagcttggaaagaaggtctaaagaatatttctgagctggtggacaaatgccaatatatttttgagaagcagccagtttccctacctaagctaagcactgacgaatttaaaacactatgcgcgaaatgcttggaaggctggaagaaacgcttttctaaagagattcttggatataagccaacgaaagctgaattagatacagtatataaatctcgcttaggctatgagctttcaatattaaaaaagatgggctttgagtcctacttcctgctcgttgaagacttggtgatgtggtctaaaaacaacggcgtgattgtaggccctgggcgaggttctgttggaggttcattagtcgcttatctgcttgggatcacggacgttgatcctatacgttttggattgatcttcgaacgtttcatcaatcctgaacgtcttgacttgcctgatgccgatctggacttcgcttcaagcggtcgctacaaggtgattgattaccttgttgaaaaatatggtgaagattatgtcgctggtatctcgaactattcaacactagcttcagcctcagccctacgtgatacaggtcgtatcagcggtttgaacaacatgcaattaagtgcgaccaagcttgtgcttaaagaacatggaacgtcacttgacctgaatacttctgcggacgctgtgcctgagctagacaagttccgcaatgaacatcctgttatctggaagcatgcaactaagcttgcaggcacaatgaaatcgtttggccaacatgcggcaggtattgttgttgcaggcgaacctatcgttaatcgagccgtgctcgagactagaggaaagtcaccagtcgtcaattgggacaagcgtgtagttgaggattggggattgatcaagatggacttgctcggtcttgccaccttagatgtattaaacattgcttgcgaatatatcaaggaccgtcatggcaaagagattgatttgctgtctattcccctagacgacccaaaaacacttgatgcatttgccaagggcgaaacgacaggtgttttccagtttgaaagtaaggggatgaaaaaccttttaagggaaatcgccaaaagtggttcgatgacctttgaggatatttccgcagcaaccgctctttatcgccctggtccgatggattcaggactgcttgatgactatgtggccgttagacaaggattgaaaaacgttgagtatgatcatccaaacatgatcgatgctttgaaagacactttaggggtcattatctatcaagaacaggtaatgaaagtgtcggtcgactttgctggctttaccaatgcagaagcagacagtttgcgtaaagcaatgggtaagaaagacaaagacaaaatggccgaaatgcgtcaaaagttcgtagacggcgcagtagccaaatcaggtgtagagccagatttcgcaggtgaaatctttgacaagatcgaagcgtttgccggatatggctttaacaagtctcactcggtcgagtattcaatcatttcggtttggtgcgcatatattcgcgttcattaccctgctgaatactttgccgcaagtctcagcgtggttgatacagaagataagctcactggacttgtgaaagatgcgcgtgaatgcggcattgagattcttcctcctgatattaattattcagccgatcgttataagattaaatccaatactgaaatcttggcgcctttcaatgcagtcaaaggtatttcagaaacgattgccaaagcgattgtgaaattgagagagaagaatcgggcttggaaagtcgttcgctacaagaagtcgagaaagacaggtgaaaccacaccgatctatggtcctgatggttcagttccaccaaaaaaacgttttgatagctttgacgagttcgagaaagcagcatctcaaccaaactcgaaagtgaataaaacaatcgttgaaaatctcagagcaattggggcgtttgcaagcattgaacctagtgagccttcagcgaaagacctctcacgacgaaaggatcaaatgaggctattaccaggattaattattgattctgtaaaagcagatagatacacagatacctcagagccattcctgcgagcttcgttggtcgagcatatgcgcgattgcaagcaatgtaacggttgcgaccttgctggacaggttcatccagatattcgtttgggtaaaaagatgcgatttatggtcgtggctgactgcccaacttgggaagaggaaaagaaaggaaaacttcttgaaggcgagacggcccaatatgtgaaagctgcaattaaagataatgaattagcagtagcggacggttattacacaacgctcgtcaaagccaaaaaagggactgttctaaattttgtgtaa

SEQ ID NO: 53367 - DNA, 510 bp, Acinetobacter baumannii
atgagcaacgcagaagatttattagagactttaatcaaagcattaaaagactcaaatgtagatgctgaggaattgcgcttcatgaccttgcttcctgatcacatgcgcaagattcaggatttaaccgaagcgtttgtaaaagctcacgttcaaggtccacatcacctagaaatttacatgagagccattatcggcgtagtggcgcatgttcaagcagcattagttgtgaattccggcactgagtcaattcaggaatttgcacaattagtggctcataaatcagaagatgaatatttgcttgaactaggtcacatgcttcgtgactttactgatagttggctaacaatctttttacaaggtgcaagagaacatttcggcgaagaagtatttaaggcttatcaaaaccaagttaaagacacaattagaaacgctaaaagcgaaatgctgaaatcaaaagaaggcgattcaccatttaaagattcatttattcctccatttgcaaagcagtaa

SEQ ID NO: 53368 - DNA, 192 bp, Acinetobacter baumannii
atggcaattaagcaaattactaaagacgaggctgatcttttaaatgtacttttagggcaagtaagtttgaaagaaagtcaaaatggcaaaccaattgaagttttgactttgagctatgtccgctctgaccctagtatgactggcgttgagttggtatttaaagagtcaaacgacgagactggcgctgtataa

SEQ ID NO: 53369 - DNA, 339 bp, Acinetobacter baumannii
atgaaaaagattatttttaccacagtattgggtttggtcatttctaattttacaaatgcagatactcttattccaagaagcgttcaaggcgataaaggaaaatattatttaattgagaagaaaaaacaaggcgatattattattacacttcacaaacgcattggtgtagaaactacagattatactcgtttggagacaaactgtaagactatgaaaatgcgtgaaattggaactggagagggatcaataaaagctataaaaattaatcctactaagtggtttgatttagtagaaggatcaagtaaaagtgatctagctcattttgtttgtaagaaataa

SEQ ID NO: 53370 - DNA, 420 bp, Acinetobacter baumannii
atgggatttaactttagaaagagttttaagattgcaccgggtttacggctcaatgttggcaaaaaaggaatctctagcgtttctattggtggcaagggcgctcgtgtaaatctcagtaagaaaggaacacgcactactgtggggattcctggaacaggtttgtcatatagtaattttatttcccataagaaaaaagcgccacctccattaaatagctaccaaccacaaccatttattattaatacttcgacttctcaaatgccaccaaacagaagtgtttcatttctactcggttttggaatcttttggatgccgtacatctttgcatggtttactttaagatctggttattctagtacagctcggtggataagctttatttggatgatatttgttttattgattgttatggcagattga

SEQ ID NO: 53371 - DNA, 492 bp, Acinetobacter baumannii
atgattggcacttggttagcctctattggaactttagcagctgtaattacttcactatatttagcccgtaagaatgaaaaagtaaatttgttagttacttccaacttaatttttttgtttagcgctaatcatggatataatgatgatgaccattatataaatattgagattacaaataatggaaatcgccccgtaactattcaaagtgtaagctggcgcatagataagaaaaaagcttttgtagttcctataaatcctaaccttattaacactcctcttcctaaaatgcttaattatggtgaagtagctagatgggcaattgaagtaaatgcggtcaaaaatatatgggcacctgatttaataaatcaaggtataaaaaggaaagctatcaataagtggaaaataattatagctcttaccactggcgaaaggattttagttaaacctaataaaagaattattgaactgatacagaattgtttacccaactaa

SEQ ID NO: 53372 - DNA, 273 bp, Acinetobacter baumannii
atgaatgtagaaaaacaaggcatgaaagaaagtgatgtttgtaatgctattggatggggattaattgttctaggtgttatatctggatttatatttatccttgtgtttggtcgagttgaagtgccgcgaacttattctggaactgagactgtatggtcaggcctcatggttattacgggtattggtatagtttttaatgggttcttggtgggctatctgtttcaaaaggttgctagtattcttagatatcatgagaataaagtaacatcttaa

SEQ ID NO: 53373 - DNA, 681 bp, Acinetobacter baumannii
atgaaaaagaatattagtttactaattttaagtattggcatagttggttgtgcttctccatcctacaattatcaagctgtccctaaaaatataagcaagcccccaattggttcagttaataaagcatttgtaggggatcaaatgcttgaacaaggtatagtggttgatcgtgaagttctaaacgtacctgaaaatattaaaattagctttgcctattcccttacttcaggcatttacttaaaaacgggccaaaatgaaaaagggcaatattttcagccattcaacactgtaagcggaggggggatggttcagaaaaaccctttagctgacccatttaaagtagttatgtttgataatgaaggtaagctttgtgtagtaacagtatttaatgcaaaaaactgtactgataaacatcaagctactatgaagactgtagcaattgcatcagataattccttccaacaaacattaatttatagtggaaaatttggaaataaaattaatgtaggctaccgtgaattttcaagtaatcaagcgcgtcctgcatttaataatgatgttgaatatgatttaagccaatctaagcaaataggatataaaggcgctttgttagaagtaattgatgctactaatcaagatatcacttacaaagttttgaagaactttaacaaggttgattga

SEQ ID NO: 53374 - DNA, 846 bp, Acinetobacter baumannii
atgtacgatgccgatgtatctgcctcccttattagtaaggtgacggatgctgtcattgaacaagtgacagaatggcaaaatagaacactcgatagtctttatcctgttgtctatttagattgcattgttgttaaggttcgtcagcattcaacagtaatcaataaatcagtttatttagcattaggcattaacctggatggccaaaaagaacttcttggcaggtggcttgctcaaacagaaggttccaaattctggctgtcaatcatgacagagcttaaaaatcgaggagtgcaagatattcttgtagcctgccttgcgaagcagcgcttctcaggactaagaggctttcctgatgcgatagcctctgtctaccctcatactgatatccagctgtgtatcgtacatgttgtacgcaatagcctgagatttgtgagctggaaggactacaaagctgtaacagcaggattgaaggcgatctatcaggcaagtacagaggaaaatgctttaaagtccctagatatcttgtgcgatcaatggaatcaccagtatccaaaaattggagaatcctggcgggcaaattgggaaaatatccgaacgatctttagctatcctgctgaaatacgtcatgcgatttatacaacaaatgcaattgaatcattgaatagcgtgatccgccattcaactaaaaagagaaagatcttctcttctgatgattcagtgaaaaaggtcatttatttagcaacttcaaatgctgctaaaaaatggaccatgccaattcaaaattggcgtttagcaatgaattggtttacgattcagttcgatgatcgattaaaagatcatttataa

SEQ ID NO: 53375 - DNA, 774 bp, Acinetobacter baumannii
atgaatttacagtatgagcgtattgaacagctttgccgtcagcttggtctacaaacagtggcatcacaatggtcacatcatgcacaacaaaccttagcaaaggatggcagttatgcagatttcgttgaagctatgctattacatgaatacacagccaagcagcaacgtagtcaacagattcttttacaactttcaggtcttactcaaatcaaaacgttggaggcttatgattttaattatgctttaggtgctccaaagtcgcagttgcttgaactatttaatttaagctttattccaagagctgaaaatgttgtatttattggtgcaagtggtgttgggaaaacacatctatcaatggctttaggctataaggcaattatgaataatattaagactaagtttattactgcagctgatttaatgttgcaacttagcctagcttatcaacaaggtaaattaaaaaactacatgcaacgtgttgtacttgctccaaagttattgattatcgatgaaataggatatttaccatttggtcgtgaagaagcaaatttattttttaatgttattgccaagcgctatgaaaaaggcagtacgattttgaccagtaatttaccatttagccagtggtctaaatcattcgcagatgatgttactttgacagcagcaatgttggatcgtttattacatcattgtcatgttgtacaaatatctggggaaagttatcgtctaaaagataaaaagagagtaggaattcaaccacaaattgagtcttaa

SEQ ID NO: 53376 - DNA, 1026 bp, Acinetobacter baumannii
atgttaactttggagcaagcagtgacaatccaaatacttcatcaacaaggtcaatctattaaggcaattagccgcgaactcggtatttctagaaatactgtgcgtaaatatttacgatctcaagtaacacctaaatatcaacgaacacaatctaaagtgagtattcttaagccttataaaccgtatttaatcaaacgtgtaaatgccgccgatccagaatggataccggctgcagtgttgtatcaagaaatcttgcaaaaaggctacacggggaaaattagaacactacaaaattatctcaatacattaaagccaactaaacaaccagagccgattaagcgatttgagactcaaccaggtcaacaaatgcaggttgatttcacaacaattcgacgtcatcacaccacattaaaagcatttgttgcaactttgggatactctagagcaacctttgttaagttttatgatcatgaacgttctgatgcatggattgatggcttagaaagtgcttttcagttctttggtggtgttcctaaagatgtattatttgataatgctaaggccattatcattgagcgtgatgcttatcaagatggtcaacatcgctggaatgctaaattacttgattgtgctaagaaatataacttccgaccacgtgtttgtaagccatatcgtgcgcaaacaaaaggtaaagtagaacgctttaatagttatttgaaatcaagttttatcgtgccattaaaagcaagtttaaaggtggttgaccttagcttagatgttgatatggcaaatgcctatattggtcgatggcttagtgaaacagcaaatcaacgcattcatgcaacaactaaagaaaaaccaagtactcgtttgcttgaagaacaacaatatttttcttcattacctttatttaatgatggttctaaaaaatctgtaattgatgatgttagcccatcatcactcatacctcatgagagtgttcaacaccccttatcaatctatgatgaattactggaggtttcttaa

SEQ ID NO: 53377 - DNA, 318 bp, Acinetobacter baumannii
atgacaaaattaaaatatacccctgaaatcagagaaagagcggttcaattattgattgaatctgaaaaagattatccatcgaattgggctgcgatcaccgctattgctcccaagataggttgtagtcctgaaacactacgtgtttggtatcaaaaatatttagataaacaaaatccagttaaagtacagcagctttcagaccgagaacgtatcaaacaactcgaacgcgaaaataaagaactgcaacgcgccaatgagattctacgtaaagcagccgcttttttcgcccacgcggagctcgaccgcccacacaaataa

SEQ ID NO: 53378 - DNA, 1158 bp, Acinetobacter baumannii
atgctgaattttaacttttataatccgacccgcattatttttggtggcgatacaatagctgaaatcaatgactatgtgcctacagaagcaaaagtgttaatgttatttggtggtgaaagtgcacgtaagaatggtactttagctgaagtgcgtgaagcattaggtgcaagagaaattcatgaatttggcggaattgagccgaatccgagttatgaaaccctcatgaaagctgtagagctgattcgagaacaaaagattgatttcttgatggctgtcggtggtggatcggtaattgatggtactaaatttattgcagcagcagtcaattatacaggggatacatgggagattttagaaacccatggtactaaaattactcaagctttgccttttgcgagtgtactcacccttccggcaactggttcagaaatgaatagcggtggtgtagtaaccagaaaatcgacccaagccaaattgtcatttagcagtccctatgtttttccgcaattttccgtactagatccgaataaaagctttagcttgccgacgcgccagttggctaatggcgtggtggatgcatttgttcatgtcattgaacagtacttaacttaccctgtgaatgcacaagtacaagatcgttttgccgaaggtctattgcaaactctgattgagattggaccgaaaatcttggaagattcagcagattatgacacgcgtgcgaatttgatgtggtctgctagcatggcactgaatgggctgattggagctggtgtaccacaagattggtcaacccatttgattggacatgagctcacggctttacatggtattgatcatgctcgtaccttggccattgtgttgccggccaatctacaagtgcgtcgtcaagagaagcgagaaaaattactacagtatgcagctcgtgtctggcagattgtcgaaggtgatgaagaacaacgtattgatacggctattgctcgtactcgagccttctttgagcaacttggattgccgactcgtcttagcgattatggactgggggagacagatattgagatcatcattacgcaacttaaatcacacaatctgacacggctaggcgaacacaaaaatgtttcattagagatcagtcgccaaattcttgcgacgagcatctaa

SEQ ID NO: 53379 - DNA, 2049 bp, Acinetobacter baumannii
atgaagacaagaatttatgaaattggagtgattgataaattaggtaataaacatccagttaaatttaaagaagggcttaatgtcataactggtaaatcttctactggaaaaagtgcattaattgagatttttgactattgttttggaagtagtgaaaatacaatccccaaaggagttatcactattagtgctgcaatatattatgttgcattggctgtgaatggccaagacatgataattgcaagagatcctaatttaaataaaaaggctttttttagaagagtagataaattcgactctaatgatattcaacctaattattttgaaagtaattattttaggaatttagacgagtttaaaaaacatcttacaagtttctttttagatatttatgacgtggatgtttcgttagaagcgagagcgaatcgacaatataatcgtaaggccgctacaccttctatccgtagttttacatctttcatgcttcaacatcagaatcttatagcaaataaacatgctctcttctatagatttgatcagaaggaaaaaagagatcaagttattgaccatactaagatttttttgggtttagttgatcaaaagtattttctactctcacaagagcgtgagcgtattataactgaacttaatcgtttaaaacgtttgaaagaatcaaataaaaaggcatcagaattacatacgcagagagttgaaccggttttaaggcaactatatgcgttaatggggtttaaggaagaaccactaagcctatcatcaattctttataatccacaaattgcgaaagattaccttgatcaaattattacacctgagaaaatagactatacttcgaattcaatagtgcaacattatgatttcttgaaaaaaaatcgtaatttaaaaatagcggaattaagaaaattacaacatgaggaaacagcattaattaaacatatcgcagaagaggtgcggttttctgaaaatgtatctaaattcagctctcctaaaaatgttcatatttctacaacagtatgcccattttgccatactcaaaaagaggaattgaaagagagtgctgagaaattgaaaaaagccattattaaagtatctgacaatctttctcaggctcgaccaatgaaagcaaaatttgagacttctctaattgaggtgaagcgtaaaattgaaatacatacgaaagatttaagtaatttaaatacacaaattaatgaggtagagaaagccgaagaaaaagtggcagaacaaaaaagtctttatgaaagtatattaatggagaaagctaaactttttatcttgttagatactttaaatcttgctgatgatattgaactcgataaagaaataaaaactttagataaacaattgtttaaaattaataatgatttaaaacaatataatatccaaaatggtttggagagagctgcttcaaaagttaataaatatatggcagaaattggtgagaaatttgaatttgaaggtagttatcgaccaattaatcttaaattttcttttgaaacttttgatttatatcatctagatggtaatgaaaaaatctaccttagatcaatgggtagtggagctaattggctttatagtcatgtaactctttttctagctttgcataaatattttactgaattaggagataaatgctcaataccatcaatactgtttttagatcagcctactcaagtgtacttccctaattttaaaagagatatttcggaaacattcagtgaacaaaaaaaaatggaagagcagcaacgtaaaaatcttgaaggagagagagttgttgatgaggatattaaagctgtagaaaatttatttagtcagctatctatttattgtgatgaaatagaaaaaaataatagcttttgtcctcagattattgtaacagatcatgctgacgatcttaagctagaagatggtttttcatttgaatctttagtgaacggcaatagatggaggaagcgaggatttattgaacctttgcctgataaagatttgataaaaatattggaagaaatttaa

SEQ ID NO: 53380 - DNA, 465 bp, Acinetobacter baumannii
atggaaggtggatccatgagtagtataattaatgctctttacgagttaaaatacaatccttttaaatatggagagtatatcgcttcattttattctactattcataatgtagataataatatattactagcgaatctagtcatcccactttgtagtcatcccatttttggacgtaaattaaaaaatgcaaatataaaaagctcgatttggacaatttttgatgatcctactaaactttatgatttgcaagagagaatttataaattccaaggtctaacagaacaatgtatccaatattgtttagttaatgattggatttatttagaaactgatagcttaaccatttcttttaataataaagcagaagaaactttgatgatacaaaagaatgctatgaatttagggcgcttacttagtggtcactcagtagttgaaatattctcaattttaggggttaagccttaa

SEQ ID NO: 53381 - DNA, 174 bp, Acinetobacter baumannii
atgacatttactttagaagagttagaagatatttggattacttattattctcatggtggggtaaataattcaaaagttttggctaaaattagagccgaatatactttttgccctctctgtgatcatctaattcctaactcagaatatcagcaacattttgatgatcatgattag

SEQ ID NO: 53382 - DNA, 1224 bp, Acinetobacter baumannii
atggctattaaattaattacagcgcagcctggttcttataagactgcaatgatgatggaacttgctaacaagatgtctagtgaaggacgtccaatctacttatgtaatgttcggggacttaaacctgaaataccttttccatatcaggttcttgaccactttaaggattgggtagatacaccagaaacatctgttatttttattgatgaggtacaggaatttactagagatgtaccgactaactgtaaaacagaagacttgccaacttggatgactttgttagaaaagcatcgtcatgagggtaaggatatttttattgttactcagcatccaatgtttatacatactcatgttagacgccttacgtctgagcatattcatcttgttcgaaatggtaatgttccttttgctgccaaacgttcttggggttttgttgaatccgatccagacgattttcagaaagctacatttaaaaatggttgtaccactacgatttatagacctaataaagaggtttttaactggtatgaatcgaccgtattagatacccataaatttaaggttccacctaagttaattaagggtgttgctatggttgcaggtatcatcggttttgctgtttggattggttatccggttgctactaaatatcttcatatgagtgataaggaagtaaccgccaaagcccatgatgaacctgtcttaccttcagatccttctaatatgactttagccgaaagggctaagtatgatgcagctatggctggtcttactccagaacaatatgctgatttgatacatcctgaaaaacgtaatgctgaactgcaggctaaaaatgacgtgagaatggagaccatagcaatcaaatacaatcctaatcgcccttatgaggttgatacttctcaaatccaatatgaagttactgctaagcctgttttttcaggttgtatgaagaaaaatggtaaatacgttgcttatactcagcagggcactattttgcatgatgtaagccaatcagattgtcgtaaattgatggaagatggtgatagaccatttaattattttcaggttcagaataacagacctgctcaggtaaataatgcattgcctcaagtgcagatgcagcctaattattcttcttatcaggctaataattatgtgcagcctaacctacagcgtagttctgtagacggtgcaaattctcaaagttctttttctttctga

SEQ ID NO: 53383 - DNA, 339 bp, Acinetobacter baumannii
atgccattgtttattggggctattgttgctgcattactgaaggttttatttagatatgcggtttttaaaatatttgcaaaattaattttggggactgccacggctggcgttatctacttgtttttatctagtacggttaaaccttttgtcgatgaaatgcagcaaaagattgttgagaaagccacagagctttcaacggttggcggtactgctgctgaagtaattcagtacttagatttcatccagtgcgtgaacattattctttctgcatcagctgcatgttttagcttaaaactaatgtctgtagctattcgtgcatttggtattaatacgggttga

SEQ ID NO: 53384 - DNA, 1677 bp, Acinetobacter baumannii
atgaagttttttaaatatttagtttttattttttctcttttattttcaattaattcatttgcttataatccacaattacaatatttatggaaatccagtgcttcaagtaaactttacgaagctatcgagccttcctgtgattatttaaaacaggttaataatggtgctggtattccgggctattcatattcccattatcaactcaatgcatctggaacacgtgctgattgttactacaatagctctaattggtcttattctttgcaagtacctaaccctgattatgatcctaagtctttacagtgtcctgatccgggttatccaatgtatgtttattttgatgcaggcggtaaaattccccaacaacgttgccaacctttaggcgataagttttgtgtctttaaagcaaaacctgattctattgttttgaatcatgctaacaatcgtcaaagtacagtgttatataacgtttctaaaacacctgtatcttcttgtactccacttgatgcaggccagtgcgataaaaatgatccttacggtgattgctatcaaccgcctaacgatggttgtactcgtctagctgacggctctattacttgtcctgatggtgcagctccaccaagtcctacgggtacttgtggtggtgctacttactgtaatagaccacctacaggttgtggcactggttacgtttctggctcattcaatggccaagcgttgtgtgttaaatcttctaatacgggtactggttcaggtactggtactggcactggtgatggtgggggttctggcactggtactggtgatggtggttcaggtacaggtgatggtgggggttctggttcaggtacaccaattgatactggtactggtagtactaatattaataactctggttctggttcaggttcttctacaggtggttctggtggtggaactacttcaacaagctttactattgatttatcacctgttgttagggctatttctgctttatccgataaattgacttgggttaagtctgaattggttaatgctgtttctcgtgttgaagataaacttacccagactaatagcaagttagatacaactaattctaaacttgattctgttaagtcttcagttgatcaaacaactgctgctgttaatgctaacgctactactgtaaaaacggctgtagaagcgaatacggctgctacaaacaatgttaaatcggctgtcgatgctaataccaactctacagctaataaacttaatgaagtggttaatgctatcaataataagcctattggcggtggtggtggcggaactaccgatgttaagcctgttgttgatgctattgagaaacagactactgattttaaagacatgatgaagactgatccatcagactttgatacctcacagtatgaaaagattggtgatgcttcggatgatccacgttctcttaatgctcaatcagatgccgcaggttctttgcaggctttatctaataaattgacgttttctaattctgcttgtgttcaggattttacagttacggttcctatttatgggtctatgacggttccgttatcccaatggtgtgacttgttagcactagtaaaaatacttcttcatctctgcactttaatggttgcttttaagatgcttgactcaactgtgagggctatctaa

SEQ ID NO: 53385 - DNA, 237 bp, Acinetobacter baumannii
atgcaaaatcaaaaacgtggtgttttaacacttactaatgttcaacgttttggggtcggtgctgctgtcggggctgcgcttattactaatgccaatgctgctgttgacgtggctggtccagttgcaaccttaacaactgacggtactgctgctattactgctgtcggggctgcattactcggtcttgcgggtgttgctgttgtattcaaatgggttaaagctgctttctttagctaa

SEQ ID NO: 53386 - DNA, 150 bp, Acinetobacter baumannii
atgttggcttgtttgatttatgggtcggaccagacgacatgtattgggtatttaaacatggatctggtgatcggtctttttgctgctttcgcagttttatacggtctcagctatgtttttaaaatcgttcttagactaatgggtttttaa

SEQ ID NO: 53387 - DNA, 273 bp, Acinetobacter baumannii
atgctcagtattacagctcaattattagatgttcaaactggtgacttttgtagtctagtttttaaaggaaccaaatgggattttggtttacaacaagaagttccagcttctgtacgtgttgcagtttccaaagatcatctttatttagttcctacttatcaggaagctaaagggaaaatggtttctgtagaagttaaagaaggtttaacaaagtcaaagcagatctggtttagaacaagtggaacaggtcaaatagttctacaggatgattaa

SEQ ID NO: 53388 - DNA, 1218 bp, Acinetobacter baumannii; identical to SEQ ID NO: 49679

SEQ ID NO: 53389 - DNA, 195 bp, Acinetobacter baumannii; identical to SEQ ID NO: 49678

SEQ ID NO: 53390 - DNA, 621 bp, Acinetobacter baumannii
atgaatgattcagttaagtggttagaaattctaaataaaattactggtattgctcaaacaggcttacattattcaaaagatgtttatgataaagaacgttatgagcaacttttagggcatattgaacatctattagaactaaaagaaattaatacagaaaattttattaataatgttcttcaagatgtgggttatgcgactcccaaactagatgttagagcagttgtgtttaaagaaaataaattgttattagcaaaagaaattggcgatggacgctggtctgttcccggtggttgggctgatgtaggctactcagcatcggaaaatgcagaaaaagaagttttagaagagacaggattgcgggttaaagccattaaattattagccttaactgatagaaccaagcaccctcatcctccaatgtttttacatgtgtataaggcatttttctggtgcgaaattattgatggcgagcttaccccaagtattgaaacaccagaagttggcttctttagtagagatgaattacccccgatttctaccgcacgtgtaactgaagaacagattcaacaattttttgattatttagagtcaatccctgaagcaacgaagtttgattaa

SEQ ID NO: 53391 - DNA, 252 bp, Acinetobacter baumannii
atgtcatacgccgacagaacaccgatggcaaaattctttgatgcgctggcttatgaaaagaatgaagtaaaagttacgcacacaaaggataaaaagggcgtccatgattcgattcatgtgaagttaagtagtggttttgcaaaatttgaaaagaacgagcaaaaatatgaatttgtctttaatcatcaaaaacaagtgattgatcatgattgctttgaagcctttgtagaaaatttcacaattaaatcataa

SEQ ID NO: 53392 - DNA, 171 bp, Acinetobacter baumannii
gtgcaacaaagcccatcgagtgctaaattgcttgcattacttgcaatggcatctgccaaacgccctcttcaatataattatactcccatattacaagctttatatctatctagttatctacatttctatattcctatattactacataacaatattgaaagttacttataa

SEQ ID NO: 53393 - DNA, 231 bp, Acinetobacter baumannii
atgatgcaacgtgttttaaaccgcaaatttgaaaaaacttttgcattagatttattacaaaaggatattggaattacactaaatctcgttactcaaaataatttaaaacttccagcttttagtctgattcagcaacagtttaatcaggtttccaaacccgatgcacaacaagttgatttttcagccatagttaaactattggaacaacaaaaccaattagaattaagttaa

SEQ ID NO: 53394 - DNA, 2412 bp, Acinetobacter baumannii
atgagtaccgaatatactgcaccttctgaaagggcgagatcaaaaaattatcgctttttcgtaatacttctacatgtgttaatcgcattattcttaattatccaaggtggaaaacttgttagcttaggtggctcaagttattaccttatcgctggtattgcctatctactgattgctattttatatacattcagaaaagtagccagcttatggttatccattttaactttcatcgcaacagttatatgggctatttccgaagtacaagtttttgacttctggcagtatattccccgtttagttgttccaacaattttatttgttttaagcttatgggcgagccgtagtttaataacgctttcatcagaaaaagttattgctgctaatcgcgctggtttagttggctttattgtttgtgttatagctttaattgcagcttttttcccacacggaaaaatcttaaatcaaatcaatattgctcaggatcataatttagttaaacccaatacagaaaatcctgataactgggaatattatggtcgtagtggcaagggtacacgttttgccccttataccgacattactcctgataacgttaaaaacttacaggttgcatggacttaccatactggccgaccaaaaaatattggagtcgatgaaaatactccaattcaaattggtagcacactgtactcatgtactccaactaatattattactgcgcttgatggtgatagcggtaaagcactttggaaatatgatccaaaagcaaaaacagctgaacacattacctgtcgtggtgttggttactatgatgcgactcaggataaaacgctttcaaaagcagatttacaaactcctagtattcaagcctgcccacaacgaattttaacatctactgttgacggtcgtttaattgcattgaatgcaaaaactggtgctttatgtcctcaatttggagtaaatggccaagttgacctgttaaatgacatgggtcctactgaaaaaagtaaacgttaccatccaacctctaccccattaatcgcagggcatgttgctatcttaggcggttgggttcgagacattactcatggtgaaccttctggcgtcgttcgtgcttatgatgtacgtactggtaaactagcttgggcttgggatgtaggtaatccagaattatctggacaacctaaaaacggttttactcttgaaaccccaaatatgtggactattccaacctacgacaaagatttaaatctagtatatctgcctactggaaatggtccacctgattactggggcggtgatcgtaatgcagcaaaagaaaaatttggctcagcagtagttgctgtagatgcaacgactggtaagactaaatggtcatatcaaattgttcatcacgacgtctgggactatgatttaccttctcaacctgttctttacaatgtcaccaatgataagggagaacaaattcctgcccttattcaaacaactaaaatgggacaaatttttgtattagatcgacgtacaggccaacctattactaaagttattgaaaagcctgtaccgactacaggtcatgcagaaggagaaaaattatccccaactcagccatattctgtgggtatgccacaaattggtaatgacactttacgtgaaaaagatatgtggggtatttcaacttttgatcaactcaattgccgtattcagtttaaagattcggcctatcaagggctatatacaccacctagtgagaaaccatatattgaatggccaagtttattaggcggaatgaattggggtggtatttcaattgatgaatcaacaggtttaatgttcgtcaatgatatgcgtatgcctttgcggatgtctttagttcgtaaagaagatatggggaaatacaaaatatctaccgatgaagttcctggatttatgggaacagtacgcccacaatttgcaggcccgtacgctggagtaaaaattgatattatgcaatcagcattaggggtaccttgtaatcgaccacctttcggtacgatgtctgcgattgatttaaaaaccaaaaagttggtatggcaagtaccaatgggaacagctgaacagcttggcccattaggtattaaatcacatctcccaatgccattaggaatgccaacactaggtggccctacttcaacagcttctggcttggtattctttgcaggtacgcaagattattatttacgtgctttagattccaaaactggtaaagaagtatggaaagctaaattacccgttgcagctgttgcggcacctctaatttacaaatcaccaaaaacaggtaagcaatatgtagtaatttctgcaggtggggcaagccactcaaaagatgtaggtgactatattattgcttttgctcttcctgatgagagttaa

SEQ ID NO: 53395 - DNA, 1233 bp, Acinetobacter baumannii
atggttgcgcctaagttaagatttacagggtttgatggggattggggagagaaaaaattctcagaacagttcaattttcataatacaaactcatattcgcgcgctttattagccgaacagggtgaaattatgaatattcactatggtgatattcacactaaattttctatgctttttgatgttaaagaagaagctgtaccatttttaagtagtgaaatagatacaaataaaattgctgaaaatcaatttttacaagtaggcgatttagtcattgccgatgcttctgaggattataaagatattggtaaggctattgaagttattaacttagataataagaaagttgttgcaggtttgcatacttatattgctcgccccgttgaaagatgtgcaattggttttaatggctacttaatgcaaacttttgaagtgcgagagcaaattaaaaaattagcaacaggtatatctgtattgggtatttctaagaccaatttagggaaagttgaactaaaaatcccttgcctagccgaacaaaccaaaatcgcttcttttctttccgcagtggatgaaaagattagccaactcacgcaaaaacatgcgcggctgagccaatataaacaaggcatgatgcaaaagttgtttagtcagcaaattcgttttaaagcggatgatggcagtgagtttggggagtgggaggaaaaaaaacttggggagattagtaaaactttttcaggtggtacacctcaaagctccaataagtccttttatgaagggacaataccgtttattaaatcaggtgaaatttctaaaaatacaactgaacagtgtattaatgatttagctttagaaaagtcttctgctaaattagtgaaaaagggcgatctattatatgccttatatggtgcaacaagtgggcaggttgcaatatctcaaattgatggtgctattaatcaagctgtcctatgtattcggagtgaattgaatacaaaatatttattaaatttcttgttattaaaaaaagaagaaatactcactacttacttgcaaggtgggcaaggaaatttatcggcttcaattttgaaagaaatttatattccaactccttgtctaaaagaacaaaccaaaatcgctaatttcctatctgcaattgaccaaaaaattgaagtcgttgcacagcaaattgaacaagcaaagcagtggaaaaaaggcttgttgcagcagatgtttgtgtag

SEQ ID NO: 53396 - DNA, 663 bp, Acinetobacter baumannii
atgaaaaaatctagagaacttatagctcagtattcttctgaacatcaatggttgcaagagctagaaaggcttttgacccacattgatcagcaatctgatcaatgtggtgacacattaattgagtgtagtaaatcttttatagaggctatagcaaaaaatgccattataaagttgaacccaaatgaaaaaataaaagatattaatgaggccaaattaggtgacctttttaaaaaaacaagaaaagcaatttgtgaacattctagtatagagaagcttatgccgataagtgaggttgaattatttttttccgcacttaatcagtggatgctttttataggaaagatcagaaatgatattggagaagtatcacatggaaaaattttacctaagtcgtattctattgatcttaatatggcgcagatattttctgaaataatagacagatttgcttatattattttgttaatgttgctagaaattgatctatcgtatttacaaaattatcgttatgagaatttccctgactttaatgagtatcttgatgatcagtatgaattacctaatggtttgagttatagcagagccttattcgaacaagattatgatgcttattcagaagagttagataattatcttgatgcgcaaggtatcgaagttgcttaa

SEQ ID NO: 53397 - DNA, 135 bp, Acinetobacter baumannii
atggctgacttattagctaaacgatttactcaaacgctggtgcgagatatggctaagcatttggctagtcaatcttttgatcaaaaaattgctgatttgcgcgctcaggagaaagctattacagcaacaatatag

SEQ ID NO: 53398 - DNA, 294 bp, Acinetobacter baumannii
atgaatggatttccgcaattaactgggattgtaggtaaacagtttgatgctgtttttgctagtgaggtgccaagaataaagaacgaacctgatattgaggtcgcgttctgtcggaagaatggcacggtcactattaaggaccgcaccaacaagaatgccgatgtcgtattgactggcgttcatgcaagtaactttcacgcttcttttgagcaaatgaaaaaggaatgtccaaaccttttcattacgaaagcgttggcaagtcttgcgtcaccttacattttaaattggctctaa

SEQ ID NO: 53399 - DNA, 168 bp, Acinetobacter baumannii
atggcttgtacaagattagtttgtgaggctttaccacaaaaatctgattttccagatgactcaccatatccactcatagatacagcaaaactaaaaaagttctttttactatattcatttaacaagccagagcgtacaaaggctttagcaccttgtttgtctttttga

SEQ ID NO: 53400 - DNA, 150 bp, Acinetobacter baumannii
atgtatattatggcaagtggtacccaacctaaaaacatccatgctgatttaagtgtctctttaccttctccatctattgagccatgggcagctaataattgtgcagaagttgacgtggtaaataaagcattaaaagatggctcaaattga

SEQ ID NO: 53401 - DNA, 216 bp, Acinetobacter baumannii
atgcaaaaatcaaattttgatttaaatgataatattgaaaaacatttaatcgagtatggttggtatgcagatcaaacttacaaagagcatggtaatgtctttacgacaactaaaatatcaataaaactgacagaatctaactttttatatcatataaaagcatttaccttaatcaggcttgagcacaaactcttaaagtgctcctttttagtttga

SEQ ID NO: 53402 - DNA, 1122 bp, Acinetobacter baumannii
atggctctaccgattattactgctgaccaaactttattggttcaagcaattattgtgtacctatacgctgatccgggtttaggtaaatcatcgatgggctttactgcggaaaaagcaatttcttttgactttgaccgtggtgctcaccgtactggtgaattacgtcgtggtgcggttgtacaggttcaacaatggagtgatgttgcaaaccttacgccgcaggacttagcaccatataaaaccgttgtcattgataccgtgggtgcaatgcttgaatgcattaaaacccacctgttacttacggcaaataaccgtcaaaaagatggttctttaaagttaaaggctcaaggtttagcgaaccaaacgttcaagcaatacatcaatactttgatcagtttaggtaaagacgttgttttcattgcacacgcatcagaagatcaaaacggtgatcaaattatttaccgcccagatctaggtggtaaaaaccgtaacgagctttaccgtatcgcagatgtcatgggttatctaacaactgttactactggtgaaggtaaaaatgcccgcgttattaatttcaaaccttcgcctacacatcatgcgaaaaactcaggtgctttaggcggtgaaaccggtgaagtatgggtacctgatcttaaagcacaccctactttcttggctgacctgattactcaagctaaagatcacattaacaccttaacgcctgcacaacttgcagcagctaaagcccaagaagagctagaaaactggaaacaaagctgtgaggaagcagagcatgcaggtgaccttaatcaattaactgagtcgcttgataaagaacacatgtattaccagaacatgcgccaagcaatgttaatgagagctaaagcattgaattgcacgtttgataagcaacgtggcacttggattagtccacctgaatttaacggtatctcagatcaacaaagagatgaacttcaaaactttattgctgaacgtggcctcgatgtgaaaacagtttgtgaacacttcggcatagatgcccttatccaaattgaagcagcaaaactaccagcagttaaacaagacattgaaacattagctaaaacggggatgacagcatga

SEQ ID NO: 53403 - DNA, 342 bp, Acinetobacter baumannii
atggtcaccagacatggcgctaaaaaattcatcatctctgtattacctgaaatagaaaaacggctagaagctggttatacaattaaggaaatccatgcagatttacctgagctagaaaacaatatttcttacagttcagttttacgaaatttgaataaaatgggaatgagtgaaaaaaaggtacatctacataaaatagaaaaattagagtcccaggatatggtccctacttctaatgaaaaaatgaaaatgacgaatgcagaaagaaatacagaaaaattgaagactaaaaaacctgctttttcttatgaccctcatacaaaaggtaaagattttatctaa

SEQ ID NO: 53404 - DNA, 369 bp, Acinetobacter baumannii
atgactgaacaaaaaaagccgaaacggatacgccaaaaagtaattcaagttgtggtaactgaagctgaaaaaaagcaaattgaagaaagtgcggcccagggaaatttgtcggcttctcagtatttgcgtgatttaggattgggttaccaacctaaaagtctgactgatataaaaacaatccaggaaattcgcagcctaaaatcagatatgaataaagtggggggactactgaaaaacttaatgaatggggagctgactgatccgaaagagatcagatctaaagtaaacgggctgctgctggatttttctaagaatcaaaattcgattgatctattcatttctaaagtcagatcagcgatcaagttttaa

SEQ ID NO: 53405 - DNA, 618 bp, Acinetobacter baumannii
atggctcagaacacagcaacatcttctacagatttactgattcgatttctgcatatcgtcattattttgagctttactggggcttatctcacgggggatgcagaagaatggcatcaagtgcatatggcgtttggctatacacttggtattagcctgatattaagaattttatggcagtttcttgcttctcgatttgctcatactcagccttcaggggcgagccgtcgatttaatgtgatcaagccatttgtgcagcgctattgggcgcaaccgcagcaatggctttccccagcatttttaaaagcagccagttccagcctgtttcagctgagcatactgggtgctttttgcctgatgcccttaactgtactggcaggctttttaacagactatacgcatagccacagtttaaaagaagtgcatgaactattcgcaaatctgtttttagctactgtattactacacttgacagcactgacactgaatagtgttctacttaaaaaatggctagcaaagcgtatgttttgggggacacaatcacattcatggttcaccctgtttgcttcagtcctttcactaggcgtgttggtcgctttctggttttggtattttagctaa

SEQ ID NO: 53406 - DNA, 702 bp, Acinetobacter baumannii
gtgcgccattcttatcatatcgaaaaacattatattgaacggtcagggtggctacgtgcggctgtactaggggctaatgatgggattatttctgtaacaagcctagtagtcggaatagcagccagtggtgcttcttctcaaacattattagtaacatgtgttgcgggattaatttctggggcggcttcaatggctgcaggtgaatatatttccgttaaatcacaacaagatattgaaaaaaatgatctgaaaatggaggcacgtgagttaaaactccatcctgaacatgaactgcaggaactaaaaaatatttatatacaacgtggtttagaaccaactttagctgaagatgtcgctaaacaactaactatgcataattctttagatgcacatgctcgtgatgaaattggcatttcagttcatacctctgccaagccatttctagcggcatcttcttcagccctcgcattttctgtaggttcattatttcctttaatttcaatgatgcttctgcctgaacaatatttagataaaggtgtcatgctgattggagttttaactctcggaattatgggagcattggcgagttatgctggcggtgtaagtatctggagaggttctgttcgggttatgatttggggaattgtcgcaatgttattcagtgcttggatcggatcactatttaatgttgctgtgacctaa

SEQ ID NO: 53407 - DNA, 144 bp, Acinetobacter baumannii
atgccgaaactgaaagacattgccctaggaattattgtggccccgctgctgatcccgatcatgctgattgcatcgtaccaggataaaaaggcgctcaaaaaagagctaaatgaacgccaaaaagaaaaagaccaggcatcctga

SEQ ID NO: 53408 - DNA, 579 bp, Acinetobacter baumannii
atgaacagagggattgtattgaacactacaaaatttagcgttatggacgcaagtaaagcctttaaaaaatcacgaacaacaatatatgaggctttaaaaaatggtgaattatcaagagataatgatggtctaatagacttatctgaacttatcagagtttatggcaacccagtcggtgttcagtccagtacacgtactgaacaagttcagaaggatgtacaggtacacgttcaatctgaagtcgaaaatctattaaaagatcagatttctttactaaaaaatcagttagatttagcaaatcaaagagaaaagtctttgatgcaacatattgaagatcttactcatagaattgagtttaaaggcaccttagaacagtcacaacaagaaaatattgataagctaaatgaatctacaaattcaaatatagcaacggatcctcggtcacagactgactctaactatgacgaattgactacttccgagagtaaacgggtccatcttcctgagcatgttgaaccagaacctaaaaaacgaggcttatttggccgtgtgctgaatgctgtctttgataatgactaa

SEQ ID NO: 53409 - DNA, 933 bp, Acinetobacter baumannii
atgcgagatctagttgtaaaagataatgctttaattaacgcaagctataacctagatctagttgaacagcgacttattcttttagctattgttgaagcaagagaaagtggtaaaggcattaatgcaaacaaccctttagaagtccatgcagagagctatatcaatcaattcaatgttgcaagacagactgcctatcaagcattaaaggatgcttcaaaagatttatttgctagacaatttagctatcaagaaataaataaacgaggaaatatcgaaaacgtactaagccgatgggttagtgagattcgttatattgacgctgaagcgactgttaagttaatttttgcacctgctattgttccattaattactaaactcgaagaacagttcactaagtatgaattacagcaagttagtaatctcagtagtgcttatgctgtacgtctatatgaattattgatcgcatggcgtagcactggccaaactcctgttatagagcttgaagagtttagaaaaaaaattggtgtgcttgatgatgagtacacaagaatggggaactttaaagacagagtcttacatctagctatagctcaagttaatgagtttacagatatcactgttaagtatgagcagcataaaaaaggacgtttaatttatggcttttcattctcattcaagcaaaagaaaaacgttaacaaaccaaatctagaagctagagatcaaaacaccttagatattttcaccaagttaacagatgctcagcgtcatttatttgctaacaaattgtcagaactgcctgaaatgagtaagtattctcaaggcaccgaaagctatccgcaatttgccgtacgaattgccgaaatgctattagatgctgaaaaatttaaagaactatatccatatctagtaaaggttggctttcaaacaaaataa

SEQ ID NO: 53410 - DNA, 750 bp, Acinetobacter baumannii
atgtctttacactctcgaattaggcaaaaacttgaagaaaaaaaattaagagccgctgatttagcaagagcaacaaaaaaatctcctgttgctgtaaagaaatggctagatggcactagcgtccctacagcggaaaacttgaaagtcattgcgaaatttttaggtgtgagtgacgattggttgctttatggtggaccgattgaacaagaatcgaacaatttacttcaattaaatgttctggatatcgaagcttttaagaaaaaatacaatattcccgatagcgaagatgctgttaaatttcttgaaacacctgttaaaccattccccacccaaaaaagatatgttcctgttaaggcttactccaagatgggcatggatggctatttcacagatatgggttatgaaggcaatgctggagatgggtatgttccaactcactcagcaggaccaagagcctatggcattaaaggcactggcgactcaatgtttccagcaattcgtaatggctggtatgttgtatgcgaccctgatgcagatcttgtgccgaatgagtttgttcaggtgtgcttgaaggatggaagatgcacaattaaagaatttgtcggcatcaatggtggggttttaagtttgctttctgtgaatggtggtgagcgatttttctttgaaatggacgaggttgaaagtattaccgctattacagatatcgtgccgccaagtcagcatagacaagaacatccttattcgcattaa

SEQ ID NO: 53411 - DNA, 519 bp, Acinetobacter baumannii
atgggttttaattttttagacttaaatgacaatgtacgaaatgcaatgcttgaagaggtgaatttagacatctccagcaacaccctgtattacagtaaaagatttaatcaacatgggattgatagttatccaaatattttaattgagagcattaaggggggtaatgaacaaactcttgctaatgcaattcgtaaagaccatatgtttaatgcctcttcagtagataaaaatggtagagcatctaaaacaccaagtaatgcacatgaaacacttgcagaaggtgaatttaatcgtttttatattcgtgcattagcacgtattgctattaacgaaaataaagaattagaagtatatcgcgcaaaagaagtgtctaatgcgcgaagtgaatcaatccaaaaaattggaattacagttaatccaaacgacctactagccgatctaagaaaaaacattggaattgatacttttctagggcttcctggcggggttaattcaggattaagtgttaaattagtttaa

SEQ ID NO: 53412 - DNA, 195 bp, Acinetobacter baumannii
atggataaaaatcaattgaaatttttagaagaactaaccgatttatcgcataaacatggaatttatttaactaatatcttagatgaagccagtaacacaaaagatgatatctatatggccgagatagaaggtcatatgaattcagctggctatgagctgcaagaaaatggatctttagtatttacttggtattaa

SEQ ID NO: 53413 - DNA, 1818 bp, Acinetobacter baumannii
atgtataacttaatttcatcaaatcaggaattatatagtctggaaaaacatttcgaaataatttgtaatcggcatccacatttaaaattactagaatcacaatggcgcttcgaccaagaacttattagcaaagctctgcaaaacgtaagctctatttttccacattatagtcgccatgatgtatctcattcacgacaaattattgtaaatattgagagactacttggtgataaaattaagttcttgagtgctactgatacatggctaattttagaagcagcatataatcatgatatcgggatggtcattactcaaaaacaaatcgaagatatgaatactcctgaatttgaagaatttgtatattctttaaaagctagtagtgacgataacttaaaaaaatttgctaaaaaatggattgaaaataaagcgttgttacctcaaaaagctgcagctcatgactttttccatcaatacattcagcttttagccgaatggtacagacaaaaacatcctacaaattccgcaaaaatagtaagaaatcccgttgaagaaattggcttaaattcatcaagaaatgagttattacccaaacgactattcgatgttcttgctgatatatgtaaagctcatggcgatagttttgaagagctaaaaaggtctttacctaaagcagaagctggaatggcttcagaggattgtcatcccctatatgttgcttgtttattaagaatgggggatttattagatatagatgacaatcgtttttgcccagtaatgatgtcaatgtgtggacataacttaccaaatttaagtaaggcgcactatgataagcatcattcaattaagcattttagacttgattcagaacgaatagaaataaaatgtttatgtcctacccctgaatcttatgaagctgcttatgattggtttaactggttacaacaagaatatcatcaacaaactcaacattgggatcagatagtaccgtcgaaagaattaggtcgtttaccaaccttaatgacacctgtagttgatatagatgagccatatttaatattaaatcaaggaagaaagccaagttttaaagttaatgaagaagctatattcaaattagttagaggaactgggttatattcttcaaaatttgattgtataagagaaattttacaaaatgcagtggattcaacattacatagaatatggattgaacataaagatgaggttaaaaatttaattccaactgatgctaaattgcaagagatttatgataattataaaatgactataacctttgaaccaaaagaagaaaattcaaatcgatggatattaaaagtaaaagaccaaggtataggtataagctcaaatgacctaaaatatatgttagaaataggtagctctttccaaaacaaagaaaagcaaaaaaggattaaagaaatgccaaaatggtttagaccttcaggagcatttggaattggacttcaaagtgcatatttactttcagataaatttacaatgattaccaaatcacttacagataatcaaaaactaaaaattacttttaacaataaaattaaaagcgtaattattgaaaaaataaataaaaatattaattatggcacagaatttacaatcgaaattgatattgaaaaactaccacgcaatatttcttattcctttgcacaacaatctttaatagatgaaagattaaaagaatttgactttacagagaaaaactcaaatctatctttcgtagaaacaattaaaataaatgacagcattaataattttttactaaacgcacggcagagtaaaacttga

SEQ ID NO: 53414 - DNA, 195 bp, Acinetobacter baumannii
atgaatggtttaattaggcaatatttacctaaagggattgatttaaatcaggcagatcagcattatttaaatcaagttgccatgtcactgaatactcgtcctagaaaggcgttagattggcttacaccattagagaaatttgctcagcttgttgattatcatatggcttttgaaactgtcgcacctcatgtttga

SEQ ID NO: 53415 - DNA, 141 bp, Acinetobacter baumannii
atgaaaaactttaaagaaatccgtcgtgactatttgattaaaaaagcaaacaaattgttagatcgcgcagatttgttggttgatcgtattattgcaaatgcgcacaccgctgaaaaagcaaaaacagaaaaagctgcataa

SEQ ID NO: 53416 - DNA, 327 bp, Acinetobacter baumannii
ttggacgaagccattaaagatatctatttgcgtgttttgaacatcgcaaataaatttttatctcaaagtaagattgtatcactcaatattgaatacttgagtaccattgaccctagtgcgcaggaagtcgcgagtattatgcaacaattagctaatattctcgaagatcttgagtgtgatgatcctaatattactttaaatgtacgccaatgcatttgggtgattgaagggatcgcaaatgccatagtggcaggtgagtctggcgaagagcttcaaaagctatacgctatgctcgaaaaacatgtaaatgtacctgtgccattatag

SEQ ID NO: 53417 - DNA, 240 bp, Acinetobacter baumannii
atggcagaaccagcagcatcaacaagcacagctactttaggtctagcaacaaacatagcaggggggggaatggttttagtaggtggactttcaactactgaatggatggctgtgttggggggcgtttgtgcagtagtcggactgattattcaggccattgctgcatatcgcaaagatcaacgagatgaagagctacacgataagctcatgaatgagagtgatcatgacaaacaagactaa

SEQ ID NO: 53418 - DNA, 225 bp, Acinetobacter baumannii
atggaagtcatcatgaagtatatgatgcacaatcctaaatatttaaaaattaacaatttacctgtaattacctatatttgtattaatagcggtatttttaacgttgcaaggcatcttattttacccaacccatttattagttttgatgaaatggtgcaggggctaacaactatgataatgagttatatcaataccgaaatggcacgctcagaagatcaatcataa

SEQ ID NO: 53419 - DNA, 1701 bp, Acinetobacter baumannii
atgatagatactaaacctcttatagcaattgatcttggaaccagtaactcactagttggtatttttgaaaatggtcagtccaaacttattaataatccttatggtatgaaaactacgccctcagctattgcattcgatgagcaagggcaaatcttaattggacaagctgcattagagttaagaagtcgtggtaaagaggtattaactagttttaagcggttaatgggtacctcaaaaagattaaaattaggccatcagagcttttcagcagttgaattgtcttcattgatattaaaatctcttaaacaggatgtggagcaggctttgcaatgtgaagtagaggaagccgtgattacggtgcctgcttactttaacgatatccaacgtcaagccactatatctgctgcagaacttgcgggtttaaaagttagtcgactcattaatgaacctactgcagctgctctagcatacggtttagggcaaacgcaggatagttgtttcctgatttttgatttaggagggggaacctttgatgtctcaattgttgagttgtttgatggcatcactgaggtgcgagctagtgcaggagataactatttaggtggagatgactttgttcagttgttaatgaaacaatactggaaacagcatgcaactatttttggctatactgaaaatactattccatttgatattgaaacagcattaagagctagagcacaacatagtcttcatgttttaagtaaagaagcgaaaacagatttaatatttaaatgggaagataaagaggccaccctagaaattactcaagaaaaattcgcagtatgggccgaaccattattgcttagattacgccgcccactagagcgtgccttgagagatgctagagtcctgcctcaacaggttgaccagattattatggtaggtggtgcgacacgtattccagttgttcgcaaattagtaacaaaattatttggtcgttttccatcgacaagtgtccaacctgatgaagcaattgtacgtggtgcgtgtgtacaagcaggtttaaaagcaaaagatgtatctttaaaagaaattgttttaacagatgtttgcccatttagtttagggattgcagtggaaaatgatgagcagttttcacctatcttagagcgcaatattgtaattcctgccagtaaggtaaatacgtatactgcgatgaataaagggcagagagaaattattgttaagatttatcagggcgaacatcgactgtgtaaagaaaacatttttttaggtgagctcaatgtgcctttacctccaaataatgactatttatctattgaggtgcgattctcttataatccaaatggtattttagaagttgatatagaagttccaagcacaggagaaaagctccaaaaagtgattgttaatcatcaaaatgtaatgagtacggaacaaatagagcaggcccgtcaacagttgcaggaattgaaaatacatcctcgtgatactttaatgaataagagcttattattacgagcagagcgtttatttagtgaatatacaggagatctacgtttacagattggagagcgaacacaacaatttaattatattctaaatctgcaagatccaagacaaatacgtgaggcacaacaacatttcgaagcttttcttaatgaaattgaagatttaagtttgtttgaagagtattaa

SEQ ID NO: 53420 - DNA, 342 bp, Acinetobacter baumannii
atgaaaaaacgaagaatacaaaataaaggagagtgggtttttccatctgtaaaatctgaatctggtcatattattaatatttcgaaatttagaaaaaaaattaatgaacaatgtaatctttcttttacttttcaagatctacgtagaacattttattttgtgttaaataatttaactaataaatcattagttagcaaaagaacagatcagtatgaagaaaagctggacgttaagaatattgctcatgctcaggatatgcgtaatagaatgaataaggttgagcaaattattcttggtccctatcgagatgaacttattaaatctatcaatattaacctataa

SEQ ID NO: 53421 - DNA, 174 bp, Acinetobacter baumannii
atgaacaagatgaccaaccaaaacgtaaaccctgcaattgttgaacttgtgcagatgggtaatagcttcggtggcacaaaaatcactggcaactcttctgaggaaacgagacgcaacttgcgcagagcctttgaagcggccaaggaacgcatgaaacgggatgccacaacctga

SEQ ID NO: 53422 - DNA, 249 bp, Acinetobacter baumannii
atggagattgatcaagatacgcctcgcatgacgccggaagaattaagacaggcgggtgaaatactctacggcacgcattggcaaagcgaattggctcgtgctatcggcgtggatccacgccgagttagacaatggataacgagagagcgaccaattcccgtgggcataagaaatgagattattttgcttcttaaagagaaaagtataaaatctgtggaatacgccgattacttggatcagcaattttag

SEQ ID NO: 53423 - DNA, 219 bp, Acinetobacter baumannii
atgttgatcttgattggtatggcacttgtagcgttatcggtctaccgtggtataagtttaggcagagatttagaaggctcgtcggtaacccaactatccaatagcatgtatattcaggaaatggtaatcacgcaaattaagcaggcttggtattgtattgtcggttttaccggagcaaccatgattgcaatgggggtatggcatacctggctatcttaa

SEQ ID NO: 53424 - DNA, 840 bp, Acinetobacter baumannii
atgaacaatgattttatagttaccgcgaaagacggttacccacttgcagcaattaaatacagtgcaaaaaaacccaaagcaaacatcattcttgcgggtgcaacaggggtaccacaagcgttttatcgacgtttctccgaatatgtagttacacagggttataacgtcataacttttgactatcgtggaattggtcgttctaaacctactgattttaagaattttgatagcaattttcttgagtgggcaacactagaccttgcagcagtggtcgatattgtggcagatgatttacctctttttatggtgggtcattcattcggtggacatgcctttggtttactaccgaatcatcataaggttaagtgtatttatatatttggtacaggtgcaggctggcatggttatatgccaaaaactgaagcagtgaaaataaaagtactgtgggagcttgttttacctacattggctcagtggaaaggctatattccaatgtcactaataggtatgggcgaagatttaccctatggagtgtaccaacaatggaaacgctggtgtaaatttccacattatttttttgatgatcctcaagtccctgaaatagcagaacagtttaccaaggtaaccacacctatcattgcagcgaacgcacttgatgatttatgggcaatgcctaaatcacgtaatgcatttatgcaggggtataaaaatgctgatgttcagttaattgatattcctttaaccaagtcgctaccaaaaattggtcatatgggctatttccgtagtgactcaaaagtgctctgggataatgtagtaactgcctttgaaagaatactttaa

SEQ ID NO: 53425 - DNA, 591 bp, Acinetobacter baumannii
atgagtttgcaagtaaataaaaaattagatccacgacaacggcttattttatccgcattggatttattaaggacacagggattagctgctacaagtgtgcgagaagttgcgaaacatgcacaagccccactgggctcgacctatcattatttccctgatggtaaatcgcaaatagttaaagaggctttaattttttctggaaatactgcattagaacaactagataaagtattaaatcagcatggagtacgtaaaggcatcactgtatttattacgtggtgggccgatatggtgcaagccgataattttgaggccggttgtcctttaatgtctgtattaatggaaacaggaagtgatcctgagaaattacaatatgttgaaatagttaaacaaatactagatgtatggaaactgcgattgatacaagcatttgaacaagaaagtatatgtttggaacaatccaatcaaatcagtatgagtattattgcatcattggagggagctattttgttatgtcgagcatgggggagtgtaactccattaaaggcaatagccgaacaattagatttaacgattaaaagcttagtttaa

SEQ ID NO: 53426 - DNA, 540 bp, Acinetobacter baumannii
atggaacataagtttgacctttctaatctactcaaagtctataaagctttgatttggattacactttatgctgctgctttacatttctttgataatgtatattttttctttcaatacccagaacctgcttggctcacacgggaaattgttgcattactttggataccgattgctttaatggctcatcgtgccgtagatttaatttatacaggtaaagtggagtacgctttcgcaataattcatagttttgtattagccaactggatttcattgggtcattatttatttgcttgcccacaagatgtattaccccgtattaatattgcaatttttattcaaaccagtattgctagtgtactatttgtcatgactttatggttgcaaatcactcgctatccgaaatcattgcgctatatcaaaccaacttggctgaaaaatattgccatgtactgcatattaattattattttagagtcaatttttccctctgattttcatgattggtggtatacgtggttcataccgtcagatatacattaa

SEQ ID NO: 53427 - DNA, 744 bp, Acinetobacter baumannii
gtgatagaaacagctcgtcaccaccgtgaatttattcaagatccgattttaaaacagcgtgttacatcgctgattggtcaagaagccatccattcaaaattgcataatgagttcaatgatgcaattaaagagctggaatatccggtcgatttttatcgtttcttgggtgagaacttctttaaatatgtgttcttaaaattcccgcaaccattaaagctttcactcatggcgggtattgaacattttacagcggtacttgccgaatacatgatgaagcatgaaaagaatttctactattcagatgatgccaaaagccgtgctttatggatgtggcatatgcttgaagaatccgagcataaagatattgcctatgatgtatatcaattactcaatggtagctacccactacgagcttctggcttcttcttagcattcttcactattttaggtctaatccctgcgactaccttgtttattccggttttaagaaaaccgcaggaaatgttgactagaaaattctggaaagacgcgcgccgtggtgtaggacttatttttggtccaaaagatggtgtattcggtagcaccattggccagattttcgattatttacgtcctgacttccatccaaatgaccatgacacgaccgaatatctggagtactacaaagacaaattactcaaagaaggcggcgcgattgcaccttactttgtgaaggaatttaccccacctgtacgcttgtcataa

SEQ ID NO: 53428 - DNA, 1278 bp, Acinetobacter baumannii
atgctaaaaattttattagttgaagatttagttcaaaaaaaagcacaaattgtagaattattgcaagaaaactttaaaggtaattctttcgatatagattatgctactgatgttgttacagcgaaacgttatttatcaaataatttttatgatttagtaattttagatttaaatcttccgagaagagaaatcgctaaagttgaaaataatgtaggtattgaaattatacagtttatagaaatgaatcctagagcaactgcgccaaaatttattgcttgtttgactgcctatacaatagatcctaattatataaaaagctatcctctttgccattttgtgcattattctcaatcagatacagaatggcagtatcatctaattaagatatgtagttatctgaaacgaactcacaatttaccattacgtaaagacaaagctacttttcattatgatgttttaattgttacagctataaaagaagaatacgatgcagttataactttcttaaatgttgagaaagattgggaagttgtaagaataaatggggatgctcaaaaatatgctataaatctaataaatactgattttggatttcttagcgttgctgtaacacaatctccgcaaatggggatggcagcagcggcagttgccgctacaaaagcaattgagttcttttgtccacaattagttttaatgtcaggaatttgcgcaggagtaaaaggaaaaactaattttggggatattatcatagctgatccatcttttgatagcggaagcgggaaatggaaagttgattctgaaggtaatttattatttcatccagcgcattatcatttaagaattgacgttgaaattaaaagaatttgtgaagaaatttcaacagataaaaaattattaactaaaatatttacagattttactttagaagtaactcgtcccaatagagcacctaatgttttaattgaagcaaatgctagtggagggtcagttttgcaatctactataaaaatggaagaaattgtagctactcataagaatctaattggtttagaaatggaagcatatgctgtatatttagctgctagtaatgcaagacaacctcaacccaagtttttatcggcaaaatcagtatgtgattttggtacagaagataaaggtgatgctattcaccagtatgcttcttatacaagtgtatctttcataaatgaatttttaaaaagagctgactttctatctgaaaatttagtgaataaaaattatgaagtggagtgtgaataa

SEQ ID NO: 53429 - DNA, 1209 bp, Acinetobacter baumannii; identical to SEQ ID NO: 45825

SEQ ID NO: 53430 - DNA, 1110 bp, Acinetobacter baumannii
gtgacagacgctgccggcaatacctcggaaacggctgtacaaaaagtggttgtggatactaccgcaccgcaagcaggtaaactcactttatctgatttgaatgatacaggtgtttcagcaacagatcagattacgcaagataatggttttactttaaagctagctcaaccgattgtgattggggaacaagccgctttactagaccactatgaagtttcaaaagatgaaggaaaaacttggcaagagacaacagctgatcaaaaagatttagctgatggtatttaccaatataaagctatagtgacagacctcgcaggcaatatctcagaatctgctatacaaaaagttattgtagataattccttaaatgttgaatcaaccacagtgattgtaaagccgattactgaagacaatacaataagtctagttgaaaaagatcaagttatttctataagacttgaaatagctaatttacccacagatttaaatagctcactgacatcagtaaatacgacattagacaatgttacttataattttcattttgatgaagtcacgcaagaatgggttactgaaattccagcagagtttctttggtcagtagagccgcaaaccaatatatcaattgagattagtcttactgatcaagctggcaatacagccattatcaaacatacccaaaattataatgtggatcatactccgaattcaccaaccctagattcactgactttcaacaatatagatggagctatcatttcaggtagtgcatataaaggaagtaaggtcgatatctacaataaaaatggtgattggcttgcaagtacaataactaatgaagaaggtaaatttactttacaagatctttcaattaactcaaatcaagaagtttacgcagtcgctacttataatggttatagtagtgaaaattcatcaattgggctagttactgaagttccagctattagtattacacgaattagtccagaaggcgtgattagtggttatgcgactgaaggtagtcattttattgtaaaagatcagaatggaaatattctacaagaatttaattctaatgtatttgatgagcctgtaaattattttgtgtaa

SEQ ID NO: 53431 - DNA, 705 bp, Acinetobacter baumannii
ttgtcacttggtacgtttgatttatttctaagtgctttagctttcaacaactgggcaacgaatagcttaaccattggtggtactgtacgtaagtcattaacgctggttaaagtttttgaagatattggacaggtgtttatctaccgtggtgtacaggtaaataccggtgaaatcactattcaaacaaccgggaaaatcactggtaactttggtcttgtaggtagctcatttactcgtcagcaaactaaccctgtagtgaatccggtggcagcttcagctcgtcctttggttagtatgccgaacgtggagaacttgcttattaatggtcaatcaattcaaggtaaggcttgtctacagtctttgactatttctatcaataacaaccttgaagcgatccgttgtattggttcaggtaaatacacacctgagttttacattgaaaagatgatggatattgaagcgaatgcttcattcatgttctcgtcaacttcagcagggtggatcgatgcaatcaaaacccgtgatgtatttacactgacctttgatattagagacagcaaaggcagtaaatactcgttcaatttccctcaattagaagtaatggaagccaatcacccggatggtggtggtgacgacatcattacagtagacatcaactttgcccaagttcgcacagcgccaacaattgtacgtgctcttgtgtaa

SEQ ID NO: 53432 - DNA, 399 bp, Acinetobacter baumannii
atgctcatcggtatcaatcacaatagcatcacccttacgctgagggatttcaactgccacgatttctttagaaaaaaagcctttggcttgcgcgcttgcggtgcgttgttggctcaccaaggcaaactggtcctgatctgcacgattgatgttgaactgttcagcgacgttttcggcagtctggggcatggtgtctacaccatacaattctttaagtttagggttaatgaaacgccagcccatggtggtgtcttcaatcttctggctacggccaaaggcactgtcagacttacccatcacataaggtgcacggctcatgctttctacaccacctgcaattaccaagttcgcttcgccggctttaatggcacgggcagcaatggcaatggcatcgagtga

SEQ ID NO: 53433 - DNA, 324 bp, Acinetobacter baumannii
atgagtaacttaaaacttaatagatctgtaactccaactttaacaggagttattatcgcgacagctttaggaagtttttccttgggtgatcatgcaaacaatcttttcaaacctagtgctaatgaaataattcaaaaaaaggagtatttagataatagttttattgctaaaacttttacttctgtagatgtaaaagattcaaatttaaatgagtctttagataatatgattgtcaatctttttgagaaaatttccgtaaatgctaaacccttagaagaagatcttgcaaaacttctttctgaaaaccttattgatttattttaa

SEQ ID NO: 53434 - DNA, 279 bp, Acinetobacter baumannii
gtgaatattagtcaaatttcaaaaaaatatggactatcattagatactttacgtttttatgaaaaatgtggagtattagttcccgaacgattaacaaatggctatagaagctatcaagaaatacatgaacagaaaattaaattaattatatgtttgaaaaatattggatttactctagaagagatcaaacaactcattgaacttggaacaaaacctccttctgaagagtgcaatattatctccaatcaattgattgataaaaaaaatagagttgattag

SEQ ID NO: 53435 - DNA, 318 bp, Acinetobacter baumannii
atgtatgcgtacttctttaaagtagtttatgcaaactctaaagtttcatttgaaaatttcctcaattacaatttcgaacaagattttgttaaaaatagatttaccaaacgattagctaagaaaaatagtttcaatcaacttcccgatgatgaatatattcttcgtcctttagttaataagttctttggtcaaccaaggttagattctgtagatgcttatgaagctttatatagaaatattaggaatgctaaccaaacaataagtctgcgtccttttcttgatatgatttgctttagcacgtttttgagtttcacgtag

SEQ ID NO: 53436 - DNA, 348 bp, Acinetobacter baumannii
gtggcttttagaattcgggaaaatagtaatatagattatgtgaaagaaccatataaaaattttactgcaaatgcatatttttataatttgataaataataaatttattgaagtaccagttttgaattcagatagtgaggataaaagtaagtcgaccgatatcttacaaggagatcagttaacatatgattcaaaaaaaggacaatatatttatctagcaaatataaaatcttataaaacaggaaaaactcaatctataaaaactatttttaatagtaatttaaagtgtatttcatctactttaggatgtgagacaataggggttcttcctgctacaaaagctaattag

SEQ ID NO: 53437 - DNA, 441 bp, Acinetobacter baumannii
atgtggaaaacggatttaaaggaagaagaaaataattactttttattaaatacagatgctcaatataagtctataaatttatatttaggcattccatattgtattcctactgatccacctcattgtggattttgtcttttcccaacacaagactataaaggtaagcgggaaatggacttttatctggattttttaagtagggaagcccacttatataaagaattttatcaaggagctaagcttgaaagtttgtatgtaggaggaggtacacctaatttacttcagcctaatgattatatgaaactgactaaggttgtatcttctctttttcccgatgctggtatatctagccctatagaaatgacattagaaggtatccctcaactttttaatgaagataaaataagagcaattaaagatgcagggcagagtaaaacttga

SEQ ID NO: 53438 - DNA, 471 bp, Acinetobacter baumannii
atgaacaggctgaaatactgcgtaacgcaaagtggttacacggcaaaggttggtgatggggttatttctcaaaagttagatggtggtgctagtcgctaccgtcgatctctaaagaacgtatctcatactgctaacgttcagtgggttgtgggcgaaggaggctatcagtatttgatggccttttatcgggtatggcgacgtacaccaagccagccattcatagctcgcctgatcattgatgatggtgtaccacaggactaccaatgttatttcgttgaaagtccgacattgtctgcaaaagaaggaaagatctttactgtaactgctcaatttgaagttaagccgcagccagaagatgaagctatggacgacttaattgttgagattggtaacgacggtatttgggactgggtaaatccacttgaagagctagtgaatgacgatctgccaagagccatggagggtatttag

SEQ ID NO: 53439 - DNA, 2601 bp, Acinetobacter baumannii
atggcaactaaactaggaacgttaactcttgatttacttgtcagacttggcaaattcaccgagccattaaagcaagcggaagggcaacttaagggtagcctaactaagatgaagggctttatcgcttcatatggtgcaattgctgctacagctgttgctggtgctacaactgccataattgcaatggctgacacaatggcaaagcataatgcggaattagagcgctttgcttatttgagccaaacgtcagttgccgagtttcagaaaatggctgtaggtgcccaaatgatgggtattgaggccgaaaagctcagtgacatcatgaaagactggaatgagcgttttggtgactttctaactgctggatctggtccattagttgatttcatggaacaagtggcagttaaaactgagaaaggcgcagatggcgctatgaagttggctaaagagctttctaaactttcaggccctgagtcaatgggcttgtttgttaagaaaatggaggaggctaacctttcacaagaccaaatgtcattcttaatggaaagtatggcatctgattctacattgctactaccattattaaaaaataatgcagaaggtatgcgcttgtggggtgaagcggctgaacgtgctggcattatcatggatgagaaaaccctaaaagcatctagggagttgcaagtccaaacaaaaatgttagatatgcaatatgaaggattaaagaaacgagtactaagccaagttattcctgctctagttgatatttcagaagcaatgttagatggcgatgaaaaagcacggggaatggctgatgcaggtaaagtactagcagattcattacgtggtgtagctgcaattgcacttggtgtatgggcggcacttaacatggttgctaatggaattgcaggtgtcaccaatcaagctttggattcatataatttaactaataaggctgcggaagaaagcggctggttaggcaagttgccagggattaagttcgccaaaacactgataactgctggagcaacttcaggcgcagagaatagttatatcaagatggcttatcgcgacaacgaagctgtaatggaagagttttcaacgaaagtgggtaagctttttgatgatacggtatcacagtcaactgcgaaattagctgagcttcaaaatcaagccaacacgacaaatactgttgccacaaagggtgcacaagattggctagataagcaaaacaaggttgctgaagcagctaaggctgcagcgaaagcacaagaagagttaaatcgtaaaattgcagaacaggcaaaattagctaaagaagttctatatgactatggaactgaatttacaagaattgaagctgatctaactaaagagttagcacgatttaacgaagcatcactaccatcagctgatagatcacgcttaattgaagaagctaagcaaattagtgctgcacgcaaacaagtatatttgcttgaatatcaacaagacttagatgcttggaattggtcagaagagcaaaagttagcaaagacttttgaaattgaaaaagcccgtgtcgatgcgaaagttgggatgtctaaggaggagcgagctttacgcaaaaagtccttagatgagcagcgtgatgatgagcttaaatctttgaggcttagtcaggaacaacaattgttccagattgaagaaagctatatggatgaagcaaaagcactcacacgacggtatgaacttgaacggcaagagattgaaaaagttcgtgatgcaaaaatacgcgctggcctacttaatgcatcagcaagagcggaagataatgagtatgaagaccgtagaagaaatgcatatgtgaatttccaatctatgtcatcttcacttaatggttctgaggagtacttcaatctagataaagagttagaggatagaaggaaagtaattgcggatgcattgaagtggaacaacattacagaagatgaggctagagcagctaacttagctgctgaaaaaaaaaatcttcaagatagattaagtctacattttatgtatggtgaatcaatagcagaatcaaccgcagatacgatgaaaactgtatttggggagcagtcagctgcatataaagcaatgtttgctatccaaaagggttttgctatcgctcagtcaatgatcgcaatccagcagggcattgcaaatgcaatgagcttaccttttcctgcaaacttggctgctgctgcaactgttgccgcagaaacggcaagcattattggcaatattaaagcaattggtttaaccggcatggcgcatgatggtattgcgagtgttccagaggaaggcacatggcttctaaataaaggagaacgtgtacttaaccctcaagataaccaagctttcactaatttcattaatgagggcggttcaagaaacccaactgtcaacgtctacacattgccggggcagacagcaacagcaacgcaaaatgatgatggttcattggatattcgtattcagcaggtcgctgagcaaactgtggctactcaattggctaatcctaatagtcgcatctctaaaactatgcagcaaaactacaatgcgcaacggagaagatga

SEQ ID NO: 53440 - DNA, 672 bp, Acinetobacter baumannii
atggctataaaaccatgtaaagaatgtggggcgcctgtaagtgacaaggctacagcttgtccaatgtgtggtgcaaaagtaaagaaaatgggtctttttctaaagataatcctttggttttttgtgcttatgattttctttgctgtaattgggaaaattgcggaacccaataaaacagttaagcaagataatacacaagatagtgctcaagcatcaaatgacacttcagaacctgtaaaacctgaaaattggtttaataacgtctctaaagatgagatgcgaggaactgaaacaagatcaacacgcacgataagtactaaccaagctgaatttgagtttccttacaatgggggatcaaacctagtcttgacagttcgaaagggtaaaagtgggactgatttaattattaatatcacaaaaggacaattcatttgttcaagcttcgatggttgcaaggttaatttcaaattcgataatggcaatatacagtcagtgaccatggtgggtactgatactcatgatacagatgttttatttgtacaaagtgaagcaactactaaaaagctcatagaaaaattgaaagtttcaaaaaagcttatagttgagtctagtttctttcaagaaggaacaaagcaatttacctttaatgttgagggattcaaagaaccctaa

SEQ ID NO: 53441 - DNA, 468 bp, Acinetobacter baumannii
atgctaggagcttatttcgggtatgaagtctgcgatgatattgttcaaacagttagagcaaaccacacaaatgcaggatcttatgagcgtattgtaaggcagcctcgatttgatggtgctgttattgaagggcggaactacgtaattctagatgatacagttgcaatgggtgggacgcttgctgcacttaaaggatttattgaatcccgtggcggcaaagttgttatggcaattgcaataacagggtttcaagttccatcaattgacttagtaccaaaagcaagtatgattaatactgtaaagacaaaacatccaacattagctgagtggtggcaatatgagttcggattcccgcttgaatacctcacccaaggggaattgggtcactttaaaaagccagaatcaattgacgtcatccgaagtcgtctctttgaggcaggatttcaaagcagccatgaaggaagctag

SEQ ID NO: 53442 - DNA, 471 bp, Acinetobacter baumannii
atgaaaaagttatcagtagctaatctgaaaaaagttagtctttctcaaggtgcaccagtcgaaaagacggtgcatttttctttaaatggggaagactacgaagctcaagttttcgttcgtaaactttcttttaaagaccaagagcagatcttgaaagcttataaatggaagtttgatcctaaagacttggaaaattctaagcttgaaagtattgatggtatccgattacaagctgcgcgcattcttggttcaatttgcgaagatgcgaaagggtctccattcttcaaatctattgatgaagtgctagattgtgatgtttctgtttgcaatgctttttattctgtctcagatgaagtgaataacttcatgggaaagttgatgaagaagagctcaagcggaatgaattctggtgcgaactcgtcagttgcggaatcggtggaagcaccatcgcagaagcgaagcaaaaaataa

SEQ ID NO: 53443 - DNA, 462 bp, Acinetobacter baumannii
atggcagttatgcgcgtacaaggcacaaacgtatttatttttgatggcgcagctatcactaaagccgtttgtattaatggtattgatcttggaagtgatagcactagtaagatcgaaaatacatgtttagaagaaacagattctaaaggttatttaacaggtttgaatgatccgggtgacggctcaatcacttttaaccttgatccagaaaatgcaacccatttaaaaattattgaacttgcagaagaccgcacaccaattacagtttatttgggtggtagtgatggcacaggtgagccaactgtagcaacgggcacggttacacttccgaccacacgtactttctggactttccaagccactcttgctccatctactcctacatttgaagctgatgcattagttagctatcaaatcacaatgcagcgcagtacaggcgttaaattaattcctaaagcttaa

SEQ ID NO: 53444 - DNA, 216 bp, Acinetobacter baumannii
atgaataaaaacaatcatcacacatcaatttatgaacgatatccatcctatgaatgggatgaagaagatgaaaaatgtcttcattactcaatcgattactcctttttagacagtttagacgaccaactagtctggaagtgttgtaagtgtggctgcaaattcaacgctcaagaatttgaagcaattaaagaagagcacatgcgaaatctttgttag

SEQ ID NO: 53445 - DNA, 564 bp, Acinetobacter baumannii
atgaatgcgaaatttaatcccgtaactaaattagttgaggttcaaaaaggcgagccaacaactaccactctacaaatcgcactaggactaggattaacacataagtctgttatccaactggttcgaacttatctacctgatattcaggagtttggaagagtcagatttgaatcctctaattccgcatttgaaatggcgaattcaggatttgatgtccgaaattcaaatcaaggtcgtcatacgcgttatgcagttctaaatgaacagcaagcatatttcttaatgacattgatgcgtaacagcccacgcgtaattgatttcaaaaaggcgttagtaaaatcattctttgaagcaagaacactattacaaacagactactttgcgttgattcaacagcgtgaagcattaaatgcaaaacttgattgtgagaaagaaatagctagttcgtgtggtaaaggtctagctgcttggaaaaagcaacgtgattgcttaactactgctatagccaatgtcgatcgacaaatacaaccttgcctcccaatatttgatgaggtgatagaatga

SEQ ID NO: 53446 - DNA, 363 bp, Acinetobacter baumannii
atgagctttcttccaatttatcgaactctcaatgcagatgctgcggttaaggctattctgggcactgatttacgagtttatgaggatttagcgcctttagacacgcctacaccttatgcagtgtggcaaacagtaggtggcaatgctgaaaataaccttgattgtcctgcacatgttgatcatgtcatgtaccaaattattgtctacgacacacagcaaaagcgagcttatgaagctagagaggcgatccgcaaagccttagagccgcaaagttatgtcttaaacccaagcattaataactatgagaaagatacaaagctctattcacgtggctttgatgcaaattggtttttagatcgctaa

SEQ ID NO: 53447 - DNA, 462 bp, Acinetobacter baumannii
atggccgacgtagacgtaaaaatcgaagggctagatgaagtcttgcgtaagatgggtgtcttaaaagataaacggaaaattcgcaatgcagctatgagagcagcccgcaaaggcatgaacgttgtccgtgatgcagcaagacaaaatgcaaaggccatagatgaccctgaaacgtctgaaaagatctggcgcaacatttcggtatcagcaggtaaaactaaatcacttgatttagtgcaaatgcgggtaggtgttcgtggtggggcatcttactcaaatccaacaccaccaaatacaagcggtggcgacaccagatactggcgctttcttgaatacggaacatcagaaatgcctgcaactccattcatgcgccctgcattggcaaacaatgttcaaaaggtcactgatactttcagtcagtcttttagtgctgaactagacaaggaaatagcaaaactatga

SEQ ID NO: 53448 - DNA, 234 bp, Acinetobacter baumannii
atggggtggttaaaaaatctttttaaaagtgaacctgtttgtgactgcaaaaattgttcttatacccgtagaaacggaggatatgctccatgtattaagaatatagatcacaccaaaccaattattccgcctccacctcgcccaacgggaagttataacgctccacctaaatttctaggtttagtagtaatgactcctgaggagtgggagaagttaaataaaggatgtaagtga

SEQ ID NO: 53449 - DNA, 294 bp, Acinetobacter baumannii
atgagcatagttactcttgaagaagtcaaagaacaccttcgttatgacgatgattcaaatgacacgaacttggaaatctatagaaaagcggctgaatcagccgttttacgctatacggatgtgattcaccatgttgaaccttatcccgaagaatttcggttagctgtgcttgtgtttgttggatattacgacaaacaccgcaacgctgaatcagatgcacctgtgaatggcaatttcatgcctcaacctgtgcaatctcttctatttacttatcgaacgcctacggcagtgtga

SEQ ID NO: 53450 - DNA, 1461 bp, Acinetobacter baumannii
atgggcatttttgactggttaagaggtaaaaagagctttcaaagtgtccatagtgctgggcagacttggaatagcctatttgtgcaagagccatactcaggtgcttggcagaaaaacgacgaattaacacgtgatgaccttgtcgcgtcttatgcagttttcgcttgtgtaagccttatctctaaagatattggaaagttgccaattctcttgaagcgtaagaaagaaggggtgttggttaatgttgatatccctgaaaagctgcgcgttttaaagaaaccaaacaattatcagacttggcagcagttccaagaacaatggacttctagtttattgctacgtggcaatacttacgtttggaaacttcgcgatgtctttggtgaagtctaccgaatggttgtactaaaccctgatctagtttgtcctttagttgatgactacggcaatgtgttttatcagttcaatacagatcgtttaacacaaacagaatcagtgattgtacctgcctctgaaatcatccatgaccgcattaatgctttttatcatccacttgttggtttatcaccaattatggcttgtggtgtagctgcgggaatgggtgtaaagattatcaagaacgccgcaaacttcttcggaaatggtagcagaccgggtggaatcttagttgctcccggacctatcacgaaagaaaaggccgaagaaatccaagcacgttggaacacgaattattcaggcgctaactttggtaaaactgcggtcattggggatggcatgacgtatatcgctttaggtatgagcgctgctgactcccaaatgattgagttattggaaatgtcaggccgtgtggtttgtagtgtatttaatgtgccacctttcaaaatcggtattggcactgttccagacgattcagagaaggcaaacggcatttactattctgactgcttacaagcactaattgaagcacgtgaaaacttgttagatgaaggtttagacctgccatcatttaaagttgagtctttccttgatatcgacatgcttattcgcatggattctgaacgctaccataatatggtgcgtgaagatgtcaaaggctcattgttaacaccaaatgaaggccgtgcacgaatcggtagattacctttagagggtggcgatacagtttacatgcaacagcaaaacttctcgcttgaagcacttgctaagcgtgatgccaaggatgacccatttaatacttcatctagtgcttcacagccttcggaaacaccgcaaaccaatgtagaacagccagaaggtgaaaacgcgcttaaatcgctttatacgggcgtttttaaagatgatgtggcttataaaaaagggcagtttgtcactaaaaatggctcgttatggcatgttgagaatgaccatttaggcgaatttgatcataaaaactttaagttgtgcgcgaaggagtggacagaatga

SEQ ID NO: 53451 - DNA, 168 bp, Acinetobacter baumannii
atgaaaattgaatatttacaggttatgcacaatgccaatatgggtgatgtgcttgaagtgaccgattttgaagcaaatatcttgattaaaacaggtgttgctaagccttatgaagaacctaaaaaggcaccaagcaaacctaaaaaagaagtaaaaactagcgaataa

SEQ ID NO: 53452 - DNA, 1356 bp, Acinetobacter baumannii
atgaatgaatatttaaaaaaattgctcaaagcattagctgaaaagaaccaagctatgcaaacggcattatctaaatcggcagcagcagggactacaccagatgaagaaactgagcaagagattcaagctcttgaaaaagacattgcagcaattgaaatcaacatcgagcgcactaaaaagcaaatcgctgctactgaagctgccgctaaaaatgcgactcctgttgctggtgataatcctgaagaggcagctaattctgctaaaggtgtgcatcagcctaaaacacctaaagttgaggtcaagccaaatttagaaaaaggtattggtttggcaatgcttgtacgcgcgaaattggtatcgacaaatcttgctaagactcaaggtgagtatgtaagtgcaagtgatatcctgaaatcatgggatgcgccagaacatgtgcagagagttgctaaagcagtagttgggacaactacaagcccagaatattctgctttagttgatactcagaatcttgttggcgagttcatcgacttgttgcgtcctcgtacaatcattgatcagttacaaggtttccgtcgtgttccatttaacgtaactatcccaaccaaaacaagcggcagtattgttaactgggtaggtgaggcaaaacgcaaaccagtcacaaacttggcatttggcaaaacaaatcttggatttgcgaaaattgcaggtattgtgcctttctccgatgaattgagccgcttctctaaccctaacgttgatcgtatggttcgtgatgacttaagcgacactattgttgagtttatgaatgatcaattcattgatccagcaaaaggtgaaacagtggattcacctgcatcaattcttaatggtgtaacaccaattgttgcgtcaggtattactgcagaacaaattaagtctgacttacgtaaacttcgcactcaatttattaccgcgaacctctcattgtcaggtgcctactatgtgatgagtgagacgatggcaagtttcatttctgatcttacagacgctctaggaaatccagtgtttaagggaatggatgcacctgtgggaagtaaaacaattaaaggtttgccagttgttgagtctgaaatggcaggtaagcttattgcactaattaagccatcagagattttactcgctgatgatggtggtattgacctttcagtttcgaacgaagctacccttgtttataacaatggtactgccgatgtcactgtgaacttatggcaggaaaacttaattgctatccgtgcagagcgttacgtgcgttggaaaccacgtcgtgcgcaagcagcaggctacatcgattattcagcacaaacaattgagtaa

SEQ ID NO: 53453 - DNA, 243 bp, Acinetobacter baumannii
atggtgcaaagcttcttatccctaatgaacttatgtggtgctatcaaaatggcctgtaaaggatgtgaggaacgtcgtgactggatcaaacaacaataccaactgttcaaagaaagattgcagttgcggaaacaaagaaatacttcaactgttgtcacagatagtggagcagaacacaacactgattcagcaagtagcaaacaaggatcaggtaatactagtagcactggaacagaacaatga

SEQ ID NO: 53454 - DNA, 243 bp, Acinetobacter baumannii
atggcttggctatcaaaccgacatgcaccaactaaaccaaatcagttatgtgtattggcaattaaagttgacagtgagtctattgattacctgccagcagtatgggacatgtgtgatagtgaagataagcatttcactcttacagtagatcgtcctgatcttggcgatattgtcaaattagaacaagttgaagcttatatgatttttcatcctctaactgttgaagataaaaagcatttctaa

SEQ ID NO: 53455 - DNA, 183 bp, Acinetobacter baumannii
gtgaatttagtaaaaacgtttaatgcatatagcatgcatacaattgaagaaaaaattaacaatttccttgaagcttatgatggtgagcttttacaagtacaggttataagaattagtgaagaaggcaacacagaatatgaggccattatttcttacaaacaatctgatccaacaaagcaataa

SEQ ID NO: 53456 - DNA, 441 bp, Acinetobacter baumannii
atgaatgcggcagtagtaacaccagtaatggattggaacaaatacacaattgatggatggctagagcagttcggcgcttggtgtgaaactgtgcgcatgaaaggaggtgacttaccagatggattgcatatcaatcagatctattggttgatgcgtgaggcaggaaaagaagtgccaagaggtaagtcttacatccgttgtgagataaatgattttgaagcggatcacatacagtcattgcttagaggtgtgttcaagtcagataaagtggattacacgaccaagtttgcagtgatgtgcctagtaaaacataaggtagagaaccggtctttaagtgcagttgcagccatcacaaatcagtctaaaggccaagtgaatatcatggttagttgtgctagattctaccttcttggtaaatataactttctaaaaatggagtag

SEQ ID NO: 53457 - DNA, 162 bp, Acinetobacter baumannii
atgagaagaagaattgattatggattgctatgggttttgtttggggtccttatgattgtagttggaatcggtggcaccttaattaacgcaaaaatggtgtgtgaaaaacaagaagtgttctggatcaaaggcactcaatacagttgttcaatatttaaatag

SEQ ID NO: 53458 - DNA, 405 bp, Acinetobacter baumannii
atgactacaagctttaaagaggctcaaaggaaaagttctaaaccagtggcgcgttcaagcgtgccattgaagcatagacaaggtgttagcaaaggtgaagcaatgctttgccgtcagctagatgtgatgaatatcgcttatgaacaggagtttagattccatcctgaacgtcgttggaaggctgactttcgaattgaaggttatccgattctagtcgaagtggaaggtggcgcattcagcaatggacgtcacaccagaggcgaaggctacacagcagactgtgagaaatactcagtagcagctattcacggatggactgtaattcgcggcactacaaagcaagttcaaagcggcttagtgctcaattggattgaagaggcaatgaaacggttgaaggtggcgtga

SEQ ID NO: 53459 - DNA, 231 bp, Acinetobacter baumannii
atgaccacattcaaagaggctcaaaacgaagtcgttcatgttcaagttgaatcagtcgaaggtgagtatgtttctccccttgattacagaatcattcaaatagaacagatgaaggcagctattgaagatcaaagattacatgctgaggaaatcaaagcacgaatgcgagcaaatgaattccgtatgcaacaagaagcattatttgctgccctaagcattctcagaaggtga

SEQ ID NO: 53460 - DNA, 282 bp, Acinetobacter baumannii
atgaacaatgaagaattagccaaaatcggaatgatgtttattcattggattcaagttcatagagaatctatcaatcgctttgaagactttcgagattgttttgtacaggaccctgatgaaccagtgcacactaaaaaggactacgacaaagcatgggaaattcaaaaggaagcttctgtattgggtagtgaagcgaaaagacgctatgaaaccttgcttgaagaagttgacctatatctagcacgtgaaagaactgatgttcttgaggcaggtgaagaatga

SEQ ID NO: 53461 - DNA, 465 bp, Acinetobacter baumannii
atggataagtgtagagaagagtttgaaaagtggtttgaagagacgcacgatgtgatcatcacaactcagtttaaaaaagagggtgaaaggtatcttgatagaaacgtgcgcagatcatttgaaacatggcagcaccagcaagcgaaagtgggggagctgcaaaaacaattaaatgaatacatatttgtagcggaaacgcttgatgaaatgtatgtgaaagaggttaagagcagtgatgagctgcaaaagcgggtggatgcagcactaaaactaatgcaaaagcctgtaattgtgggtgagcctgcaaagtatgtttgtgcaaggtttaaagagatagagcaagcgctcaagggggaatgtagacatgaatcagatggcactaatcgtttaagtctcccgcctaaaactaaatgcaagaagtgtgggaaattctatagcgccaatgtgctcaagggggaaggatga

SEQ ID NO: 53462 - DNA, 231 bp, Acinetobacter baumannii; identical to SEQ ID NO: 47263

SEQ ID NO: 53463 - DNA, 759 bp, Acinetobacter baumannii
atgaacagtatggtttctaacaatcaaaatgcagtagcacatatcaattcagcaaaagttgttggaatcttcaaagcgattgcacctcgctcatttgagaaaacttttgaaggaattgcaacagagcaaatcaatcatgcaatgaagatctgtcttgatggccttactcatgagcaagtgaacaaaggcttatcaatggtccgtgataacggctactgtccagatcctgcaatgtttcgcaaatggtgcttagggattgaaggctttggatctgagcagcagcgtgcagttgattcattcaaaaagaagaatgcagctttagctaacataatcaaatggctttctgaccgtgatgttgaaattacaaatgcagaaaaagaagcttacaaccgttgttatgagatgttttcaaatctcaactactcgaataactatgagcgttcttcgtattacgcatatgaagcattcaaagataactatgttgatgtggtgaatgagtttgtagaaaaagggattacgcagacgaaatggtctaagccacctcaaatagatctcagtgttctgtatgccaaaactggcagcgaggaaaaagcagaagcaactccaatgacaaaagaggattttgaaaagcgtacagcatatgttgaatcacgtattccacaaatcatgtctgatcggaactgtgacaaatcaatggcaaagctttatgccatggctgagtaccacagttcaagagtggaagagggaggtgcagcgtga

SEQ ID NO: 53464 - DNA, 756 bp, Acinetobacter baumannii
atgagcttagatgcaactcgctgggcgtggactgcacctgtagaaagctgccctcagcgcaccatcttactttcgctggctgaccgcgcaggagaggatcataaggcatggccaagcatcaaacgccttgaggttgataccaaatgcgaccgcaaaaccattatgaaagttttggagcgtctgcaagagataaaccttattcgctttactgaagaaacgcgtggcaatggggtgaaagtttatcaattggttggtgtacgtggccgcgaagatgacttaaccagtaccaaaaaaggaaccagtaccaaaattggtactagtaccaaaaacggtacttcaaccagtaccaaaattggtactgcgaccagtaccaaaaacggtacacagaatctatcaatagaatctaccaatgaatctaccaatatatataaagggaaattcaactttgcaaacgctctagtttctcaaggggcagatcaaaaacttatctctgaatacatggaagttcgtaaagcaaagaaagccgttaattcagaaacagcattcaagtcacttatctctgaacaacaaaaatctggtctcactttaaatcaggtccttgaacactgtgttgtgaactcatggaaaggatttaaggcggagtggatcaagaatcagagcacagtccatggacaacaaaacaaaccatctcgctgggatgaaattcaagagctaatcgcaaaagaggaggcaggcaatgaacagtatggtttctaa

SEQ ID NO: 53465 - DNA, 702 bp, Acinetobacter baumannii
atgaacgcattaattgtaccacaacatatcaaaattgacgaaacaatcattcgccaagacgaaaatggacgttattgcattaacgatcttcacaaggctagtggcggggaagaacgcaacaaacctaaatttttcttagaaaataagaaaactcaggaattagtacaagaattaaccgagggaggaaatcctacttcgcctgttgaagtgatacgtggcggtttaaatcaaggcacttacgttgttaaagaattggtttactcatacgcaatgtggatttctgcaaaattcaatttaaaagtcatccgcacttttgaccaggttgtaaacgcatcaaagcaaccacaaatccctcaaacactatccgaagcattacagcttgcagcagatcaggcgcgtcaattagaactcgcagcacccaaagtccagtacttcgaccgtgttgccgacaccaaaaaccttttaaacgcctcccaggtaggtaaaaaggtcggcatgtcagcggtaaaactcaatcaataccttgctgatatgggcgtatatgaccgtcgtattgccggacgcacctttgcccaatggtttattgacaaaggttatggcgaagtcaaacagacagagcaaggctacccgcaatccaaattcaccaataaaggcgaacagtgggtaattgagcagcttgtgagtgaaggggtggtgcaatga

SEQ ID NO: 53466 - DNA, 297 bp, Acinetobacter baumannii
atgcaagaagcaatcgaaaaaggatatttgggtggcaaattaataacacctaaaaccattaagttcacggatgaaatgttggacgcagtagcaattgttgctgagtcagaagaaaaagaccaggcagagtggattcgtgaagtcatagcgcaagccttactggttgaagatgctagatatgagcgtatgacaagagcgcgcctaagatcaaagtgtacttcgggtactttggtacaccaacaaaaaagcccaactgctggaacagttgagccgtattcacacaacataggaaagtaa

SEQ ID NO: 53467 - DNA, 252 bp, Acinetobacter baumannii
atgcaacaatttcaagtaaattccgaactaattgaagctgtcgcttacgactctgcaagctatacaatgtatgtaaggttcgtagatcaaggggttcttgctattcaacaaatacctactgatgattttaataactttcttgcctctcaagacaaagatacattcttgaaggcgcagctgatgataaatacagattatagaaaacgcattcagacgcgaagtgcaattgctaaaagtctatttcagggttaa

SEQ ID NO: 53468 - DNA, 267 bp, Acinetobacter baumannii
atggaacaaatcgacccttgcttcaaaactgcttttgaagaaatggagctgctcaaaaaggatattatattgccgaagggtatgtggttgttattgcatggatgtcctgttcaactcaaagaacaaacattagtgagagcagacccaactgacattttattcgcactagatatagttgagaagaagaactcaaatagtctggtgaaaatagatatcacaggtctgcttgataatctaaaagagcttaaccctgaaatagacttttag

SEQ ID NO: 53469 - DNA, 144 bp, Acinetobacter baumannii
atggataaggtctattcagatttagaagctatgaagtggttccttgagaaccatagtggaaaggttatttgcgttaaagatggtaaagaaaaagtagttgataactacggatgcgcaaataagttttttagagaaaagaattag

SEQ ID NO: 53470 - DNA, 804 bp, Acinetobacter baumannii
atgaatgcgccagtaaacggaacacttattactacacagattgcaaacgttgcggaaactcttggcttggtaaatgttaatccacaagagttaaaggaaacgctaattcaaacagctttccgtactgaaacacctgcaactgatgcacaaatggcttctcttttgattgttgctggtcaatacaaactgaacccatggactaaagaaatctacgctttcccagataaaaacaaagggattattccagttgttggtgtggatggttggtctcgaatcattaacggaaactctaatttcaatggtatggaatttaagttttcagaaaacatggttcagatggaaggcgcgaaagtagctgcacctgaatgggttgaatgcattatctaccgtaaagaccgtgaccaccctactgttgttcgtgaatatttggctgagtgttatcgcgcaccattcaagtctaaaactggatatgttgttgaaggaccatggcagagtcacccttctcgcttcttgcgccacaaggcaactattcaatgtgcacgcttggcttttggttttgttggtattcacgaccaggatgaagcagaacgcattactgaaagtggacagcctattaaggatgtaacgccagatgctgctgataatcgcccaacccttacagaagaacaaattgagaaagccattcaaaaaattcgtaatggtaagggtgatattgaggcacttaaacaccactacaacttgagtgaagagcaactcaattatgtacaagcacaaacggaggtcttagaacatgatcccgtttag

SEQ ID NO: 53471 - DNA, 639 bp, Acinetobacter baumannii
atgatcccgtttagagcatcgggtgtgggtaagcttatggcttaccctgaaaaagacaccataccagaaggcgcgctatcacatatttatgagatagcaagccagatccttttagattggcaaccagaattaagtacgccagaaattgagaaagggaaagttgtagaagaccagagtattgcactacttaaccaagttactggcaacttctatgtaaagaataagacacggatcacgactgacttattcacaggtgaatgggatatagatgagcaagaggaagacatcattattgatatcaaatcggcttattcaaaaaagacattccccattgagattaaggctggtgataagaaattgtatgagtggcaattggatacttacatgaatattcgtgacctgaatcgctcagcaattgcttacacccttgttgatacgcctgattatctgattaagaaatacgagaacattgactggcatgttgttggtcatattgcaccagaaagacgagtaaccatgttttacaaagaacgtgatgcaactcgtgaaaaacaattaattagacgcgctgagatttgccaagacctgctttgcgaaatcttagacaagaaaggctttaagtttgaggtggcagcatga

SEQ ID NO: 53472 - DNA, 393 bp, Acinetobacter baumannii
atgaaaaatatatttgcacctttactgcttgtttctacggttattttctctgctcacatttatgcagagccgactagtatctgtaaggaagtgaaattccaaaaggccgatcaggcgtggagtgggcactattatttacatggtgtaatggaagtcggttcagagcttttacttcagccaaacggcaagtttcaatggatgctcgctgtaggtgctttagaccaatatgccgaaggcacgtggtggaaaaatggagactgtattggtttaaaaccagaggctaaatttaaaaaggatttaagtattttccctgaaagtctaacgatttctgacaagtccttagacgcgatttgggaaggtgggcgccagcaaggcacatatagcaaagactaa

SEQ ID NO: 53473 - DNA, 648 bp, Acinetobacter baumannii
atgaataagttattaagaataatatttttatttactttcactctctcaattactcatgctcaggtctattacgaagacattactaaatattctcttcaagatatacctgaaagctatttagataaaattagtaattttactgatgaagacaagaaaaaagaacgagatgaatttaaatattacaataagcatggtgaattttgccttataaattataatgaaagtttttggaaacataagaagaaaggtgactatatttttacttcattttcaaccatacaacaatgcaaaaaaaatagtattattaataacactcgaattgaaggagtatgtcctatcagtcaagtaaaaacaagaagagaatatacagttacaaatggtaaaaaagaaattaccaacgttgcagtagatgagatgaaacccatttatttaggtttttttaaaagagatgatagtgtagagagtatgcctatagttcaagaagaaaaagaacctataagttttgaaaatttaacagctttagacttaactcttttatgttcagaaattatacttgaagtagccagaaagcgatataatcaagcaaaaaaagaacattatgattctactctagataagattcttgaaaaggcaaataaagatgattag

SEQ ID NO: 53474 - DNA, 1185 bp, Acinetobacter baumannii
atgactgcaccaaagctaagattcaaagagtttgatgatagttgggatctcaaaaagcttgatcagattgctgaagttaatccaaagacaaaagagttacctgcttcatttttttatatagatttagaaagtgttagtgaaggactattaatacaaagaaaaaaaatagacatcaatgaagcacccagtcgagctcaaagattgttagaaaaaagtgatgtcttattccaaatggttcgcccttatcaacaaaataatttttattttgatctagatggagactatgtagcatctacaggatatgcacaaattcgtacaaagctaaattctaaatatatttactatgttttacatagtaaaaaattcttagatgaggtaataaatagatgtactggtaccagttatccggcaataaatagtagcgaactatctagcatagaagtagcttttccatccataagagaacaaaccaaaatcgcctcttttctttccgcagtcgatgaaaagatcagccaactcacgcaaaaacatgcgctgttgagccaatacaaacaaggcatgatgcaaaagctgtttagtcagcaaattcgttttaaagcagatgatggtagtgaatttggggagtgggaggataaaaaacttggcgaggtgggtgaaaatattattggtttgacctattctccgacagatgtgactaatgatggcacaggcatacttgttttacgttcatcaaatattaaagagggacgtttagataagtcagatcaagtacgtgtgaataaaaagattaaagataaaattattgttcagcctaatgatattttgatttgtactcgaaatggcagtcaaagacttattgggaaaagtgtcatcatcaatgatgatgaagtaatgacatttggcgcatttatgtctgtttatcgaagtaagtacaatagatttattgcgtatttgatgcaaactccttggttctttgagcaagtacaaatgaatttaggtgctcgtattaatcaaattacgacaggtactttaaacgaattcacttttgattttccatgcttagaagaacaaaccaaaattgccaatttcctatctgccattgaccaaaaaattgaagtcgtggcacagcaaattgaacaagccaaaacttggaaaaaaggcttgttgcagcagatgtttgtgtag

SEQ ID NO: 53475 - DNA, 285 bp, Acinetobacter baumannii
atgagtaaacacgacgataccgtaaaaaagcattggttcatggtttgttttaaggtctatcacagcgatagatcgacaactgaaggcttcaaagcttctttttctaaagcttgtcgggaaatcaattccaaagacattgatgaaatttgcaaatatcttgcagaagacgtgacaaaaacctgtaagcgaccggtagtaggtaaaaacattattatcaccagcatgttccatatgggtgaaatgactgatgctgaattttacgaaggatatgaaggagaaaaataa

SEQ ID NO: 53476 - DNA, 378 bp, Acinetobacter baumannii
gtgaaactatatataagtgcactacagttagaaaatggagagcttttactcgtcgtttctcctcagtttaatgccaatgctattcaggattatgcattacgctgggaaattgaaaccttattcagttgtctcaaaggacgcgggtttaatcttgaaaatacgcgcttgacagaccctagacgagtgaaaaaattgattgcggtgttagctataagcttctgttggtgttacttaacgggtgaatggcaacatgatcaaaaaaaagcgataaaaataaagaagcatggacgactctcaatgagtttatttcgctatggtttagactatgttcaaatggcgattcagcgtttaattggttttgggaaaagaagagtttaa

SEQ ID NO: 53477 - DNA, 192 bp, Acinetobacter baumannii
atggaaaactggaaagcaattaagaactacgaaggcttgtatgaagtttcagacttagggcgctcgcggaagaatatggcatttctaacaatgccgtcagtcacattgttttgggtaagaactggcaatgggttggtggaccaatccaagaaagaattttcaaagatcgaggcgctaaccaatgaaaattaa

SEQ ID NO: 53478 - DNA, 927 bp, Acinetobacter baumannii
atgttgttgaactcgccaaagaaattgaatgtaagacaaatgcagtattgcgatgaggttaaagccattcttcttgaaggaaggccattcacttttgaggagttttcaaaatttaaagacaagtattcaggcaatgttcgcgttgaatttgagtgtgaggactgcggagcattctgcagcactccattcaaaaagttaaaacgacgcaagtacgcgcagcgccctacctgtccttcgtgctcagtgaaagaagtaactagcctagaagaatggaaaaaaaacaacagtgaggcgcagctcaaggttcagtcaacgccagaagttcttgaaaagaacagacaggcagtaaagaagttttgggcgaacaatcctgagatcaaggagaaaatgcgctccaatctgcttaaagcgcatcagcgagaggatgtgcgggagagaatgagaaaccgcaccaagcactcaggaacaggtatctctggcctgtatcagtcaaagtggggcgagattcgattcgatagctgttacgaacttggcttcatcgttgaaatggaaaagcgcaacgatgtagtaaatctatctcgcggccccgccattgattatacatacgaggacaaggttcaccaatacatcattgattttcgcgttgaatttcaacaggaaattatcttggctgaaataaaggggtcgtatatctccaatgtgcgtgatcttagaattaaagcgaaaaatgacgctgtagaagctgcactgaaaggcggtattgctgacaggtttatttttgtgacagagaaggactgcaaagagcaattcgggttcaatctgccaactagaaagcatgaccgccataacctgtttaaaagtcttgaaggcaaggtgcagctacgccaaaccaaatatgaggaaatgttttatggcaaagctagttaa

SEQ ID NO: 53479 - DNA, 219 bp, Acinetobacter baumannii
atgttgatcttgattggtatggcacttgtagcgttatcggtttaccgtgctaatggcttgggtaggtatttaaatagcccgtcgttatctcacttatccaatagtctgtatattcaggaaatggtaatcgcgcagattaagcagggttcgtattgtattgtaggatttactggggccaccatgattgcaatgggagtttggatgacatggctttcctaa

SEQ ID NO: 53480 - DNA, 228 bp, Acinetobacter baumannii
atggctttcctaaaaaaactatttggctccaaaagggagccaataacaaaatctcctgaccagcagctcattagcaaaattggttcaaatggatcggcaacggctgtaacctcattacatagcacattgccttcaaattataaggcagtgacttatgaatctccttatagggaaggagcattaaatgtcttattctttaaggttaaagatgaagataagcacatgtaa

SEQ ID NO: 53481 - DNA, 741 bp, Acinetobacter baumannii
gtgtctcctcctgatataattcttgaagagaattatggaaaacctcttcataacctgccattagattttaattatgaaaaacctgctgaaagcaggtatttctttaatcctgcatttggtggtttatttaagttcaatgaactcaaaggcacgcctggttgcgaattcagcggctgcttggaagttttttattgccacgtcaacgaaatggctttaaatgcaattgctgccattgccgaggattacgatgatccttatgaaggcgcaaataaagcattggaggcatgtatagatgttgaccgtgaagaattgattggtcgatatgctttcaaagacttcgtatttcaggatgatgatggtcagaggaaggtaggtaagcaaattaaaggcgcatttatacatgaggattttaagcagtttaaaatcgccactttgctatacaaatacttgaccaaaaaatatcattatttgattagcgataataaccaaacctatcaaggacacatactatgggtattaagtgtccttaaatggggaaaagtaaaatcttacgattgcgttgaagaaagatttattagcgcctatgatcctaatgacaacccaccagatttcaaaccttggtcggtgccatataatttcccaatggatttagaacaccatttgagagcagatttatgcgttcgaacaaatacgccgcttacaaatgttgtcctgattgccaatagctcattgcttgaataa

SEQ ID NO: 53482 - DNA, 126 bp, Acinetobacter baumannii
atggaactcatacgtaaaactgtacttcatgtagaaacgacttatgtagatggcggcaaagaagcagccaagccattaaaaatggtggcagcagcagcggtaattaaaaatccgtgggcagggtaa

SEQ ID NO: 53483 - DNA, 1599 bp, Acinetobacter baumannii; identical to SEQ ID NO: 46980

SEQ ID NO: 53484 - DNA, 687 bp, Acinetobacter baumannii
gtgtttgcagaatttaatttagacaatggtgatattaacttttcagacgatactaaaccacttcttaccgattactctcgagtagcacctgttccattacacccatacgatgggtcgatatggtatggaggagctaaatttttacagtttgcacaagttccagcaaacttaacgaacagtacaaataatttagtgggctttaaagctgacgacaataatatcttgcaggtggggtcagatgcttttctagttacaaaatatggttcaactcaatttaacttggatgttcgagtgcaccttcaagatcatattgttaactatgaagatgcatatataagtacctatgatgctacgggtaaaataatgtggtctgcttctgcatttataacagcccctagacttatcaagagattagagattactaaggaatatatgagccccagcgatacaccttggttaatttacaatagtccaaatgataagccactttatttacttacccccccatttaatggaatctacgatttaaatggcgatggtgtttcttatgaatcctctattcaagttaagtgggaaaataatggaaagcgtattatggttaatttatctactggaagggaaaataaccattacaatttattgatgcggtatggatatgttccagtatatgtcgtccaatatccttag

SEQ ID NO: 53485 - DNA, 348 bp, Acinetobacter baumannii
atgccatcaggtttagaaatatatgatgcaaatggtgttcaaaaatttaatagtaacactgatagagttttgaactttataggtacttcgactgaatcattctctggcccagcatcagaatatcttacagtgttcactagagctaaagctggaattactaaagataggcatattattagacctatttctgtaagaaaagatcctagttctacaggtaattggcaaatcgatacagttatgtatgtacctcaaaatggaagtattgattttttagttcatctgtatggatggaataactttgacagtactcaaaagcttattattgattatgcaatttatagggtttag

SEQ ID NO: 53486 - DNA, 10359 bp, Acinetobacter baumannii
atgaatggttataaacgtgcaaagattttaagttacaacgcaaaaggtcgtactgcacaagtacacattcatggtttaactgatggcgcgagtgaaggcattactgcaacttttgcctatccagtcggtgatagtgatttagatacagaaattcaaattgtggatggggaagacgtctatgtcttctttgaaaacggcaatgaagaacgtccagtaatccatagttatgtcagtcacggagacggcgcaattgtaggtgtgcgccgtattcgacaagacaatattgaatttatctctaaagaaaatttaaaagtagattctggcacaactgtatctattaaaacgccgttgatgaatgtgcaagctaatacacaacaaactggtaatagcacattaacgggaaatagtactgtagtaggtaatacttcagttgcaggaaatagttctgttgcaggcagtatggctgttggcacaacacttacggttgcaggtgtgcctattgaccctaaagctattgagggtgcatttaaagacgctcttaataagttagagagtttaaaagaagacttaaaagaacaaggcgaaaaaattgatgaaaacaaagatcagataagccaagaaattgatgaaaaaataaaagaagtagaagagttaattgataatattaaagattctgatgcctataaattgcttgaagaaggtattaatcacattgatgaagaggtgcaaaaaatacatgaccaagtaaaagaagtaggtcagattgcacaaaataaagttgatgaaattcgggcttatattgatcaagaaattatcgataccaaactgattgttgaacagcatgcaaatgatgcaaatattcgtttggatgaagccaataaacgtattgatcaatcaattctggcaaatgaagagttggtagctgatgctcaacaacgggcaatccgcgctgagaaagaactcgatgacaaaattggtttcatcaagagagaaacggattctattattgctgatgttagaagtgattctgatgaaattcgcttggtcgcagaaaacgcgaaaaaagttgcagaccaagaagttctagaccgtaaaaagcaagcagctgacactcttattgttattgatcaaacaaaggccgctttaaaacaagatattgatcaaaacttagttaaagctggtcaaatgattgatgatgctaaattagcattaggtgaagaaactaataccctcattaatcaaaaaattgaaccaatagttagcaaaactgaagctgcagttaaaaaagtagatgaatttgcagctcagtatgttgagcttgataagaaagtcgattctggttttctagctgaagctgaagcacgtgcaaatgataaagaggctttaactcaaagttttgagcttaagtttgctgaaatgcaaaacgaattgggtaaatcaaatgccttaatttcagaagaatctaaaactcgtgcagctcaagacaaagcaattactgaacaaattagtattgctcaatctcaaattggtgataacaaagctgccattaatagtgttgaacgaactgtagttgaccttaccaaatctgtggctgaaaaaactgaccaaatacaggccagtttagacacaacaaatgcaagtttattaagtgctaatgagttagcgcggatgcaatcacttggtaaacctttacgtgatgatccgacgtttttttctggtaatgggggattaagtgcctatgtggtaccagcaggctcaacactaactcgacaagccaaatctacggataaccccgtaaatagtacccatgagatgcttttaagatctacatcatctttaggtggtggttggtatccaactgttcctacacttgtagctgcgcctaataaaacctttttaataaaacaaattattaaaatgccaaaagggacttatttattaccagttggcaatgctacaggtacaggtggttatttacgagtacttggaaataaagaaggtactggcaagtttgaggtttattactctgttgttcagtgtggctatgatgcaccagcagctattcatgggcattttcgtgtattagctggcactaatccacctttaccaagcacttcaagcccagttgatgtaatccttgctgattatgaggtctgggacattacagcactaaatgacaccatccctaaagcatggcgtgatcaaattactggtaatgcctcatatatcgaaaaggttgaatcatctgtaaaacttgttgatgagaaacttgtttcagaagcaaaaaaacttgaagaactaaagactgactataattcaaataaaactaaaacaacgtctgatttagcgacaattactcagtcagtttctgatggggataaagccttatcattacgtatcgaccaaacaaaagcagctctggaagaagcagatcgtcagtcgaattcaaatattctagaagttactgagtcactagctgaatttgaacagtctaccacgacgaaatttacagaacttgatacaagtatctcgaaagaaaatttgaaggtacaaggtcagattgtagatgtccaaaaaagtatatctaccttagaaagtaatacaaacactaaaatatctggcctttcttcttcacttaaaactactgatgatattgctaaactagctttcgataatgcagccgaagcgcagcaaactggtacaacagcggtaaaagcaactgaagcactttctcaaaatttattaagtctcaagtctcaaactcaagtgactactggtgtgagggcagtagtaacagcaaaaggaattgatgactggtcaacttggcgagctacaggtgaagctaaagtacttcaagattctgatgcatttggcggttatattcttgagcttggtaataatgctggcaatgatgaagcttgggttcattggaaagaattagtaaaaattaatccagatacgctttatcgggtgcgtgcacgtttccgtcgtgttgctggtgaaaatggaagtatttatttaggtgttgcatgtaaaacagcagatcaaactaagtatgtaacaactacaaataatcttgctgcagacatgggctcatcaaattacttgttgtctgcaattaaaccaaatttaggtgaatggcaagaagttgtactttatctgaaaggaaaatctacaggtgcagctacgggacttggaacaattgataatccgcgtactttcccagcacaagctgaattttatgccccaatgtttattggtaactatgcggctcaaccaggtataagtcagcttaactacattatcgttgaagataacaactctttagcttcagcaaatgatgcaacagcaaccgcaaatgatttattcaaaactgctactaatagaactgaggctgaagcagaacggaccagtaagcttgaatcaagaatgcagaatgctgaaacaggtattcagagcaacgctcaagcattattgaaaacagctacaaagagtgatcttgatagcgccatgggacgtgtggctactgatatcacagctgcagtagataatattaaaattggtggggttaatgcggtagctaattcagaagcgccaagaagctcaacagcatcaactagtcgtgaatacttaatgtatgaacgaagtaaagagctcaaagctttttatgacgaaaatttagataagccggttactatttcttttgacgtgagtgtgcccgttgctggaacagtacaagtttactcttcaaatggatctgctcattactttacaacttcagttactgtaacaaaagcaaatgagtttcaaagatttgcagttacagtatcccctaaagtacacactggaagtactaccgaatcaacaattgagttttatggaacatacggttctggtcgaattccaacgattcaaaaattacagatcgaagcaggcaataaggctaccgcatggagcccaagcccacgtgatactcaaagctctttaaatgccaatgcggaagcaattaaagtcactcaagctgaagtaaagaagaatggtgatactttatcttctcaaagtatagatatttctaagcttagaaatgatctaactttgactaacactgaagtagggaaaaaagcctcaagtgaagcacttgaaacaacaaattcaaaagtaactgaacaagctggacagattaaagcagttactgaacaatcaaataccttatcagcaaatcttaacaagtctgcaccagctggcacgaatttgttaatcaactctaatgtagtaggaacttacaatggagtttcatatcctcatctacgctataaagtgggggaagactgggaagtaggagcaaaatacacacttctttggtgtgctgagcatacacgaggtgctggtgatacaaactctaatttaactgtatatgctggtggcggaagtcagtgggttcaagcttgccctgcaggtgcaggtaaagtaattaataaagttacttttacaaaaagttctgcaggcacaggtagagaaattcaattctatatgattaataaacctacagcagacaaaaattctgtaggtactgtttactgggccgtattggttaaaggggaattcataactacagataattggattgcaagtccttacgacttcaatgcagcattcgatcaagtatcagcaaatttaaatgaatttaaacaaacgtatgttactgaaagtactgctttagctaaaaaaactcaaaacttagaatcaacaattaatgatcctgtaaatggtttggcagcacaggctaaacaaatttcagaccggatgactaaatctgatgttgatagcgcaatatcaactacaaccgaagctttgaaaacaagtatcggtggaaaggcttttgacaacattgtggtcggggggaatgtcgaaaaaagcaaaacgggtggttatgtacaaatatcatatcccttagcaaaaagtttaaatgcacctggtattactgttaccgtcagagcaaaagttacctttgataatggagggaacaatgcagccaatttgcgtatatatattggcggagctaatgtatttaatgcagatgcgcctattttttcagctagtaaagacattttcgaatttaccttaactacaattgctagaacagactcaacggttgttaattttgcttgttttccaaattcgtcagcaaatgctaatgccactactacagtgcattgggtagaagtttttgagggtaataataaagcgttaaatgataaggtaagtacttcaactctaattaaggattactcttctaaagcagatactgctcaagcaataacttctgcaactgaaacccttgaagctaaatttcgtcaaaaatttggtgatctatggactaacagttcagcaactcttgatagtactcgttatacaaaaactgagactaatcaagcgattgcagaggaaagtaaaatcatcaaagccgctatttcaactagtggtggtgataatattattaaaaatggtgatttctcaagccctttaggcaccttaaattggcgtcaaaattctgctgtggcaggtaatctacttgaagtttataaagattcaaaaggtgctacttgggggcactttaaatctactgatacaactacatactttaaagggtttattgaaactctgacattggcagatggtttagagatgaatcagaagtacacattgtcatttaaagcaatgtcgttgacagctgcacagactcaaattttattaattatacaccgtcgagattcatcaggtagtaacaaccaaattggtactacatggaataacatttcgactgataaagaaacattatgtacttatacctttgatacaaatattattaatttacagcatattaacttaattttatattcgcaagtaggttttgctcctgactttttaattagagaagtgcaacttgaaaaaggtgagttagccactggttttagaaaaaatcctcgtgaactaattaaggatcttgaagctaatgcttctgcaattgagggtactaaagcggatgttcaaaaaaacggtgagaagattacttcacttgcagagaattatgcgactttaaaatctactgtagacaataataaaactgctgtagatggtaagtttcaggaaattaattcaactattagtgataatcaacagaacaccacacagtctattaataacttggaatcaagttataaacaattaaatcaggaccttggtcaagttttcaattaccgtgtttattcatgtggctggaatggctttttcacagggattaaaaacttaaagggtgaaatcaaatcagtagcttcagctcgtggtttttcagtacatgttttagcagctgatggttctgttgcttcttcaactagatatgatacttatgcagctgtagcaaatgctacggcaatgagtaacgctattgctgcgattccaaatgacacctttgttatcgttacaaactacgacagtattggggtaaacctagcaccagttaagaatgcactaatttcattaggtgccaatccattcacacttgatcaaataacgggtcgggatgcatacattttagttggtcagaaggggattggttcaggtcgtggtatagaattgcatgcaacaccagatactggaccaaatggggctaagcaaatcatgcttgcagtccaagtagttagtggtatcccgattggtctggcaaacaatagtggaaacttacaaaaggttttagaaaaccacgcacaaattcttcaagaaaaaattacaagatctgatgcgaaagaagtatttgctgaggaaatcaaagtttttaaagcacaacttgatactttacgttactcagaagagaactggattttacttggtgatgatactaaaaatttaagtatttctactggtacaaaccgaactgtagctgtttgggaactgcaatataaacacaaggaaattccaattgataagggtgatccaatagttgcgagaatcaaatacacagcaactgcaggattagttggcgctacatgtagtattcaatttcatggtgcaacttatagtgttgggttgccttcgtttgttgtagctgcaagtggtgaaatagaacttactggtattttcccatctgatttaaaagcctctgcttttgaagctattccattgggtttacggtttgataatgctccatctggtggaacatttactgtaactaatatgtttattagccggggtaattcagcgccaaattttaagggcggatttagatcgtctcttaaacaaaatgctcaatttgttgaagatacttttatcaaggctgatgtaaataaaggggttatagctcagcaaattcaacaatatgatgcaactgtacctggtggtttatcttctgtagtaaaaacaacaaaagctacagctgaccaaacatcaaaggatctagctacacttagaaatactgaaatttctcagcttcaaacaagtacaaataatcttggttccgcattagaaaacacaacaatgctggcgatgatgattactaatggaaaattgttgcagggagacgtaaatttcaaaaaaggtaacaatggtgtatctgtctataacaatgccggcaatgggaacgtgacagttactcgtgtcgcgaaaagtgctgataacccaactacatcaacctatgaaattgaaattaaaaccattggtgctgccagcccaacatggggtggatttgttcaactcgtttatggccgtgcaaatgctgtttttgttatcaagtatttaatcaagctaccagttggatataaattggtgaatgctggtaacgcaatggggacaggggcaattgatcgattcattggcaatactgagggtacaggcaaattcgaaacatatattcgaatgattaaatgtggtgctgtaggttctttctctaactcaggacatgtttatgtggcgggaggatctacaccaacagctactgcgcctttagtttggaccttagcccaaatcgagcaatatgacgttactgattacgcttcagctgacccgactttacaggactttgtttcttcagccacagactctatatcaacattaacgaacttcaaagaaacttgggctgccaaacttactgaaatgtcttcaaaattagacagtaaaaacggcgcttatattttgaatgcggatataacaaatactaatgttgagcgtgcaattgcagcatcttcacagaaaattacttctgaatataccaatgctatgagtgtgcagccattgagttcaggtgcagggaaaattttcgttaagcctttaacttggcgtcaagcaatcactacttcgggtacattggttattaagacaccaattacagttggtgcgtacatgaccaaggttaaaatttctggttataactacaataacaaagaagataatattttcgatctggatttggcattttatgcatatacgtcaacagtgccattttattcgaatatgacctctcgttcttttggtatcactttagatgaaagtaatgctacgactaaaggtctagctttagctttagatagcaataataaggtgtgcatcttaattaccaaaaaatatgcttggtcttacccagcaattacagttgagtcggccactattactcatacaaatccgccagattactttaaagatggctggacggcggccattgaaacagatttatcagtttataagtcagttacgccgtttacagtgacttcaatgatggaaaccactgcaggttcacaagccaaagtggatgttccaatggctcagttaagtgatattgctgctgataataaactcacaccagttgagaaaaaacaggcgaagttggtttgggatacactttatcaaactgatgcaagcttgcgagctgaggcagtcacttatggtatatcttctgctgcttatgccacggcattcagtactttaaatacatatttggcatctttattcgcaaatatgaatgtaactagtacgattgaccgaaaccagttcattacaaactttgctaacgttcacaatgcacgacaagcattagtacgttcaatatcggagaaggctaaagaaatagctgatactgccaaggatatagcttctactacaaaagcgacattagagcgtgattacatgacgtctaccaagacgaatgaagcaatcgcatcttcaacagaaagaatgtctgcactgtattctgcaaatggtcaaaagatcatggcatcagtactagaaacatggcaaaaagattggttagtaaaaactccaagtggaaataagcctgaccttagtttagtagcagatgcaacttgtcgtggaggatatgcattaagaattggtaataacgtaggtaatgatgaagcctggttaaattggttcacatctttgcctatcgatgacaataaatattaccgagttaagtatagattccgccgtgtaagtggtaccggagttgtttatgttggtgcgacctgtcaaaacgccaataaaacaaaatatattgctcaagataactctgaaatcaatgatatcggttcaagtcactatttagtcgcaggtaccgcaccagcgttgggaagttggataaccggtactgcttattttaaggggcgatctgctggtgcaagtgcaggtgctggcactctactaagccctaaaacatttgctaataaagctgctttctttacaccagtattcattggtaactattccggtaaagctggtgaagtggatctagactttatagatattgaagatgctgacaacattgctgattttgaaaatttcaaaaccacatatacaactgatgtgggagcatatgctggtgcattacaaactttggtttctgtttacggccaaaatgctatcaagcttaaatcacaagctgatttgattgatggtgtgaaaggtaagtacgtaatgggaatggataataatggtgtgttctctggaatgtctatggtcagcgagcaaacgaatggaactgtgctcagttctataggtttccaagctgataagattttcttcactactggtacatcttctaccaaatatatgccgttcataattcaagacaatcaggtcattatgaatagtgatgtatttattaagaatttgaccgcatcaaacttcaaagctaagtctcttactgctgaattatttaacgttgataaattgagtgcaatcgcaggtgagttggggactttaattacttataaagatccattgaaacctacaggtacccgaactgtacaaacaggcggcaagatagaagtatatgacgataacaatgtagtaagaatgcgtttaggtttttggtaa

SEQ ID NO: 53487 - DNA, 834 bp, Acinetobacter baumannii
atgagtaggtttgcccatcctttaattcgctatcacggtggaaaatttagactgtctgattggattatttcatttttccctaatcataatgtctatgttgaaccatttggtggtggagcttctgttttactaaacaaagaacctagccgagttgaagtttacaatgatttggatgatgacgtagttaatttttttaaagtactacgtaataaggagttagccaaacaattagctgaagcaatttatttaacgccctattctagaactgaattccttaatgctcgagctgattcaaatgatatggtagagaaggctagacgtttagtaattagagctcagatgggatttggaagtgctggtgctacaaaaggtaatactggtttccgtttagatacagctcgaggtggaagcgatatagttaccatttggcaaagacagccaaaagtagtacttcaagctgctgaaagattaaaaaaagtcttaattgaaaatagagatgctttaaaagtcattgaagatcatgatcgtgaagatactttatttttcatagacccgccatatgttcatgaaacgcgttcaatgggtgggagtgcttaccggtgtgagatgacaaacactcaacatgctgaattagttgaattactaaagcttgttaagggaaaagtcattctatgtggttatgagcactatatttatgattccttaaactggaaaaaagttaaaaagacggttgcagcagcgggacaatctggttctgttcatcgtgaagaagtgctttggataaatcctcaagctgaaaagcaggtcgatttgtttagtgaggtaacagtatga

SEQ ID NO: 53488 - DNA, 159 bp, Acinetobacter baumannii
atgatttctcaaaagtttttaaatggcagctatcatcctcaaaatggtgattgtcttgagttaatgagagatattcctgactatttccaaatagcatgtaatcgaatagagcatagtttgtctgcctaccaacctcaattatttaaggaggttgtatga

SEQ ID NO: 53489 - DNA, 306 bp, Acinetobacter baumannii
atgaaacctactctatttacgcctgaaacatgggcggagtttacccaacaactcaaaaattcttgggaaaaagataacgctggtactgattcaccaatttttgttgttcaagaaaaaaagattgtttggggtttagatccggctagtgattctgtagaaatcactaatattgtagatgccgaacaagactatatgactattgatgaagatttaaatagtgtatgggcaaattatcataatgatgcgccttcacactggatgcattttcatagtgtgccaaacgtatctggagctgctaatgagtaa

SEQ ID NO: 53490 - DNA, 312 bp, Acinetobacter baumannii
atgagtaagtttattggtgaagttaatttgaatcctagccgtactgaaggcactccggatcaggtagcggttcatatttttaaagaagttatttgcccaagtactgaagagcttctcaaaaataatcctgaggcggcaaaggtttttgcataccacatttttggtttagcactttctcagcttgccgaattccattcaactaaaagtttagataaagctgtatccgttactcttcacaaccttttgcgtcaattgaagaaagaacgtaatgagttgaagcaatatggagatttatatgtcacgtttaactaa

SEQ ID NO: 53491 - DNA, 1353 bp, Acinetobacter baumannii
atggctcaacacattaaatttactaaatcagtaatagactctattcctttgtctgaagagaaacaaatcttttacagagatacagcaactataggatttggcttatgtgttggcaaaactaaaagctattttgctgaaaagaaaatgccaaacggcaaatcaaaacgtaaagtcattggtaaacatggcgtctatactctagaacaagccagaactgaagctaaacgcttgctaatcatgatggatgaaggtgtagatccagttaagcaaaagcgtgatttacgagcttcagcaattcaaaatgatgccttacaaaagctagtgcctaccctttctgaagcctaccaatattataaattgcgtaaaaagctggccgaaacttctttaattgcctatgatggatgcatagaaaactactttagtgactggaaagatgtaaaacttgatcaaatcaccagttcaatgattattgatcgtcatctaaagctttcggaagcaagcccttcccgagctaatctcgcatcaaaatttttacatgccctctttaatcatacgattagcagatataaagatgagtctgggaacaaaattctaaatattaaaaacccggttgttattgttaaagaagaaaaagctttcaataaaattaaacgcagaaaaggccatgttcgtgcagatcaacgtgaagcatgggcattggctgtggccacaacttactggatgggtgaacaaaataacgattttagagcgtacacaaaccaagactttttattcttactcgctttaactggttttagacgtagtgaggctgaggctgtcgaatggaaaaatgtagatcttcagtttggtaccatcaaaatcgttaacaccaaaaaccatgaggaccttttattgcctatgggtgataccctttggcatcttatgcgtgaacgaaaaaaacgtgccggcaataataaatatgtgtttaccgatagaaatggtgtttcccatatttcagatcgccgagctgcacgtgaaaaggtaacagagaattctggtatagaatttacgttccatgatttacgccgcacctttggcactattgcgaatagcttggccataggaagctatacgatcaaaagactaattaatcacaccacggacgatgatgataacgatgtgactgatggctatattcaagtttctttcgatgatttaaagaaagctatgaatatgattgaagacgtgattatttctgatccggtgaaagaattgattaaaagtcgtttgtactttgaaaaaaatgaatcgagaaatcaggctcaagcattgctagatcatcatacgagaatattaggtaattataataagtga

SEQ ID NO: 53492 - DNA, 126 bp, Acinetobacter baumannii
atgacacacttaattgatgacatgttttactcagagcatattttcgaaaaactttctgtctattcagaatatatgcaaaccttattgcaaagtcagcatagtcttcacaaaaaacaaattgcttag

SEQ ID NO: 53493 - DNA, 426 bp, Acinetobacter baumannii
atgattttgcatggcaatttatcttataaacttgagttaggtaatactcttttaaatccaaaatttatcaatcagtatggtgagttaatgcaatttgatattgctatatcaaacccacctctggcattaagtaattgggggtacgaggaattaataaaagataaatttaaacgttttacacttggaatgccacccaaatctagaggtgattttgcttttatcctacatatgattaattcaattaacgataatggacgtatggcaattatagttcctaatggtgttttattcagaagtggaactgaagctgaaattcgaaaaaatttaattgaaaataatctgattgatacagtcattggactacctgaaaaacttattttaagtttattgatgcatctaaaaaatttatatttgacaagaatttaa

SEQ ID NO: 53494 - DNA, 129 bp, Acinetobacter baumannii
atgagtctaaatataggaagtgtaaaacgagaagtcagccaaattgcgacacttgaaagtacagcactaattccaaaagccagtgtaattaaaggaacgttcgaggaagctgcttcaaataaatggtaa

SEQ ID NO: 53495 - DNA, 1443 bp, Acinetobacter baumannii
atgtctcaatgtgatgaatgtggtcgcagtgtggaaaaaattcataagaactataaatcgattaaattttgccatacatgttatgtacgggttttcaaaaaacgagcatgttcatcctgtggaaagcttgccaggttatataaatatgataactcagctatctgccaaaaatgtgaaaacaatagaccatgtatacgttgtcaacgagttgattactctatcggaaaaattacaaagtatggtcctgtttgttgtagctgctctgtttatttcaaggagtttcaagcctgtgagcgttgtgggtgcttttcccagaaactctccagaatcagccgcttttcagataatttaagagtatgtcctaaatgcgcaactcgtgattatagaacttgcccaagttgtcgtaggtatcggctacttgaagaagatgttaaatcaggtcagatgtattgcaagaaatgtttgaattcaccacctcattattgtttgatctgtaaattgaagattcctgctgggcgcggaaattattgtgaaagctgttcctggcaccagattcttgaaagaagagttgggaaattagcaaataatttagaagatatacatctccaaaaacactttaaaaactatataaaatggcttgaacaacgagtaggttcacataaagcagccttatttactgcgaaacacataaaattctttgaagaaactgatgatctttggatagagcaagttcccgcttataccgagcttttgggaagattaagaacaagtggtttacgtaagtttgtattacctatgcaatggttaactcaagtacatcatcttcaagtagatatacaggcaaaagaattttgttctgaattggaccaattgaataggttaaaaaatatttgtctagagcccactttccccgctcaaattcttcaaaagtactttgacacgttaatgaatagagtgagcgatggtacaacaactattcgctctgccaggctagcaatgaaaccagcttcagccttgatgtttctggtgagtaattcaagatttaacttgccacggatatggcatgtcaaacattatttgtcacatcatcctggtcaagcggctgaactcattggctttataatttttttaaaccggaattatgatactaatttaaatttttcatttataaagaattctaactttataaaagcaataaaaaatcagaaattagaaaaagaaattattaagttaagtaaattaaccaagaatagatttgaattattattgtgggtaagactttgcttaatgtattttcataagttcgagattacccattctaagcaaatagaactaaatatgatcaatgagattgaagatggattagagattagtttcaggaatgagattttttggatacctaaaattaataatttttttgatattagccaagaatcaacatag

SEQ ID NO: 53496 - DNA, 381 bp, Acinetobacter baumannii
atgagctttatcactgaacaagaagcgatagaacatgttgaaggctttgatgctttatctgccagtgataaggctcaatacctccaaatggccgaagcatatctgttagcacgtaacgtaaagccttatgaagacgttacccaagttcctgaacctctaaaaactgcctcatatcaaataatcaagggcattatgaaaggtgatctatatcaagggcaggaacaggcactaaaacgtaagaaagtcaaagctgatacggttgaaactgaaaaagaatatcaggacggatcagtaaagcttagtgcaattgagcaattcattcttgatttgatcaagccttattgcaaacagaaacgcgtgtttattgttaggaagatctaa

SEQ ID NO: 53497 - DNA, 369 bp, Acinetobacter baumannii
atgggcttacgtgacgaaattcaggcagatattgctgaagcatttaatgatgatctagcggacgccgttcatacctttacatgtgatcggatctcaaaaactaactgggatcctaaaactgaaacgtatattgaagttaaagaaaattattctggacgtggcgttctgtttggctcatatagtcaatatgagatccaaacgcttggagtattggcaacagataagaaggcgaccttgctgcagaatgaagtaaccatggtaccgaaaattgatgatgaatggctaacagccttaggttcattccgggtaattcatattcaacaagatccagctggaacaatctggaaatgccagttgaggaaggtttaa

SEQ ID NO: 53498 - DNA, 306 bp, Acinetobacter baumannii
gtgtttgcttgtatgtgtttaacattaactgaagctaaacaaaaacttagagcatctgctagagatactagcagaatcaagttaaccacacatgcaaaagaaagaatgaaagaacgctgtatctccatgaagcaaattatttgctgttttgaacatggagacatcactgagggaccatatttggatgctcgtggaacttgtaaagcaaatgtttctgttcgtactgctggtgaatatattaccgctacagttgcatttaaagagaccgcgaacggtgacctttcagtcgtagttactacattttaa

SEQ ID NO: 53499 - DNA, 459 bp, Acinetobacter baumannii
atgtatcactatgaagaatgtggcttaagtaatatttggctacagaatggttttactattgaaaatgatgaggaatttggcgaattggtatcaatccaatctgtccatgaactccataatgccataggcctatatttaataactcataagccagaactcaatggtgaagaaataagatttcttcgtaaagagctaaatttatcgcaaaaaaatcttgcggggcttttacgtgttggcgaatctagtattcggcactgggaagctggtcgttcgttaattggaaaaccaacagatttattactccgtgctttatatcaagagcacgtacaaggtgatggtgaattaagacagttaattgaaaatcttaatcatcaagaaagaacattagttccaagtgaaattagtttttcatatggaaataaccattcatggcatcaaaccaattgtgaaatagcttag

SEQ ID NO: 53500 - DNA, 312 bp, Acinetobacter baumannii
gtggctgttttttccacatcattttcacatgctttagctcccaaaaatggagatgagccaacttattgtgagcagattgtttcggtccacggcttattaactagagcacaatttgaatgtggatatagtgaatataacaatgagttaatctcagattcagccaagtgttttcagcatgaacttggtgaagaatatgggaaaaaagtccttatatttggcatgaaagaatttgaccgaaatgtaaagaaagacgggaagaataagatttgtaatagtttattaaaagaatttccagagtatgtaaggaagtaa

SEQ ID NO: 53501 - DNA, 327 bp, Acinetobacter baumannii
atgaaaaagctactaccacttgcatttttactcacagcatcatttgtaactcactcagccgatactaatgataaacactgtagagatgtgaataaacttgctgaaaatgtcatgctctttaggcaagaaggggtttctgtggttagacaaatggagatgatagagagtatcaaaccaagcagggatttcaaaaggttaatggagatgatggtcgaggaagcctataaagaaccaaagtttggatcagaagagtataaggcggaagcaataactgaatttgcaaacaattggtacattcagtgcaagcaagcaaatcgaaataaatag

SEQ ID NO: 53502 - DNA, 315 bp, Acinetobacter baumannii
atgagaaagatagttttattaggtttggttttcttgccgtttttggggaacgcgagcccatttccaaaacaagctgaagaagaaaaaagtgaaaagttttgtcgaggatggatggatatcgctgaaagcattatggcagaaaagcagaaaggcacctcgttatcgataatgcttaaatcttctgatagtatgaaaagtaaagaggatgaacgtctgataagaacgattatacgagatgcttactcacaaccaagttattcaactccatcaataaagaaagaacacttaatgaatttgctgctaggtattatttaa

SEQ ID NO: 53503 - DNA, 210 bp, Acinetobacter baumannii
atgagtacagaaacttcaccttctaatcgttcccgatcaaaaaagatcagtggtggacgtattccatgcattgtctatctaccaaaagaggaagttaaggcaatcgatcaagaagtagaggaaaccgattccagtcgctcaagtgtcatcgcaagaatttattacttgggtaaaaagcaaactccaaataatgaggaccaaaaccaatga

SEQ ID NO: 53504 - DNA, 807 bp, Acinetobacter baumannii
atgacgacactcgaattacaaaatgctgtattcattcaaaatgaccaaatcaaaactgatagtcttaaagttgccgaagtatttggaaaacgtcacagtgacattattcgggcaataaaaaatattgattgttcaactgagtttagcgaacgcaattttgcgtcggctgattatttagatgagcaaggaaaatcccgtccaatgtatgagatgaccaaagacggctttattttccttgcgatgggttttacaggtgcaaaagcagctcagatcaaagaagcctacataaaggcttttaaccaaatggcagagctgctcttaaaacagcgaaatcaattgcaaacaatacaagttggatcggtagttcagttacgctcaggtagcccgaacctaactgtaaataatatttttgatgatattgccgaggtgatttggtttagaggagggcgtattgttcgtgaacatcttccgattagttgcttaagtttgggcgaaaatgatcaaattgcaccgaatgttgcgagttcacttgagtcattttggtcaaacatgtacacacatggcattcacaacttcaatcatagcaatcgtaccgatcaaattgcgattaacctcacacaagttctagacctattccccaatctgtttaaacgtccagatctaattcagactttacctcacagtaaaccgccatatcctaagtatttggaacacaatattgcaattcagagcaggttggaacgtaaaacgattcgttgttggatatttacaagtagtcaacctaccatgattgatgtcggtcgctaa

SEQ ID NO: 53505 - DNA, 171 bp, Acinetobacter baumannii
atgaaaaaatctattcatgtcatcgagcacacgcctatctatgatttagaagcgtttaaacaacgccagaaaaagcgcaaaattcaccaattattcaaaaacgttatcgacacattcacgttcttatgtgcagtctttatgactttctctatattattcatagggggataa

SEQ ID NO: 53506 - DNA, 216 bp, Acinetobacter baumannii
atgccacctcttccaaactctcacatatttaaaatgtctcatttaaagaaaaaaatctctttagaaagctattactccgctgccgatattttaaaaaaattagaagagttaactggacttgtatatcttcaagatgataacaatcctattattggttttttgccaaaaaattatttaatcactcaaaataaccaaaacagaaaaaataagttttaa

SEQ ID NO: 53507 - DNA, 525 bp, Acinetobacter baumannii
atgaatattctaattgttggcaatggttttgatttatcacattacttacctacgaagtatgatcatttcatggtcgcaatgggagctatagaaaattgggatgagcaaaagggtgaaatgcagtttgatgatctgtttggctcgttatatgagaaagaaaattacttctttaaatatacaaaagcaatgtatcaaacagacgagataaaaatttcgactgagcaagttaaagagttaaaacaaaaattaaaagaaaatgtttggtatcagtatttttctgatcatgttagggagattaaaacatggattgactttgagcaaaaaattgaggaagcattaatttataccactcattttctagataaaatcaatgaggtatctttgaatgaaaataaattagaacgagtaatacgaacttctggttataaggcctctgattatgataataaatttatttatttaggtgactttttcagccaacgtaattgcaagattcctttctttaattaccttccaaaagtttag

SEQ ID NO: 53508 - DNA, 843 bp, Acinetobacter baumannii
atgagcaaagaagataagaaatacaaatcgaagtggtttcgtattgccgtagcgggtgataccactgacggtcgtgaaatcgaagccaattggattattcaaatggctcaaaactacaatccagaaacttatggtgctcgtattaatgttgagcatttacgtagtgtttatcctggtggagctttcggtgcatatggggatgtccttgccttaaaaactgaaaaagtcaccattaatggtgaagagaaagacgcactctttgcccagatcgaacctactcaatctttaattgagttaaataaacaaaagcaaaaggtatatacctcaattgaagttgataccaattttgctaataaaggttcagcttatttaataggtcttgctgttactgattcaccagcttcactcggtaccgaaatgttgaaatttgcagccggtgcaaaagaaaatccattaaataacaaaaaacaacgccctgaaaatttatttacggctgcagctgaagcaacgcttgaatttgaagaggtcaaagagcctcaatcctattccgcaggtctgctagattcagtaaaaaaattattcacaaaacaaaaaaaagcagaagaaaaaactgcggaatctttttccgagcaagagcaagcaattattgaaattgcgactgaaacctctaaacagggacaggccgtaactgagcttgaagaaaagtatacaaatctcagcaatgaacattctcaactccagaaggatttcaacgaattgaaatccaaattgggtggagaagaagaacatgagcctcgtcctaagtccggcaattcaaactttactgaaattgttgactgttaa

SEQ ID NO: 53509 - DNA, 192 bp, Acinetobacter baumannii
atgaatgatcaaaacttaaaatctgaacttatacgggtaagtctgagtgatagcaaaaaagccgatttaccctgtctagttgatagtaaaaataacatcatcaaaatatatgattaccagggcaatgagctgaagcataatcctcaggctaagactgttttttggaggaatcagtactggtattactactaa

SEQ ID NO: 53510 - DNA, 468 bp, Acinetobacter baumannii
atgaacagagtccagcatttaattccaattctccataatctttttaaaggcagcgcgtaccaaatcagtagtttttacataataagccgggttaatggccgtaaaattatttggctaaaatattgtgcaaaaatgttgcctgaattggattgggatttttcattagacttcccctttaatccccaaagtatccataaagtaaagaatagacagctccgaagagcttgctatcagtcatttgcactgtataaaaaaacatttaaaccacgctcaatcaaaaaactaaaaatttttaaagatgaatggccatcattagataaatggaaagcttcaatgctggaggcaactaagacagctgctaaaaggtttagtgacacaacagatgcaatgtcttatgcatttaattcattagaaaactttaggactaattacatgtgtagttgggatctagcagctggagaggattaa

SEQ ID NO: 53511 - DNA, 978 bp, Acinetobacter baumannii
atgtttaaaaagatagcaactaagttaaaaaatttaaaaagttttttcctgtgtagcattttaattttagcagttgtgggaatgtggataggctatccctatgggttaacacatgtaggaaatatacctaacacctctgattatggaacctttggagattcttatggtgcattaaatacattatttagtggtcttgcttttgccactcttattattaccttgattttacaaagaaaagaattacaactacagagaaaggctgttcaggaccaacagttagaaatacagaaaagtaatgaaattgctgagcaacaaaggattattgctgatcaacaagcttctttgattaatgatcaaataaaagaagcccaaagacaaaacttttacactttactactcaaatttattgaagaaaaaaatattaaagcagctaagtttactatccgtttccgtaatccttcattattagattcacatgggaatgatgtcttcaaagattttgcaaataatttcattccaaattttgataattcaattattcccgtacctccaaatgataacggtgaattcccttcacatctagaatacataatagagcaattaaaagaatcttatgaaagatgttgccgtaattataaaatgaagttcgaagagaccttatattttgaatatatagaatttatattaagctttataaataaaaacaatagtttagctgataaaaaccaaattattcaaatattcctttcatatttcacatttcatgaaactatttgtatggcatgtattgcttccataaagatgcctacactaaagaattatataaatgatttcggtttattgagaaacataaatcctgaactattaacaacagatcaaatgaaaaatctaagatcattatttaatgagaatgcgtttaaaaaaaaaccaagcacaacagcaactttagactttttatttgataaaagtgaaatttaa

SEQ ID NO: 53512 - DNA, 1407 bp, Acinetobacter baumannii
atgcatgttgcaacaccatctttaagtgcagcattgaatttaactgccaatcagcttttatggattattgatatttattcactgattatggcgggtttgattttaccgatgggtgcactcggtgatcgtattggctttaaaaaattattatttattggaactgcagtttttggtgttggttctttagctgcggctttttctccaactgcctatgccttaattgcttcacgtgctgtcttaggtctaggggcagctatgcttattcctgccactttatcaggtatccgtaatgcttttaccgaagaaaaacagagaaattttgcacttggtctttggtctacagtaggtggaggtggagcagcttttggtccactagttggtggttttgtattagagcatttccactggggagctgtattcctcattaatatcccgatcattttagtggttctagttatgatcgtgatgatcattcctaaacaacaagagaaaactgatcagccaattaacttagggcaagctttagttttggttgtagcaattttaagcctgatctattcaatcaaatcggctatgtataacttctcggtgctcacggttgtgatgtttgtggtgggtataagcacattaattcacttcattcgaagccaaaaaagagctatgacaccaatgattgatctggaattatttaaacatccagtgatttctaccagcattgtcatggcggtagtttctatgattgctttggttggctttgaattattactgtctcaagagttgcagtttgtacacgggttttctccattacaggcggcgatgtttattattccatttatgattgcaattagtttaggtggtccattagcaggtatttgtttaaataaatggggtttacgtagagtatcaagcctaggtattttagtgagcgcgctcagtttatgggggcttgctcagcttaatttttcaaccgaccactttttagcatggacatgtatggtctttttgggctttagcattgaaattgccttactggcctcaactgctgcgattatgtcatctgtcccacctcataaggcgagtgcagcaggtgccattgagggaatggcctatgaacttggcgctggcttaggtgttgctatttttggtttaatgttgtcttggttttatagccgctcaattattttgccagccgagcttccgtcagacttaattgaaaaagcgagtatctcgattggagaaaccatgcaattagcctctaatcttgaaaatcctttaggagggcaattagttgtagtggcgcagcaggcttttagctatgcacatagttgggtgcttaccctctcagcgatctgtttcttccttttaactgtatttgtctggtttagttttccgaagaaagtaaattaa

SEQ ID NO: 53513 - DNA, 1053 bp, Acinetobacter baumannii
atgacaactgaagttttaggttatgccgcgctgtcatcagaaactcctttagttccgtttaaatttgaacgtagaaccccacgtgaagatgatgttgtcattcaaattgagtattgtggtgtttgtcactctgatctacatcaagctaaaaacgattggggatttagtgcttatccattagttccgggccatgaaattgttgggcgtgttacctcaatcggtcctaaagtcacaaagtataaagttggcgatttagtgggcattggctgtatggttgattcatgccgtacttgttctgcttgtcattcagggctagagcaatattgtgaagaaggtaacatccagacttatggtggcgtagatcgccatgaccaatgcccaacttatggtggatattcacaaagcattacctgtagtcaagattttgtattaaaagtacctgaaaatctggatgctcaagctgtaccaccactactttgtgcgggtattaccacatggtcgccgctacgtcactggaatgttggaaagggcagtaaagttgctgtcgttggtttaggtggtttaggacacatggcaattaaacttgccaatgctctaggcgctgaagtgacactatttactcgctcagcaaacaaagaacaagatgcaaaacaacttggcgcacatcatgtagtgttatcaacagatgagaatcaaatgaagtcggtattaaatcaatttgatttaattgttgatactgtgccttataaccatgatttgaagccttatattccaactttagctttaaatggaaccattgtattagttggatatttaggtgaaattagcgcaaattcagtacctatgattttaggtagaaaatcaattgcaggctcggttattggtggaattaaagaaacacaagaactactcgatttttgtggtgagcataatatcgtttctgaagtagagatgattaatatgcaaaacattaatgaagcttttgaacgtatgctaaagagcgacgtgaagtatcgttttgtgattgatatgaagacactgtctgaagattaa

SEQ ID NO: 53514 - DNA, 1584 bp, Acinetobacter baumannii
atgactcagcaggtatgtgtaatatcacaactcactttggagtttccttcaaaagtgatgtttaaagaattgaatttctcacttgagcatcatcaagtatcagccttaattggccgcaatggtcaaggtaagtctttacttatgcaattgcttcacaagatttcacccactacagaaatgcatatcagtggccaaataaactggcaaaccaagcatgcatatttatctcagctcactcgtctccaatcagacacaattgcagaagctttagaggtcaaccatctttacaacgcttttcaaagagtggaacaaggcgaagctgaatacgatgattatgatttgttagaaggacattgggatcttcctaatatttgggaggctttactacgatctgctcagctaccaaccgatttagactttcctgttaagcagttgagcgaaggccaaaaaaccaagttagccttatccgcattatttttaaaaactgatcattacctattacttgatgagccaagcaaccatctcgatcaagaagctagacagtggctaattgctcagttaaagaaacatccagtaggcgctctgattattagtcatgatctgactttgctaaatgaagtcgaccatatttatcacttaaatgagcatggcctacagcacactacaggaaattatgaaaaattttatgagcaatatcagttccaaatcgaggctttagaacagtcagtacatcagcatcaacgtgaagttaagcacatgaagcaaaagcagcatgaagttttaatgaaagcccaaaaacgtgaacgtgctggcaacaaacttcgtgactcaaactcgcaagctaaaattttgctcgattttaaaaaagaacaggctgggcaaagcctaggagcaattcattctcaacatcagcgtcaaatcgatcaaagccagcaagacttgaagagtaaaaaagtacttctagaaactgttaagccccaacaatttatattcccctcttttaacaaaagaacaggagaaattcttagaattgagaacttaaaactcaactatgggacacaacaaccaattcatctcgccttaagagcttgtcaaaagattcatttggttggccgaaatggtattgggaaatcaactttgctgaaacagattgatcaatcagctgtaactgctacagatgaaattaaactgtttgcaaattgcttctatctcgatcagaactttagctttttattagaccatctctctgctgttgaaaacttaagaaatattaacccaaatattactgagttagagtggagaaatttattaggtcagcttcggattcgtggtgataaaagcacatatcccttagctcaactcagtggtggtgagaagttaaaagttgctttactaggtttgagccatgctcagcctatgcctgaacttttactacttgatgaaccagaaaaccacttagatatcgagtcaagagagttatttgcaaatgctatttctagttatgaaggtgctgtgctattagtttcacatgatttaagttttgttgaaaaatgtgggattgttgattcaatttatttaaattaa

SEQ ID NO: 53515 - DNA, 735 bp, Acinetobacter baumannii
atgaaattgaacagttataattttttgttaggtttggcgtttgcttcatctgttgctgctcctgccgctcaagcagaaattgtaattcatggcacccgtgtaatttatccgtcggatgctagagaagttacgctacaagttagcaataacggttcaaagccagcacttgtccaagcttggattgatgaaggtgatccaaaaagtactccggatcaatcaaaagttccttttatgattgctcctccaatttctcgtgttgaagcgacaaaaagtcagacgcttcgtattactgcccttccaaatgcttctcaatttaaccagaagcaagaaactgttttgtggctaaacgttttggatattccaccaagacctacctcaaaaaatgcagatacgacacctgataacttcttacaacttgcaattcgttcccggatcaaattcttctatcgtccggcttcaattaaagaagatgcgaatttagcagcagataagcttcaatgggttaaatctggtcagaatttaacggtaaaaaatccaactcctttccacattacgatgacttctgtttatcaaaaggttggagataaaaaagttgatttattgcctcaagggctaatggttaagcctttttctgaagcttctattcagcttaagaatagcaatcttcaggatatgagttttattaatgtcaacgactatggtggtcgagtcgaacaccaaataaaacttcagtaa

SEQ ID NO: 53516 - DNA, 309 bp, Acinetobacter baumannii
atgtttaatgaaatgctagattttgttaaaaataattttccttatgaattcagaaaatctcgtaatgccaaaaatgtttcacgtatccgatttgaggcaaccgctgttgggagttctttggcaattacccaaaatccagaattaaaaaaattgaaatctataaatacaaattgggcatatgaagaaccatttttaacaatgatgcgctctgatgcgagcaactcaaagcccaaagttaaagccagaatagagtttgtaagaaataaattaatggggttggatacggatgagctctctcaatattactaa

SEQ ID NO: 53517 - DNA, 723 bp, Acinetobacter baumannii
atgagctctctcaatattactaattctcatttattgacagcttatttagaatttgatgataaatgcgcggaaatagaacgatatattcaatttatgaataatctagattcaggagcggataatcatcttttagcgaaggatagtcatggttattggtcaactaaaccaataactagagaagtccaaaaaactattagagcttccacatatctattaatttataatttactggaatcttcaatgtgtgatgcattagatgcgatacatttaactttagagacagagtcagtagatatacagtttgtatctaaaaagttgaaaagaattattttctcaaatttgaaaaagggcttaagtgaaaaaagtattgatgaaatagttaataataatatcgatttacgccctatcatcatgaggcatggttataataaacgtgaattacttagtggtaatttagatggagatatcctaaaaaaaattgaaagtaagtatggctttcaatcttatccagttggtggaaaagaaggaatttataatccaaaaattattaaagaaataaaggttaagagaaatgagttggcacatggatccttatcattcgaacaatgtggccagtctataccattatttacaatggaaaagaaatacgaagaagcaaaaaaatttatgctttctgtctttaacggattaaataactttttaaataaaaaaagttatttataa

SEQ ID NO: 53518 - DNA, 1017 bp, Acinetobacter baumannii
atgcgaatagaagctgtagatttgttttgtggagtcggtggtttaacggctggacttattaaatctggtattacagtcaaagcaggatatgatattgaagctgcttgtagatttgcatatgaatacaataataaagctgtatttgtgcataaagatgtagcagaagttacgggagatgaattaaataaatggtactctccaaatacaattaaactattagctggatgtgcaccatgtcagccattttcttcttataaccaaggaaaagatactagcactgacaagaagtggcctttactttatcattttgctcgcttaataaaagaagtgcagcctgatttagttactatggaaaatgttcctgatgttataaagcataaggtatatcatgactttattaatgatttatctaaactaggttatcagattgttgcaaaagaaatagcttgtgttgattatggtgttcctcaaacacgtaagcgtcacgtggttttagcttcaaaaataggtaaagttaattttattcctcctactcatgagaaatatattacagtagcagaagttattaaagatttagagcccttagaggctggtggtaaatctaataaagatagccttcatgtagcttcaaatctaactgaaataaatttaaaaagaattagagcatcaataccaggtggaacttggagagattggcctattgatttaagagcagaatgccataaaaaagctagtggaagatcttatccggcagtttatggccgtatggagtgggataagcctgcacctacaatgacaactctttgttatggttatggtaatgggcgttttggtcatcctgagcaggacagagctatttcattaagagaagctgcattattccaaactttcccaaaagattaccaattcattcctcctacacagtatgtaaatattaaaagtgttggaagaatgattggtaatgctgtgccagtacgattaggagagataattggtttgagctttcagaggttataa

SEQ ID NO: 53519 - DNA, 441 bp, Acinetobacter baumannii
atgaacgtaaaaaccttttcaaacaagcacaaggtaactggagttacagcaattgctgtacttgtagccttgagttcttgtgaatatcgaactgctaattctagcgtcccttctaattactcatatgaaagcaaacaagtagttgcttctgaatatgaactcttaggaattaagcaaactggtgaaaaaactggtgtagctgttatccgcatagacggcttcaaattaaacgtaagcttcgattttgacggcgtagctgatagctatggtgtagctggatctgattttacagcggctgaaattactaaccttgctattgagtcagtaactgacttaagcggcaaaccttggaatgatttcaccaatcatgacgaccataaaaacataaatattttattagcgggctatatcgaccgtaataaatggttggaggcagcttaa

SEQ ID NO: 53520 - DNA, 291 bp, Acinetobacter baumannii
atgaaagattacaactgccctacttgcaagaagatgattcctgttgaccgttcaaaaatcaaagctggtgatgaggtttcattttgcagagtaacccaatcttctaaatctgctcatttttcttcaagagaaggaattgtcgattgccgtgaaggtgatgtggttttagttaaatatcgaaaagaaattattcctttaaatattaaggatgtttctccagttgatgctccaagcccgcttacctatgcctttgttggtacatgtgaatgtaaggaagctgaacatgtctaa

SEQ ID NO: 53521 - DNA, 1281 bp, Acinetobacter baumannii
atggcattaatcgttcaaaaatatggcggtacttctatgggtacccccgagcgcattttaaatgttgctcgtcgtgtgaagcgttggcatgatcacggtcacaaggttgttgtggtcgtatctgcaatgagtggtgaaacaaaccgcttacttgccctcgctaaagccattaccgaaacacctgacccacgcgagttagaccaaatggtttcaaccggtgaacaggtgacgatttccatgttagctatggcacttaattcgattggtgtggaagctaaatcctataccggacgtcaagtcggtattaaaactgacagtgcatttactaaggcgcgtattgagtcgattgacacagatgtcatgaccaatgacctagatgcaggccgtgttattgtagttgcaggcttccaaggcttcgatgccaacggaaatactacaactctaggacgtggtggttcagatacttctggtgttgccattgcagctgccctaaaagcagatgaatgccaaatttatactgacgttgatggggtttatactacagaccctcgtgttgcccctaaagcaaagaaaatcgatcgtatttcttttgaagaaatgctagaaatggcatcattaggttctaaagttttacagattcgctcagtagaatttgccggaaaatatcaagttcctttacgcgtattatcaagttttgataatgatgacgacggcgcatttgacgacgaatttaaagaaaatgtaggtacactcattactactgaggcagaagacactatggaacagccaatcattgcaggtatcgcttttaaccgtgacgaagcaaaattaacaattttaggtgtacctgatgaaccgggtattgcttctaaaattttatcaccagtaagtgatgccaacattgaagtggatatgatagtccaaaatgttgaagaagatggcacaacagatttcacgtttactgtaaaccgtgttgatttagcaaaagctgaaaaaatcttaaatgaaactgccaaaaatattggtgcacgcgaagtttcaacacgcgatgacatcgttaaagtatctatcgtgggtgtaggtatgcgctcgcatgcgggtgtagcaagcaaaatgtttactgcccttgctgacgaaggcattaacatccttatgatttcaacatctgaaattaaggtttctgtcattattgatgaaaaataccttgagcttgcagttcgttgcttacataccgcttttggtttagatcgtgaacatggtgaaagcagcgcacgcgcttaa

SEQ ID NO: 53522 - DNA, 726 bp, Acinetobacter baumannii
ttgattaataaagaaggctatcaagcagacttatttgcttcatttgatcatactgttattgaagaagagattaaatccaatcaaaaggattttgatttcgatattcgcgaatatactgttgactttttggttcaacaatttgatccaaatcctaatggaaactcagatatatatattccagaatatcaacgtgatgatgtttggacagatgagcagaaatctttatttattgagtcattacttattggtttacccatcccttatatttttgttgctgatgttgatgaaacggaagatcccgaagcagatgggagaatagaaattattgatggtgctcaacgtactcgaacaatttatcagtttagaaataacttgctaaaattaaaatcaatggaaaaaatcccctcattagaaggagcaagatattctgacttacctattgcacggcagcgccgctttaacagaacaactgttagattaattgaattgacaaatatcaatgaagacggccgtagacttatgtttgatcgtctcaatagtggtggaagtccattaactgagatggaaaaacgactgggaactgaaagtggagaatttattaagttcttacgaagattagctgatactacagcatttattgaacttactcctatggcatcaaccaaatcatcacgtagagaacgcacagaatatgttctaagattttttgcttatagagaacattag

SEQ ID NO: 53523 - DNA, 693 bp, Acinetobacter baumannii
atgaaaacattagctgaacgtcttagatatgccatggaagttttacctgccaagaaaattaaaggggtagatcttgctcgtgctgtgggcgtaaaacctccgtcagttagtgattggttaagtgggaaatccaaaacaatggaaggtgaaaatcttttaaaagcttctaaatttttaggtgttaatcctaactggttagcaacaggaatcgggttacctaatgaaaaaaataaaaagacagaagatgaggaatcatcaaatatacttttcagggaactaaatttacataaaattcctattcttgattatgttcaagcaggcttttggaatgaagttgcttatgatggaactacacctcatagttatacttatacggactatatgggaaataatcctgaagcaatattcagcgtaatagttcaaggaaatagtatggagcctgattttaaagaaggtgacatgttaattgtagatgcatcaattacacctaaacctggttgttttgttattgctcagaatggttctcatgaggctacatttaaaaaatatcgtgttttatctcatgatgaatatgggagagatatttttgaattaattcctctcaatccagattttcctacactttcatcaataacacatgacatacgcataatcggggtagtgattagacatatgcgtgattataaatattaa

SEQ ID NO: 53524 - DNA, 207 bp, Acinetobacter baumannii
atgagtaaatgccaacactgtgtagttgaagagttaataaattcttactgcggttttgcagaagttaagactctttgtgaaaaattacgaggccgatataaccgcagtgggctatcaaacactgattacaacgagttacttcaattagagaaggcacttgaccaagcgaagaagtttaatgcggagggcgcaaaaaatggacagtag

SEQ ID NO: 53525 - DNA, 324 bp, Acinetobacter baumannii
atgattgatagaatatttttattagcattcttttctttaaccctattttcaataatatactttacaagtattgagccaatttattatataaatttaaaagattttttaaaactaactccagaatattttcttcctacactattaatttccttactagctttatatgtaactgctagaaattatttaagaaagtctggaaatagtattgcagcaacttttacacttcgtagtgatttctcatccactgaaagatatatttcttcaatcattttagttaataaaaaagataagcctgtcataattaataaaatattctggagttag

SEQ ID NO: 53526 - DNA, 1299 bp, Acinetobacter baumannii
atgaaacacgaaaacaaagtctttttcttgatagacgtcaacaacatgtacgtctcatgtgagagagtctttgacccaagtttgaacaataagcctgtgattgtgctcagcaataacgatgggtgcgccgtggcgcgtagcaacgaggcaaaatccttaaatataaaaatgggtgtgccgctttttcaaattaaagacattgttcagcaacataacgtaattgttctttcaagcaactatgcaatgtatgcagaaatgtcacggcgctttcatacgatccttgcctcttacgtaactgcagaagaagttgaaccgtactcgattgatgagtgctttgtagatttcacagcttatgaaaagaactttgatttagaaaaagtcggtcacgatatgcgagcgaagatctggaaatggcttggtttgcccgtgtgcgtaggaataggtcgcagcaagacggaggcaaagatctccaaccatatagctaagaagaatcaaggctttaatggtgtttgcgatctcgtcaatatggatccatgcaacaaagaatattactttgctcaaatagatgtgagtgaagtctggggcgtgggtcgtaagcacgctaaaaagctgcaaggtatgggaattaatacggtgcttgatttagcttgtgctgagccgcgcgagatgcagaaaaaattctcgattgttatggctcgtactatctatgaactgcaaggcatctcatggattgagattgagcacaccccaccctcaaaaaagcaaatagttgcaagccggtctttcggtggtcgcgtaactgaactaacggatcttaaagaagctatctctatgtatgctcaagatgcatgtaaacgcttgcgcgatgaagggttactatgcggatgtatgattgcttttgtgcagtcaaaccctttcgatgccaatgttccgttctacaacaaatcgatcacaggttcgttttctgaacccacggattgcgcgatagattttgtcaaagcagctacgaagatgttaaacgatatctacaaagaaggagttaaatataagaagtgcggcgtagtgctgacatgtttagagccaaagtctggccatacttatgaccttctcacagattttgaagctatagaaaagaaagaacaattgatgaaaacactagataacgtacacacaaaattcgggaagagaaaacttggtataagtacatgttatgtaccaggtcgcaattggtcaatgagtagagataaattgagtagaaatccttttcagtgggatgagttattgactataaatgattga

SEQ ID NO: 53527 - DNA, 498 bp, Acinetobacter baumannii
atgagcgaaattgcaccttccattatcaagataaagccataccttcaaaaaagttttgttttatctgaggccttatctatcaaacaagttgtaccatcaactcatctactcatcccttacgcattagaaaaaatcaatgcaggtttcccctctccggctcaagattacatcgataaagcgctcgatatgaatgagcacttaatcaaaaatgcaacttcaacgtttattgtcaaagttgcatcactatcaatgctcaatgcaggtatagatattgatgacgaattgattgtggatcgtagtcttgatgcaaagcacggcgatatcgttattgcactaatcgataatgattttacggttaagcggctaatgatcgatgaaagtggccaatggcttaaagcagagaatccggattataaaaatatttacctttcggatggccaagaattaattatctggggtgttgttacctgcgtaattaaaatgataagaaagttatga

SEQ ID NO: 53528 - DNA, 636 bp, Acinetobacter baumannii
atgtgcgcaaactatgaaccaataagaaaagatcgtgtgtacctcctagatctattcgaaccaacattcgactataagaatgatgtttatccgggttatgactgccctctttttttttctaaagatgggaatattgaatggcgccaagttaagtttggcatgatcccaccttggaaccatgatttaaaattttctaaatatacttacaacgctagaactgagacagttgataagaaaccaagttttcgtcatgcttgggctaaaagtcagtttgctttgatacctgtagaaaagatctatgaaccgagatatgtgaatggtaaagcggaaagatggggaatttatagagaggatggcttgccttttacagtagctgctatttacgattctactatcattgatgggcaacaagttcgatcaatgtcaatgctgactattaatgccgacaaccacccttttatgtcacagtttcacaagccagaagatgagaagagatctatcatcgtcattcctgaagagtatcgagaagattggctaaactgcaaaagagaagatgctgatcaatttttctttgagatgcccctaggtggatttactgcagaatattgccctaaaccaagaaaatcagccaattaa

SEQ ID NO: 53529 - DNA, 636 bp, Acinetobacter baumannii
ttgaccccttggcttccagatttaccccatcaacttctaagttatggatggtttatatctacaactatactactgagtgctttgctgctagatgcaacaccatatatgaatagattagagcaaagtgcatttattaatatcgataaatggataattaatatcggtttaatctctcttagtatttttcttatttctgtcttttttattattggtgaacctaatcatatctggttcataatttatagtctgattccgatctgtttcttattttacccagaatctttccgccctctcttctatatttttggatacaataaagaagataccaacttaacagataaacaaataatgtatagaagtattggtattatcttctttaggctattctgggtttttggctttagctatttatttataaaatcttcctcacaaccttttatgtatgctgcaggcttgattctaggaagtatattaataaccggatttagtgccaagaatctctcttctacacttaaatatttaacctacatcgccttatgtatagcaacgttatacaccatactcttccctttgatattaatttattatttatatcaaagctatcaagcaaaaaaaatcattttatctagctgctaa

SEQ ID NO: 53530 - DNA, 273 bp, Acinetobacter baumannii
atgagtagagatcataagtctgatctcgagtttacggtgaaatacgatactattactaaaaaagcaaatgtagcgtatcaaagacctaaaaaagatcaattgaatgtaaatattcatttgaaatggaattgtaaattgacaaatgatcattgtactggtgtaactgtcaatgagtcagaaggaaccattgaatttaaaaatgtgcagttagatgatggtcgtatcataaatggtaaatttgcccatctaggggtaaatgatctggtaggctga

SEQ ID NO: 53531 - DNA, 354 bp, Acinetobacter baumannii
atgactgcctataacgtaacgaaagctggtgttcgtgcgctgtctgaaacactttcggctgagcttcgcaaattcaacattaaagtgaatgtgctttgcccgactttggtgcctaccaatatcattaaaaatggtcgtattccgggccgttattcaaaacttgcagaccatgcgctcatgaactacgcactcaccacaagtgatgatgtagccaaactcacacttaaccgtcttgatcaggatgagctttataccatccctcaaatcgatgcgaagttgttctggctgatgaaacgtgcatcaccaagtttgtataccaagttccttggtacctcttacaaattatttaaataa

SEQ ID NO: 53532 - DNA, 930 bp, Acinetobacter baumannii
atgagaagtaagatatttattagtgttattttatttggcttaagtgcctgtgctgcgaaagcagatcagaaccaattaaaagatagagagttagataaacttgttgcatgtaatggaggcaacacagaatatactaatatagatggttattttactattccagattttggttgtccatatgatggtaagaataataaaattggtaatgctatggtttatctaattgctccagatcataataatgattatatacagttaaataatatgaaaaatataaaaggaaaatatatttatatagtgccttttaaatttttaaatcaagataagaaatctggaagtttttatattgcaaaagataattatagctacgaagtttatttcaatgaaggaggtaaatgggttcgtaaaccagatataattgtgagtaataataaagttagtgtacttagcgagataaatggttttcttaatgatagagctaaatctttttcaaaaaaaacagaaaaaaaattaaaaaaatataaaatggatattaaccatgatggagtggaagattttattgaagttgtaggaaaagataataagccaagctcaatacatattttaaatggattggataattctttgatttataagaatgataaaatttttaacaactcctttaatgaatgcaattatagttcatttgataatatttctattagtaaaaataattttactttagaatatagtacatgtgcagatagctcccaaataggatatagatacgccacttttaaaacagataaaaataaagagccgatacttatacaagataattaccttgtttctcctcgagaagaaacatcagataattttaaaccgaagaaagtaaattgtcttacaagttcaaaaattacttttaaccaatttaatggtagatgtggttaa

SEQ ID NO: 53533 - DNA, 1395 bp, Acinetobacter baumannii; identical to SEQ ID NO: 52600

SEQ ID NO: 53534 - DNA, 4908 bp, Acinetobacter baumannii; identical to SEQ ID NO: 45835

SEQ ID NO: 53535 - DNA, 3177 bp, Acinetobacter baumannii
atgttgaacagtattcatcaagttttagatagtttgggtattagcccgcagaaacgtgctattcatgttcaatttacgtctccgatattgaatgaccaagtatttctgcaaagaattgatggtgtacatgcactcaatgatggtttaaaagcagaacttttatgcctatcgacaaatgcaacgattcaacttaaatcttttattggtgttcaggctgctgtagatattgtgacggagcgaggtgaattaactcgcgttacaggcattattactcatgctcaacagggccaatcagatggaagtctaactttatataagctgaccttagaagatccaaccgcattatggaaatatcgccgtaattcacgtgtatttatgaataaaagcgtggttgagatatgggaaatattatttaaagaatggcaaactaaaaatccgctatttgctgcaagtttaagtttagatttaagcggtctaacacaaacttatgatgtgcgtccttttgtgatgcaacataacgaaagtgactggaatttccttacacgcttacttcgtagtgaaaatatcagttggctcattgatgaagctcagcatattgttccaagtacagatacatctattcaagctcagaaactcaggttaattgatgccaatagtcaatatcagcctttagaccgtaaaacgattcgttaccaccgtagtagtgcggtcgaacaatatgacagtatgactcgcttaactgccgagcgttctcttcaacccaatgttatgcatatacaacgttggcaagcagaaatattagatcaagaagaagggattggaagtgttcaaagtaagcatcagcatagtgaacattatgacaatgctacacttggcttggagcaagcttggaactattcgcctgcatggattggtgacttaaagggtgaggatggggttactaaatctggaaatcaacaagttgaacgattaaaccagaacctccacaattactacgaggcacaggcgaaacgctttattgcacaaacaacagtccgcgatgcctatgtgggttactatttcgaattaaatgaacacccagaaatagaccagcatgaaagctcagataaaagctttttgattgtttctaaaaacttctttaatcagaataatttacctaaagatttaaatgatcaaatcaatggtttattggcgcaaagtaactgggcaattcaaaaccccgagaacagtgatgaacgccaagcgaatcaactgattttacaacgtcgtcatattccaacaacaccagcttataacccgcaaattcatagtccagtcactcatccacaacgcgcaaaagtggtgggtcctgaaggtgaagaaatctatgtagatgagtgggggcgtattaaagtccgcttcctatttacgcgtagtgatgaccatagccatgatggtggagcaggaaccaacaacaatgataccgattcagcttggattgacgttctaacgccgtgggctggagaaggttatggtgcgcggtttttaccgcgtatcggtgagatcgtcgttattgacttctttaatggcgatatcgaccgaccgtttgtgatgggtcgaattcatgaggcacagcgccaaccaaccaaatttgataacaaaggaaagcttcctgatactaaaaagctcagtggtatccgttctaaagaagtgtcaggtggtgggtttgggcaactcagatttgatgatacaccgggacaaattagtacccaactccaaagcagtcatggtgcaagccagctaaatctcgggaaattgagccatcctaaagataaagcggaaagtgaagaccgcggagaaggctttgaactgcgtactgaccaatggggagctttacgtgcggggcaaggtttattggtatccactcataaacaggataacgctaaaggagaccacctcgatgccgaagttgcgaaaaagcaacttgagggtagtcaaactaacagtaaagcactgagtgacattgctaaaaaccagaaaaccgatgaaatagaatcgattgaacagttaaaagattttgcctcacaaattcagcagcaaatcgctaaatttgaaaaagctttacttcttttgagttcaccggatggtatagctctaagtagttcagaagatattcacatctcggctgatgcacaaatcaatcagattgctggagacagcattaatataagtactcaaaagaatgtgattgcccatgcccaaaataggctgagcctttttgctgctcagagcgggctaaaagctgttgctgcacaaggtaaggtagaaatacaagcccagtcagatgctttagatgtacttgctaataaaggtatcaccatttcttcgacagaagactgtattgaaattagtagtcctaaagaaattgtaattactggtgcaagttcacaaattaccttaaatggttcgggaatctttccaaaaactggcgggaaatttcaggtcaatgctggacagcatgtgttccaaggcggcgcatcggcaagtgttcaatctagtttgccaccgccaccaaaacgtgtacaaggtgtacttgagttatttcatgaatatgcacatggtgagtttgtaaaaggtggaagttatagggttgtcgataacttcggaaaagaggttactggcaagctggatgataagggatttgcaaaagtttctggcttagcaacaggtgcagtaaaagtcttcttcgaatcagatcaccgtgatccttgggatactgcaagtgactttaaacgtccagttgagtggccaaataagaatgatgcggatagtgagcaatcagattcattaattgcacaaatgagtaaaacagcccagtccaaacttggtgaattatctaaacaattaaccaatcctacgaatattatgaaaaatattcaaactgcacaaagcataaaatctgaaggagcaaaggctttaatgccaatgttaaaaactcaggcgcagggattagtaactgatcaagtgaagagctttttaccaatttcagaagcaggtcaaaaaatagggaacaacattgaacttacatctattcaaaaaatgaatgatttcaataaatcaggctctattgatggcaatagtttggtcaataatacgcttcatcaatatttgcaaagcccttttaaaaagaattcatag

SEQ ID NO: 53536 - DNA, 699 bp, Acinetobacter baumannii
atgaaaaataatattttttttaaacttattgcaattatattttatgtttttggtacatattggtttttgctgttcctttatgatttatatttctataaacatttttataataagttttgctcatttttttactgcttagaatatattgaatttaaagactatgcttcaattatagcaactcttattgggtctgcttttgttgcctatagtttattttcatggaaagatactttcaagttcaacttagttaaaaatgatattgagcgtttccgtttcgctactcataatttaatgaaaaatttgaactctcaattcggatcatttgctgatcaggttgatagtattgaaattgcaaagggaaaaggcatagaagtaacagattttaatattacgttagttcattatgaagattgtattactcaactaaacgcattgagaggttcaactattgaactctacaatgagttcacatttgaaataaaatattttattttacatggaggtaaaattgatgctgatgacttcacaacaaaactcaaagatttcttaaattcattagatgagcttcatagtgcatttaatgataataatattactgaatatctaaatgcttatcctaaatgtgaagagaagaagcgcattttcaccaaggatgctggaaaattattaagtgaaatttataaaattcttaataaataa

SEQ ID NO: 53537 - DNA, 690 bp, Acinetobacter baumannii
atggttaaaaatgcagtaaaaattgggtggttacttactttcatctggggtggaattattatctgtttatcaatcaataaacccttcccatcttccttaaatgaaatgggtgatttctttgcaggtatattttcaccacttgcatttctttgggttgtggttggttattatcagagtcaacaagctctgattatgcaagcagaggacctgagtcaaaacactaaagctctaactgcacaagttgaagaaatgaaaaaaacaaccgagatacaagaaaatcaattattagagatgaagcaacaatatctagaattaggaaaacaagaacgtataaaaatgcagccattttttgatataaaatttgtaagagtgatagatgagataaatgacaatgagcattttattaatataagatttgatatcgaatgcatgagtggatttgcaagaactatatcattatcatttggtacaattgatagcgaaagtgattttattaactatataaaagaaggagaaataaaaaataatttcataaaagtacgtgctaaaggccttggagaacttaacagtaaggcattagacattatttactatgataaaaaccattcattgacgaaacaaagatatagattttttcataataatgtggataaaagtatactttcttttgaaaagtttattataaattaa

SEQ ID NO: 53538 - DNA, 1179 bp, Acinetobacter baumannii
gtgtcgttatttaataatataaaaaaaattctgctcgggaatggagctgcacaattaatacaatttgcgttccttccactttctgcttttctatatacacctgaacaatttggtgtttttggtacgatacaggcttatagtacagcccttacagtttttattagccttcaactatatgtagcaattccttttgaaaaaaatcaatttttattaaatgatttaatagttttaaactttaagtgtatttttgctgttacaacttttttgttaatactatatggtctatttaatattgattatttttcaattttagcaatttttttagcaagtatcactgctgtaactaatacattacgtagtttaattgtttactcagggaatttcactaggttatcaactagttatgtgatccgagctcttgtaatagttatatctcaagcggccttgtcttttagtactgctataaatggattaatttatggtttattgctaggtgaagtaatatatagtgggttattacattattttattaaaaaaagtattgatttaccaagttttagtttacgctctttatttaaagttcccataaaaaatatatttacgaaatatagaccatttagcttatacggttcaatattagagctaacgtcagtatttattttttatgggcctatagttatattttcttatatctttaatgggaataataattatatagggcaatatagttttatatcccgccttgtttggcctcctataattttaatatctacatcttgtactaacgctttatattttcatattactaaaattaataatttagaagtaaagtcattaactttaaaagcaacggcattaggtggtttcataatagctattgctccttttttaggttggtgtggtcattatataattaatttgttaataaaaactcccacatggaatttagtgtctgatttcggattttatattataactttagcttttgtatttatgggaactatatatgttagagttgtaataataattctttattttcgagagaaaataggcatatctgacgtgtttgaaattcttaaaagttatactgttatatattttatttatagtcttttattaattttaggtattttattttttgttttaaaagaaatgaaaaatcaaaatattattaaatga

SEQ ID NO: 53539 - DNA, 336 bp, Acinetobacter baumannii
atgggactttcatcatttaaccgtgcacgggaaagacaacaaatgacagaaacaaaaattgctgaactcgaagaacaactggtaacagtaaagggcgaatttattgcctttcaaaatgataccgaagcaatgaaagcacgtattgctgaacttgaatcaggtgaaggtggtcaaacacctgaagatgaccaaaaaccaagtgatactcaaccacaaccaattaactatgctggtctaaaagtagatgagcttcgagctgtactaactgaaaaaggcattgcatttgaagcaggtgctaaaaaagatgaacttttagcattaattccaaaggaataa

SEQ ID NO: 53540 - DNA, 642 bp, Acinetobacter baumannii
atggcttggtcacgtaatgaaatggcacaacgtgctgcaaaagaactcgaagatggtttttatgtcaatttaggtattggcttacctacccttgttgccaattatattcctgaaaatattaatgtttggcttcaatctgaaaatggcttattaggtattggtgaattcccgactgaagaaactgtggatgccgatttaattaatgctgggaaacaaacggttactgctcgctctggtgcagcctttttctcaagctcagaatcttttgccatgattcgtggtggccatgtcaacattgcaattttaggtgcaatggaagtttctgaaaaaggagacttagcgaactggatgattccgggtaaaaaagtcaaaggtatgggcggtgcaatggacttggttgttggtgttcaaaaagttgttgttcttatggaacactgcgcaaaagacggtacaccaaaaatcgtgaaaaactgtagtttgcctttaacaggtaaaggtgttgttcatcgcgtaattacagacttaggcgtaatggatattacgccacaaggtgtagagctcattgaacttgctaaagacgtaacgctcgaacaaattcaagctgctacaggtgtcgagttttataaaaccttagtcgcgtaa

SEQ ID NO: 53541 - DNA, 864 bp, Acinetobacter baumannii
atgcctaaaaaatttgaggactttaataatcctaggaaaaaagcacttgcagggatgaaacaaagcatttcagctgaactttgggacaaaaatcttaattttttaactcaattaagagccaagattgcgaaacatccagtatctcatcatcctgcaatagaaactttaaataacggtgaaattaataaagaaaacttaaagcgtattcatttagagtatcgccatgcaatcgtacaaacatttacagacgctttattaatggctcaataccagacaaagcagttagaacctaggttgcatgcaggtgcaaagatgtttccgcgctgtcttttgagtcttaatatatttgatgagtttgggtttcgacctgggaccgacaaagacggttattatcaaggtaacccagaatatgcacattatcctttatttgaagatgtccttgatgattttggagtgacggaggaagagcgccggagttatcaaccaacagaaattgcacatcagctgagagagtttctagaaaattcctataaagactataaagccgtttctgctttattagctgtagctgaagaagaagttattttgtacagtccacctttacgaaaagcaaccagtgctgtaggtatagcggtggagggtggtggctattaccatgtgcatggagtatctgaagatgaaactgctgaggcagcagatgacgatcatgaagaagatctatggtttattttaatgcaagcttgtacagaagaagactacacttatttagaaaacctatgcctcgaatattgtgatttatgggaaaagttttgggatgttcaaatagaaagctcaaaatcaatcctgaaacaaaatttagcttaa

SEQ ID NO: 53542 - DNA, 1626 bp, Acinetobacter baumannii
ttgattgagtattcaaccactgaactggttgaaaatagagcgaatgaatatgatgtaaatcgttctacattgtggaagtggcttagagattatcgtgaaaataactctctaatgacgttgattcccaaaaaacgaggttggacaactgaaaaatcaaggttgtcacctcaagtgagcaatatcattaaacaagctatcaatgatgaatatttgaatgcgaagaaacctagtatttccaaaacgattgaaattgtaaaagcagagtgttcacggcttcagcttgaagcaccgcatgaaaactctattcgtagaagaatcgaggctttaaataattaccaagtaacgaaagcacgtcttggatctaaagctgcaatagataaatttaaggctgctgcgggttcattcccaaatgctgattaccctttggcatatgtgcagattgatcatacacctctagatattgaaatcgtggatgacgagttcagagaagcgattggaaaacctcacttaaccttggcaatcgatgttttcagtcggatgattgttggatattacctatcactagaagcaccaagtacgacttcagtggcgatgtgtatagcatcttgtattttgtcaaaaaaacgtaagttgatcgaactaaatattgatgctgaatggcaggtcgaaggtattatggactcggtgcatacagataatggacccgattttagaaccaatcacatcagtaaagcttgcctaaaatatgggattcattgggaatatagaccaattggtggggcgagatttggcggtcatattgaacgtatgcttggtattgtcaatcttgaaatgcatgtgctggatggtacaactttttcaaatgtgcagcagcgaggaacttatgattccgctaaacaagcctgtatgacattaaaggaacttgaatactatatcgtttattggattactaaagtttatcatcagaagaagcattcagctttaggaacatcacctattgttaaatgggaagaaggtgtttggggaacgaagacgacagcaggaacaggtttgaaagaacgtgtatcagatgaagataccttgtttattgattttctacctgaatttgaagcgaccattcagcgtacaggggtgcagaaagataacttattctattttgcagactgtttaaggcaatgggttaattctattgatccagacgacaataatcgaaagcgcaaaagaaaattcttatttaagcgtgatccgagggatatttcacagatttggttttatgagccattttctaatacctattttaaagtacccactgcaaagcgagagataccaccgattagcttatttgaatatagacaggtacagaactatctcaagaatgggcgtcaggatgttcagaatcaggatgagatttacaaggcgattttacatctacgtgagcagcttaatcaggctcgaagcttgactcgaaagcaacgtcgctcaaaccaaagaaaaaaggaaaatgaaaaagccattactcagctatccgaacagaatcagtctaaaaaggctgtagtttctgaaagccttcagacaagtgatgatttgtggagtactcctttaactgcatttgatgatttaaggtga

SEQ ID NO: 53543 - DNA, 1626 bp, Acinetobacter baumannii
ttgattgagtattcaacgactgaactggtcgaaaatagggcgaatgaatatgatgtgaatcgctcaacattgtggaaatggcttaaagattatcgggaaaataattctctaatggcattgattcccaaaaaacgaggttggacaactgaaaaatcaaggttgtcacctcaagtgagcaatatcattaaacaagctatcaatgatgaatatttgaatgcgaagaaacccagtatttccaaaacgattgaaattgtaaaagcagagtgttctcggcttcagcttgaagcaccgcatgaaaactctattcgtagaagaatcgaggctttaaatgattaccaagtaacgaaagcacgtcttggatctaaagctgcaatagataaatttaaggctgctgctggttcatttccaaatgctgattaccctttggcatatgtgcagattgatcatacacctctagatattgaaatcgtggatgacgagtttagagaagcgattggaaaacctcacttaaccttggcaatcgatgttttcagtcggatgattgttggatattacctatcactagaagcaccaagtacgacttcagtggcgatgtgtatagcatcttgtattttgtcaaaaaaacgtaagttgatcgaactaaatattgatgctgaatggcaggtcgaaggtattatggactcggtgcatacagataatggacccgattttagaaccaatcacatcagtaaagcttgcctaaaatatgggattcattgggaatatagaccaattggtggggcgagatttggcggtcatattgaacgtatgcttggtatcgtcaatcttgaaatgcatgtcttggatggtacaactttttcaaatgtacagcagcgtgggacttatgattccgctaaacaagcctgtatgacattaaaagagcttgaatactatatcgtgtattggattactaaagtttatcaccagaagaaacattccgctttaggaacatccccaatcgttaaatgggaagaaggtgtttgggggacgaagacgacagcaggtacaggtttgaaagaacgtgtatcagatgaagataccttgtttattgattttctacctgaatttgaagcgactattcagcgtacaggggtgcaaaaagataacttattctattttgccgactgtttaagacaatgggttaattctattgatccagaggacaataatcgaaagcgcaaaagaaaattcttgtttaaacgtgatccgagggatatttcacagatttggttttatgagccatattctaatacctattttaaagtacctaccgcaaagcgagagataccaccgattagcttatttgaatataagcaggttcagaactatctcaaaagtgaacgtcaggatgttcagaatcaggatgagatttacaaggcgattttgcatctacgtgatcaacttaatcaggctcgaagcttgactcgaaagcaacgtcgctcaaaccaaagaaaaaaggaaaatgcaaaagccattactcagctttccgaacagaatcagtctaaaaaggctgtagtttctgaaagtcttcagacaagtgatgatttgtggagtactcctttaactgcatttgacgatttaaggtga

SEQ ID NO: 53544 - DNA, 1626 bp, Acinetobacter baumannii
ttgattgagtattcaacgactgaactggtcgaaaatagggcgaatgaatatgatgtgaatcgctcaacattgtggaaatggcttaaagattatcgggaaaataattctctaatggcattgattcccaaaaaacgaggttggacaactgaaaaatcaaggttgtcacctcaagtgagcaatatcattaaacaagctatcaatgatgaatatttgaatgcgaagaaacccagtatttccaaaacgattgaaattgtaaaagcagagtgttctcggcttcagcttgaagcaccgcatgaaaactctattcgtagaagaatcgaggctttaaatgattaccaagtaacgaaagcacgtcttggatctaaagctgcaatagataaatttaaggctgctgctggttcatttccaaatgctgattaccctttggcatatgtgcagattgatcatacacctctagatattgaaatcgtggatgacgagtttagagaagcgattggaaaacctcatttaaccttggcaatcgatgttttcagtcggatgatcgtagggtattacctatcactagaagcgccaagtacgacttcagtggcgatgtgtatcgcatcttgtattttgtcaaaaaaacgtaagttgatcgaactcgatattgatgctgaatggcaggtcgaagggattatggactcggtgcatacagataatggccccgattttagaaccaatcacatcagtaaagcttgtctaaagtatgggattcattgggaataccgaccaattggtggggcaagatttggcggtcatatcgagcgtatgcttggtatcgtcaatcttgaaatgcatgtcttggatggtacaactttttcaaatgtacagcagcgtgggacttatgattccgctaaacaagcctgtatgacattaaaagagcttgaatactatatcgtgtattggattactaaagtttatcaccagaagaaacattccgctttaggaacatccccaatcgttaaatgggaagaaggtgtttgggggacgaagacgacagcaggtacaggtttgaaagaacgtgtatcagatgaagataccttgtttattgattttctacctgaatttgaagcgactattcagcgtacaggggtgcaaaaagataacttattctattttgccgactgtttaagacaatgggttaattctattgatccagaggacaataatcgaaagcgcaaaagaaaattcttgtttaaacgtgatccgagggatatttcacagatttggttttatgagccatattctaatacctattttaaagtacctaccgcaaagcgagagataccaccgattagcttatttgaatataagcaggttcagaactatctcaaaagtgaacgtcaggatgttcagaatcaggatgagatttacaaggcgattttgcatctacgtgatcaacttaatcaggctagaagcttgactcgaaagcaacgtcgctcaaaccaaagaaaaaaggaaaatgcaaaagccattactcagctttccgaacagaatcagtctaaaaaggctgtagtttctgaaagtcttcagacaagtgatgatttgtggagtactcctttaactgcatttgacgatttaaggtga

SEQ ID NO: 53545 - DNA, 1626 bp, Acinetobacter baumannii
ttgattgagtattcaacgactgaactggtcgaaaatagggcgaatgaatatgatgtaaatcgttctacattgtggaagtggcttagagattatcgtgaaaataactctctaatgacgttgattcccaaaaaacgaggttggacaactgaaaaatcaaggttgtcacctcaagtgagcaatatcattaaacaagctatcaatgatgaatatttgaatgcgaagaaacccagtatttccaaaacgattgaaattgtaaaagcagagtgttctcggcttcagcttgaagcaccgcatgaaaactctattcgtagaagaatcgaggctttaaatgattaccaagtaacgaaagcacgtcttggatctaaagctgcaatagataaatttaaggctgctgctggttcatttccaaatgctgattaccctttggcatatgtgcagattgatcatacacctctagatattgaaatcgtggatgacgagttcagagaagcgattggaaaacctcacttaaccttggcaatcgatgttttcagtcggatgattgttggatattacctatcactagaagcaccaagtacgacttcagtggcgatgtgtatagcatcttgtattttgtcaaaaaaacgtaagttgatcgaactcgatattgatgctgaatggcaggtcgaagggattatggactcggtgcatacagataatggccccgattttagaaccaatcacatcagtaaagcttgtctaaagtatgggattcattgggaataccgaccaattggtggggcaagatttggcggtcatatcgagcgtatgcttggtatcgtcaatcttgaaatgcatgtcttggatggtacaactttttcaaatgtacagcagcgtgggacttatgattccgctaaacaagcctgtatgacattaaaagagcttgaatactatatcgtgtattggattactaaagtttatcaccagaagaaacattccgctttaggaacatccccaatcgttaaatgggaagaaggtgtttgggggacgaagacgacagcaggtacaggtttgaaagaacgtgtatcagatgaagataccttgtttattgattttctacctgaatttgaagcgactattcagcgtacaggggtgcaaaaagataacttattctattttgccgactgtttaagacaatgggttaattctattgatccagaggacaataatcgaaagcgcaaaagaaaattcttgtttaaacgtgatccgagggatatttcacagatttggttttatgagccatattctaatacctattttaaagtacctaccgcaaagcgagagataccaccgattagcttatttgaatataagcaggttcagaactatctcaaaagtgaacgtcaggatgttcagaatcaggatgagatttacaaggcgattttgcatctacgtgatcaacttaatcaggctcgaagcttgactcgaaagcaacgtcgctcaaaccaaagaaaaaaggaaaatgcaaaagccattactcagctttccgaacagaatcagtctaaaaaggctgtagtttctgaaagtcttcagacaagtgatgatttgtggagtactcctttaactgcatttgacgatttaaggtga

SEQ ID NO: 53546 - DNA, 1299 bp, Acinetobacter baumannii
atggatttcaatacccttgaccaagaaacggtacagaaaaaacaaaagtttcatcaaattttgtatgtacaggtcatctttgcaattattttgggcattttaattggtcatttttacccagaacttggcgaaagcttaaaaccgcttggtgatgcattcatcaaaatcgtcaaaatgattattgctcccgtaatctttttgacagtggttaccggtattgccagcatgacgaacatgagtcgagttgggcgagtgacaggtaaggcaatgctatatttccttactttctctagccttgcgcttgtggttggtatgattgtggctaatatcattcaacctggtaaaggcctaaatattgacccggcaaccttagtcaacgataaagtaaatagttacgttgaaaaggctcatgctacaaatatcactgactttttcatgaatattatcccgcaaacattagtgagtccgcttgctggtggtgaaattttgcaggttctatttgtggcagtcctatttggtatttctttagctgcattgggtgaccgtgcacgtccaattactgattttttaaataacctcacggctccggttttctatttggttggcatgttaatgaaacttgcaccaattggagcttttggtgctatggcatttactatcggtgcgtatggaattgaatcaatcggtaatttattactattgattatgaccttctatatcacggcagtgctgttcgtattaatcattttaggggctgtagcacgctacaatggcttttcaattatcgatttaattcgttacatcaaagacgaactctggttagttctaggtacaagttcttctgaagctgctttaccatctttaatggataaaatgcaaaaagcaggttgtgaaaaatctgtagtaggtctagtcattccgacaggttactcatttaaccttgatggaactaacatctatatgactatggcggctttatttattgcacaagcatgtaatgttgatttatcaattggtgagcaggttgcattgcttttagtggcaatggtgagttctaaaggtgcggcaggggtaacgggcgcaggctttattacactcgcagctactttatcggtagtacctgctgtaccagtggcaggtatggcgcttattttaggtattgaccgttttatgtcggagtgtcgtgcattaaccaatttaattggtaatgcatgtgcaaccattgtggttgcccgttgggacaaagctctggacaaggacgttctagataaagctttacgcaaatcgaaaacgaattaa

SEQ ID NO: 53547 - DNA, 291 bp, Acinetobacter baumannii; identical to SEQ ID NO: 46180

SEQ ID NO: 53548 - DNA, 576 bp, Acinetobacter baumannii
ttgaaagaacgtgtatcagatgaagataccttgtttattgattttctacctgaatttgaagcgactattcagcgtacaggggtgcaaaaagataacttattctattttgccgactgtttaagacaatgggttaattctattgatccagaggacaataatcgaaagcgcaaaagaaaattcttgtttaaacgtgatccgagggatatttcacagatttggttttatgagccatattctaatacctattttaaagtacctaccgcaaagcgagagataccaccgattagcttatttgaatataagcaggttcagaactatctcaaaagtgaacgtcaggatgttcagaatcaggatgagatttacaaggcgattttgcatctacgtgatcaacttaatcaggctagaagcttgactcgaaagcaacgtcgctcaaaccaaagaaaaaaggaaaatgcaaaagccattactcagctttccgaacagaatcagtctaaaaaggctgtagtttctgaaagtcttcagacaagtgatgatttgtggagtactcctttaactgcatttgacgatttaaggtga

SEQ ID NO: 53549 - DNA, 1014 bp, Acinetobacter baumannii
ttgtcaaaaaaacgtaagttgatcgaactcgatattgatgctgaatggcaggtcgaagggattatggactcggtgcatacagataatggccccgattttagaaccaatcacatcagtaaagcttgtctaaagtatgggattcattgggaataccgaccaattggtggggcaagatttggcggtcatatcgagcgtatgcttggtatcgtcaatcttgaaatgcatgtcttggatggtacaactttttcaaatgtacagcagcgtgggacttatgattccgctaaacaagcctgtatgacattaaaagagcttgaatactatatcgtgtattggattactaaagtttatcaccagaagaaacattccgctttaggaacatccccaatcgttaaatgggaagaaggtgtttgggggacgaagacgacagcaggtacaggtttgaaagaacgtgtatcagatgaagataccttgtttattgattttctacctgaatttgaagcgactattcagcgtacaggggtgcaaaaagataacttattctattttgccgactgtttaagacaatgggttaattctattgatccagaggacaataatcgaaagcgcaaaagaaaattcttgtttaaacgtgatccgagggatatttcacagatttggttttatgagccatattctaatacctattttaaagtacctaccgcaaagcgagagataccaccgattagcttatttgaatataagcaggttcagaactatctcaaaagtgaacgtcaggatgttcagaatcaggatgagatttacaaggcgattttgcatctacgtgatcaacttaatcaggctcgaagcttgactcgaaagcaacgtcgctcaaaccaaagaaaaaaggaaaatgcaaaagccattactcagctttccgaacagaatcagtctaaaaaggctgtagtttctgaaagtcttcagacaagtgatgatttgtggagtactcctttaactgcatttgacgatttaaggtga

SEQ ID NO: 53550 - DNA, 171 bp, Acinetobacter baumannii; identical to SEQ ID NO: 51532

SEQ ID NO: 53551 - DNA, 576 bp, Acinetobacter baumannii
ttgaaagaacgtgtatcagatgaagataccttgtttattgattttctacctgaatttgaagcgaccattcagcgtacaggggtgcagaaagataacttattctattttgcagactgtttaaggcaatgggttaattctattgatccagacgacaataatcgaaagcgcaaaagaaaattcttatttaagcgtgatccgagggatatttcacagatttggttttatgagccattttctaatacctattttaaagtacccactgcaaagcgagagataccaccgattagcttatttgaatatagacaggtacagaactatctcaagaatgggcgtcaggatgttcagaatcaggatgagatttacaaggcgattttacatctacgtgagcagcttaatcaggctcgaagcttgactcgaaagcaacgtcgctcaaaccaaagaaaaaaggaaaatgaaaaagccattactcagctatccgaacagaatcagtctaaaaaggctgtagtttctgaaagccttcagacaagtgatgatttgtggagtactcctttaactgcatttgatgatttaaggtga

SEQ ID NO: 53552 - DNA, 576 bp, Acinetobacter baumannii; identical to SEQ ID NO: 53548

SEQ ID NO: 53553 - DNA, 918 bp, Acinetobacter baumannii; identical to SEQ ID NO: 49475

SEQ ID NO: 53554 - DNA, 576 bp, Acinetobacter baumannii
ttgaaagaacgtgtatcagatgaagataccttgtttattgattttctacctgaatttgaagcgactattcagcgtacaggggtgcaaaaagataacttattctattttgccgactgtttaagacaatgggttaattctattgatccagaggacaataatcgaaagcgcaaaagaaaattcttgtttaaacgtgatccgagggatatttcacagatttggttttatgagccatattctaatacctattttaaagtacctaccgcaaagcgagagataccaccgattagcttatttgaatataagcaggttcagaactatctcaaaagtgaacgtcaggatgttcagaatcaggatgagatttacaaggcgattttgcatctacgtgatcaacttaatcaggctcgaagcttgactcgaaagcaacgtcgctcaaaccaaagaaaaaaggaaaatgcaaaagccattactcagctttccgaacagaatcagtctaaaaaggctgtagtttctgaaagtcttcagacaagtgatgatttgtggagtactcctttaactgcatttgacgatttaaggtga

SEQ ID NO: 53555 - DNA, 819 bp, Acinetobacter baumannii
atgcttggtatcgtcaatcttgaaatgcatgtcttggatggtacaactttttcaaatgtacagcagcgtgggacttatgattccgctaaacaagcctgtatgacattaaaagagcttgaatactatatcgtgtattggattactaaagtttatcaccagaagaaacattccgctttaggaacatccccaatcgttaaatgggaagaaggtgtttgggggacgaagacgacagcaggtacaggtttgaaagaacgtgtatcagatgaagataccttgtttattgattttctacctgaatttgaagcgactattcagcgtacaggggtgcaaaaagataacttattctattttgccgactgtttaagacaatgggttaattctattgatccagaggacaataatcgaaagcgcaaaagaaaattcttgtttaaacgtgatccgagggatatttcacagatttggttttatgagccatattctaatacctattttaaagtacctaccgcaaagcgagagataccaccgattagcttatttgaatataagcaggttcagaactatctcaaaagtgaacgtcaggatgttcagaatcaggatgagatttacaaggcgattttgcatctacgtgatcaacttaatcaggctcgaagcttgactcgaaagcaacgtcgctcaaaccaaagaaaaaaggaaaatgcaaaagccattactcagctttccgaacagaatcagtctaaaaaggctgtagtttctgaaagtcttcagacaagtgatgatttgtggagtactcctttaactgcatttgacgatttaaggtga

SEQ ID NO: 53556 - DNA, 753 bp, Acinetobacter baumannii
atgggtagatttggtcttccggcaattgaaaattttatacgcatgcattatgtatatcctaaaattcctaatattatttcaattagtcattatttaaataattattattccaagaaaagtcatcggcctaatataaatcaaatggttttaccaattgtattagattgccatttggctgctgaaaagccatcgatagagcagggtattaactttatatatgctggtaatcttggaaaaaaggataatattattgattttattaactatcttccaacattacatcaacaattaaattgtccaattttatttaatatagctggcgtaacattctctcaattaaaagatcttctaggaagtgaaaactttgatagaattcaatcatatataaaatgtcatggtcggctgtcgagaagtgatgtaattgatttatatagtaaatctcatttttctgtattgtttagagatgataaacgttatgcccacgctggttttcctactaagttagtggaaagttggtctatggcaaccccagtaatctgtaatcctattggtgatattactttgtatgctcaacatggagaaaatgcatgtattgttaacgatattaatgaagttgcaaaatttctaggtgatgttttaaaaaacaatcaatataaatatatgcaacagcaatgccaagaaacaattgagttaaaacttagtaataaagtctatagtaatcagttattagagttttttagaagattaaagtga

SEQ ID NO: 53557 - DNA, 705 bp, Acinetobacter baumannii; identical to SEQ ID NO: 8686

SEQ ID NO: 53558 - DNA, 606 bp, Acinetobacter baumannii
atgagtattcaacatttccaaacaaagttaggcatcacaaagtacagcatcgtgaccaacagcaacgattccgtcacactgcgcctcatgactgagcatgaccttgcgatgctctatgagtggctaaatcgatctcatatcgtcgagtggtggggcggagaagaagcacgcccgacacttgctgacgtacaggaacagtacttgccaagcgttttagcgcaagagtccgtcactccatacattgcaatgctgaatggagagccgattgggtatgcccagtcgtacgttgctcttggaagcggggacggatggtgggaagaagaaaccgatccaggagtacgcggaatagaccagttactggcgaatgcatcacaactgggcaaaggcttgggaaccaagctggttcgagctctggttgagttgctgttcaatgatcccgaggtcaccaagatccaaacggacccgtcgccgagcaacttgcgagcgatccgatgctacgagaaagcggggtttgagaggcaaggtaccgtaaccaccccagatggtccagccgtgtacatggttcaaacacgccaggcattcgagcgaacacgcagtgttgcctaa

SEQ ID NO: 53559 - DNA, 522 bp, Acinetobacter baumannii; identical to SEQ ID NO: 46238

SEQ ID NO: 53560 - DNA, 576 bp, Acinetobacter baumannii; identical to SEQ ID NO: 53554

SEQ ID NO: 53561 - DNA, 366 bp, Acinetobacter baumannii
gtgtcccgagtaggcgctgcaatcgctgccggtcaggctggtgccgctgtaggacaggttcaggtcgatgcccagccagggccgcgagaggttcaccgaccagtcgttgaagacgctcacgtagcccccgccgctgaggctcgccgggttgtccaggcgatggttgccgtacttcagggtgacgtcgaaaccgaacggcgggttgaccccgaggtccgggcggctgtagcggatcaggcccatttcgtagcccaggcggttgttcagcgggcgcttgaagccggcgtaggagtctatctcggtgggcttgccggggtcgaggttggaggtccagttgccgatgtaccagccactttcgtggcttag

SEQ ID NO: 53562 - DNA, 192 bp, Acinetobacter baumannii
gtgcgtggacctgaaacaaacgccgtgcaggatgccgctattcaagctgtaaagattaaattgggtaatttggtctatatccagaacaataaagcttatggaccgcgtttagaaaacggttggtctgatcaagcaccacaaggtatttatggcctcacatttaactttatttctcaaaagtacggtggctaa

SEQ ID NO: 53563 - DNA, 267 bp, Acinetobacter baumannii
atgtttccagcaattcgtaatggctggtatgttgtatgcgaccctgatgcagatcttgtgccgaatgagtttgttcaggtgtgcttgaaggatggaagatgcacaattaaagaatttgtcggcatcaatggtggggttttaagtttgctttctgtgaatggtggtgagcgatttttctttgaaatggacgaagttgaaagtattaccgctattacagatatcgtgccgccaagtcagcacagacaagaacatccttattcgcattaa

SEQ ID NO: 53564 - DNA, 3813 bp, Acinetobacter baumannii
atgggtggattggcaccatatgctctacagtcaggctctacattaacaagacaagcggtatcggctgacaatccaacagaatctacatatgaggttttattaagagccactaccactttaggttcaggctggtatccaaacaaccctactgtactcggtggaccaaacaaagcgttcttggttaagcaagtaattaagatgcctactggtcaaagagtctatccatacaacaatccactcggtactggtggctttgtccgtatgttaggtaatgcagagggaacgggtaaatttgaaacttattattctattattcagtgtggtcctgatgctagtaagtctattcaaggtcactttagagtaattaatagcactaacccgccagttcctacaacaagtaatccagttgatgtaattcttgcctcttatgaagtatttgacgttaccgcagtaaatgacactattcctaaagcatatagtgatgccatttctgcaaatgcaaacgcgattaatagcttatcgaatagtgtcactcagcagggtaatactattacttctcatagtaattctattacatccttaaataacagcatcacaagcattaatagctcacttacaaacagtgcgctaaataacctttcgaatcgtgtgacagcggcagaaggaaacattacaagccaaggcaattctattacaagcttaaataacacgcttacgaataatgacttgtcgaatcttgttctcaatcctgacttcatcgatcctaaaaatggatggacgtcaggcgtaattgttgatgctactgatgcagcgccgaatccaccgtcgctaaaagcattaaaactcaataaccgtgatagctattacggtccattcgtaaaatgcaatgttggtgacatgttttatgtttccgcgtggtttgcaacgccaaatacatcagcaaccgcttccgcagtaattggatttaatacccgaaatagtgcaggtacttatacatggtacacagtagcagttaaatcgaccgacaagaatgcttggggctttgtggaaggttatttcacggttcctgcgggtatggttgacatccgaccttggctacaagtgagcattgctgcgtcagaagcagcggggcagcaatggcatgttacgaatattcaagttcgtaacattactggtaacaagaagttagcaactgacttacaagcaacatcgtctgcattaagtacgcttgattccaaagttaccaacattgacggtcgtgtaacttctgcatcaaacagcattgtttctcttaacaatagcgttacgaatatcaataccgcactttctcaaaaagcggatgctgcggctctcaattcgctttctaaccgggtaaccactgccgaagggaatatcaccagtcagggtaattcaattacatcattgactaactcgttagctgtgagcggaaaaggtggaactaaccttctcatcaaatctaatgttgttggtacttatgatggcatttcatatccgcatcatacttacaaactcggtgaagattgggaaattggggctacatatactttaatttggtgtgccgagcacaaacgtgggacaggcgatacaaactcatcacttgctgtatacgaaggtggtggctcacaacatctccaagctgtagtaaatacaaatggtaaggttgtcagcaaagttacctttgttaaaaacagcgcagttgcctctggcccaattatccacttctacatgctcaaccgtccgacagccgacaagggtagtgttggtacggtttattgggcggtgcttgtaaagggcgatgtactcacgactgatgcttggattccgagcgcttatgattatatccctgatagcaacgcaaacgcttctgctatcaccaacctcactaacacagtcacacagcaaggtaatactcttacgtctcatacgaatagtattacttcactgaacaacagtatcaccagtatcaacggcgttttgaatactaaagccaatacttctgctgtttcagatctcgatagtcgtgttacagatgcagaagggaagattactgcaaatacatcttcaatcactagccttacagcaaatttaaaaagcacttcaaatggcatcaccatgtctgcatcaattgatgtggatccagatagtgaatggatttactggaccaaaaatggtgaagttgtgagagctgatgacacatctgcacttggaggaaaagtctatcgatttggtaataatgctggtaacgaccatgtgaacgccagatcaaaagccaaacttccttttgatcaaaataaaacgtaccgcatccgtgctagataccgtcgagtcagtggaacgggaaccatttattgtgcggtgtttggaattgcaaaagatggtgtttcacatgttaattccagcaatacagtgaccactgatgctggctcttctaactattttgttacaaaccaagcgcctgcacttaatgcatggcaagaggttacggtatatgtcaaaggtcgagcagcaggagcagctacaggaggctggactttagataatcctcgtcaactgccaaatgctacggcatttataagtgtccaattccttgcgaactactctagtgcagcaggtgaagtagatctggattaccttattattgaggatgctgacgcgattgctgccaatgatgctactgcgaaagctttatcttcacttgacactcgggtgactactgctgaaggtaaaattacttctcaaggtaattcaattacccagttaaacaacagcatcacaaccattaatggcactttatcaacgaaggcagatagttcagcacttacaaacctagccaaccgggtaacgacagctgagaactctattactagccaaggttcaagcattacctccttgaatagctctgtaactggaatattgaaagatattgaagttacagatacccgctcaaccaaccaaccgccatcgtggtattggtcaaattacccgaaacggattgttcgtgaatttaaacaggcctcaacaatcggtctatcaggaatggggacatatgtttcgcttgaaacatacgtttattatagcgacgctactggtggacctattattcaaattgcacgtggcacagattcgaaactgaccgccgaacgccgaagtacaagtacatcaacatggggtacttgggtacaagacattaaggccataagtgatgggcttgcaaataaagctgaagcttcagcactttcatcacttgactcaaaagtgtcggttattgatgggaaagtttctacacaggcctcaagtattactactctgcaaacaacagtaggcggtaatacagcctcaattcaatctcaacaacaatcaattgatggcctgaaagcaagagcaacattgaagctgcaatctggcaatctggttggtggcgttggtattgaaaatgatagcaaaacggttgacttcatcattcaagcaaataagtttgcgattggtgcaccttctgatgtcactagtgctgttacaccaaaatacgcttttacttatcaatccaccccaacgactttgcctaacggcacagtcattcctgctggcttgtacttagacagcgcgtctattagctatatcaacgccaacaaaatttatgcagatagtttaagtgctattagtgcaaatcttggtacctttacctcattggcagatcaatcaaaaccaaatggtgctaggactgtaattagtggtgagaggatcgaagtttacgacgaaaacaatgttatgcgtgtacggattgggagatggtaa

SEQ ID NO: 53565 - DNA, 489 bp, Acinetobacter baumannii
atgaattttgatcgtaatactcctattgcttttttaggcataggacttatgggaagccgtatggcaagccgtcttatacaagccggctttcaggtcgcagtatggaatcgaacagcatctgcttgtgaagaacttattgatattggcgcgcatgcactcgatctttccaacatcggacagtaccctctcattttgacttgcttagccgacgataaagctgtgcaagcagtatttgatcaaattcaaacaaacttaaaagcgggtcaggtcattgtcgacttctcaagtctctctgttgctgcgacaaaagcacttgctcaggctgctgcttcacaagatgtgatatggattgactcccctgtttcaggaggtacagctggggcagaacaaggcacgctagtcatttttgcaggtggcgatgctcaaactattgaagctttaagtcctgtttctctgtacacgataaaaatagataactcattgaaataa

SEQ ID NO: 53566 - DNA, 546 bp, Acinetobacter baumannii
atgaacattgaacaatatcttgatgaattaattaagcgtgaaggcgggtatgtaaataacccagctgatcggggcggtgcaaccaaatacggtattactcaagctgtagcacgtacaaatggttttaagggcaatatgaaagatttgcctcttgaagtggccaaagcaatttatcgcaaaaactattggacagccccacgttttgatcaggtgaatatcatttcttctgctgtagctgaagagcttctagacactggtgtgaattgcggtaccggatttgcaaaacctcttttacaacgtgctttgaatctcctaaataacaatggtaaagcagggtggccagatttatcagtagatgggatatatggtccggcaactcttaatgcactcaaaacttatttggtcaaacgcgggaaagaaggagaaaaagttttagttcgagttctgaatattatgcaaggtcagcgttacattgaaatctgtgagcgcaatccaagccaagaacaatttttctatggctggattgctaatcgagtatcaatgtga

SEQ ID NO: 53567 - DNA, 264 bp, Acinetobacter baumannii
atgaaaaaaggaatttgtaaactatgcgacctagaaaaagaattgaagcgctctcatgttattgggagagcagtttttaaaaaggctttaaatggtgcaaattacgctttaagacttgataaacagcataaaaaagtgattaaagatcaagatcagtgggccacatatatgctatgtggagattgcgagcatgatttaaatacaaaatatgaaggctattctctagatgaattgaatctagtcatgaagtttttaataaattga

SEQ ID NO: 53568 - DNA, 477 bp, Acinetobacter baumannii
atgcttaattatcaaaatatttataataaaatgggggattatgatctatatcttaagttaactttagagacagcattcgatttgcttaataataaaattattataaaaccattaatattagatatttatgatccgtgtgaatatttttacctttgtgataattatcttaaaattgattccggatattatttggaatttaaaaaatatcctaaagggcttaaaagagatgagtattttgatacggttcttataaatcattcagaaaaagaaattattaaaaaaatgtctttttttgagatatatgatgaaatttataatggtacagaatttgccgatctatactacgagtttcctgaggtaatggagattgtagaaatacaaaataggcacgcaactgatagaatagataaatttaagtggaaaaaaggatgggagaagtattactggtacggcgataaacagttagaggatttttaa

SEQ ID NO: 53569 - DNA, 246 bp, Acinetobacter baumannii
atgaaagatcagtacaagaaagtgagccaaaaacacatgcttggttttatgtactacttgcaattgctgggctacgtaatagtccggcaaggcatggaccaagcaatgtttctaacaaagcattatgcggtaccagttgcttggcggcgcataacgatcgactatcacaaccgattaaataaacctgcccagcagctttataaagagtttgttgagtggactaaagaagaatatttgagggcttag

SEQ ID NO: 53570 - DNA, 450 bp, Acinetobacter baumannii
atgattgatttaaaaacaaaacaagctttttggtctgaacaattacctttctttaaagaaaaatattggattcccggacatctagatgtactcgaatttgatatgaatgctggttgttttgatattgctgaaggcgtcaaaactgatctaagtgaagaagacctttttgatgtttaccatcgtgtaaatagtggttgggcaatgtggaaaaaagccgtgaatttcatgaaatccaaagttccaacgtggattagcgtgaatgatgaattgccacctactgacataatggtacttatttgttgggcagatgctcctgatgtcaccccagaacaagactatatgactattgatgaggatttaaatagcgtatgggcaaactatcaaaatgatccaccttcacattggatgcattttcatagtgtgccaaacgtatcgggagctgaacaatga

SEQ ID NO: 53571 - DNA, 756 bp, Acinetobacter baumannii
atgaaactaacagcaaaaatcaaaaaagcggtaatggcccatgctgatgaatgctatccgcatgaatgctgtggggtcattgtagacaaggaatatatcccttgtcgaaatgtagcaaacaaatcagatcagtttgaaatacatcctgaagacttagcttttgcagaagaccagggcgagatattagcgtatgtgcattcccaccctgacggaactacaagagcctcagaactagacttaattcaaattgagttacatcaaaagccttgggtaatttgttcctatccggatctagattttcaaatatatgaaccatgtggttatcgcgcccctttagtggggcgtaattattttcacggttggcaggattgctacgctcttatacgcgatttttatagtcgtgaattaggagtcgaacttatggatttcgagcgtaaagatgcttggtgggaagataaagatcatccatcactttatcttgagaattatgagaaagcaggcttctatgaagtagatacgccgcaatatggcgatatgcttgtttgtcgtgttgggcgtactgaacatcccaatcatgcggttgtttggcttggggataatgggcagcttaaatcggaacaaactgagcaatgcataggttcaagtctaattcttcatcatccatataatcgtaaatctgttcgtgaaatttatggccaacaatggcaagagcgaacagtaaagatattgaggcatcgagatgttaaaaaccattaa

SEQ ID NO: 53572 - DNA, 672 bp, Acinetobacter baumannii
atgttaaaaaccattaaactgtatggagtattgggacaaaagtttggccgtgaatttaaacttgatgttttaaatacacgtgaagctatgcgtgcattagcagtacaagttgaaggtttcgagcagttcatgttgaaagcacatgagcagggactccagtttgctgtatttcttaagagtaaaaattcaagcaaaaagcgtggaaagaaaagcccatcaatttatgaccatgaatcaaaacgactgattactggagacaatatcagtgaagaccagcttgatatgactacacaagctgaagttattcatgttgtgcctagagtagttggagcgggcgggggtggtggccttcaaacaattatcggggctgttatggtagttgtaggggtggttgtaggggtgtttgctggatggactggtgttggtgcagttgtggcacaagggttaatcggggcgggtatcggcatgatgcttggtggtgtggcaatgatgcttatgccaaaggtcgataatactcaggaccaaaaccaagatggtaatagggcaaaccaaggattcggtggagctgtaactacggttgcccaagggaaccctgttccagttttatatggccaacgtgaagttggtggattcattgtgagtgctggtcagtatcctgaagaccagatgtag

SEQ ID NO: 53573 - DNA, 516 bp, Acinetobacter baumannii
atgaatatgatgtcagtattaaacttaagagctgttgttacacaggaaaacggcgaagttaaaactaccagttacgccgtggcagaagcgtttgataaattgcataagaatgttattagggacattgaaaaattacgctgttctgaaagttttagaaaactcaattttgagctttgctatgaaaacaatgagttacagaacggtaagccacgaaagttttatcgtatgactaaagatggctggatgtttttggttatgggttttactggtgaaaaggcagatttgatcaaagagcaattcattgaggcctttaattggatggcgcagcagctcactcaaacttttcaatccaagtgggctagatacaatcaaatgtgtctcgaatataaaactagaaaagaacaggtgagctgttcagcacgcaatatgcgctattggcaggatgataagccagtattcgaaaatgagttgaataaactggaaaacgagttatcaccacaactaaagctggtttga

SEQ ID NO: 53574 - DNA, 936 bp, Acinetobacter baumannii
atggttagtttaacacaaataaataatacgcaagtatctgttataaatttcaaatctattccagttgtaacgactgaaatgcttgcaggtttttatggtactgagtcagtgcgtatccgtcagaatcataatgaaaataaacaacgatttattgagggtaagcatttttttaaaattgttggtcaagaattaaaagattttgtgagtagtttaaaactacttgcaaactccccaacaatttcaaataaggttcggtccctaattctttggacagaacgtggtgcagcacgccatgccaagatgctcgatacagatcaagcatgggaagtatttgagcaactggaagattgctattttgttcgaaaggaaattttagccaaaacccataaatctgaacgcacaccattacatgatgctcatgctttacttgtggctaagactaaacacctaaattcgagtgatgcatggaaaattattaatcaacgttttgggacaaatcatattgatgaaatcccatatgacatgattcctgtagcggttgagtatgttcatcatttgattgctatgtacagtagcgcagagaagaaagggcaaggttcattgtttgatgaagatcaattcaaactcctcaagagcctgattgatgcaattattacccaaaactttgttaccagtcgaatctatcgagcagtacatatgcttgataacgagcaaggacaccacttagctgaatatgcttttaaaactaatattgcagttctaaaacttactcgggcaatggatttaagaggacctcttaatagaaaaatcattagtgatgacttaaaaactataagctatacaacaggcaatcaacattatagcgaccgttggtttcatccattgatggaagcgggaatgctagctggtgctttgcgaatttctggtggttggtag

SEQ ID NO: 53575 - DNA, 267 bp, Acinetobacter baumannii
atggcagatccaaagactggcagaattgtctcgcaagatgactggaagcgaactcaagtgcgtatgccacaagaactttatgatgatttaactaattatgccgagaataaaaatatttccttaaacacagcaatgattacattgatgactaaaggcttagagccaactaaacattttgatttggtcagagaatcagcaactattaccgatgatgtaattgaaaaaatagccaacaagattgttgatcgcatgaaaaaagcaccctag

SEQ ID NO: 53576 - DNA, 492 bp, Acinetobacter baumannii
atgaaaaaagttatatttgctgcttttttaagttattttctaatagtaagctgtcaagttcaagccagaactatatacacagctgagtatgttaagatttttgaaaatttgaatagcgacaaaaaacagctcttcaatcaatcaaaaaagtggatagctaataactttaattcggctcaagatgtaatacagtatcaaagcttagaagaaggtcaattaataattagaggtattgcttctcctttgtgcgatttaacagttagcaaaatgcaatgtaatgggtactcacaagccaaaatatcttttaatttggcaatagatctgaaggataaaagagcgcgtctcaaattcaataattatggttatgcaaaatttggaaacacaccaattgatgatcctattacttataagctaatgcttggtagatttgatgcgttatctagtgattttgaaaaaactctaaatgcaagtattgacaatgacaagtggtag

SEQ ID NO: 53577 - DNA, 885 bp, Acinetobacter baumannii
atggctatccagcttttagatacggcaagaaacgaaattccagtgaaatttacgcagttttctggtggcgagcgtcatgttcaaattgatgagacaaccttaggttcactatatggcaatgtattggttcgtgcacacatggcctcaagtcacgatgtgatggactatttactacttgaaaatatattgctgactcagggtttaaccattgacctagaagttccgtattttccatatgcacgtcaggaccgtatttgtgcagtaggccaagcgttctcgcttgatgtgatgaccaagttactcaacatcaatgctgacaaaaaagtgggcaaacaaggcaaggtgactgtttgggactgccatagtgaagtaacgacagccttactcgccgccaatacttcttttagcgaagttgtaaacatcagttcagtagacatcatcgcaaagagtgaagcgctaagcacattgttaaaagatgaaaaaacagtgctggtttgcccagacaagggtgcaaaagcacgtacacaaagggtcgcagatgcttttaattctgagcgcaaacaaccactcactattgttcattgcgataaaaaacgtgatccagtgactggcaaaattttaggtacacatgtacatgcgactgatttatcaggcctcacagcggtcattaccgatgatatttgcgacggcggtgcaacctttattggtattgccaaagaactgcgtcgcctcaattgccataaggtcgttctatatgtgacccacggtatttttagtaaaggaatagaggtttttaatggactgttagatcaactgtttacctcagacagctttccacaacaaccatcagacaaaatttcagtaattgcttttgcagcaaaataa

SEQ ID NO: 53578 - DNA, 654 bp, Acinetobacter baumannii
atgtctcccgtggaggcgtcatgttccgtaggtatgcaatgcgcaaggcagttgtcgcccaacatggcgctcaagccgaccggccagccctgcgggctgtccgtcggcttagctagggcgttgggcaacaagaaaaccgatatgaacgtacgcacttgcactgaatctgacgtcgcctctatcgcagtcgtatttactgagtctattcatgtacttggagcgtctcactatgacgcttcgcaaaggaatgcgtgggcaccgcgtcccgcagatatagaggcttggtcagctcgcttatctggcctacagactcttctagcaattgagggagatgcggttatcgggttcatctcttacgagcttagcggccacatcgagtttctttacaccgcaccgggttccgagcgtcggggcgtcgcgtctgttctgtaccgtgaggttgagaaagccctcccaggtgtttcgctcttcacagaagccagtctggtcgccaagccctttttcctgcggcatggtttcagtgtagttgaggagcaaaatgtctcccgtggaggcgtcatgttccgtaggtatgcaatgcgcaaggcagttgtcgcccaacatggcgctcaagccgaccggccagccctgcgggctgtccgtcggcttagctag

SEQ ID NO: 53579 - DNA, 1017 bp, Acinetobacter baumannii; identical to SEQ ID NO: 51504

SEQ ID NO: 53580 - DNA, 735 bp, Acinetobacter baumannii
atgctagttgaaaagtttgattttattgagttacttcgccttgctattgctcaaagcgaaggtaaaggaaaaattactaagcatgttgttttgggagaaattgccttattgcctgcaggtgcaaaaaaatgggcagaattactgcttgaacgtgttgattttgagcgcattgcagaaatcacagaaacaaagaaaatttatgagaccaggataattaatggtaaggaatcaaaaaagcgtattggtgaaataccgggtaaagttgaaataaaaaaaggggagattaactcagctgattttttccgcgttagaaacgtactggcgggtaagatccatcgtgaaatgatcaaaaagaactttaagccaaataattgtcagggcgatttatcaaatgtggccaaaggtattgctgaggttgttttgcgtgggcgattatttacaaaggcaatgtgtggccattgccagggattaggcaaattggagttattcaatgaaaagggatatccaaacggctctaaattttgtgataaatgtggtggtacggggaaacgcccttatacattgcatgaaaaaatcacgatcgcaaaattaaaagtatctaaatctggatattctgagcgctatgaaccatacgagttaattgctgaagcatgtatagagaattgggaaaacagtattagaacaagcttggctagatcgtttcattttgaatcagaagaaatcacccttgcttga

SEQ ID NO: 53581 - DNA, 297 bp, Acinetobacter baumannii
atggaaaacacctggcatgctgaccaagaaaaaccagaattacggccagatgaaaaacctttgaattgcccattttgtggatctgattcaatttgtacggattcttcacattatggaaaaccagatgaagacggctctatagcgtgggatgctttcacatggtgtcatgattgtggatcaaaaggccctagtgcttgggcgatgatcgcttgggatgaaaattttcattacgacactgtttatgaagaaagatcaattgttaattatgctattcgccagtggaatacacgcaaataa

SEQ ID NO: 53582 - DNA, 192 bp, Acinetobacter baumannii
atgactgaatttcaaaaaattacgcatgagattagacagctccaagtagagttaaatcatttgggaagctgtacaacgaaaggattatctacagaacagatcgctcaattagatgagcgattttttttagccatagcaaagcaaaacaaattaattgcacggctcaacaacaagcctgagggcttcttttaa

SEQ ID NO: 53583 - DNA, 504 bp, Acinetobacter baumannii
atgtggcatttctttgccgtcatcatgaatatagatcggcttatcaccgtctacttccgcataaactttaccgtcgattgttactgttttaagtttcattggtcatccaacctatatatacaaaatgggcatccgcccggattcgccgttagcatccgctttcggcaggcaataaaaaagcgccctttaggacgcttcatttctataaatgattatttacttaaagcttggcgtacaaatgcatcttttgcttcaagtagctttcttaatcctgtggatttttcaggcccgtcaggaagttgctcatccatttgccgagctaaatcaccaattggcttactaacttgctgcaaatgttcaggtaaatgttcatattggaaatattggataatagggcttggcattttcttctcgcaaaaaaagcacccgaaggtgctatggttaaaaattaagttctatttgatgagtgcaattgcttttaatctttcaaaagtaaaaccataa

SEQ ID NO: 53584 - DNA, 441 bp, Acinetobacter baumannii
atgaacgtaaaaaccttttcaaacaagcataaggtaactggagttacagcaattgctgtacttgtagccttgagttcttgtgaatatcgaactgctaattctagcgtcccttctaattactcatatgaaagcgagcaagtcgttgcttctgaatatgaacttctggctgttaagaaaactggagaaaaatctggtgaagcagttatccgcattgacggcttcaaattaaacgtgagcttcgattttgacggtgtagctgatagctatggtgtagctggatctgattttacagcggctgaaattactaaccttgctattgagtcagtaacagacttaagcggcaaaccttggaatgatttcaccaatcatgacgaccataaaaacataaatattttattagcgggctatatcgaccgtaataaatggttggaggcagcctaa

SEQ ID NO: 53585 - DNA, 501 bp, Acinetobacter baumannii
atgagtgaaatcaacttaagcccagaggctaaaacagcaatttacaagatgattcaccagtcacaaggagttacgccgcaagaaattgcaaacgtacttggtgactcttacaagagcgtacttaattacgcaaacccaaatatggaaagccatttaccaagtattaagaagcttgaggcaatgattcagtttacacgcaacccagctttagttaaggcatgggcacacatgcttggttatgttctagtgccagctaatcaagtggatgagaaaggccatgaagtcagcattgttgaaaccttgctacatataaatattaacaatggccaaaccaatcaacaggtccacaaagttttagaggatggagttgttacacctgcggaattagcagatacagaagaaatcttagaagaaatggaaaaccacattcgccaacttcgagaggcgcttaagtcggaagctgcaacttatatttctaaggtaaagaaagaaaaagcctga

SEQ ID NO: 53586 - DNA, 1989 bp, Acinetobacter baumannii; identical to SEQ ID NO: 46156

SEQ ID NO: 53587 - DNA, 1839 bp, Acinetobacter baumannii
atgaatcaaaccattgacttaaatatttctaaaaaatcagctaaagcaggtgattcgattccacacgaaagtgcacatttacatgtgactgggcaggcaacttatattgatgatttacccgagcttgaaaataccatgcatttggcagttggattttcaaattgtgccaaaggcaaaatcagtaagtttgatttggatgcagtacgtcaagctgatggtgtccatgcagttttttctgcaaaagatattgaggttgaaaataattgggggccaattgttaaagatgatccaatttttgccgaggaacaggttgagttttatggacaagccttgtttgtggttgtggccgagagttatcagcaagcccgtcaggcagttcgcttagcaaaaattgagtatgtgcccgaaaccccaattttaacgattcaagatgcgattaaaaaagaatcgtgggtgttgccgcctgttgaatttagccatggtgaagttgagcaggcatttcaaaacgcagcacatcaactttcaggtgctattgagctgggtgggcaagagcatttttatcttgaagggcaaatttcctatgcgattccacaagaaaatcagagcttaaaagtctattgctcgacacaacatccaaccgaaatgcagttactgatttgtcatgcattaggcatgaatatgcatcaggtcagcgtggaaagtcgccgtatgggtggcggttttggtggtaaagagtcacagtcagcgcagtgggcatgcattgcatctttggcagcaaaaaaaacgggccgtccgtgtaaattacgcttagatcgtgatgatgacatgagtgctacaggcaaacgtcacggttttgcttatgagtggtctgtagcttttgatgacactggtattttgcaaggcttaaaggtgcaattggcttcaaactgtggtttttcggctgatctttctgggccagtgaatgaacgtgcgatttgccatattggcaatgcctattatctaaatgcagttgagctacgtaacttacgttgtaaaaccaatactgtttccaatacggcatatcgtggttttggtggaccgcaaggtatgtttgtcattgaaaatattattgatgacattgctcgttatttaggttgtgatccagttgaaattcgtcagcgcaatttctttgccgagcagcccggtggtggacgtgaccgtatgcactatggggcagaagtccgtgataatgttgcgccaaaattggtagccgaactattgcaaagtagtgattacgcgaagcgtagacagactattcatgcctttaatcagaacaatgacatcattaagcgtggtattgcgttaaccccattaatgtttggtatttcatttaacgccgtgcattacaatcaggcaggtgcactggtctatgtgtatatggatggtactgtcgcgattacacatggtggtacagaaatgggacaggggctatataccaaagtacggcaggttgctgcacatgagttgggtttacccatcgatagcgttcgtttaattgcaaccgatacttctcgtgtgccaaatacttcggcaactgcagcatcgagtggcgcagatctaaacggtaaagctgttcaaaatgcctgtattaaaattcgtgagcgtctggcaaaacttgcagccgaaataagtcaaagtgaagctgaccaagtccagtttgaagatagtatggtttcaacagcgaatggtcattcatggacatttcctgacttggttcaacgggcatatatggcacgtgtacaactatgggatagtggtttttctctgtacacgataaaaatagataactcattgaaataa

SEQ ID NO: 53588 - DNA, 1356 bp, Acinetobacter baumannii; identical to SEQ ID NO: 51528

SEQ ID NO: 53589 - DNA, 720 bp, Acinetobacter baumannii; identical to SEQ ID NO: 49337

SEQ ID NO: 53590 - DNA, 606 bp, Acinetobacter baumannii
atgatcgcattcaatcacgttgttccggtacttaatctgtcggtgttcaacgtcagacgggcaccggccttcgcgtttgagcagagcaagcgcgcgaccataggcgggcgctttatccgtgttgatgaatcgcgggatctgccacttcttcacgttgttgaggattttacccagaaaccggtatgcagctttgctgttacgacgggaggagagataaaaatcgacagtgcggccccggctgtcgacggcccggtacagatacgcccagcggccattgaccttcacgtaggtttcatccatgtgccacgggcaaagatcggaagggttacgccagtaccagcgcagccgtttttccatttcaggcgcataacgctgaacccagcggtaaatcgtggagtgatcgacattcactccgcgttcagccagcatctcctgcagctcacggtaactgatgccgtatttgcagtaccagcgtacggcccacagaatgatgtcacgctgaaaatgccggcctttgaatgggttcatgtgcagctccatcagcaaaaggggatgataagtttatcaccaccgactatttgcaacagtgcccgccaacttgcctga

SEQ ID NO: 53591 - DNA, 135 bp, Acinetobacter baumannii
atgactaaattcgagattttaagctgtggcttactcatttcgtgtgtaacagcagtactttgcggtgcggtggttttgtggtggttggcgcgtaaagagctagatgagaaaggagccagccatgaaagcaactaa

SEQ ID NO: 53592 - DNA, 390 bp, Acinetobacter baumannii; identical to SEQ ID NO: 45813

SEQ ID NO: 53593 - DNA, 399 bp, Acinetobacter baumannii; identical to SEQ ID NO: 46160

SEQ ID NO: 53594 - DNA, 252 bp, Acinetobacter baumannii
atgatgccttcaattgagccagcttcaccgacaatcaatttcaaaattgaagtgattaatcaggtgagtggggcgacagttgaagccgaacaactggacgagcaaacagtccggatcattgttaaagatgaactggataagcagcttccaagaacggtacctaagcttgtaagtgatcaaatcgcaaatccaaactcaaccattagtcggtctttgactgagaatacgacagcgagaagaaatcgtacttaa

SEQ ID NO: 53595 - DNA, 273 bp, Acinetobacter baumannii
atgcaaaacaatttatcagaacaaccaatcgaactcaactcgcaagattttttagtaggcgatgtggttgtgcttacaccgcaaggctccaaagatcacttgcttgaaatcattgactacaagtacacgaatgatttgtttcgagtaaaggttatctcctctggtgcttgtggaccaatccataaaagccagattcgccacgcaacagttgcagaacttaacgctaaacgccgactaacaagcgctgagcaagcattagcggaggtgtcatga

SEQ ID NO: 53596 - DNA, 363 bp, Acinetobacter baumannii
atgaaaagtcatgatcatttgcttgatagacaatatgacgaggaaaactacaactgtgttcattttgctcatgaagctgcattggatctatatgatattgatcgaggagaggcgcttgagttttttatgaagcccgtcaaagagaaggtatttctgccatcaagattgaagttactaaatccattgcctatgcccaaggaaggctgcatagtcgcctttcactcgagataccgaaacaagcccccacatgtggggctttttcgtttggggcgtattttgcatttgcaggaatcaggcgtttcatggatgccaattcaagtcgttcaagcatttggatttaatcgtgtgagtttctatgattaa

SEQ ID NO: 53597 - DNA, 141 bp, Acinetobacter baumannii
atggctaaaagaaaatataagagtgataagtttcaagtagctactaagacattagctaacaattatgctgacgattatatagagcagtattatatgaacctctacattcaacaacagttgaaaaagccggaaaccgtataa

SEQ ID NO: 53598 - DNA, 630 bp, Acinetobacter baumannii
gtggtaaatctgactattaaaggtgctgttgttgggcgtggtggtgatggcggtttacctcatttggcatttggcgcatgggagtccgatccggattacaactttactaaaacccgacgtgatgggtttcagggagcacccggtttattgaaccggcacagcaaactaaacctgattattgatggcggcactctagctcgaggtggatctggtggtggagcaacaccaagcggtatttacactgggttgtcttatggtgttcaaggtattccgggtggagctggtgcaccatttggacgggtcatgacaggccagccaatttcaagcgactcacaagattggcgctggtattttggaagttacttcaatgtcttaaaaattactgatgccgaagcttcggtacccggaaaaggctaccgaacccaaaatgaccgttatggatccccattatcaggtgatggcggaaactggggcgaacgtggtaccaagtctactaatgatggaacatggaactggaaataccatggcacaactgaaggtcagccggggccaggtggacctgcaattgtgggagttgcaccactgacaactcaattgattaatggagggaaaatcttacaaaccctttaa

SEQ ID NO: 53599 - DNA, 675 bp, Acinetobacter baumannii
ttgattggacaagaggcgattcattctaagttacacaatgaatataacgatgcacttaaagatgttgaataccctgttgatttataccgtttcttgggcgaaaacttctttaaatatgtgtttttgaaatttccgcaaccgcttaaattatcgatgatggctggtattgagcattttactgcggtacttgccgaatacatgatgaagcacgaaaagaatttctactattcagatgatgccaaaagccgtgctttatggatgtggcatatgcttgaagaatccgagcataaagatattgcctatgatgtatatcaattactcaatggtagctacccactacgagcttctggcttcttcttagcattcttcactattttaggtctaatccctgcgactaccttgtttattccggttttaagaaaaccgcaggaaatgttgactagaaaattctggaaagacgcgcgccgtggtgtaggacttatttttggtccaaaagatggtgtattcggtagcaccattggccagattttcgattatttacgtcctgacttccacccaaatgatcatgacaccactgaatatctagagtactacaaagacaaattactcaaagaaggcggcgcgattgcaccttactttgtgaaggaatttaccccacctgtacgcttgtcttaa

SEQ ID NO: 53600 - DNA, 678 bp, Acinetobacter baumannii
ttgattggacaagaggcgattcattctaagttacacaatgaatataacgatgcacttaaagatgttgaataccctgttgatttataccgtttcttgggtgagaacttctttaaatatgtgttcttaaaattcccgcagccattaaagctttcactcatggcgggtattgaacattttacggcggtacttgccgaatacatgatgaagcatgaaaagaatttctattataccgacgatgccaaaagtcgtgccttatggatgtggcatatgcttgaagaatctgagcataaagatattgcttatgacgtctatcaggttttaaacggtaattatccgttacgggcaacgggctttttaatggctttcattaccattttagggcttattccaacagcaactttatttgtacctctactgcgtaagccaaaagaactgttgaccagaaaattttggaaagatgcacgtcgtggcgtcaacttaatttttagtccaaaagatggcgtatttggtagcaccattggtcagatttttgattacttacgtccagacttccatccaaatgatcatgacacgaccgaatatctggagtactacaaaaagaaattacttaacgagggcggtgcaattgcgccttactttgtgaaggaatttacaccaccagttcgtgcagtttcataa

SEQ ID NO: 53601 - DNA, 363 bp, Acinetobacter baumannii
atgaaaagtcatgatcatttgcttgatagacaatatgacgaggaaaactacaactgtgttcattttgctcatgaagctgcattggatctatatgatattgatcgaggagaggcgcttgaattttttatgaagcctattaaagaaaaggtatttctaccatcaaggttaaaacttttaaatccactgcccatgcccaaggaaggctgcatagtcgcctttcactcgagataccgaaacaagcccccacatgtggggctttttcgtttggggcgtattttgcatttgcaggaatcaggcgtttcatggatgccaattcaagtcgttcaagcatttggatttaatcgtgtgagtttctatgattaa

SEQ ID NO: 53602 - DNA, 249 bp, Acinetobacter baumannii
atgccagatgagtttgaacgggtaatcgaagggcaatatccagatgtaaagccaaccgtaaattaccggatttacagttcagacaatctgaactctccaatgttttatttacttggactgcaactctccagtgttgccatgaaccataaagctgtgacgttcaaagctgaatctccacgattaaataccgctaaaactggagatatctttgcactagaccgctttactggtctcaagggggctatatga

SEQ ID NO: 53603 - DNA, 525 bp, Acinetobacter baumannii
atgatggctggtattgagcattttactgcggtacttgccgaatacatgatgaagcacgaaaagaatttctactattcagatgatgccaaaagccgtgctttatggatgtggcatatgcttgaagaatccgagcataaagatattgcctatgatgtatatcaattactcaatggtagctacccactacgagcttctggcttcttcttagcattcttcactattttaggtctaatccctgcgactaccttgtttattccggttttaagaaaaccgcaggaaatgttgactagaaaattctggaaagacgcgcgccgtggtgtaggacttatttttggtccaaaagatggtgtattcggtagcaccattggccagatttttgattacttacgtccagacttccatccaaatgatcatgacacgaccgaatatctggagtactacaaaaagaaattacttaacgagggcggtgcaattgcgccttactttgtgaaggaatttacaccaccagttcgtgcagtttcataa

SEQ ID NO: 53604 - DNA, 522 bp, Acinetobacter baumannii
atggcgggtattgaacattttacggcggtacttgccgaatacatgatgaagcatgaaaagaatttctattataccgacgatgccaaaagtcgtgccttatggatgtggcatatgcttgaagaatctgagcataaagatattgcttatgacgtctatcaggttttaaacggtaattatccgttacgggcaacgggctttttaatggctttcattaccattttagggcttattccaacagcaactttatttgtacctctactgcgtaagccaaaagaactgttgaccagaaaattttggaaagatgcacgtcgtggcgtcaacttaatttttagtccaaaagatggcgtatttggtagcaccattggtcagatttttgattacttacgtccagacttccatccaaatgatcatgacacgaccgaatatctggagtactacaaaaagaaattacttaacgagggcggtgcaattgcgccttactttgtgaaggaatttacaccaccagttcgtgcagtttcataa

SEQ ID NO: 53605 - DNA, 363 bp, Acinetobacter baumannii; identical to SEQ ID NO: 53596

SEQ ID NO: 53606 - DNA, 291 bp, Acinetobacter baumannii
atgaaagattacaactgccctacttgcaagaagatgattcctgttgaccgttcaaaaatcaaagctggtgatgaggtttcattttgcagagtaacccaatcttctaaatctgctcgtttttcttcaaaagaaggaattgtcgattgccgtgaaggtgatgtggttttagttaaatatcgcaaagaaattattcctttaaatattaaggacgtttcacctgttgatgctcctagcccgcttacgtatgcctttgttggtgcatgcgaatgtaaggaggctgaacatgtctaa

SEQ ID NO: 53607 - DNA, 522 bp, Acinetobacter baumannii
gtgagcaacaatgccggtaatggcgattatggtctggctaaactgctcaaagccggttctattaaaaaagtgatttgctctttcccacgtcagtctgactcttatgtgtttgatgaactgtaccgtgccggaaaggttgaacttgaactggtaccgcaaggcaatctggcgtgccgtattcaggcagcaggtatgggccttggggcggtgtttaccccaactggctttggaacacttttggccgaaggcaaagaaacccgtcatattgatggtaaagattacgtgcttgagtatccgatcaaggctgactttgccctgattaaagcctataagggcgaccgctggggaaatctggtttaccgtaaatctgcacgtaactttggcccgatcatggccatggctgctgatgtcaccattgctcaggtttctgaagtggttgaattgggtggattagacccggaacacatcatcaccccaggtatttttgtacagcatgttgtacaagtacagcccgcacagtaa

SEQ ID NO: 53608 - DNA, 489 bp, Acinetobacter baumannii
atgtctccagaggaagcttggtcacgtgcatgtaagtttacgacggaccgaactgtggttattacccaaatcacaaagtatgcattagatgaggttatgtatttgatcgaagcaggtcaaatgagagctgctcaagataatttctttggtacatacaatgtcatggtggctaaagcgcaattaaaaggccgtcagcaagagttttacaccccaccgctacaactagagcataaagaacctgaacacactccagtaagcaatgatgaagcacaaaagcatctcaaatctttaatggaacggttaaagattaatggccgtaaaactgcaccagtacaaaaacttgaggctaaggaaaaagtgccagaactcaaacaagagctaggtccagatccttttgacaatccgcacgaatacgcagagatgtgccgccgtgaaggtatgccaattcctagaaatattcttaagttaattgatggggcgaatatatga

SEQ ID NO: 53609 - DNA, 363 bp, Acinetobacter baumannii; identical to SEQ ID NO: 53596

SEQ ID NO: 53610 - DNA, 363 bp, Acinetobacter baumannii; identical to SEQ ID NO: 53596

SEQ ID NO: 53611 - DNA, 324 bp, Acinetobacter baumannii
atggggaatatgacggtctttattctcggtatcgcccttctttctttgggaacctatttaatgcgtctcggcggggcaaaactcggcaaccgactggcgctgacagaccgctctcaggctctgctttcagatgcggcaacggttttgctgttttccgttgcgctggcgaccactttctatgaaggtgagcattttgccggtatggcgcgcgtactgggcgtggcgtttgcagtgtttctggcatggcgaaaaatgccgttaattgtggtgatcgtggcggcagcggtcgtgactgcattgctgcgcctggcgggtatccaataa

SEQ ID NO: 53612 - DNA, 363 bp, Acinetobacter baumannii; identical to SEQ ID NO: 53596

SEQ ID NO: 53613 - DNA, 489 bp, Acinetobacter baumannii
atgtctccagaggaagcttggtcacgtgcatgtaagtttacgactgacagtaccgtggttattacacaaattacaaaatatgcattagacgaagtgatgtatttgatcgaagccggccaaatgcgagcagctcaagataatttcttcggaacctataacgtgatggtggctaaagctcaattgaaaggtcgtcagcaagagttttacgctccaccgctacaactagaacacaaagaacctaaacacgttcctgtgagcaatgacgaggctcaaaagcatctcaaatcattgatggaaagattaaaaatcaatggtcgtaaacctgcaccagttcaaaaacttgaggcaaaagaaaaagagcctgagcttgcaaaagaattaggtccagatcctttcgacaatccgcacgaatacgctgagatgtgccgccgtgaaggtatgccaatacctagaaatattcttcagctaattgatggggcgaatgcatga

SEQ ID NO: 53614 - DNA, 498 bp, Acinetobacter baumannii
gtggatgccggtgaagttgagaaagttaaagctgaagctatcaaagcagttgaggaaaaatatgccccgattgttgagcaacgtgatgctctagaagcctctttacataaagaacttatcggcggtggttttgctcgttctaagtacattcaagacaacattgcagtacctgtggacatggttcaggcaacctttggtcatcacttcaaaatcgaagaaggcaaggtggttgcatatgaccagaacggcgaaaagatttattcacgtgtacgcccaggtgaacttgcaaatgttgatgaagctttagagtcattggttggtggataccagcataaagacttaattcttaaaggtggtaaaggaactggtggcggttttcaaggtgggggcaaaggtggagcacctacaggaatgaaacgcagtgaaatgtctgtttctcagaaagcagattacatcaaagaacatggcaatgatgccttcctaaaactaccgaactaa

SEQ ID NO: 53615 - DNA, 978 bp, Acinetobacter baumannii
atgacagaagctttaaccgttttaggcggtattactgctgaacagtttttaacagagtattggcagaaaaaaccattacttgtacgtaatgctatgcctgaaattgtgggtatgttagagccgaatgatgtaaaagaactcgctttagaagaccatgtaactgctcgtcttatccgtcaaaaagataaaaatccaaatgaatggcatgtaaaatcgtctcccttaactaaaggtgattttcaaaaactaccaaagttatggacacttttggttcaagcagtagaccattattcatttgatatagctgaattgtggaagaaatttccttttattccacaatggcgccgtgatgacattatggtgtcttatgcccccaaaggtggttcagtaggaaaacattttgacttttatgatgtttttcttgttcaaggatatggtcatcgtcgctggcaactcggccaaatgtgtgatgcaaacactgaatttgtacctaatcaacctttaaagttgctatcagaaatagatgttcattttgatgaagtattagctcctggcgacttattatatgttccacctggattatcacattatggcgttgccgaagatgattgtttaactttctcctttggtttccgtatgcctaatatttcaggcatgatcgatagaattagcgatcaatttgctactgatgaattacttcaaaatcctgttgtcgatattacccgtaagaatcctcctcaaattggggaaataaacacggaagagttggcttatttaagagatttagtgctagctcaattgaaaaattcaacagtacttgatgctgccctcatgtcttacatgagcgagcctaaatatccagacaatattccagaaccagatgaaatagaggttgaagacctaaatgctattttgtcagaagggtatgagctgctactcgaacctgcttcgcgtctactttatacagaactggggtaa

SEQ ID NO: 53616 - DNA, 219 bp, Acinetobacter baumannii
atgagctgctactcgaacctgcttcgcgtctactttatacagaactggggtaatggagaagaattaccgattgtggaatcttttgccacccaactcaaatcgattgccgatgggaaaagcattcctttcaatagtgagcttaacaatacagatattttagaaaacattgttcaattattgaataattcaattcttatgttgttacctcctgcagagtaa

SEQ ID NO: 53617 - DNA, 633 bp, Acinetobacter baumannii; identical to SEQ ID NO: 50712

SEQ ID NO: 53618 - DNA, 153 bp, Acinetobacter baumannii
atgacttacgaaactaacgatcaagtgactatagagcagtttttagcgaagttttctaaccctgataacaagaaacgttttcgcttagaaggcttcagctttacgcatcaacacggttttaacctttactttgatgaatacgacgactcatag

SEQ ID NO: 53619 - DNA, 984 bp, Acinetobacter baumannii
atgagttatctatttttatcgtgtacagagaaatccaaagaaacaaaaaccaagattgatgagctcgttgatcaatgtcgttatcgtgactggaataatcttcattactggtttagatctgttgagaaattctgtccttgggtaaggaaaattcatcttgtaacctgtggtcattttcccgaatttttagtcaaaaatcatcccaaattaaatttagttactcatgatcaaattatagaacctcattgtttgcctacgtttaattcacatgcgattgaaatcaatattcataaaatagaaggcttggcagaacactttgtttattttaatgatgacacctttattaatagccctttagaaccagagttcttttttaaaaatggtttaccttgtgatggtattcaattacaacctttgatggtggtgggggaagagaactttttaggcgcagttgctttgacggatgtcgcaattattaataaatattttgataagagaaaactctttcggagtaatccttctgcactttttaatcatcgatattcgataagtaataatttgggcaattttttaagcttatataatcgaaaattctcaagcttttatagtactcatttaccccaaccgtttctaaaatcggtgtttgaagaagtttggagaaacgaagagagctacttaaaagaagtatcaagtcatcgatttagacaacctttagacgttaaccaatacctatttcgattatggcagttatgttcggctcgtttttacccagtaaatatatttcagcgtgggcagaactttaatttaagaatacaaaatcttcctgaaattaatcatgttattaagaatgagcaacttccacaaatttgtctaaatgacgatgaacacgtggttgattttgaaaaattaaaaacagaaattatccaaatttttgagcaaaaatttaatacggtttcgagttttgagaaaaagataacacattaa

SEQ ID NO: 53620 - DNA, 282 bp, Acinetobacter baumannii
atgtcgaatcagatcaaaaaagcctataactcatctttaggtaataccactgccttttttgcaccacaccccaaagctaatcatttaaatgctcaagacgttgcttatgaattggtagcaagtgcaaaggatatttcgattgctactttccaatgttttgaaggtggcaataaattaatgataaaagcggaaatcgtagccaatcttattattgaaattcatacaaaattggaaatgattgaaaaaatcctacctttagcttttgaaagtgaggaggcttaa

SEQ ID NO: 53621 - DNA, 2463 bp, Acinetobacter baumannii
atgaacattaaacccgcttgggataccaagcctgatatgtttgagggcagcatttcaaatattaccccgcaaacacaacaaagcccactggaggaagtgggcaatggtgcaagtcattcaataattgaagcacttgaagaacatacagtcccattatttaacaataatccactacacggtgcaatggctgaaatggtgggtggttgtcctgtagaaatccgccgttcagtgattgagaaagccacccaatatggagaagctgatgataatgccctatatggtttagccgtatttgatctatacaacgagcatttacagcctacaggtgcagtattcactaacccaactattaaaggttttaaggatattgttttcggccatggcggtttgtatttcaaccggtcaaagttgaatgaattacctttgattgtgacggatgacattcatcttgcatttaaaacagcgtatccaatctatgcaccgtatcaatcagataagattaatgcttataccctcaagacattgatgcaagcacatgctgatctatgtgtgatagccccagtccatcagcaagatgccatacaacggcgttacagtggtatggatgtcaaaatggcatttattcctgaacctccaaacattgctatgcttcaagatgagctagatagcatgattaaggtggcgatagatcaagccaagagcctggcaaaaggacacttagctaaaccatttaagatcaaggaaggcgaatatttaaatatccttatggatggcttatatctagtgaaggaacatgatgatggagaaggcggtattaaacgtactagaaccagaatatctgattcagcaattatattaggtgaagccagaagcttgaataataataactggaagcgtgtaattcagtttaatgataaagacaatgttcagcatacgttactcattccctatgagcatttcatgggtgaagcacaagaagcattaaagatcattgccaatcatggattaatgccaccacgacaaccaaataagaagaatgtatttattaactacattcaggactatccaatagaaaagcgttttcgatgtgttgaccgtaccggatggcatggtcattcatacgttacgccaagcaaaacatatggcgattctagcggagaagaacttttatttaatagtgaaatgaaaaacccctacgccgtgcatggcagccttgcaggatggcaagaactaagccgcttgatagagccccatgcactgggtgtactggcgttttcttgtgcattttcgggacaattggttgcgccattaaacttagagagtggtggctttcatatctatggctcatctaccgatggaaaaagtaccattacaaaagcagcgtgtagcgtgtggggcaatcctagagaagtatcgaaacaatggcgcaccacagacaatgccctggagaacgaagccgaattaagaaacgatagctttctaaatcttgatgaattgcgacaggcgccccctaaggccgtgtcggatattgtttatatgcttactggtgggcaaggtaaatcacgaagcagcaagacaggcaaaaatagggattctaagcaattcaacttgatgtatacgtccactggcgaagtcaccctcgaggaacatttacggcgtggcggtatcgagctagatgcaggtttattgcttaggttcgctcatatccctagtgatgcaggcaaaggatacggtgtttttgagcagatcaattacggtagcagacctcaagacataggcaatcagattaatgaactatcgtcaaagcattacggccatgcaggcgtgaaatggcttgagtaccttacccatgacaagggtgcagtcattcaaacagcactgtctcaaattgacgattttatccaacggtgtagcaagaacataggtaagaaactaaacggacaatctaaccgtgttttacgccgttttgctctagttgccgtatcgggtgaattggctacaaaggcaggcattacaggatggcaagaaggacgtgctctcaatgcagttgagcaatgctttaaaacttggctggatgattttggaactggagacaatttagaagaaatcaaaattcttgagcacttcaaaatatttattgagacacatggctcaagccgttttgaaaatctaattgttagccgacaccaagacggcgagccaatgacaccacgcattaataaccgtgtcggctattatgaccctgatagcaagatgtaccttgtttcatcggcgatgtttaagtctgaaatgtgtacaggcttaaatgaatcaaatgccaaaaaggtcttaaagaaatacggatggatagattgtgctgaagatggcaggtatgtaaagaaagtcagtaaggttttacctgacggcggtagacctagcctgattcatttcaaagcggatgttattcaaaactttgatgaatag

SEQ ID NO: 53622 - DNA, 312 bp, Acinetobacter baumannii
atgaaagcatttctcgtacttgatgagctgaatcagtttcattgggcgatgcttaaatctgtcctattgattttagcattattacctattgctgaagtttcattaaagctatggttgagtactgagggaagtagccaaatcatgattggtttctttgccttaagtattgtaagcgcttggttaatggtgagcttctttaccgcattaaaaacgagtgtatggcaaactaaacagatggcttctaaatacgaacaattgctttttaaagcttatcgttatgtgccgatggtttttttatccagggcagagtaa

SEQ ID NO: 53623 - DNA, 1077 bp, Acinetobacter baumannii
atgacaccacgtccacggggaaaagggagtttagacctccctccccatgttgaaacagataaaaaggccaatggcacaatttactttcgttatgtactaccaaatgggcaacgcaagtcactgggtaaagatcgtaatgaagcaattgttgcagccatggctttaaatgcagcactgaaaagacacccagacatagttgcaaaaatacttgaagtaaatcgaaaagttgaaaataaaattccaacttttgaaaatggccttaaagaattccttgaattgcgtttatcagagaaaacttatgccgaatcaacactggaaattattaatgccaattgcgacaagtacattgaaaaatggggtcagctcagttgctctgaaatgactttaaatatgttagcaacctttttaaaagaacaaacaccttatcaagcagaaaaacatcgctctttattgatcgatatttttaagtactttgtagcaaatggctgggttgctgaaaactttgctgagaaaactcttaaaccgatacggcctaagaagattcgtcaacgcctaagtaatgaaatgcttgcacagatttatgcagtttgcccttattggttgcaactcgccattgacctagcattacactcaatccagcgccgtggtgatttggtgatgctattacgcacggcggtaaatgtgaaagaaaacaccttcacagtgttacagcataaatctcttaattatgataagccggtctatattgaagttgatatgcacccggaacttgccgagacagtagttaaatgtattgccaattcatttcgtttgaattgtccacatctaattgctactcgtcctgaacgcattactgaacataatcgtattgcaaaaccgcacccctatgcagtaacggaggatcacttaacaaagcagtttcagaaataccgtgatttgtctggcgcttgtgaccatttggaaccaagacaacgaccatcatttcatgatctgcgtgcgcttggtattttcaatattaccgagaaatatgggaaatcatatgcacaagcattggcgggacatgcaactgaaaaatga

SEQ ID NO: 53624 - DNA, 264 bp, Acinetobacter baumannii
atgtctagcaacattaaacacattaaactctcaatcttcgctaaaaattattttgatgaggagtcgcgcccatgccgagcaactttggtaagtcatattgaacgtggctggttaagtggcattaaacgcggcacccattggtttgtgcaatgtacaacttggggtgaaccaatcttttacagttgtgaaaccccaaagattgatctacagacaccaccaatcacagggaatgctatcgccgatagaattttagctgagatataa

SEQ ID NO: 53625 - DNA, 483 bp, Acinetobacter baumannii
atgagtacaaaagttttagacccttgttgcggttcccgtatgtttcattttgatcgtagcaatccaaacgtgacttttggggatatacgtaaagaatcacatattttatgtgatgggcgttcacttgaaatcagtccagatatcgaaatggatttcagaaatatgccttttaaagatgaaacttttcatgctgtggtgtttgacccacctcatttggttcgtgcgggcgataaaagttggcttgctttgaagtatgggaaattgggtgaaaattggaaagatgatttggccaaaggtttctcagagtgttttcgtgtacttaaaccaaacggtatgttgatttttaaatggaatgaaacacaaattaaagttagtgaaattctagctttaacagatcaaaaaccactattcggacatccgagcggtaaacgtgccaatacacattggattggttttatgaagattggggacgctgagagatga

SEQ ID NO: 53626 - DNA, 534 bp, Acinetobacter baumannii
atgattaattctgaaaacgaaaacattgatgaattagaaaatttaaaaagtgtggaagttattctcgagcgactaactttccatatttttgaagacgttatgatttggtcaaatgaaggggccagtactgcatttaaacgatgtgtaaaaaagactattgaagaatttaagaatggagagttaattctaacaaagggttatcctcagcttaaaccttttcaagtagacaatgtcttaaatgctttgaattccgctttaaaccaagcacaggagcatcaagacaaattaaatgcagaaatagattccctcaaagctcaagcagtgccaacttggatcagtgtggaagatgcgtggccacctactgacacaatggtacttatttgttgggcagatgcacctgaagtcaccccggaacaagactatatgactattgatgaagatttaaatagtgtttgggcaaattatcacaatgacccaccttcacactggatgcattttcatagtgtgcctaacgtatcgggagctgaacaatga

SEQ ID NO: 53627 - DNA, 336 bp, Acinetobacter baumannii
atgagcaaaatgacccatgagcaatttttgttaatgaaactagctgaagaagcatcagaaatagcccagattgccttaaaaactgctcagtttggtatggatgaaagacatcctgaaatgaatctcaataataaggcacgaattcatcaggaattaaatgatctattagctgtagttgatgagcttaacacctggtgtaaattcgaatttcaacctaaccacgcagcgaaaatcaataagattgaaaagctaaataaatatcttggctattcaattcaaataggaaaggttgaaaacgttccggcaattttcggcgaattgggagcgcaacaatga

SEQ ID NO: 53628 - DNA, 312 bp, Acinetobacter baumannii
atgaccaaaactatccataaatatgctttagctattcaagacaaccaaagtattgaaatgccagctggaagcaaggcactttgtattgatacacaacaaggtgatccacaactttgggtgttatgtgatcctgaaatgccaaaaattaaatacaacattttatgtgttggtactggccacgaaatcactaaaccagtcggtcaatatcttggaacaattcaaatcctccgagcagtacctttggtttttcatttcttctcaagtctagcagatgcagaacaggcactacctttaattggagaagcttcatga

SEQ ID NO: 53629 - DNA, 264 bp, Acinetobacter baumannii
atgaataaagaaaaactatgggcagtcaatattccagaagaacctgattcagaacttctccaccctgttccatcacaaaaaattggcaagcagcttgtatatcgtcttaagaaagaagcattgcaggctttccctaaagttggtcaatccattgctgactcaatcacttttgaagagtggcaaggcagcaaagaagatcatgaaaaatatcttcaagaaaacaaaaactggtggttagagacaacttttctgggagaaggctaa

SEQ ID NO: 53630 - DNA, 738 bp, Acinetobacter baumannii
atgagtacagcaattaaaacccgtgaaattcaatatactgcaccagatggtagccatttaattggttactttgcggctccagaaagtgaaacacctgtaccaggtgtcattattggtcctgagtggtggggtcgtaacgaatacactgaacaacgtgcgcgtgaacttgctgaacacggttatgctgcacttgcaattgacatgtatggcgataaaaaagtaacaacgactgcagctcaagcttatgaatggatgatgcagacatttgaagatctagacactgtgactgatcgtgccaacgcagggcttcaaactttagctgctcaaccagaagtgaacagtgaaaaacttgcagcggtaggtttttgctatggtggcaaagtggtactcgatctagctcgctcaggtgctcccctcaaagcaactgcgacattccatggtacattaactcctaaggctcctgctcaaaaaggcaacattcaaggcgaggtattggttctacatggtgaactagacagcatggtcaccttagaagatgttgctaattttgaaaaagagatgcaagctgctgaggttaaacatgaggtagtggttttaaaagatgctaaacatggctttagtaacccgcttgcagatgaaagagctaaagcgaatggtgtagaccttggctacaacagcgaagcggagaaacaaggccttgctaaaatgtacgctttattagaacgtactttaaaataa

SEQ ID NO: 53631 - DNA, 1086 bp, Acinetobacter baumannii; identical to SEQ ID NO: 45794

SEQ ID NO: 53632 - DNA, 177 bp, Acinetobacter baumannii
atgatcgaatttgtagattacacatcaatgatgaagctccgcagagattgcaacctcggcactcgcaataaagaaacaagagcagcagcgaacctctacgagaaattaagaaaactgaaaatgctagaccagcttaagcaggaagccatgacaggacatgacaaggaggcggtatga

SEQ ID NO: 53633 - DNA, 828 bp, Acinetobacter baumannii
atgggtgcattgaagcaggctgaaattattccaatttcaaaaggtagggacaagatgacagacaagttcgaaaagggctatgtgatgtctagtcgtctttatcgtagtgatgtgcgtccatttcttagtgatgcagcacgtaatgtgtatgctgaactggaagaccgcatcaatggttttaaagacaaaactactgattttgtaagttactctcaattgcagggcggcaagcttgaaggttctaaaaaactaagcactactacagttcgtaaaggcctaaaagaattaaccgatttaggcgttgtaactgttgttagttctgattcaagaaagggtaatgaatacagaattaatgaggtgtcattagtcgagcactttaaaaactgcaataccactttagaaagtaaagcactacagaaagtaaagcgcgagcactttactaacgaaagcgccagcactttagaaactaaagacacaatagaattatataaaaatatttatagagaggagagcacacaagaaaatccagttgatgaagttctgaatatctggaaaccagatttacaacaattgaattcttggatgcaaagatcaggtttaccaaaaatcaatcaagctcaagttgaagaattacttcttgaaatcaacccacactacgaaaacaaaatcatcactggtgcagtaacaagcactcagatgtattcaaatttcgtgaagtgggtaaaacgtgatttcaaacttgttgaaaaacttttcaaacaagcagaacaaaacaacactcaagcaatcaatcctgaaaatctcgaaacagaaatgggggattggtaa

SEQ ID NO: 53634 - DNA, 159 bp, Acinetobacter baumannii
atgaaccattcaatattagcagacattgaactaaatcggaagattagtttgtttcaaaaagcggttgaggcttatgtgcttaatcgaactctcgaaaactctatggcattggctaaagcgaaagctgatttagctgcatttgtattgagaggtgtttga

SEQ ID NO: 53635 - DNA, 2268 bp, Acinetobacter baumannii
atgtctaatattgagcaagatacacgttttattgttaacaataatttgattaacaagggctggatcttggacattcaagatccaaacaaaaatgtcttttttgaatcagatatcttaagaattgttaataatgagtttctcaagaaaagtaaaaaaagacccgattatgttcttttcgattcacaaaataagcggccaatcggtgtaattgaaacgaaatcaggtggaaaaagcttaacaaaagcactggatcaggcaaccgaatatgctgaaatgcttgatgcacctttgatatttgcaatgaataatggtttctgcgaaacacggcatttgtatacccaaaaaccattatttattgatgaaaatgaggttaatgaattaataagagtaaatgaagctaaagagttcatattgcaggaaacaaatggtatttatattacacctaaagaaattttagtctctcgcaaagagttaattaatgttttcaagaagttaaataactcactaagaggtgaaggtttaagagctggtatagaaaggctttcagaatttgcaaacattctttttttaaaattgtatacagagaatgctaatacaggtatttggaattctctcaaaagtctcgataatgatttgctaattaatacaactaataacatactacaagatattgatagacaatatggtgcttctgtttttacaaatttacagctaaccaaccctgttgctgttaaagagatgatcaaagagttggataagttaaaactctcatcaatagataccgatattaaaggagatgcttttgagtatttcttacagcaagctacagcaactaataatgacttaggagaatattttactccacgtcacataactaaaaccattgttaacttagtcaaccctaaatatggtgaaaagatctatgaccctttttgtgggacaggtggttttttaacagaggcatttgatcatataaaagataacactttaattgcaaacaatagtagtgaagaaatcaagcttaaacataatactatttttggaagagaaattacctcaaatgcaaaactcgcaaaaatgaatatgattctgcatggggatgggcatagtggaatttgccagatagacacacttcaaaaccctattgaatctgaatatgatgtggttataaccaacatgccattttctcaaaaaacttcttattctcacttatatgagaataagttagctaaaaacgatggtgatggagtatgtgttctacattgctttaaagcaacaaaaaaaggagggcgaatggcattagtagtacctgaaggctttctttttaaagccgctttagctccagtaaggaagtatttatttgaaaacgcccaactaaaagcagtagtttcacttccaaaagaagtttttctgccatatgcaaaagttaaaaccaatatactctactttaccaactgtcataatggtagaacaaattctgacgttttttactacaatgtgacaaatgatggcctaagtttagattctttccgtagaaaaattgacgaaaatgatttaaaaaatttagattttgctgatttaaataagagcgactttgataaatattataatgaattaggtttcttaaaagttaatccagaattaatcagaagcaatgattatatttataattatgctcactatagtaattcacatataaaatcaaaattcccaactataaaactaaaagaactcctatccttgtctggcaaagtcaaagtgggagaggatacaaatatacctattatgagtatcactatggaacatggcttaattgatcagcatgagaaatttaaaaaacgagtcgcaagttctgatatttctgggtataaaaaggtttttaaaaatgaacttgtaatggggttccctatagatgaaggtgttctaggatttcaaaaatattacgatgctgctgccgtaagcccagcatacaaaatctttagattaaaacgagaagttaatgtagaatatttggatttgattttgagatctaattctctaagaaaaatatacaaaagtaaaatgcaaggcagtgtagagagacgacgcagtattcctgatgaaatgtttttgaatattgagatcccgaatcctcctgaagaggttaaagatcaaatagtaaaacaacataaactaataaaggaaattgagaatagtctcaaggaaaatcaaaaaaaattgcgtctaaagacagaagcattatgggaacttcctcaaaattacaactaa

SEQ ID NO: 53636 - DNA, 834 bp, Acinetobacter baumannii
  misc_feature (766)..(775): n is a, c, g, or t
atgacgaatggattaatgatgcattgtaatttaaacattacttcaataatgcagcatgctttgatagtttacgcagatcaagaaattgtaactttgaaagcagatgggataagtaaacaccgatatacatataaagatgctttcgaacgtgtagctcagtttgccaacgcactagaccgattaaatataagttctgatgctaaagtcggaacgatggcatggaactcatttcagcattttgaattgcactatgccattccatgtacgggaagaatttaccatacaattaaccctaaattggcgcctgaacagctcattcaaattatcaattctgctcaagatgaggtactcattattgaaccagattgtttggcattagttgattcgatttatgacaatataaagccagtcataaaacattttattgtgctcggggaccccaataaaaatttaaaagcacaatttgatttcgtcttttatgaagaactcattgctccagagcagtcttattatgattggccagatatccctgaagagcgtgcaagtggtctttgttatacatcaggtacaacaggggatcctaaaggcgttctttactcacatcgtagtactgtattacatgcattaatactaagcatgccaaatgcgattggcttaacgcatgatagctgtatcatgcctttggttccgctttatcatattagcgcatggggaatgccatttaatgcggttttgtcgggggcaaaaatcgtttggcctcattcannnnnnnnnncatcaaagctactcatgctcattcatttgcgggccaaacagataagattttcgacctga

SEQ ID NO: 53637 - DNA, 1293 bp, Acinetobacter baumannii
atgaaaaggcgaatttttgcactcgtagatgtgaacaattgctatgcaagcattgagcgattctttaacccccagcttaataataggccggtcatagttttgtcgaataatgacggctgtgccgttgctcgtagcgcggaagctaaagcaattggtattaaaatgggtgaaccattatttaaaataattgatctggttaagcgcaataatgtagctgtgctttcaagcaactaccctgtctatgctgaaatgagtaaacgatttcattcaatcttaaaacagtttgtagcaccgcatgaacatgaaacatatagtattgatgaagcatttcttgagcttactgcttaccagcaaaattatgatttagatgcttatgctcgcctcatgaaaaaccgcatatggcaatggatcggtctgcctgtttgcgttggcattggccgatcaaaaactgaagcaaaaatggctaatcatctggcaaaaacatacccaacttttgacggcgtatgtaacttagtttcttttcccacaaatataagagatttactttataaacaaacaagtgtttcagaagtttggggtgttggccgtcagcattctaaaaaacttgaatcgatgggaattaccaaagtttatgatcttatgatgtcaaatccatatcacatggaaacattgtttagtgtcgtaatgaagcgcaccgtgcttgagctaaatggtattgcatgcatcgaaattgaagacacgccaccatcacgtaaacaaatcatttcatcaagagcatttaaacaaaagattattgagaaagatgatttaaaagaagctattgcccgaagaacgcaagaagcctttataagagcaagaaaagatcaagtgttatgtggctgtatcattgcctttgcacattcaagcccatttgatgtgagtaagcctttttataaaggtgaattatctcagtcttttagtgtcccaactgatgacgttagacggcttgtgaaagcatcaacttcaatgattgagaatatttacagatatggagtcgattttaaaaaatgcggggttgtactgactgcactggaaagcaaaaattcttatacgtatgacttactgactgattatcgtgatttagaaaaaacagaaaatttaatgtgtgcaatagaaaacattcaaacgaagtatggaaaatacaaacttgggttcggcggaagtatgtatcaaaatcgagcctggtcaatgtctcaaaatcttaagtcgaataattattttactcttgagggtatgctaaaaattaataattaa

SEQ ID NO: 53638 - DNA, 153 bp, Acinetobacter baumannii
atgtctgaaaagcaaatcaatatgtcagatgctcaatatattctgagcacaaaattaattctggtgccatttcttcaaattaagatttcaagagccatggcaatttatggttttacttttgaaagattaaaagcgattgcactcatcaattag

SEQ ID NO: 53639 - DNA, 444 bp, Acinetobacter baumannii; identical to SEQ ID NO: 49443

SEQ ID NO: 53640 - DNA, 279 bp, Acinetobacter baumannii
atgcgtatcagcatcaaaaaaccactttctgaaaacgcagtaaagctaatccttaaaaaacttatctcgtttggacctttggctaaccaatcactggaaaactcaattatcggaaattatcagggtgtatttgagcctcgccaaaatcaaattcaggaaaacccacaatctcataacgttcctgaagaaccgggttatttcactcaaatgtacgctgagagcaaccgttcaaacgtgattgacgttacgccagtgtcacaagattttggaggctattaa

SEQ ID NO: 53641 - DNA, 267 bp, Acinetobacter baumannii
atggctaaagattattctcaagtgaattttagaatgcctagcaagctcaaagaattattagaagagaaggctaaagacaatgaaagatctttaactgctgaaatagttgcaagacttgaagaaagccttgatataaatgagaaaatcccaactgaagttatgaagcttatagatatgagcaataagaatttagatcgcgcaactgttttaattgaaaaactaatggcacgaattgaagagctagaaacaaataaacccgctgattag

SEQ ID NO: 53642 - DNA, 162 bp, Acinetobacter baumannii
atgacaaggcatgataagcaaatgaacgttcgtatggcacatgaaacagtaagtgaattaaaggaggtagcaaagaaaaatcgtcgatcggtaacggctcagttaaatcaaatcatagaagactggctaaaagaacagaaacaacaggatgcgaaagcatga

SEQ ID NO: 53643 - DNA, 387 bp, Acinetobacter baumannii
atgttaaatataccattcgaatttgataaagacaaggttctagatattaccgatctactgccaaccattcctattgagattcttgagaaagtaacagatcaaaacggttctgtttcggcagatgaagaaaattttctaaaatctgtaggccgtgctgcggaaaatgcaaaccttccagttttaaagggattaagtgctattggtgtgttgcttgccaacgcaaatgaagaaataccgttaggaacatttaatgatgttggctggttaatacaatcgcttagcgaacaagttttagctataagccatatgcaagggttcgctgacttacttcttgatgcaagtaataagaacaaaatctctaagggcaatggagggctaatgtcatga

SEQ ID NO: 53644 - DNA, 753 bp, Acinetobacter baumannii
atgagtaacatttctgtattcaacttcaatcaaaatgaaattcgaacagttttaaaagatgatggagaaatttggtttgttgctagtgatgttgctactgtattggaatatagcgttgcatcagcaatgattcgtcatttggatgaagatgagaagggtgtgtcaattgtgcatacccttggtggggagcaagaggtttcgattattagtgaatctggtctttattccgcaacacttaaaagtcgtaaacctgaagcaaagcaatttaagaagtggataacttcagatgttttgccaagtatacgcaaaaatggtggttacattgctggacaggaaaatgatgatcctgaattaatcttggcaaaggctttgcaggtcgctaacaatgtgattcttcgcaagactcaagaattacaacaagcacggattgagcgtgactttgcaattgaaacaaaagcccatattagcgacaagaaaacagctaccgctatggcaactgcttctgttaagagtcgtcaagctgagaaattgaaagagcagattggcgagtctaagaactatgcttcggttaaggcggttgaaaaggtcgcaggtggcaaatacaactggcgtgaacttaagaaatggtgcttagcccatggcaaaaaaattaaagacattgctgatgctaattatggatctgtaaagatttaccacaaggatgcatggaaagcagtttatgggattaatctaactgactactttgccgcttaa

SEQ ID NO: 53645 - DNA, 687 bp, Acinetobacter baumannii
atgaaagagttagtacatcaaaaaacgcatcaaagtaacaatattactgtagtgcagaattggattgactcatctgatattggtacagagcccaaaactaataaccgaattttacaagaattgaactggttggatagtgaaactacgatttttcaattcttcggtaatattggtcgtgtacaaggcgtagaaaatattctgcatgctattcagaaaatgaaatatgcacatttggcaaaattcatttttattggtgatggtgcatatgttgctcgtcttaaagagcaaatacagtctttgggatctcaaaatattctttattatggatctttagatcagaaagaaaaaacaactggtttaaatgcgtgtgatgttgcattgattactttggctgatgggatgttaggtttaggggttcctagtaaatcttatttttctatggcggcagataagcctttgctagcaattatggatagtgagtcagaagtagcagatatgattaatactcatcatatcggttgggtagtcccacctaataatgaagaggctttggcaaaacaacttgatgaaattgtgttagcaaaacactgctatgcattcaattcatcaagagaagtattaaatgaattttattcagaaaaagtagcaatgagtaaaattctaaatattattagaaaatttacttaa

SEQ ID NO: 53646 - DNA, 936 bp, Acinetobacter baumannii
atgaatatcttgattacaggaagtagtggttttgttggttcatacttatgtgaatattttacgacaatgccagaacatagtgttctggctcaaactcgtaaaaatacacaaaagttatgtaataacataaagactataacttttgatataaatgatgatctaacttctttggacttgagctcagtagatgtcattgtgcattgtgctgggcgtgctcatattatgaaggaagttgaaagtgatccactatctatttatagaaaagtaaatgtagaaggaacactgaatttagctaaaaaagcagctaaagctggtgtaaaacgatttatatttatgagtagtattaaagtaaatggtgaagtgagtgatcaagtaccttttactcctcatgataatattataaatattaaagatccttatgggttatcgaaatatgaagctgaacaatctctattaaatttagcgcaaaactcgatgatggaggtggtcattattcgcccagctttaatctatgggccaaatgttaaggcaaattttaaaagtatgatcaatctggcggctaaaggaattcctttacctgttggatgcctcgataataaaagaagtatggtcagtatttataatttaagcgatttcattaatatttgtttatcacatcctttagcaaaaaatcaggtttttttaatcagtgatcaagacgatataacagttaaagaattatttacgaagttagctaaagttcagggtagaaatcttattgctgtgcctatacctaaagtattaattaattttttagctaaacttcttaataagagtgctgtcgcttcaagactttgttctgtattgatcgttgacacctcaaagaatatagaactattaggatggagagctccttttagctttgatgagagtttaaaattgatgttcaaaaagtaa

SEQ ID NO: 53647 - DNA, 777 bp, Acinetobacter baumannii
atgggtgaactatattcattcattaaatttttgtctgaggagtctaatgcagacaaagattgtattttttataatcgtagttataagtttaaaattaaagcttgtgaagatgatttaaattatccgattgatactaaaagcttaggtaagttcaaacatcaagatatgcaccgagaggctattattaatctgatgtgcaaagaattgacgtcttttgttaaagacgaaattgaagatgttagatttagctatcttattcgtaacttgaatcccttgattacgaatatcaatcatagttatcaaagctatgtagaggattacacctttgataaggtgagaaaagagtataaagaaaagaaaactgaatacatcaaaaaattgaatgatactttcgattctgtcgctacaaaaatgtttgcaataccagcaggtatttggttcgctacagcccaaatgactaccatgaaaactgttagtagttttatatataccaaaaacttcattgtattaatgaccgttttatcaatgatatttattatgattcttaatgtatatgggcaacgtaatacacttaatcaagtgaaagaagagtatttagatatttttgatgaattagaaaaaaaatttgaagatgtagatgcggaaattagaaaaataaaaggtgaagtaaatgataagttcgatagagtaatgtcttacatttatgtggcgattattatttgtgttgcattaggtgtgtatacggcataccttttttatcaaagtagtattgtctag

SEQ ID NO: 53648 - DNA, 900 bp, Acinetobacter baumannii
atgaattttaatagtgaaaatatcgaacttttcttaaccgtattagatactggatctttctcggccgcggcacgtaagttaaatcgagtgccatcagcagtgagtatggcaattgccaatattgaagcagaacttggttaccacttatttgaacgtacacaccgcaaagttattcctaccgcggcggctttagcattggaacctcaagcccgtattattgctgaacagcttaggctattagctacgcatgcttatgaactttcacttggtcttgaaagtaaattaaaaataggtgtggtttcagatgcgaatactgaattactttttaaagccataaagcaactagcagagaagtttccccttcttaacctagaaattattacagctcctcaagatgatattctaaatttactttatacagaaaatattagcctttgccttgcaggttcaaatctcaatataaaaatgcgtgaaagcctacaattagtaatgacagaaacagttattgctacgatctctgctcatcatccgtttttaaaagaacagaataagttaaacacgattgaagagttaattaatattcggcaaattgtggtcgcaagtagtgagctggatatggaagactcacgttcaatcattggagcaatgtactggaaaacgaatagcttacaaacagcaattaatatggtcgaagctggcttaggatggggaaattttcccttatctttggtaaaagaaaagattgaacaaggccacttagttcaattagattttaaaaatacgaaaaatcatttgcctttatctatttatctcatttggcttcaagataaaccgttatcgaaagcagccagagagcttgtccagattgttcaagcaaacttatctcaaacttgtcattaa

SEQ ID NO: 53649 - DNA, 810 bp, Acinetobacter baumannii
atgaaacaaagcatttcagctgaactttgggacaaaaatcttaattttttaactcaattaagagccaagattgcgaaacatccagtatctcatcatcctgcaatagaaactttaaataacggtgaaattaataaagaaaacttaaagcgtattcatttagagtatcgccatgcaatcgtacaaacatttacagacgctttattaatggctcaataccagacaaagcagttagaacctaggttgcatgcaggtgcaaagatgtttccgcgctgtcttttgagtcttaatatatttgatgagtttgggtttcgacctgggaccgacaaagacggttattatcaaggtaacccagaatatgcacattatcctttatttgaagatgtccttgatgattttggagtgacggaggaagagcgccggagttatcaaccaacagaaattgcacatcagctgagagagtttctagaaaattcctataaagactataaagccgtttctgctttattagctgtagctgaagaagaagttattttgtacagtccacctttacgaaaagcaaccagtgctgtaggtatagcggtggagggtggtggctattaccatgtgcatggagtatctgaagatgaaactgctgaggcagcagatgacgatcatgaagaagatctatggtttattttaatgcaagcttgtacagaagaagactacacttatttagaaaacctatgcctcgaatattgtgatttatgggaaaagttttgggatgttcaaatagaaagctcaaaatcaatcctgaaacaaaatttagcttaa

SEQ ID NO: 53650 - DNA, 918 bp, Acinetobacter baumannii
atgagttcaggcgcaaaaattcgattatatgcttgtgaagaagcagttttaggaacaactccagcaaacccgatctggtacacagttcgccgtgtaagtgatggtttatctgaaaatgtttctactgaagaaagcagtgaagtggttgattcacgttttcgccaaggtggggtagttactgaagcagaagtagcaggtcagttagagtttgaattatcacttggaacatttgatctattcctaagtgctttagccttcaataattgggcgggtaacgctttaagttttggtggtacggtacgtaagtcattaacgctggttaaagttttcgaagatgttggccaagtctttatttatcgtggagtacaggttaattctggtgaaattactatccagaccactggaaaaattactggtaactttggtcttgtaggtagctcgtttactcgtcagcaaactaaccctgtagtgaatccggtggcagcttcaacacgaccactggtcagcatgccaaacgttgaaaacttgctagttaatggtcagtctattcaaggtaaagcgtgtctacagtctttgaccatttctattaacaataaccttgaagcaatccgttgtatcggatctggtaaatacactccagagttttatttagagaagatgatggatatcgaagcgaatgcttcattcatgttctcggccacagctgctggttggattgatgcaatcaaaacccgtgatgtgtttacactgaccttcgacatcagagacagcaaaggaagtaaatattcatttaacttcccacaactggaagtcatggaagccaatcacccggatggcggtggtgacgacatcattactgtagatatcaactttgcccaagttcgtacagcgccaacaattgtacgcgctcttgtgtaa

SEQ ID NO: 53651 - DNA, 999 bp, Acinetobacter baumannii
gtggatctatttcatgccatgagagtattcaacaaagttgttgaaacaaatagtttcagtttagcagctgatagtttgggtctaccgcgtgcttctgtgaccacaaccattcaggctttagagaagcatttgcaagttcgattgcttaatcggacaacacgaaaaattagtctcacaccggatggcgccgtatattatgatcggacagcccgtattttagcggatgttgccgatattgaatcttcttttcatgatgcagagcgggggccaagaggtcagcttcgtattgatgtgcctgtatcgattggacgtttaattttaattccaaggctccgcgattttcatgcacgctatcctgatattgatttagtaattggtctgaacgaccgacctgtagatttggttggagaagctgttgattgtgcaattcgggtgggtgaattaaaagattcaagcttaattgcgcgtcgtatcggaactttccagtgtgcaaccgctgcttcaccgatttatttagaaaaatatggcgaacctacctcaattgaagatttgcaaaaaaatcataaagcgattcatttcttttcaagccgtaccggacgcaacttcgattgggactttgtggttgatgatttaattaaaagtgtgtcagtacgtggacgtgtttcggtaaatgacggtgatgcttatatcgacttggctttgcaaggttttggtataattcaaggcccacgttatatgctcaccaaccatttagaatcaggtttgttaaaagaggtattgcctcagtggacgccagcaccgatgccgatttcagcagtttatcttcaaaatcgtcatttatcgcttaaagtaaaagtgtttgttgattgggtcgctgaactttttgcaggctgtccattacttggcggtacagctttacctttcgaccagaaatgtgaatttgcctgtgataaagaaactggtcatgaatatacaattcgggcactgttgcaaagttag

SEQ ID NO: 53652 - DNA, 669 bp, Acinetobacter baumannii
gtgacaactaatggaagtaatagtcaaaataatcctatagctagaacttctgtagagggatgtagtaattgcacaaaaattacagaaaatgagctgaaacagatatttacacaagctaattctaacgatataaaaaaaataattgatgtttatacgaatttctcagaaaaatttggaatgaataattgtttaagtaaggcacatttttttgctcaagttttagaagaagtgggtaaaaagatagaagttaaggatggagaaagcttaaattatcactctgatattctttttttgtcttatacaaaaataaaaagaaaagagtatataatagaaaaaggtaagcgagttgagaaaatgactcatggtgggccattttcagcatttagaggaaatagacagttatgtgataaatatggaagaaatgataatcatcctgctgatcaagtaatgatagctaatattgcatatgcgaatagaaatggaaatggtgatattcaatctggtgatggttggaaatatagaggtcggggaattatacagataactggtaaagataaatatgataaaattaataaagcaataaaagataattatcccaatgtaggaatatctattgatgcaaataatcttcaatggcttattggaaatcttttggtctatcaaaactag

SEQ ID NO: 53653 - DNA, 234 bp, Acinetobacter baumannii
atggcttattggaaatcttttggtctatcaaaactagctacacaaaaacaagtagatattaggactcaattagaagttgtagattctttaattgatattattaatcgagatacagcatcaagatcagatagaaaaaagaattttgagtatataactgcgaaagtcttcaagcttaatgaatgtaaaaattcaattgtagaagcgaacttctctgtacacgataaaaatagataa

SEQ ID NO: 53654 - DNA, 678 bp, Acinetobacter baumannii
atgagttatctatttttatcgtgtacagagataaaagatataaagtatggttcgaagaaccgatcaactctggatttttttcctctagaacatgtcagtaaaaccgtaatttttatacatgggggatattggcagtggtgtgataaatcggactttgcctttatagcgccgtacatattagcaaaaggagcgcagtgtgtacttttagaatatgacttggctcctcaaagtcatatttcacaaatcgttgctcaaactcaacaagcgctcgattttatcgctaaacaaaattggaaaataggcgaagtagtagtggtcggccattcagcaggtgctcatcttggtgctttatgtttaaaccatccgttattatccaaggcaactttattaagtgggatttatgatttattacctatacaagagactcatttaaatcacgctttaaacttatcgcaagaggatattttgaaatatagtcctattcatcagcaggaacagatcaatattccttgtacgattttgtgtggtgggttagaacttagtgaattaaaatggcaaagtcaaaattattttgagtaccgacttagtcaaggtgaggatatgatttcttttgaaattattcctgagattaaccattactctattttagagcactattttaaatttatatttaagtga

SEQ ID NO: 53655 - DNA, 126 bp, Acinetobacter baumannii
atgaaagctattttaacgaagaaaattattagctgtatcgcaattagtggtgttttaagcttcagtgcatttgagattatggcagcgaatcaacaaactataaatgatgggcagagtaaaacttga

SEQ ID NO: 53656 - DNA, 897 bp, Acinetobacter baumannii
atgtactcaagtaatttttctctacgtttctcaggtcatcagacttttgctctacgttatggttggttaaataagtcatataatttattgaattataatggaaaaagtgatgaagagttagttgtatctttgggcgtcgggaaaaatatggtcgatagtatcaaatattggaccgaaatctccggattagtacctttaaatgtaaaagaagattttcgaccaaaatatgtaacacctctagcagatatttttgctaaatatgataactatttggaattgaatgtatcaacttggttattacattattttattcaaaagaattttaatgaattaaatttttcacgttggtattttaatttctcaaataaacagttttttgaaaagaatgacttaattaaggatttaattaattggcttgaaggagagaatctaaaaataccttcagagtctacgctacagaaagattgtgattgttttttactatgttatgcaaaaaaaactaatcgtggttttatgaatgaagatgcttttatttctcctttaaatgaattaaatctcgtttatcaagttgaatcacataaatttaaatctgatttacttgaacaaaagcctttatctcccttagtttttttatattgtttagttgatttttggaaagaaaattttatagattcacctacgattagtgtggatagtgttttgacgaatcctggtagtcctggacgtttatttagaattaatagtaccggtattgattacttccttaatcaatgtgcattaattgataatcgtttccaatggtctgatactttaggtattagaagtcttgcatgcaatgaaataaagaatattgatctagatggtctacttgcgaatatttatcgagagagtaagtaa

SEQ ID NO: 53657 - DNA, 3486 bp, Acinetobacter baumannii
atgaatgaaactaacttaaataagtattatcagattaatgttaatcatttactctcaactcgactagattctgatatttcaaaagagttttttgataaagtagtttttcacggaactgcttataactctttattaacaatagctgattcatttatttctactaatcagtcaacttttactttgactggtagttatggtacgggaaagtcaactcttggtgctattttaactggtttaataagcaataacatccttgtaagagaatcggttagaaagctaatatctgaaaaaaaattacttaaaaaattggataaagtttttagttattcagatgaaaggccatggttaattattaaagcagtaggaggagtatcttcacctttagagcttttttatagagctattatacaagctttaaaaaatgctaatttaatagatgtttttgaaaatgatttattctttttagaatttgaagagatcactaatgagtatcaccttattgaatggattgatactatatttagaaaattagaaggaaaaatttcgggaacgctttttgttcttgatgaaatgggtaagttacttgagaatattgcaagaaaatctggtgatttacatctatttcaagagttatcagaaaaaataaatagactttctactaaagaatgtccttttatttttattggcattttgcatcaatcattttcggactatgctaaaggactaagtcatcaaatatctctagaatggtcaaagattcaagggcgctatattgatgttgcttatagaatttctttggatgagtcaatcgctttagtttctaaaacaattaaacgaaccaataaaaaattaccagaacaaatcgaatcattaaatgaatgtttaatagaaaatattaaagaatcaattaattctaggttaacagataataatcccaaaattaagcagtattttaaggatgctttaccattgcatccattgacaacagtcttattaggcgcgatatctaaaagtagttttagccaaaatgaacgaagtatttttagctttcttttatctgtagagccatatagttttagaaggtttttagaaacagatgttttatataatgagacatatacaattgtcgatttatgggattatttaagtcaaaatttgcagcatcaaatacttagctcaaaagaaggtcatgcttggggggtagttgagcaggctatcactttgcttagccaaaagcttaatagtgtagaagaaaatgattcatcatttactgatatatatttcaagttaattaaagcaattgcaatgatgaatatatttggtaagactttaggagtttatcctactagaaacttattattattttcattgccatttatagattcatctcaaaaaaaattagtatcagtttgtttggaaaatcttgttaaatgggggcttattacttattggaatagaactaattcatatgaagttgttgaaacttcagagttgaatatacaacaacttcttaatgaaaaattacttaccttgagccagcatcaaaactatttagattatattgaatataatagtaatactgttttagctaaaagatactatcaacaaaaaggtattatgcgttggatggaacagcatttaatcattaattcaacagaacttaaaaagctagattctaaatttaatattttaaaaaacaaagctttttcatattttgtgttaatagctgagcaatctttaactaaacaaaaacttgagaaattatcaaaagaatatcctaattttgctattgctaaattaaataatttaaatgaaattagtatatgggcaaaagaaatttttgctttaaaacaattaaatatagaactgccaaagattaatgtcgatcaggcagctaaaagagaatatgagcaacgattaaattttgcttatcagcaacttgatattttattccaagagtcttttgaaaatagtgattggttctatgcaggggtggcggtagaaaaaaaatcactttcaatgatggtctctgattttgctgataataaattttctgcatgtccttctgtgtttaatgaattagttgttagaaatgatgtttctagttcagctgcatttgggcgtagaaagttaatggagataatgctagagcacagggctgaggaaaatcttggtatcgaaaaatttccaccagaaaaagcaatatatctttcatgtttaaaagaattaggattacatcgactgaatcaagaaacaggagaatggttcttttcatttccaaatgtaggtgatgaggaattaacagttaatcataaaaagatagcttatttatttgaagaaggtttcaacctattaaagagtagaaaagagattatcaaaatatctgagctttacgatttttggtctaagccaccatttggtcttcctcaaggtattttgcctatatggggactagctttgctactagcaaagcaagatgctttagcattttatgatcaagatattagtcaggattttagatttatcagcgaaatggatgaggagtttataaataagttaattaaacatccagctgaggttggggtaacttttattcgtgatcaattagaaaagaataaatttatagatactcttacagctgttattaatgatattcataataaaaatatagaagctaatcccttacaaattgctcgctatatagtttcttatgtggttaagcagcctaattgggtaaaattttcaaaaaatatcaattattttagtagaaatactcaaaagttaagaggatttattgttaaggctgatgacccttataaacttctatttgatgatatgtatgagttattcgatataaatatacttgatgaagttaaatttaaatctaatattgcagattttttcttacaaattgacagtgcaaaaaattctttattgcaagattttttatctaaattagaagaggaattaggtgagtttgataacgaattgatgcaatatgcaaaaattattagtcaatctgcagcagattggcaaatgcaaaaatttgcttatcatatcgctaatagtagtgagcactcgaaccaatggataatcaatcttataactttactgtctcaagtccctgaaagagattggacggatgacagtattaaaaaagcatttgaaatgatatcaaattatgtctaccgttttaagcaactttgtttttttgtaaaaaatggacatcctgatctcattgataccaaagatcaaaagcacttagctattattgttaatacagataatgggttagaggaatataatagagacatacgtattagcagtaagattcaagaaaagattgttatagcagctaatagttttagagcttttatagaaaatcaagatgatctgaataaagatgcaaaagcattagtcttatatgaattacttaaagattatttaagtccagtttcggaggagaagaacaagtatgtcgattag

SEQ ID NO: 53658 - DNA, 870 bp, Acinetobacter baumannii
atgtcgattaggaaaataaaacatgtacttggtctttctggcggaaaagatagtgcagcgttagcagtctatatgcgagataattatccagacctagatattgaatatttttttacagatacgggtaaagaacttccagaagtcatggattatttaaataagttagaagcatatttaggtaaaccgatcttacgtttgggatctgataaggattttgattattggttaaaagaatataatcactttttaccttctggacatcaacgctggtgcactgttcaaatgaaattagttccatttgaaaaatgggtaaaaccttttttggatgcaggttatgaaattataagctatgttggtatccgtgctgacgagccatggcgtgaagggtatgtacctactcaaaagtttctaacaactaaaatgccatttgcagaggatggattagtcaaagaagatattttaaatattttagagggaacaggcttaggattaccaaagtattatgaatggcgctcaaggagtggatgtacattttgcttttatcagagaaaaattgagtgggtacgtttgaaagaacgtcatccagataagtttgaagaagctaaagcttatgaaaaacacttagctgataaaaaatctacaaatggtgaaacctactattggatgggtaaaaatacacctcttagtacgcttgacgatcctgaacgtgtggctcaaattaaagctgatcatgaacagaaattactaaagtttaaaaagaagcgccgtcgaaacgccttatatgatgatcaattaatagaattgattgatcttgatgcagtttatgatgagatggagggtggtggtgcttgtgtaacttgttataaataa

SEQ ID NO: 53659 - DNA, 957 bp, Acinetobacter baumannii
atgatcaggatccaagttaacaatcagatctttcatattgaaaataaatatgaaatagactcaaaagtattcgaacatttagaacatttaggtaagggtggaaatagctcagttgaatgttacttagaacgagattctgggaccccgtatgcgataaaagtaattcctttagaaaatcacacaatttttcatgaaagggagtcaaggagatctattgcagagttaaaacttttaagacaattgaaacatcaacatattataagtttttatggctttaaaagagtaaaaattgaaaaagttcttcgctccaataaaattaaagttgacgcattacttattttaatggaaaaggctgactgttccctcaaagaatatatttgtacaaataatattagttattctgaatattctgggcaaatactaggcttatgtgaggcattaaatcttatacacagtttcgcaattcatagagatttgaaacctgagaatattcttgttgttaattcaacgtgggtcattagtgatttcggattaagttatatgctcgatggctcaagtccagagataacctctaattcaaaagcaatcggtcctaaatattggttatctcctgaagctttttcaagatatatcgacattgatgaacaccgtaaagaaattgctctatgctcagacatatatcaaatgtgtgcaatattttggtttattatcaatagaaaacatccaagtggtatacttactgaggaggatttttgtggtcctaaaaaactctttaatccaatcctaagaggattacaacataatagtaatagaagataccattcaacaaatcaatttcttaatagttttaaaaaggtaattttagaaacagaaacagaaacagaaacagaaacagaaacagaaacagaaacagaaacagaaacagaaacagaaacagaaacagaaaaggctacgtaa

SEQ ID NO: 53660 - DNA, 1356 bp, Acinetobacter baumannii
atgaacggaagatggaaccccactaatcataccatcagtgattttaaagattgggataatgattccaaacttgttatacaacccgattttcaacgtaaagctgtatggaatgcaacttccaaagttatgttaattgatacgatactaaaaaagtatcctataccaaaagtctttatacaaaatacatcggaagatggccgtacgattagaaaaattattgatggtcaacaaaggattactgcaatattagaatttgtgaataataaatttatattagataagccctatagtggtgtctatgaaggtaaaactttttcagaattacctcaaaatgagagagaaaatattttacaatatacaattgactgtaatgaagcctatggttatacggatgaacaatatagagaaatttatacaagattaaataaatatactgttcctttaaatagtcaagagttaagaaaagccgaatttcctggaaatttttatcaattatctgaaaaattagctgcttcagaaatattagataattggaaaatttttactatttctagtagacgaagactattagatgtagaatttatttcagaaatattagctgctctcttagaaggtcctcaagacaaaaaatctactttagataacttttataaaaaatataataatgataatttagaagttttagaaagaagatttcaaaatataattgaagaaataggactaattttcccaaacgatactatttctaaaactcgatttaaacaaaaagcagatttttattctttagtattatcaattgatttttttacacagaaaggattaacacttaaaaataagaatgttaaagctttacgtgaagatttcttatttttagatagagagattgatccatctgaagaatcccatattaaaattctacaagaatatgctattagatgcttgagctctgcaaatactgcatcctctagaaaatggaggttggattttttaaaacttattttatcaggtagttacttaagtaaagaaaattttataaatacaatttccgaatataaaaacgactttaatttaaaaaaatttttagagctctatgatttggcagatccaatttatcaggatacgggcatgtgcccattaggtgcaagccactgtaaagcatgtgatgatgaaattgatttggatacagaagaatggtctattggttggtacaaacaaggcccttttcagtcatcaaatttaactccaatccataaaaaatgcttctcacctgaaagctttctagaatataagtcgagtttttatactgaagaaaaatctaagtttattgatgatttatttaaaggtcttgaaaaatga

SEQ ID NO: 53661 - DNA, 1122 bp, Acinetobacter baumannii
atgctaaagtatctctctcttttacacttaaatatgatttatctagattttgcagcatctacgccacttcttccatctgttcaaaaagaactatttagggcatttgaagaagaattttcgaatccttcatcagctcataaattaggccgttcatcagcagaaaaaattgaaaatgttaggaatataatcgctaattcaattggagcatataaaagtgaaattatttttactagtggcgcatctgagtcaaataatttagcaattaaaggttatgtcttagcgaataaagataagggtaagcacattatcacttcatcaattgagcataaatgtattttatctatctgtaattttcttgagaaagaacatggatatgaaattacttatatttcaccacagaagaacggaattattgatgctctagatgttattaaagctatgcgacctgatactattcttgtaagtattatgcatgtcaataatgaaataggttcaatccaaccaatcaaagaaattggagaggcatgctttaaaaaagatataaaatttcatgtagatgctgcccaatcttataagaaacttcctattgatgtagatgatttaaatatcgactttttatctctttcagcccataaaatatatggtccaaaagggattggtgcattgtatattagagatattaggcaaacacgaatacaaccgattatacatggtgctggacaagaaatggggctaagaggtggttctttagccacaccattaatattaggctttggagcagctgtagaagatctaaccattgaaaaaagtatagatgaagttaataaaatgaatcttttattaaggacaaaagttatagaaaaaggtggatcaattaatactccagatactaatcatattccgcatattctaaatataagacttcctaattttgatgtttcacattttataactacctcagattttttatgttcgcagggatcagcctgttcttcacttaatatagaaatttcatatgtactaaaagaaataggtttagattttgattcagcaaatcaatccattcgttttagtttcggatataatacaaattataatgatttaaattatatatttaaataa

SEQ ID NO: 53662 - DNA, 2385 bp, Acinetobacter baumannii
atggctgtcgatcccaaaacaatatttgaagcaatttctaaatcaccaatggagttgctagctgatagaggtctaggtctctacataccctcttatcaacgcccttatagttgggataaagataaagttagtcgattaattgaagacattagccatggtataaaaactttaattaagtcagatgatagttttacctttcttggaacagttataacaattcatgatattaataactcaactgtccaaccaattgtacgagcagatgtacctagcaaagtgctgactgttattgatggtcaacaacgcatgacaacattattattagtatgtattgcactgcataacacattaaatttgacccataaacaatttatcaaaaaaacaaaagcattatttatcgaatatgaaaaactaactaataataatgaagaagtaagtttagaacttgaaagccatataactgcattagaatggctcgatggtcaaactaaagaggttttatctgctttagccgataccttttatgaaaaatattcatttggtaaatcacctctttatcctcgaatgatcagatcaattgatgatcaatggtctaaaagtacaataaataaaaaatatgactcacctatcgcaaatttaacttttaattacataaccgaaatagataaattagattatgaagtaagtgaatataaaccagttaaacgtgattcaaatattgagggtgaagaagctcttgttgaccgttttaatcaattaatgaaaattctgaaaagtattattaataatcgtaataatatagcagaagaaatggaggaaatccctagtattgaagatatttacgcttcagactcttttcaagagggattactaaaccatgtagcgcctgttcaagaaatacttaatttaaaagaggcagaaaaggaaatttttgacaaattaagtctacttgtattttatgcacgttatgtcctccatagagtagtcttaactgttgtcaaaggtaaaaatgaagattacgcatttactatttttgaatctttaaatacaacaggtgaacctttaacagcttttgaaacttttaaaccaagagtagtcaatgccgtaggtcttgcaaattacgagaattcaattgaaaaaatattgctagatcaggtttctgaatatttatgtattttctcggtaggtccagaattacaaaaagcaactaaagaattattaatccatttttttagctcatattcaggattaaaaatttctggacgtttagcagaacaacgtagtgctttgaaaacctcatttgaagaaggaaatgatccacttgtttttattaaaatgcttagtcattgtgctaactttaaaaaatatttttgggaatctgatagttacacagatatccaaaaattttttaatcatcatcaattgtctccgacaaccaaacttggattaaaattttttaaagatatcaaccacacaattgttattccaattttaactttattctttagtcaagttgttgatgctcaaaatccaaatgaaaaagaacaaagatttaaagactttgaagaagccctaaaagccatgctttctttcagtaccctgtggagagctactagaagagggacaggaggaatagataatgaataccgtgaaatcctcagcaaattagaaatgccctcaggtctacctcgcttagcgaaaatttatatgcatggtaaagttataaatatagatcttttcaaagctgagcttaaatcaagattacttgacgcagaacgtaaaggtaaagttctaaacaaagaaaattttatcaatttagcaacttatcaaccaatttataaaagctctaaattagctaaatttatcttgcttgcagctcaccacgatgcagtagccgatactgcatatgaaggtttattgattaagggaaaagttctctctaatcctagcttgaatctagaaacatatattgatgacagaaatctatctctagaacatattgctccacaatcaaataatgggagttgggaacagtcaatttacgagcatggtgatttaattgatactctcggtaatctaacccttgtttctcatgaacttaactcatcattaggtaatcgagtttgggcagagaaaagaatcttctacaaggttgttggtgctcaagaccagaatagtgctgctgaaattttaagacatgctgctgaaacgaaaaatattcgttttggtggcttaacaaatgagttattacaagcgcaaaaatatatgcctaaccttatcgctttaggtaatatgacaaagccatggacaagtgacttcatcattacccgttctaaacgactttatgaattagcatgggatgaacttattaagtggctagaataa

SEQ ID NO: 53663 - DNA, 498 bp, Acinetobacter baumannii
atgaaaaaattacttttatgtggggtcattgcggtttgtactacattacatgctgaaaatttaacttcggttaatgatatctataaattaagtgatccaagtgatcccgcttatagtcgtattaaccagaattctaatagatctgttagagaacttggacaaaatactgtaggcccaagtgaagaagctgtgtttcaactgcggcacaagaagcgcgaaatcgaaagaaaagatacattgtgtaaagctgctttcgagatggctgctaatattatgaatgagcgtcaagctggggtgagtaaagcaattcagctacagtcaaatttgcagactgcttatagatctcctgagtacacaaaatatcaggtgtatttgataaataaagcctacgatgagcctgtttatgcaaaaacagtggcaacatattatgtgagtcaggaatttgcctataaatcattttttgaatgtaaaaaaagtgtatatagcttaattccataa

SEQ ID NO: 53664 - DNA, 2397 bp, Acinetobacter baumannii
atgaaaaatggtaaatctataaatcaaaaatcatatccgttaacgcgttatggatttatttgtgctgtttcaagaatggaatcttcatcagatttaagtttacccttaacggcaccggtaaacattagagcaagccaaaataaaaattctcggggttatattggtttttttcagtttggggaagctgcactgattgatcttggttattataagcattggaatgataattctgataaaaccaaagcaaacgattggaccgggagttgggttggacataatggtgttaattctttatcagattttttgaaatcccctgctaagcaaattcagatcattggagaatggatagatcttctttgcaaacgattaagaaatagaagtttcaatgaatactatgggaaaataataaatggaattgaaattactgaatcaggtgctattgcaggtgctcatttagttggggaaggaggattaggttcttttttaggtatatcaggttttaaaggaaattataaagaagtagatggaaataatgttcacattagtagatatattgagatgtttaaccattatgacttagaaagctgttgtagtagaaaaatatatataatattaaaaaaccaaataggacaaatagcaaaaaataaaaaagtaactattgaatctgaatatagtggtaagtttaaacaatctaagtttattgtaagtgctgagtcagatgagcaaggattattacctgttattattagacatccaggcagtaaaattataattaaagtagatggcaaacaatctgctgtcatcacacaagcctctgataaaaaacaatctattgaattaagtgtaagtgaagatattaaaattcaatctgtcttacaaaaacctgctgaaccagagccaaaacaagaaaaagttgttgtggtggaacagaaaactgttgatttgaagaaagatgaggtgaaaacgaatgctcctaaagatataaaatttgatatagcgataattgaaagtgacacaaatagaaaaataacgaatatgaggttttttataagatataaaggtaagatcaaagagcatacttctgatagttcaggaataaaaactggtataattgcagaagagggggaaaatttagatatattggtaaatggaagtaaaggttatcaaaaactaaaaacaatatctataactaaaggaatggaaaatagttgtatatcagtcccattaggactagtcagtgtgaaattgaagatacatgatagtaaaggtaaaattttaaaaaataataagttttttgtttcatatagaggtagagaaatagaaaaaataacggatagtaatggctttattcaattaaaaatgttgaatgcatttgtttataaattgcttctttcaaataagaaacctattttgacattaagaaatgatccaagtatttccgtaatcaatgttaacttaaattctgcagctacaacaatacagatgcctcgagtagcttcaaatcccccaagtaagacagtgccagcaaaaacaaaaccagcgaaagaaacgtcatctaagagagaagagagctttgttgattacttaattgattttattccttcattaggaaaaacagagaatgttcatacagaaaaaaatggtaatcctttaaccaaacagtatggtagtgatgtcgtttttactattaaaacaatcaataaagagacaggtaaggaagaaaatctagcttattcaattaagtataatggtgcaaaaagaacacattatactggacaagatgggattggattaaaaaaacatcggggtgaagagggaaagaaaattgaaattgttgtagatgttgatagtaaagaacaagtactttataccgctatattgaagaatcctatgccggttattgaaataagaatggataagccaaaagatgatgactcatatttattccctttaaaggcacggacaaattcatataaaaatggatttgctcgatttggttctaatcgtagtggtggaaaacgtaaacacgcaggttgtgatctgtatgcaccaacaggaactgaaattagagcgatggctgatggaaaagtccgtgtagtaaaaggtttttattctggtactgatgtaattgaaattgtacataaaaaacatattatacgctatggcgaggttctggcaggaaagtccttagtaaaagttggagatgatgtaaaacgcgggcaaactattggctatgtcggtaaactcacagtacaagttccaagtatgatgttacatttggagatgtattctaatcctaaagatactagtccattaacagttcgtggcaataatgcctatcaacgacgctctgatctaatagatcctactacttttttagataattcaacattatga

SEQ ID NO: 53665 - DNA, 525 bp, Acinetobacter baumannii
atgtgttattcaaaagatttttggtcatggatgggtgctaattctggtcaaatccaaatattgattgcggttatagctttactgctagctattattcctatccgtcatgcataccaacaatttaagttaagtaatattcagagagcattcgagttaaaaattaatttatataatttaatgactgaaaatattcaattgattaatcagtcatatgaaaaatttagtgaaataataaaagaatatacaattgttatagctgaattaagaaggaggaatgatccagaacttaataaacatgaagctcttcttgaaagagttatcaaagtacattctgatattgaaattaatgcaaccgatttgacagatacagctaaattattaaaaaataatgctattagtatgaataagttagaaactaatcttgaaattgtttctggtattatggttgatgctgctggtttcataaatcaagcgatgggcattgcaatagagatagagacattaaaaaaagcgaaaggaatataa

SEQ ID NO: 53666 - DNA, 261 bp, Acinetobacter baumannii
atgacttcatggatgaaagttaactgtatcgtaattatatctcttgttgtaaatactgtgagttgggcagaaccagcatcagctaaacatatgcatgcgcttgatgacagtgagctgagggaagtttcggatcatgaccactcagacgagagctcactttcacatgcccatcatgcagataagaaagaggaaccacaaaatttaagtaaggaaaataatcagcaaaatttaagactaatacaaacgtcttatccaaaataa

SEQ ID NO: 53667 - DNA, 1806 bp, Acinetobacter baumannii
atgactaatacttctactgatcaaaataaaaactcttctgatggaaataaagtaaaactattatgggagattcttaaaccctataaagataaatatttacaagtttggtggtatggagggatggaaaaaggaaaaaggcctggagatcagccacaggtccatgtcttattcagagaagttttagaagatttcagtcccactgataattttattcagattacagcaaacattacagatcttgtatcttggcgagttgattcaatttggcatcagcaacgaaaaatagattttgcaaaccaggatatctatgaatttgttattgatcatactgatttcgaatttaaatttttaaaaatctatgagaatgtggatgagaagaagaaaattaactttttcaaaaatcgagaagaatgcgaaatagtagatacgaaagagaaaaaaaattgtatttctttcaaagtgaaccaccctgactttgatgagcttttaataccatgtctagaatttctcactagagcatacggtttatcaactgagctcatacgaatacttactacatataatgaaagtgaacgagaatctcgattatatattccccacgtaggggaaaaggatctttggagtgtactacttggcgatagaattacccggcaggatgccgactttgtcgcatattataaatatactgaactcgctaagaatgctacacgtattttatatagtagtatcgttagaaattctgatttaaaacaagccaatatctatccaaaagttgtcccttggcatacggagaccttacctatccgagtgtcagggttccgcttagcgggaacaaaaacatttgttgtgacaagaatcagaggaatgaagtcaccaaaaaatgatcatattagaataatacctagagcaactgaacgtattaataccactacagacactaaccagcctaatccccccttacctcaattaggtagcggtgacattaacgtttccacaaatcagggcggtcgacgtccgccttctgattatgaattcttagaagatgactttgaatggattgatggcggtccagctagtgaattaagtaaatacaaatatgtaaaacagactaaacatccaaaaagaaagaagaaatatatagaaacacagactataggaactggagctcctgacaattcaccagaagtattaaatggccaaatagttccttcaacaaatcaatcgacagagtttcaggcctccgaggatggcagaattattggattatggaaagcttgtgtaaaagccatggatttcaatccagatttaatacaaaaagttcactattacacatttgaaaagggatttaactattccgaactcccgatgctgatcggtttttttactgaatctgaagagcagattcacaagacttggtgctacgcaaattcattaaaaacccaaataagaggagcattaattatcagattaactgtatcgcaattagaacctgtttatatttttgatatacagcccgcaacatatacgtctactgtagaaggtgaaactctgacaaaagaaagaggacatgccggtttagtgtttcaaatgaaatatgaaaaagatctcgaacagttcgtttcagatttaatgtatcatcttcctctacatgagggttcatatccctcaagagtgtttcaaagcttgttagtaactcaaatatttttatttcgacattcaaatacaaaagggttgaccgaaggtgaatcaactttgttgaatgctttaagaaagatagaaattgataaagtaacgttcaagaattga

SEQ ID NO: 53668 - DNA, 465 bp, Acinetobacter baumannii
atgaatgtacaaaaaggttttacattaattgaactcatgatcgtggttgccattatcggtattttggcagcaattgcgattccgcaatatcagaaatacactgctcgttctcaaattacagcagcattggcggaaatcagcccagggaaaactcaatttgaactagctctatccgaaggtacagctaacagtgtgaataataaccccgcagcaattggtttaaaaagtactactaataattgttctgctgttaatgtaactgcaaatggaactactggtactattgcatgtacgttacaaggctctgctacaattactggtggtgttctaactttaacacgtagtgcagatgtagcagctgcttctggagtaaatgcaaatgtgggtggctggacatgttctattactaaaggaacaacagatatttcttcagtaattgctccaaaaggctgtacaataatttaa

SEQ ID NO: 53669 - DNA, 954 bp, Acinetobacter baumannii
atgactatagtagttgcagggtacgatggaaacgaggttttttttatagctgactcagctataacagccaacaaaaagacattgctctcaggctttaaaaaaatttattcaattcctatcaaattaaataagccatatatcaaccgaactttttatcactatatgccttacagaggatatgagggagaggctgcatttgctctagctggtagtactttaatagctcaacatattattaatttaatcactgaacatttaggaaaaattcgattcattcatacttatacaccacatggaatacagtactctctgctaagacattgcaatacacgtgataatccgttttatgaatctaggtatatagaatatgatgataatttatatttagataacgagctttataaatccatcaatatcaatgatcttaaagatgttattgaatattctgtaaaagaagctcttagctctgcatcacaacattcacttaatgaaaatgattggaaaagaatcattgacaatgagtatttatttgcattgaattgcccaatttcaaataaaaactatctttatcaaattgagattaatgcagtcgaagaggatggagtcttgaaaagtgctcttcctacagttaagccaatatcactaaataaattaggcgttattggtttgaaagaccgaaaacaagatttagaagatttttataatcagcttattgctaaaaaatctgaaaatatttctctacgcatgttaggtaaagtagaagagtttattgagctctataggaatgaagggaacttaggtgtttctaaaccagttatttttaaaacatttgataaaaaactaattaaacgtatcaatattgataggaacggaagatggattttcatgactgaagatcaaaccgtatacaaaattatcgatgataaaaatgaactcaatctaaatgccaattag

SEQ ID NO: 53670 - DNA, 378 bp, Acinetobacter baumannii
atgaaaaatatagccaaattattaattatatcatctttaataatattctttttttatcctatatcaggtgatcaaattaatataactacaaatataactcgtatagttttttctttagcttcagtaatgttaactttaggattttataaacttgagattgatttaccattatggttcagtaaaccttttgcacatttaggtgaagctacttatggtatttatctacttcatcctatagtttatatctttataaataaaattttcaatttcccattaatttgtatagttactacatgttttataactataattctatcaaattttacttataaatattatgaaaaaccatttattaaaataggaaaaaaaataacttaa

SEQ ID NO: 53671 - DNA, 606 bp, Acinetobacter baumannii
atgaaaaggtatgaatccttagattggctacgaggacttatggcatttgctattatgatctatcatttagtaagttggcagttatttcatccagaagctggcagtttgcttggaaattttggtatttatggagtatcaatatttttcgttttatctggtttaagtatggcaattgtatatagcaactttattaaagatttccatacatcttttattttttttatacgtcgtttatttagattattaccattattatgggttgcagtttttatagtttctagcataaaatttttattacataaagaaatagatatttataatattttcataaatattacattactatttggtttcatctctcctagctcttacattaatataggcgcatggagtataggaaatgaagttttttattatgcgtttacacctatattaattataatttatttaaaaaataaattgttagggaatataattgttataattcttactttggtaagtttttatttttcattttttttattagaccccacttataaactttctcagcaatggtctatatatattcatcctctaaataattttttctatatagttgtggtttag

SEQ ID NO: 53672 - DNA, 447 bp, Acinetobacter baumannii
atgaatgagcaggaaatttaccaaaaaataggcgagttattatggtcaattatgccacaagatgctcaaattattacatttataggaaaaatttacccagaatatcaagggtggggtactagttttattctaaaaaatggaaaattaagtacatttgatttcggagaagagcctgcggatattgaactgcagataaaagatttagctaataatttgaggaatttagatatatttaaagaaaaatggacacattataaaataacgttaactgatactggaaaatttaatatagattttgcctatataccagaagaagatagttgggtgagtttatatatgaaaggaattagtgatttaagtgaagaagaacttgataaagattaccctcaaattcctaaagaattatggaaagagcgtataaaaatgaaagagaaaaataaaaaatag

SEQ ID NO: 53673 - DNA, 252 bp, Acinetobacter baumannii
atgtttaaaggtccaggtgaaggtatcaatatcgtaccaatggataagacatttaacggttcaagtggtgcatggtatcagcttgaaagtgattggaaaaaggctttggaaaataatcaatcagttaaagtaaatattcaaccagtttatactggagcgagcaaacgtcctgatagttttattattaatcaaagtattaatggtattagacaaccttctttacaattgaaaaatactgcaacaggaaaatag

SEQ ID NO: 53674 - DNA, 522 bp, Acinetobacter baumannii
atgacagatagttttttagatcatttaatagccttattaggacagtctaataaagacaaaattctaattgatttttttgtatctaataattttataaatagtgcaaatgatttaaatttacccatatatggtgcggatggtgaattattagatgaatataatctttatataagtagatataaagaaggcttaagttttatatttactgatgaaacattctttttaaattatttagataaacctatctctggagagaatttatacctttcaacaatattcttttataatgagggggtcgagggattctctcaatatgagaattcatttccttttaatttagatttttcgatgaaaaataatgagttggaagagatattaggtattcctatatttacgaaagatgatgacaatagaattataagaagtcaaaaatgggctttcaaagacaaaccttatactttgtatgcttcatatacaaatactggaaagattcgttatatttctttaacgctaccttattag

SEQ ID NO: 53675 - DNA, 438 bp, Acinetobacter baumannii
atgaatctattaggtaatgcaagtgtatttatagattgtattggacgaacagtaccagataagaaaatattagatgctgtaagtattgttgctgcagattttaatatttctgagactaatttcgctagtgaaaaaactttatattgggaatttttcaaaagaggtgttacttttcagtttgatgaaaatgaaacacttaaagtagtttttatatacattaaagataatgaacaatattttaaatatccttttttagatgattttattcttggagttaattatgagtcatctaaaactgatattgaaaaaatattgggaattgccgaaaagaaaggacaaaaatggattaaatatagattagcaaataagtatcttcattttgaatttggtgatgatgaaaaattaaatttaataactataggtggggtgaaagattaa

SEQ ID NO: 53676 - DNA, 768 bp, Acinetobacter baumannii
ttgtctttagcctttggtgggccgattggattagcgaaagacctgatagttgatactgtagcaggagatcaaatagcacagggtagtgatgcactgaagaatgaagttaaggcggttgtgagagatacgagctatgacaccgtttctggctatacttcaaatagtacaaaacagcaattatcgggtctgaatgatccagcatcgcaaacagccttacaagtttctgaacagctacaacgtactaaagatggtgttggcttcttggcaagtgtagttttaggggctggtggtattgcgaagacagctaaggttgatggcaatgaggttgaggttagtacggctggggttggcagcaatagtaaaaaggatcctgttaaagaactagaggtaggatcatatcaagagttaaaatctagagcacaagttggagatggtttagaacatgatcacattccttcatttgctgcattgaaaaaagctaaagaaaatgagctaggaagagatttaacaccatctgaaattacaacattatataatcaaggaacagttattgaagtttctaaagatacacacaaagcaggtaggacacattcgggtaaaaatacttctgtgcaaatagaaaaagatgcccagaatctatgtgaagctcaacgatgtgatttagatgttttaagaaagaatttagaaaatagaggttttgatcctaagagtattgatgaagcaatacaaaaggtaattgatcgaaataaagacagaggtattgattaa

SEQ ID NO: 53677 - DNA, 339 bp, Acinetobacter baumannii
atgagtaatagtattgaaacacaaacagagattttaaaccaattattgcaagtaatgcataacagtgtagatgaaccatatgactctatggagtgcatatttgattattataaagatccagatgatggctctgtttcagttggagaaaagttttcttatcaaataaatggtgaggttaaatcagaatatttagtatatgatggcctgatggttagtaacttagtaaataaattacacaacattatgactgcccatactggaagtaattggaaagagtttattttaagtttagatgagaaaggccgagctcatactaagtttatttatgatgaaagttaa

SEQ ID NO: 53678 - DNA, 1206 bp, Acinetobacter baumannii
atgcgtgtattaaaagatagctttatttatttaattggggagctttttgcaaaaagtctcccctttctgatgctgccatatttaacgcgaaagcttggaccagatggttttggtgagttatcttactatttaaccatgcttgcattatttggaatttttgttggtttaagccaagatggggcagttacgcgatatttctatttttatggaaaaaaagcgttaaatacagtggttaaggcgggatacttatttaatattgttatttctgttttattgttactcggatgctggtggcttaaagctgaaattatagcatatgttgtattggctactatgtttcagtcttttatcaacgtccaacttgccttacggcagtgtcaaaagcaaccacttaaatatattacaattcaaattatattatctttaaccaatgttttattcaccatagctgctcttgagcacttcagtcaagatttagtagcttatcgtatactagcaatcgttatttcaaacctaacaacatttctaatcgctagttttgtattaggagacctgtttagagataattatcgctttacatggcaaagattgcgtttagggctgttttatattttctcatttgggttacccttgatcctgcatcaatcaagtttttttataaaaggtcagttagacagaatttttatttaccaacaatactctaaagcagagcttggaatttattcagcaggggtacagatagcagccgtactgccaattatttttatggcactcaataaagcgattgtaccatattactatcaagggcttaaaaacaactcgttaactatagcaaagataaaaaaatatacattgtacagcttgcctttaagtatactacctgcagtagtcagttggctgttgccagagcaagtgtacctttggtttttagggcaaagttatgttggttcaaagtactatgttgtaatgtatttactgggatttggagcaaacctcccatatcttatgttagtgaattatttcttttattatggcaaaaatttgatgatctccaaggtgacaacgttatcatcaatcgtttatatagtttttttatatttctttgcaaaagaaactatagaattaattccttatgcattattgataagtaattttgtattgatagtcattttttggaagagaataaattatgcaagaacaagctaa

SEQ ID NO: 53679 - DNA, 417 bp, Acinetobacter baumannii; identical to SEQ ID NO: 49420

SEQ ID NO: 53680 - DNA, 1539 bp, Acinetobacter baumannii
atggctattaatttctttttaactgacgcaggtcggaatgctttaaataaagtaggcgatgttgctagctttggtggggagcttactcatcttgctgttggtaccggcaaatttgatgcatcagttgaagcgaaaaacctaacttctcttaaaaatgaattagccagattttctcttaatggtggtggtgtagatacagaaactggtactttgcgttttgtgatgagtattgagccaactttaacaatggaagtgtttgagatgggtatttacctatcagatggtactttacttgcggtggcctcgactacagctgctcaatcaatcatgtctttacatgcaaacgtagtagccattgtaacatttggatttgttttaactgacgttaatttaaaaaacgtaactatcaagattgatccaaacacaccaattgctgtgatgttgatgaatcagcatagtgcagatgaagaccctcatccacaatacggcgcgttaattcgtaagctcatgactgaacataatcagcatgaggatccgcaccctcaatatgcatttgaaaaagacgtaaaagccaaagacgatgatttacaacaacagattgatgatctagatcttagttccaaaaatttgttgcagcagttaatcgatttcaagaaaaacttagatgctcaatatccaaaattaattggagcaggtgtaaatattggtagctcagccacagttgaactaggtggcaaagttactgatttacgtgattcaaagtatgcaatctatttaacaccagaaagcacacatgaagcatgggagcttactcgtgctgaaaagggtttttcatatgaagtttgggaccgctcaggtcaaaaccggatagggtattcaggtactgtgaattggtccgttgttcaggtagctgcagaaacactaaacgatggtaatggcgattacacagtaccaggtgtttatatcattccaattcaaccaaaagaacaaaaagaattcatattggttggtgctggtggtgctggtggtggcagtgtctgggagttaggagcattggcacatgggaccagtggtacagatacacgcttacgtttaaatgaacttgatttggcggttgttggtggcggtaagggcggtaccagtggtcagtggtcgaatggtagtgctttctcaaatggtgctggtggtttagcaggtgtaatcactgtgacatcaaacataaccgaaatttcacgcaagcttggtaacgctggtacagctgcaaaccaaacaaaccacaaaggcggcgcatcagttagtccagtatcaaactggggtgctggtggtgatggtgctaatggtgtaggagatgatggctgggcacttggtggtggtggtgcaagtggtggtttactcatttgccgatatgtgaattcaaccgaaaaaactcagtatatgactttaattgttggcgaagctggtcacactactgaaagtaatggcaacagcggtaaagccggtattggtggctttgctcgtgtaagtactgttaaaacttaa

SEQ ID NO: 53681 - DNA, 279 bp, Acinetobacter baumannii
atgagaaatgactatcgaaatgctatcagagatttaattcaccgaaatcttcaacagaataatattcagaacttgattgtatgggagattaaagaggatgaatcgcaagatccatcactcttaagctacaagctttatggttcaagaaatcatattgatgcggttttagtggcctgtggtgccaacggtatttgggaaaaactaccactacaaaaggtagcatttccaaggctcgttgatcttttaagacttcaaaaagaatacttgcaggataattaa

SEQ ID NO: 53682 - DNA, 1131 bp, Acinetobacter baumannii
atgtcagcattcaagccagatgatttacgccgtgcccagctgcaattaaaccaatctttgcaaaatggtggagttcgtagagatcaacagagccgccagcgtgcagatagagaacagcgggcatttgcagaaaaagaaattgaatatgatgattggggaagaaagatccctaagcctatgttcttgcggccacaagatattgcacaaggcgaaaaatatgatgtagagagagtgctttttacaaccttaggtcagcgaaatggggaagtgccacggcgtattacccgtgatgatattttggcatttcaggaaaacattcagttattaaaagatcagtatagtaagggtattacccctcaaaacatcattaatttaagccgacaagatgatattgaccgtgcaaatgagcaaatatatttggcggtaccagtcagcagaaaagctggtttagtgcacttacttacgaatgccggtccaaatagtaaagtcttaaatcatcacgttgagattgagttttcaaactttaaatctgtcgtatttgatatcgacaagcaggcattaaccactgtaaaaaaccgcttggctaaaggcaaaatcaaatttcagtgtgattgcgaacgtcatacattctggtaccgctatatggcaactattggcggctacaatttaggacgtgatgagggcggctttccgaaaatacgtaacccgcatttatccggtgtggcttgtaagcatgtattgcgcgttgttaagtggattagttcaccagcagggattgcctaccttaaaaaggaagtagagaaagaccgtaagaaacaagttggtgcacggtataagcaaacagataagcaaatacagaattcaattaacgagcaagtaatggatttgatgaatggttctgttaagccaatcaaagccaatatccaaaaagcagaaaaagaaatgatgcgtagagctgataaagttgccaaaaagctcttagaaggcgaattaaaaaccctcaaacgttttgaagtggaaactgttagagcgagtcaaattgaaagaattcaagccttacataaatcaggcgcaatcgacaatgacatgctaaatgtctttatgaagggtttaagtcgaaatgctaaatag

SEQ ID NO: 53683 - DNA, 546 bp, Acinetobacter baumannii
atgctaaatagatcagtaaatcaagttgcaaatggacgccgtttagcagctagacgtgttgtgatgaatgctctagcaagtattccagcgcaaatttggcgaaaagaagtaattttcaataatccagctgaagattcaaaacctttagatcctctttcttttgaagcgaacactttatcgattcaagatgaacccaactacaagtatgaatataagggcgctgcttatgttcatttcgataaatttaatggtggttatattcaaaagaacttctcaatgaataacccctcagatttggtattaactgctcaagtagagccatttaatgatgaattagaagatgtattggacaggataatcaacatcccagatttgattcttaaagaaggggatcttttagggttaatgatttatgaaaatttaatgttgtggtttgagattgtgaatataactggttttagcctcatggcagattttggcagtaagtatgttttaaaccgtagagatgatttgtttatttcacctaatggtgatggagagagttaa

SEQ ID NO: 53684 - DNA, 303 bp, Acinetobacter baumannii
atgagttatttagtttttaatgtaaaagggaaaaagacaggggatattgatatagctgagcaatgtacttctgcaattttcaattaccaggtgatcgggaacggggcagaagtagaatttttcggaagtaatgttccttctgctgatccgcaaaatgattcacactgggtgcctattctttctttaacagctgctgcaccagatactgaaccatttagacaacattgctgggataagctccgttataaagtgaaagcaggtgataatgtggagatttatgtttcaagtggtgtaagtggataa

SEQ ID NO: 53685 - DNA, 246 bp, Acinetobacter baumannii
atgttagtagatatctatcaatcagcttcacactcttcaaaatatttaacagttccaaacggttttgatgttaataagttaaatatagaagagatagataaagattataaagtagtgaaaacttttaaaacaaacattgatcttgtaactaattcaaaattaatcgctgctactgatgaaatacttaatcaaataaataagaatggctatgcaatacatggagcaaccgttcttgcatcagaataa

SEQ ID NO: 53686 - DNA, 1779 bp, Acinetobacter baumannii
atgactgtgttatcagacgaaattcgtaaaaagtatgaggctcaacaaattgctacagctcagtgccgaaattactatttcaaaagtcctgatgagcttgaaaatgggtttgatagtgcacaaacagcggcagaagagtacccagaagtattaaaagcaatttttgattcaattggcatcgaatatgcgccagaagttgataaagctgtgatgtttggggtatcacaatatcaagcacgccatggcggtgatttaccccatccttcaatcattgcagctgcgttaactgctggtttaagtggtgcaaaacaagctggttctttgcctactgataccattagctattatgacagtattaatgaatctggatttgatgatgtaaatcaccagcatcatgaatctgtaagtatcgtcccagcgattactgtagcaactattgcaaacgttatcgcttatgcaacgccaattgttgcaatgattccaaactctaatggttcaaatgaagtaccgttagtatctattcgttttgtcaccaatcgtgattttggtgcaatgaagaaatcagaatacttagacggtgcaaatgcctcaaagccttatgtagagggccgtttacgttttgcattgtcaaatggtggtgcaggtacaacctactcagtggtagcacgaactggctatgaagatttcaaggcaaaaacgccagatgtaaatgcgaagttactgccgtttattgctggtaatgtttcaatcaaaatcaacggtaaagaagttgcgcatactcgaaaccgcagtaaatcaaaattttcaggcaagatttctgctattgctgaaaaaagcgtaattgtaaacggcgtagagtatcgtgttgttggtagtgaaattgacctttctgctagcaaaattagcgtgaccttaaatgaagctttaccagctggtgctaaagttgaagttcatctcgtagctgattttgatgcgcgtgatggtaacggtaacttcttaatgacgcctgtaggtgttgattttgaacctgaatatgaaaatttggtggcttcaccaattatggcacaggttaccgcagcaactttattgcagactcagttgaataatgaactcaaactcggcttcttaggtcaagctttggcaattattcagggtaaagttttcttggaacaaacggtccgtcttttaggtgaagcaaaagatttggctgaatactcaggccatgaaattacttttgatgcttctcgtggtgtaactggtaaattggcagctgcgtttaataccactggtgatctgtttggcgaagtaatgaaattcatttctgctgcaaaaatggatattaatcagcgtactggtggttctactgttgcatacgatttgtatgttggggatagtggtgcagtattctttaaccaactttctagcgataagatgccgacaaaaactgggtactctgctggatatggtcaaattgttcgtattggtacacttgcagatggtaccaacgtttatcatgcgccaacagctcaagagcttgtagcagaaactgatacagcatttgatatgcttttagtaggccgtggtaatgagccaattcgagcgccgtttgttgggtttattcaaacacctctctcagttattgaaacacgcccagatgcacgtgaatcagtactaactttaattggctctcaagctgctgaaatgaacccattggaccgatacgctgaccaaagctatgtcattcactgtatcaatatgccatctcttaaaaaatcgtaa

SEQ ID NO: 53687 - DNA, 624 bp, Acinetobacter baumannii
atggctgcagcaactcaaaacactgatgaaactttagtttcaactgacgaaaaagcgactactaaatcaaaaaacacacgtaataaaaccaataaaactacagaaacacagaatacccaagctggtgatgaaaaagcttcagaccaaggtgatttgttaaatagccaaggtcctgaagacggcgcttcccaagatgaaggtaagaaacctactgatttgaaaaatggcgattcagataatgaagattccagtattaaagataatggaaatacaactgaatcatcacatgagtctgtctcacctttaaaagatcttgattccaaaattagttggaatgttgatgagttagggtatgtagcaaataaaactaaagaaactgatattcccaaagccgaacatcaaattgtagaaaatctatctggatctaccattagtaatgtagatcctctagttattaatgtgactaataacggattttcaactgttttagaaccgttatcacgtgttgctattgaggcaggtaaaacagcaagtattacgtgtcataaccaaacatttaaacatcaagtactggaaaacttacgtcagttgaaggggcttggtaagaatctaactgttgagtaa

SEQ ID NO: 53688 - DNA, 219 bp, Acinetobacter baumannii
atgtttgatttaatgcccaaagatgcaaagagtaagatgcgagaaattagagttgttaaagcctttctgatttttgcatttgtattgtgtcttttaattttatacatcgaatatcaaaaatatgcacatataagctggaaatttgtattccttacctgtctatgtatgatctgggattttgatttaaataaacaagctaagtgtttgaaaaataaatga

SEQ ID NO: 53689 - DNA, 585 bp, Acinetobacter baumannii
atgtcagtttatcaaaagatatcggaaagcatagaagactttaattgtttaagagaatatcctattgaaaatggcttagggatagaaatttctgagaactgttttgaaaatgaatcgttgatttacgagaaaatactaattctaaaattggatgagcataatgacttttgctcttgttttacccataatcctcccgcaatgattgattttttaattattactcaatgttgtgatgaatctattaatttacatcttgtcgaggttagagagactagcggtgctaaaaaaccgacagtaagattaaatcaaaaagacataatggttaaatttaataatgcaattgaattatatttggaaaataatggtagaaagtttattgatgtagataaagtaaaaagtgttaaaggttatttagtgtgtgatccttggagtcttcgtgacaaagataatagggaagaaatctttaagagaaaaatgaaaacctctgcattagatttttatacaacacttaagcctctaagagtttttaataaagcatttatgattaagcctgaattgccaaatcctgttgttgaatgttgttaa

SEQ ID NO: 53690 - DNA, 1059 bp, Acinetobacter baumannii
atgaatggcacatttggagatttaagcttactagaaagaagtaatgctgaaaaaccttttttttcgattgaaaataacaatattgaatttagttttaatataatatctggtgaattaactaattatcgagttaattttgaagaaaaaataatattaaagaaggcgaaaagaaatttacaagataagtttaatgcagatggaagtaaaacactttactttaatgatagaatatattctgaagaaaggtctttaaaagattatttagaaatgcgatctttacgtatggcaatagcatttaccaactcaatttcaaaagtaatttcagatgtacattatttgccagcttcacgttcagggctataccaatcattgacagcttttggacaaattattgctgaattagctaaaagaagaacatttgtttcgagtaaaatagaacttccatcaatttcggaaccacttactgattattttctaaaaattactgaaataaaatataatcaaattgctgaaaaaatagagagagatattcttcaaggaaaaattgattttgatgctaaaacaaagaaaattttctatataaaatacaatggtaatttaagacttgatttgagtaatacttcttcaatggtatctgaaattggaccgattgttgcatatttaaagcacataattccagcatcggagaaaaaggataatactaaatctaaacaggtcatttttattgaggaacctgaagctcatttgcatccagaagtacaatctaaattaatggaaatatttgttgaattagtaaatttatgtaatgttaaaattatattaacctcccatagtaattttattctaaataagctaaataatcttatcctctcaaataagttggattattgtaaggttactggatatcaatttattgctaataatgaacaaggaaccattgctcaaaagttaaatatagatgagtttggtattgatgatactaattttgttgatatagcctcagaattatatgaagaaaagcttgaattgtttgataaaaagatggctgaggggaattaa

SEQ ID NO: 53691 - DNA, 315 bp, Acinetobacter baumannii
ttgccaggtacaggcacagtttcagcagacatcacagcacctgtggttgcgctggatgacgtgttgacgaatgacagcacaccagcactcactggtacagtgaacgacccgacagcaactgtagttgtcaatgtggatggcgttgactatccggcagtgaacaatggtgacggcacctggacgcttgcagacaatacacttccaacactcgcagacggtccacacaccattaccgtgactgcaacagatgcagcaggtaacgtaggtaacgatactgcagtggtgaccattgatagacttacaacggtcttctag

SEQ ID NO: 53692 - DNA, 378 bp, Acinetobacter baumannii
atgtccgtcttattctgtttgcttatattccaaagcttatggaatgtggcagcggcattttgcgtgcataaaaatcaggaaaaggcattacaacatttcggtcatcatgcagatttaaatgtatatcaatcttcagaccatatgcagactgaacatgttggtattgtagaaaattctgagaatgctccattaagctggcaagatcatcacgatcatttaccttcatgttttcatgtagtgatgactgaaaatgcacaacaagctcaagaaccttttgtgcgtgtacatgagctttcacaaatctattactggtctaattcttatcagtccccgtatcttggctctttaaatccccctcctgtcttaaccctgctatag

SEQ ID NO: 53693 - DNA, 546 bp, Acinetobacter baumannii
atgtcaaacaagactaagttattagtaattggatctacattagccgccgcatttggcggcttagttatttatgggccgagtgatcagcaggtgcaagcaacagctttaaaagaggggtatacaccaaagcccgtcatcccggttaaaggggatcgtccaaccattggcaatggtacaacattttacccggatggtcgcgccgtaaaaatgacggatccagccattacacgaaaacaagcttttgaatatctcaaattcacaatgaacaaggatgcaaaagcatttaataaaactttgctgaatattcctatctctcaaactgaatacgacctatacctcgatttcacgtatcaatacgggattggtgcatggtctagctcatcaatgctgaaaaaactaaaggtagggaagtataaggcagcttgcgactcattacttaaatataagtacgttgcaaagcgtgattgttcgattcgttctaacggctgctatggggtttggaccagacagcttgaacgacacgcaaaatgtataggagcgcagtga

SEQ ID NO: 53694 - DNA, 294 bp, Acinetobacter baumannii
atggcactattcttgtcatgtgacactagcaaaaatgaggctaatgttttaataacaagtccagtggtacttgaaaaggaatttagattcacaagcgataaaagtgaactgaatcttattggtagtgttgcagacgataaaagtggattttctaaagaaaatagtaaaaaaatccttaaccttatctacagtgcaaacacactaaaagttacaacgtctttcacaaataatgccgagtttgatttggcaaagtataaaactgatattcaaaacaacctcaaagcatgtatttaa

SEQ ID NO: 53695 - DNA, 2502 bp, Acinetobacter baumannii
atggctctaaatgctgaaaagtttgcgaatcttgaacgcgatattgatgacacaagcaaaaatatcaatgaggctgtagtaatcacacctcgctatggcgatccgttctactctgctccgcttgtttctaaaatcttaatggaaaatggtgcatatgagccttttgctaccgaagcacaattacttgcttcaactccattgctaccaaagcgggcggcaaaagcgcttgatactaaaaagatttggatttgggaagtccgcgcaccactaacaactccagcttggtacgatactggtgagagcgaacttgatattgcaaaacgctatgcagaaaatgctgcagtcgctgcaccaaaaggtattaaacaatttggttattacaccggaacatctacaacaactctaatttcgcaagatggtccacgagcctacgcagtgcaagtaaatgaatctggctttatcaaaaaatttagaactcaattggctggcggtccttcaaaggtaagagttcaggtatatcgaccaagtgacaaaggggcgacattaattgagacgcgtctatatgatgtttcttatcctcaaagtgaagtttctttaattgataatccgattcgtgtagaaaaaaatgatctggtcactttggcatgggtcagtggaatctttatccgcgggaaaatcgttagttctggtgatccgcttggaagtcttattgttacacaaacattaacaattggtcagcaagtagcaattagccgttctcgcaactcactagaatttcaaattgatgtcttaacagatagtcagcttgcaactgttcaaaatattgatcctatgacgcgcttggccgttggatatggggtggcagaatccataagcacttttaagcagggtgtattgaatacaccgaccacaacgggatcattcagttttgcatatggcaatattgatgctcttacaaaattcggaaagctaagccaaatcaaatatacaacccgaagtatcagtaaggatgttctatttagattatgtattcttgctccaaatgctgatgggacccataaagttgcaactgtcaaacaggttttagcgccatccgatgcaaacggtgtcgtaacagcaacatcaaagcactttggtgatatttttgtaccaaaaggcggctatgcattaatagcagggaccactgaaattgatgcacctttggctcaagttggtattgctggcggcttctcatacattgctgcaaccgatattcagctaaatgccaatgttacagtttctaaaaacagtaacaatcaaccaatttcagctgagtttacatatgaatcatcaagcttaaatcttgaagatcgtgtggtggctcttgaaaacatctctgactctatacagccgcctttgtattccacaaaacttgattctcaggcttttgcaggcacaacagtacctacagactggacagcaccaaactggactgttagtgatggcttgattagtcctgcagctggtggatggaatgtgacagcattgtctacaggctattcatctcttgctaaccgagaatatcgatttgatttcactgtaactgatgttaattgtgttttcgggttctgtaccgcgcctattgaggctaactcaggatctgcagtagcaatgattgacggtgtaaatggcaagctaagaatatacggatgggatggttcaaacgctggtactttggtagctgaggtttcaattgcacctttagttgcaggtagtcgctatacagtgcgagttgaaaaaactggttactttagcaaggtaacgctgatcaacaagattactggtgcaactgctattgttgagtattctggaacatccccgtatgttcaattccacggcagagctggttttatttttataagtggcggtgccaatgcggtgaagatcaataactatgtatttgttggtctttatccaaaaaaagttaaggctattgtaatcggggatagtaactcagagcgtgctgctacagtattgcctaatgaaacttgggctttcaagtatgctgacctacgcagaatgaatgctgatgttattgtggcgggtagatctggtgatgaaactccaaacttcttaaagagaaaagagtttgatcttaaaaagtggcagcctgaatatgttgtttgggcattgggtacaaatgacacagatcaaaacacatggcgaactaatatggctcagaatattgccgacacactggcattaggtgctgaaccaattcttgtgacccaagtaccaagaggatctgcttcaaatgtgcatttcttaatggatgaagattacagaaatggatactttggcaattatcgttatgttgaattcgctaaagctgtatcattgaacaatgatggtttcacttggaatcctgcttataacagtggtgataacttgcatgtaaacccagcagggcaagagcgctttttacagcaacttatgattgatgtgcctgaattattccgttaa

SEQ ID NO: 53696 - DNA, 477 bp, Acinetobacter baumannii
atgctttgccctttattaaagggttatgaattcacaccaggtaataatttgcgagagcaagaaacagaagggggaccgccaaggcaagtccccttttttgttggcgcttggcacaccgtaaacgtttctatctcgcttaataatgctgatgacaaggaatatttctgggctttttggcgtgataagcaatacaagccaagtaactggctttggaagctcgcattagacaatggaactttggaagagtgtgaatgcagatttattgcagactcaagacccaaagaagtagagcgtgatggcaagattttgcaaatcagttttcagttaaggatcaagcctattttccgtgatcctgcaaatgatcgggacattattgaaatttggcaaaacggtggaccaactattgttgggaaaattgagaaaattccaaatgagtggctccctaacgctcaaggagtgaaatggtggcagaaataa

SEQ ID NO: 53697 - DNA, 255 bp, Acinetobacter baumannii
atgagaaaattttttcttattcgaaagttgattagtcaagtggcgaacttagatgaaaatgatccggccgttttaccttgtattttaagcgtgatgaccccgtgcatgatgcttattattgccgggcctaatgctcaagcacctgagccacttaaaaatattgctcagatgccattacatgatttagttgaacactttaaaaaattttcattagctggattaaaagcaattagccaatcaaatcttaaaaattag

SEQ ID NO: 53698 - DNA, 396 bp, Acinetobacter baumannii; identical to SEQ ID NO: 46595

SEQ ID NO: 53699 - DNA, 960 bp, Acinetobacter baumannii
atgaataatctaatcactgcagctgaagcatttgcagctcttcaaaaaggtaaaactgttctttgtcgtcctattggagacatgttggacttttctgacttagatcaattccccgcttctgtttttggtaaaccgggttttgaattctgcatcaaaatcgaaactattgagctggctggcattacattcacaaagccattaactattgatgagtatgaagaaggtcaggatgtttttgtaattactacatattcgccttctatttacgtcgtgaattttaaaaccaccgcattaattgattctattaactgtggcttcgttcaacgtgatgcagaaaacgccaagcttcaattaaaagcactgtccaaagcgttaggttttgaagttagtgacgatttaagtgttattcgcttaggtgatgaaaaaaagaaacagcgtggcaagaaatcaaaagcagaaaagcctattgaagttatttctgcagaaattcaaccaacaattgttattaccgaacaaacaaatgtcaccacatctgaggatctgttagttccagaaactaacgagcctaaagtagatccagaatatcagcaaaccctagatactcttctacagcgtgtaaaagagtcaaaaacacctgcagaagtaaacgcggtttatcgttatacccgcacatgggatgacgaacaaatgaagcctatccttctcgccactcacaaacgtcttgaagagctagaaaaagaaaaggcatctgctaatgagccaccctctttaatggttcaaatccaaactgcaccagaccttacaacattggatgcgctggaaatagatgtggctgcacgagatccgcagattcaaccgaagctaatggggtatgtgagaaaacgccgctatgaattagagaatcctacacctacccaacctgaagctgatcctgattatctattagtggacggtttctaa

SEQ ID NO: 53700 - DNA, 324 bp, Acinetobacter baumannii
atgtctaatttcaaaaagcaccctgacggctataagtcttttttaggtcgtgatgataagggcctctactctgttcgtattggctggcaagtgtacgcatctaatgctaatggctcagttctttacaaagttaaagacggatttaagacgcctttaaatgtgttcaggttccaaactgactatccaaaagtttggaatgaactcacacaagaaattgatttccaacgcagaaagcagctcgcaataaaactgcgtgaaacaaacatccctacttatgaccgcaaagcttataaaactaagcgcggcttcactggctcaagataa

SEQ ID NO: 53701 - DNA, 291 bp, Acinetobacter baumannii
atgaaagattacaactgccctacttgcaagaagatgattcctgttgaccgttcaaaaatcaaagctggtgatgaggtttcattttgcagagtaacccaatcttctaaatctgctcgtttttcttcaaaagaaggaattgtcgattgccgtgaaggtgatgtggttttagttaaatatcgcaaagaaattattcctttaaatattaaggacgtctcacctgtaggtgctcctagcccgcttacgtatgcctttgttggtacatgcgaatgtaaggaggctgaacatgtctaa

SEQ ID NO: 53702 - DNA, 768 bp, Acinetobacter baumannii
atgaaaattaatttaagttgcgtttcagctttctcagagcctagagataaattcttagctgagatgaataaacagaatgaagattcatttctggttcctatccagaaaggaaatggttttctatttggggttgctgatgggttaggatcatattatggtgctaaagaagcatcaaattttgtttgtaattatctccaagattctcgagaaattactcataagtatttagaacaaaatttaaaaaaagaacttaaagatagttttaacaattttattaatagtcagaatagtgactatataaaagcatcaacaactttatcaatttgttatatagatgaatttggtttaagtatatggcatgttggtgactgtaggatctatgtaaaactggacaataaattattgcaacttacaaaggatcatacacagtatcaaaagttattagataaaaagatctatagtaaaaaagaactaaatgagcttaaagtaagtcaaagtactttaacaaatgcaatttctccatttattgatctagagaatgattatacttttattccttatgacgtattaaaagttgagtatggacaaaatatttcaattttaattatgtctgatggtgcgtatcatttttgggatcaaagaaaaaattttagtaaaatcactatgagtgatcttattaaatttggtaatgcattaaaaagaagaattgaaaataaagggccgattgatgactatactctgataggtgcttctttcaatctaacttaa

SEQ ID NO: 53703 - DNA, 744 bp, Acinetobacter baumannii
ttggaaatttatagacattcaagttatgaatttcaagttgtgaaaagaattggaggtgggggatttggcgaggtttttgaagtttctttgccaacctgtgactttaaatatgcattgaagaagttttcccctaaaagagaaattgctgaggcatcttttttatctgatggagagttactagcaagatttagtcaagaaatgaggtaccaaactaattgcaagcataaaaatatagtatctatttgtattgtgcatcaaggtgacactcctttttttgtaatggatcttgccgattctgatttaagcactttaattaaagaaaataagttatctaaagaggaaaaaattaaaataatttatgatgtgatggatggtttagaatatcttcacaataaggggctctaccatagagatattaaacctgaaaatattttaaaatttaatggcgtttacaagatttctgattttggcttaattaagaattcaaatcctcacaaacatcctaacgacgtaatgagtgcaattgggatatgcttaggaacaaagcgatatatggctccagaagttgctgaggctgctcattactctgtctcatctgatatatttgcattaggagtaattatatctgagttacaaataaatgaattagacaatattgcaaataaatgcactgctcaaagggtaacctcaagatatcaatctatagctgatatcagaaaagatatttcaagagtaataaaatga

SEQ ID NO: 53704 - DNA, 429 bp, Acinetobacter baumannii
atgaaatctcggattggattaaaggagttatcagcaacttctttggttggagctaagataatcagttcggcagtttgcctatcattaagaattaatgcagtaagcatgataccggcggcaattgtagactttgtattcttctttgaaatcagaagaaagaactcacgtattaatctacgcttagtgcttggatcatatgcgccaaagattgctcgaacaaactcgattacccattccaatgtgacatcgcccatcttagggctacccatcacatcaacaagaattaactctttaaagatacgctccgctacgtcagccactttgggaaataatggcttacacggcattaacgattgtttagaaacaatacgagtcgcccagtctgggcaagctgtagtccagatgggtgacattgaagacataatttag

SEQ ID NO: 53705 - DNA, 162 bp, Acinetobacter baumannii
atgaataatgatgaattattggaacagcttgggtcagtagctaatttcatgcgaggaatgcagtttgatccacgtatcccagcagataccaagcaagctttaattgaacgtgctgaaacaattgatgagcttgttcaaaagtatttggatgaggattgctaa

SEQ ID NO: 53706 - DNA, 213 bp, Acinetobacter baumannii
atgacactatcactggaagaacatatcaagttgtttggctcacctattcctcaaggtattaatttgcgagttgttgagagtggaacagtagtggaaggtagatcagttaccgacacaaatgttgttcttaaaaactcagatttatatcttactcaaaagttatttgactccataaaagaaagatgcaaggaatttatgatagttgaatactga

SEQ ID NO: 53707 - DNA, 279 bp, Acinetobacter baumannii
atgaaactacaaacactgaagccgagattgcacatacaacgtgcctcaagtaagaacacttggggttcaggtcgtggtggtcgtccttggcgccgtcttaaagctaagatccatttacgtgatgagtggacctgccaatgttgtggcatcgtcactaaagacttagagcttgaccatattgtgaatgtggcaagaggtggaacggatgatgaatccaacctccagtctctttgtgttccatgccataaaaagaaaacccaacaggagagccggcaatga

SEQ ID NO: 53708 - DNA, 465 bp, Acinetobacter baumannii
atgaaaattagcctagaaattgatgtgccagagtttgattggattgatacaccaacattgtatagaacaccaattggtgagtttaacgacatccaagaagttaaagaaattggtcgcttgattgaatacctgcaacgccttgatgaaatcgaatggattattaattccaaccatcaacatgttcgacatccattttgtcgcgagttaattcgtgatcgacttcgcttcattcctgaaaatcaaatctattggtttggtgaaaaattaagttatttccttcaggattttgaaaagagaaccggtcgcaagttcgaagaatatgaatacaaatatcaagtcctttcaaatggcaagaagattcaatttaaaacattctcaatgatgtttgatactgaagaagcggctttgcgtcatatagcaaaggtttatacatcaaaaagtgattttaagtttgagaaagtttaa

SEQ ID NO: 53709 - DNA, 273 bp, Acinetobacter baumannii
atgaaactagttcgattagaaacaattaggcttaatgatggctcatttaaattgcaatttagtgaggatggatttgcgccaccatatccaaatactatctatgatggtgttgattttgcatcaggtaaggttagtatagattctattttctatcataatttagatagagatgacacaagatatttaatctacattaaaggttatctaggtcgaccagatgggaatgaaatccctaatcttgaaaaagcattagatgctcatctgcaaagttaa

SEQ ID NO: 53710 - DNA, 291 bp, Acinetobacter baumannii
atgaaccaaattgcaaatattagtcaactagaagttgatttagtggatcactttgatgctgtttgcttggcgaaaaatgatcttaattgggctttatacgctattcgcgaaatcgaggaaaaagtaaaagccttaaagcaagaagctgctaagcatggtatgtgtgaggcttgcttttacagcttagagcaattcactggaattcttaattacacaatgacacttcgatctgactactgggaaaatgaggaaatgcgtattcaaaaacaattagatgggaatggggaataa

SEQ ID NO: 53711 - DNA, 561 bp, Acinetobacter baumannii
atgaaaaagaatattactcgtgaaaatgtaaactcatttgaaagcaatgttgaggatgtggttgcctacctgacagatctgttaactactggtgaagaaccaactgtttttgaaacttttgcaatgggatggattggcactatcagcccacgctttgaaaagttatttaatgaggcaaaaattactcatacgaaacgccaaacattcccagctgagttctcagcagaaatggaaaagtatgaggcagtagttaaatccacaggtgaggattcagaagaggctagaaatcagtttatgaaagcaatgcttctagctcctgattggtttaatgacatggctagagataaggctaaagaaatgggcttattgcctaatgcaatttattgccttgaggatgggaccaaagtttttacgcctgaacaagtagcggagcatctaggtgtgccagttgaggaagttgtcagtcaaatcgaaagattgaaggccattcaggctgaacaaaagaaagttactgctgataattttactattgacacagccgatcttcagaagattcattga

SEQ ID NO: 53712 - DNA, 1005 bp, Acinetobacter baumannii
atggaaaacattgcgcttattggtatcgatctgggtaagaactctttccatattcattgtcaggatcatcgtgggaaggccgtttaccgtaaaaaattcacccgaccaaagctaatcgaatttctggcgacatgcccggcaacaaccatcgcgatggaagcctgtggcggttctcactttatggcacgcaagctggcagagttagggcattttccaaagctgatatcaccgcaatttgtccgcccattcgttaaaagcaacaaaaatgacttcgttgatgctgaagctatctgtgaagcagcatcacgtccatctatgcgtttcgtgcagcccagaaccgaatctcagcaggcaatgcgagctctgcatcgtgtccgtgaatccctggttcaggataaggtgaaaacaactaatcagatgcatgcttttctgctggaatttggtatcagcgttccgcgaggtgctgccgttattagtcgactgagtacccttcttgaggacagtagtttgcctctttatctcagccagttactgctgaaattacaacagcattatcactatcttgttgagcagattaaagatctggaatctcagttgaaacgaaagttggacgaagatgaggttggacagcgcttgctgagtattccctgcgttggaacgctgactgccagtactatttcaactgagattggcgacgggaagcagtacgccagcagccgtgactttgcggcggcaacagggctggtaccccgacagtacagcacgggaggtcggacgacattgttagggattagcaagcggggcaacaaaaagatccgaactttgttggttcagtgtgccagggtattcatacaaaaactggaacaccagtctggcaagttggccgactgggtcagggagttgttgtgtcggaaaagcaactttgtcgtcacctgtgctctggcaaacaagctggccagaatagcctgggcactgacggcgcgacagcaaacttacgaagcataa

SEQ ID NO: 53713 - DNA, 570 bp, Acinetobacter baumannii
atgcaagaatggcggccagcccgccggcgaagagcgcaccgcgcccgttttgtggttcagacatacgttggcccttttgaatttggattggatagcgtaaccttacttccgtactcatgtacggagtcaagcgatatggaaaataatttggaaaacctgaccattggcgtttttgccaaggcggccggggtcaacgtggagacaatccgcttctatcagcgcaagggcctgttgcgggaaccggacaagccttacggcagcatccgccgctatggggaggcggacgtggttcgggtgaaattcgtgaaatcggcacagcggctggggttcagtctggacgagattgccgagctgttgcggctcgacgatggcacccactgcgaggaggccagcagcctggccgaacacaagctcaaggacgtgcgcgagaagatggccgacttggcgcgcatggaaaccgtgctgtctgaactcgtgtgcgcctgccatgcacgaaaggggaatgtttcctgcccgttgatcgcgtcactacagggcgaagcaggcctggcaaggtcagctatgccttag

SEQ ID NO: 53714 - DNA, 276 bp, Acinetobacter baumannii; identical to SEQ ID NO: 10326

SEQ ID NO: 53715 - DNA, 435 bp, Acinetobacter baumannii
atgcgccggcgacacgaagtcccagatcgacaccccaatcatcaaggccaggccgacgtacatcaggttcgccgtccaccagttgccgagcagccagaccgtggccgcaaacacgatggccgggccgatcatgccgagcagactgcgcagccattgccgatgactgaaccaacccagcgcgttcgccaggaaggccagcgcggcaaacagcggcagcaggcggctgatgaacagtccctcgtactggctcaagaagcccagcccgatggccgcgccgaagctggcgagggctggaaagcaggcggcgcagcccatcgcggaaacgacgctgccgagcgcgccggttttatcggcaatgcgtgtcatcagtcccatgaagcggctctcgctgttgtcgttggcttgctggctcactgcttgacgctggacggatag

SEQ ID NO: 53716 - DNA, 1695 bp, Acinetobacter baumannii; identical to SEQ ID NO: 31949

SEQ ID NO: 53717 - DNA, 510 bp, Acinetobacter baumannii
atgatccgccccggaaggcgcgcagcagccgcgttacggccagaacgaacaagccggtcagcgcgagcgcggcaacaccccaatgctcgccaaggaaggcaccggcggtcgtcccggccagcacggcggcgagaatcggcagatggcaggggcaggtcaacacggccagcgcaccccacaggtagccggaaacgggttggcgcgtctcgggcggcagtttgtcaggggcgttcacggcaatgcctcctcgtgcgcccgctcggctggcatggaggccagttgcgcgtccagatgggccaacgccgcgcgccgccgctcgaccaactggcgcagcacggcaagctgcgctgcggcttgtgcgccgtccgctgcgtcgagcgcacggcacagccgcgccagggcatccaggccgatacccgcctcgaaggccgcgcgcacgaagcacagccgttgcaaggccgcatcgtcgaacacgccgtagccgcccgtggtgcaggccaccggccgtaa

SEQ ID NO: 53718 - DNA, 1680 bp, Acinetobacter baumannii; identical to SEQ ID NO: 10332

SEQ ID NO: 53719 - DNA, 330 bp, Acinetobacter baumannii
atgattaatctaaaccaagaacttgaagattttgatgcttatttttttaaaagacatggtgaattgccactagattctacctctgaggaatacgccaataaatcatatctaaaacacgagatgtttaaggcatggaaagcaagagccaaagctcagacggtgccagaaactcatctactaattccaaaggaaccaaatcacaaaactataatggcaatggcttgtgtctgcttagggtctgttggttcaggtgcagagttccttactcttaaagaagctaaagatgtttacagtgcactagttgaaaaagaatcgggagctgagggatga

SEQ ID NO: 53720 - DNA, 909 bp, Acinetobacter baumannii
atgaataacttcaaagggctagaagaaaaatttaaaaaaaaatctcctcaagtatctaccattgagggtcattggacacaaattcgttggacacctgacttagtaagtggtgaacaaatatcaataggtgtttttcttgaagaaaacggatttattcacactaaatttattgaagattatggccgcctagagtgtgtgtatggaagagatatatctaataacttagaattagcaattgatttaatagaatatctacttaaacgagattggaaaaaatctgtctctcctcaattaatatttgatcaaagaggatttgcacgtggtgaatcaatacaatctattttagacaaactattcaaccgtgcagtaccttttggtaaacctcatgacataccacatgagccgatagatcgcttcccaacctataggacatcaaacctaataaccaatattaagtcacgtatattcaatcaaatcggtgaaactgtttatgatattttcccagagaaatcttggttagatatctcaattgggcaaaaggttcatcaaattgatgttccaattcgcccgaaaggaacaaaacaggttggtagtattaactctacaatttataaaacatacgataaatttgaagtgagttgtctcgcagcactaactgacctgcaattggcaaagaaaagtggtctaggcgatgatgctgttttattcactttattgcctaatgattattctttaagtttacttcctgaagctgaacaagaaaaaagatttaatttcttaaaagaatttgaatggaaactggaaatgaatgagataacacataaaaaatatttcgaagaaattgatatctcggacaatattctaaattgggcgaaaaaaactattccccactcagatctctttaattaa

SEQ ID NO: 53721 - DNA, 939 bp, Acinetobacter baumannii
atgacatcacaacaacttattcagtaccttccctcttcaaattatattgaatttttgcgtggtgctagcgatggtgtttctggatcaacccatatggccacaataaggtgggaggatgacatcgagcgagattcttgggtaaaaatttatgctggggataaacctagaagcctaatcaatgaaatgattggatatatcctaggaaaagcacttaatttgccgatgcctcctaaagctggatttcttttagtggaaaataaaattcttaacccactattagtaagtaagctcagcgaggttgatcgatatagaggttttacttttgcatgggttacagaagatgtcaaaggaaaaaatcttagaatagaaatagaaaataacccagccattatgaatgtaatggttgagtattttagttcatgcatgaaagagtgggatcaactatcaaaattgatcgcctttgatgactggatattaaatacagatagaaatatggggaactcaattcacttaccagataaaacctttagcctaattgaccatggggaatgtttacatggaggaaattggaaagaagctcagttacttgactttaattgtcatcatataggttttgcaaacaatttccacttaaaattacttcacgaaaaacatgctcctgctgggctgtttcaatatgaaaatactatgcatgagcttgagttggcaaagttagaacataaaaaagcttttttaaatgctgagtcagaaatcagacttcatttacacgatcttattggtgatgaagttattgaaacaggtattgaagaaataccctcttatttggctttggaaactgttctgagttttctcaagaaacgtgcagaaggtctaaagaaatttaatgaaagatgtgatacattcttttcatcacactctattgttcgtccactgagttaa

SEQ ID NO: 53722 - DNA, 429 bp, Acinetobacter baumannii
atgagtctgcatttgaagccaacgcaattttataaaatgctggcatcggccgagtttgtaaatcggtggtttagtggtggaattaaccgagaagttttaagaaaaacaccggcggttatttttaaccataaagatttaatgcattcagaggttttattaaaaggatacggtttaccaatgcagagttatccttatagttttattccggcaacagatgctttcgttaaagcaattcagctaggtttgggttatggcatggtgcccgagcttcaggttcaaccattactcgaaaatggaacacttattgatattatgcctgaggctcaacttgatgttcctttatattggcatcactggaaaagacagtcgaaacaacttgatgtactgactgagaccattgttgaatcagcaaaacagatattgagataa

SEQ ID NO: 53723 - DNA, 204 bp, Acinetobacter baumannii
atgattcaattattacgacgtttacagcaaacagagcacttgagctatatttttattagtcatgatttaaatgtggtcaaagcactgtgtcataaagtgatggtattacgacatgcaaaagttatggaatatcagccgactgagctgttgtttaatgctccaaaaactgaatataccaagcagttaattgcggcaagttgttaa

SEQ ID NO: 53724 - DNA, 1209 bp, Acinetobacter baumannii
atggatgaagcaacaatcaaaagtatggctgccgaattggctaaaggtctaaaaacaccagaagacttaaaccaaatgacagcagtctttaaaaaattcatgattgaaactgcactcaatactgaactttcagaccatctcggttatgaaaagcatcagtccaggaaaggctcaaatagccgtaatgggtttagttctaaaaccattacaactcaagatggacaactggctttagatattccccgtgatcgagaaggttcatttgagccacaaattatcaaaaagcaccaaacacgcatcaccagtatggatgaccaaatcctctcactgtatgcaaaaggaatgactaatagggaaattgtagccttcttcaaagaaatgtacgatgccgatgtgtcagcatctctcatcagcaaagttaccgatgctgtgattgagcaagtgactgagtggcaaaatagagccttagatagcctttatcctgttgtctatcttgactgtattgttgtcaaagtccgtcagcactccaatgtgattaacaagtccgtataccttgctttaggcatcaatatggatgggcaaaaagaattactgggtatgtggattgctcagacagaaggtgccaaattctggctgtcagtcatgacagagctaaaaaatcgaggagtacaggacattcttgttgcctgtgtagatggattaaaaggcttccctgacgcgatagcctctgtttaccctcatactgatattcaactgtgtattgtgcatgttgtacgcaatagcctgagatttgtaagctggaaagactacaaggctgttacgtcgggtctgaaagcgatttatcaggcaagtacagaggaaaatgctttaaagtccctagacatcttctgtgatcaatggaatcaccagtatcccaaaattggagaatcctggcgggccaattgggaaaatatccgaacgatctttagctatccagccgaaatacgtcatgctatttatacaacaaatgcgattgagtcgttgaatagcgtaatacgccattcaacgaagaaaaggaaaatcttttcatctgatgactcagtaaagaaggtcatttacttagcaacatcaaatgctgcgaagaaatggacgatgccaattcaaaattggcgtttagcaatgaattggtttacgattcagttcgatgatcgattaaaagatcatttataa

SEQ ID NO: 53725 - DNA, 1302 bp, Acinetobacter baumannii
gtgactgtacaagttgtttctacagcaagtacaagttcggacattgataaaacaaatttactattcccgagcagtttctcattaaaaaatggatctgaatattggtttaaatattattctgctttaggaaaatgggttcctgaatatataaaacctcagaagctaaatgttcagcaaatcggaacatctttagcagcagtaaatagtccacttaccgaagtttcatttggagatggaaattgggtttccaatttcactttgccgaccactgcaagtgatcgggatagaattattatcaagtctacagcgacttggtctgcaaaaattaataataccaatattaatagccaagcgactttaacgcttaaaacaggcgatcaatatgagtttatgtatgtaagtgacaaaggatattggcagttgatctcttcaccaacaaaggtgattgattctacagcaacaatccctgcaactttaccgaatatgactcagcctactttaaaggtgaaattgtctacatcaaattggcagccaaccttacaactacctgctaaagctcaagtcggcgataaagttgttattgtgtctaatgcatcggcagacacctatattaatgccgctaatggcttgactactgcaattaaaaatggtgaaaatcgccgttttatctacaccgctcaaggctggacagtagatagttatacaattgatatgttgttggtttctagcccagaggtaaattcaattttaggagacagcgctgcaaaacttagaatgattgaaggcgtaaatttaacgaatttaactgctgaaaattcgaatgcacgtttttacttaagagatgtgggctatttaacttataaaattcctgctgctactcttaaagaagcaatctctactggacgagacgacaccacggtacaaaatgagcgtaaacgtgtattggcagacggtgtttattatcaaggtaatgaacctggtgacggtggttgtggttgggcttggattaatgcttctgcatataacatgattggcgcaaatgatattgcaggttgttctttcgcggccatgcgtcatgaagtcgggcacaatcttgggctataccataatggttcaactaatattggctcaggttttgcccatccgttaggaagtactgcaatgggtggtaataacattaatttttattcgagtccctatctatataaccctaaatatggtgtacgtttaggtgtagatggaaaaattgatgcggtcagtgtcattaatctgaatgcgcagaaaatttctctatataattaa

SEQ ID NO: 53726 - DNA, 582 bp, Acinetobacter baumannii
atgagaaatattattgcatgttgtttactgatatattgcccattcgttagcgcagaaataccttttggtcttaaagcaggaatgtctttaaatgagataaagaaatttgatgccaagccagtagagttgggtgatggaaattttattattaaaaatgttccaaagccatatgatggttttaaagattatgtcgtcaaagtttcaccaacgataggtttgtgcaaagtcgtaggctggggtaaacctgtaaaaacaagtgtatatggtgatggtctatcttctgaatttgattcagttaagagtggattaactacaaaatatggtgctccaaatggagattataacttcctgagagcaaaaagcatctggagtcaaccaaatgaatggatgatggggttatataaggaggagcgaattttagctgcaacatgggaaccaaaggaatctgatggtgttaagaacatcatgttaaaagcaaaagctaaaagtaccaatgaagggtatataacagttgcatatgagttctttaatacagaatcttgttataaagaaaaaaaagtaaaagacataagtggattataa

SEQ ID NO: 53727 - DNA, 696 bp, Acinetobacter baumannii
atggctagaaaaaaattagaagataaaatcaaaagagttggctactttgttagtggtggagtattgggctacttattgatcagtttttttatactaagttcatttccactacaccagtaccttctggataaaaaacttgcttatgatgttttaaaagatgcattcacgataggcgcagcatttcttgctccaattgctgccttcgttttatttactgattggagagttgaacacaggataaaaagtactcttcagcttttggaagatctgaagaatttatcatacgatattaaaaatggattgggtttttacaatgccaaaattattacggaaaaagaaatttcaattaaagaatttagaaatagagaagatcgtcaaacgatacaatggctacttacaaaattgaaaagaatgaatggtcaatttttaacagataatgtagaagtaaagtgttttcaagatttagtgtctacatttgaaagtttagcagataaggcattgaatgatttgcattttactgaatatttttctttcagaattgcaggagataaatatttaataaatcataattctaattataaaacatatttagagtttagagaaaagtttgacagcaaatttaaagagttagaagagctatccactaaaatcgattcacaggttgtaattgtaaaaaattccgttttacaaacttaa

SEQ ID NO: 53728 - DNA, 486 bp, Acinetobacter baumannii
atggaacctagattcgtcatcaaaaaccattctgacattaactatgtaattggctatctaaatactaatcatgcaaaggcagcgagtgaagggaagcctttggttgttaccattacttgtaagcaagaaagcctttcaacagcacagcgaagattatattggctatggatgactgaatacgggaatcatagagggctagataaagaagaggcctcatcattctttaaatacaaatatctgtcggtaatttataaccgtgacaatgttggtgagtatccagaaacatttagaacaatgaaggaacttaaaaagactggtgcaagccaatatgaggctttgcgacagtttgtggccaatagaatcagtatcacggaagcaacaacaaaacagatggctgagtttttaaaagatattgagattttttgcctgaaggatggtgtgaaactcacatgtccagatgaccttaaatacttaataaatagttaa

SEQ ID NO: 53729 - DNA, 1194 bp, Acinetobacter baumannii
atgactcagatagatattaaagaaaaagagaaagcagatcaaatacgaatagaaaacttcgtcaagaaagctgaaaagatacataattttaagtacgactattcagatacgaagtataaaggttatagggtaaaagttgatatttcctgtcctgaacatggtatattccagcaaagaatagactctcacttgagagggcaaggttgtcctgagtgtagcggcaataggaaacacaccaaagaatcatttattatgaaagccaacaaaattcataataataaatatgattatagtagagcagtatatataaataacgaaaccaagctagaaataatctgcaaaactcatggatcgttttaccaacagcctaacagtcattttaatggctgtggatgcccggaatgcagtaatttaaaaatttcagagtcccaatttctcaatactgaaatatttattgaacgtgcaagagaaatccacaaagacaagtatgactatgaaaaaacggtatatgtctattgtaaatcagaggtcataataacgtgtaaaatccatggagattatctccagaaaccatacttgcatttgttcggaggcggttgccacaaatgcgcaattgttcaaggtgcaatttcaagatcggacactcaagaagagttcttaaagaaagctactcaactgcacggtgacagattcaactatgagaaagttaagtataaaaaccatagaacccaagttgatattatttgtcgcgtccatggagtctttaagcaaaagcctaaagatcatttaatgggaagcggttgtaagtggtgttgtgctgaacttatcgggtttaacagaagtaagtacataaaagtaagtcagaattataatggtaaagcgaagttatacatcattaaatgctttaatcatgaagagttattttataaggttggtataacagtcaccccaattgagcagagatacagcaaaggtgcaatgccttatgaatatgaggttgttgcggttgtagaagatgaagctgggtttatttgggacttggagaaaagactccattcactaatgaaagatatacgatatgtgccaatacagaattttggtggatacacagaatgttttaaaactattcctaattccattattaagctcttgagtcagtttagacaggaagagcaaatacaacttatcgcataa

SEQ ID NO: 53730 - DNA, 975 bp, Acinetobacter baumannii
atgaaaaaaataggtatagttactgttggtgcagtgacattatgttgggctatgtatgaggtatcttctgataataccaatacagtaacgcataatgaggctagccaaaaagtcacatttaaaaacttttcatcaactgcaaaaaatgaaaaattagcgcctcaaatacttttggctcaaacgaattcccttaattcctccgccccagtctgcaaatataattttgacgcgaatcaagaagattatgatctttggaatgatgaacactctgactattggtctatgaaaatattcccattaataagtgggcaaaaatttagtcttaaagtagagcctaggccagaaagtaagtatggtactctagagtatgtggctagaagtaaaattagtcttaattctactaatgacattggagatttcacattacctcatactggtattattgcatttgaaatggagcttaagattccaacctcagctcttgggaattcatcacttggtaattctacttattactcctctgccattggttttaatggcataacaaataatggctatacggttagatccaactattggtttgatatgggcacttatgatccagattttggtgagaatcctgctagattatactattctgtagcttatcgacttagtgataatagcgggcctgacaatccatattataaaggtcaaaacatgacaaataattcaaatggataccaaagattagggatgtatattaatcagaatactaagcaggttggctttattgtaaatggtgttgatcaggggtatcaatctactttacccgctgcacttgagaatataagcttttctgtctcaagtgctatatcaatagatgccgaacaattatttggacaagaattatctaatgaactgattactgatcgtaatgcgctacagtttaactaccctcagggtacaaccgatatctgtggtaatgctatttaa

SEQ ID NO: 53731 - DNA, 1872 bp, Acinetobacter baumannii
atgataactaatcgacaaaatgtgcaaaataatactaatacatcacctcatccaattacccaaaatacacttattgatcggtttagtcctatttactggagaatagacggcccacaaaccatgtcttttgccattacaaattatggaaatggatttgaagcatcttttagatcacgtatgacaaatgacttggtagggattagctgggattcttatgatacgaaagatcataaacttttagcatatgaaaccaaatatagttatgcaggggtagtttgggattttgatattgaattatcggcttctatgcccgtacttaataatccaagtttaacgccaactttaacggtgtactatcatgacaatggcgtagataaaattgcatatattgtgttatttaactatgcaaataatccttcatcgcgaacggcgcatattcgtattaactgggatacagttaaagccggtttttctgctacagatagctttccggtaaccaatattcaacgtatctcattttcaggctttactagccactataacggccaatcaactacgcctttaagccagccggaagatggttatattcgtattaccaattcagtcgtgactggaacaaatgcaaagttaaatctgagtcgtgttgttgtaccccagcacaattatgggatctgtaccagctatgatgaccattatgacttgaacccgcagcgcctagtcaacaatatggtcgctttgggatatcagggattagtaaaccactattgtggaatgtcgcattatcctgaaatgacatggaaaagcgatattaataaatggcaaataccagatacgttggtaacaggtgaggcagtcgtcaacgcatgtacccgaaaatggcatgagaaatatgcccaagctctacataatgcaaacatgcaacccatttttggggtaagttttgagatgtattcacttggagcaaatgagttttgggcacagcgtgactggaatagcaatttaggtaaaacaggttaccaaccaccgagttatttctttagcttaagtgatcaaaatgctttggcttatttgcacaaagtttttattgagttcgcagatacaatggttgctggcggctgtaatgttaacatgcaaattggtgaaccttggtggtggtataacacggacacgaatctaccttgtgtgtatgactatccaacaaaattagcctttaatgccgatacaggactatatgcgccagacctaggcacaatctatgaggctatgaataaaacaggtacgccgtatgatgagtttaaaacttggttaagaaataagttaggacagacctgtcaaaatattcgagcagccattaaagctaaatatgcaaatgctcaagtgtgtcctttaatatttttcccatccattcgttctccaatacaaaccctagcaacctatatcaactatccaagccagcactactcatatccaaattttgattacatcatgactgaagcttatgactggcttttagaagctaaattagatttagctcatcaagctgtttctcagataccaactcaagatttaggttatccggcaaataaagttgcttatttatctgggtttgtgccagatgcatctattgcttatatctatggattcgacaaaaacaaaccttatcggacaccaatttggcagaggatttttggcgatatgaaaaataacgtatctcttggcctaatgaagcagtttatctgggcctatccgcaagtcatgtttgattcaattacaattgatacgacccaagccccaaatggtttctttgttgaaaatacgctttactcaccaattagtgataacacaccgtatccaccagatatttacctctaa

SEQ ID NO: 53732 - DNA, 342 bp, Acinetobacter baumannii
atggataagacttttgaatctttttggatcacctgtaaagatggttatcagcttgcagctcaattttatcctgctcaagaaaagaaagttgaataccctatcctgatttgtccagcaacaggtataactaaaaacttttatcactctttcgcaacgtggttaagccaacaaggctatgatgtattgagttttgacttccgtggtattggcgagtccctacatggagctttaaaacaaagtaccgcaagtattaccgactggggaacacttgatattcctgctgcaattgatgccttattaataaaaacgaaagcaaatcaagttattcttctgctattttag

SEQ ID NO: 53733 - DNA, 534 bp, Acinetobacter baumannii
atggacgcaagtaaagcctttaaaaaatcacgtacaacaatatacgaggctttaaaaagtggtgaattatcaagagatcatgatggacttatagacttgtctgaacttatcagagtttatggcaatccagtcggtgttcagtccagtgcacgtactgaacaagttcaaaaggatgtacaagtacacgttcaatctgaagttgaaaatgtattaaaagatcaaatttctttactcaaaaatcagttagagttagcaaatcaaagagaaaagtctttgatgcaacatattgaagatcttactcatagaattgagtttaagggcaccttagaacagccaaaacaagaaaatattaatcaactaaatgaatctactaattcgaatatagcaacagatcctcggccacagactgagtcaaactatgacggattgactactcctcagaaagacaataaacgtatccctgttccagaacacgttgagcctgaacctaaaaaaaggggtttcctgagccgttttttccttccttatggttag

SEQ ID NO: 53734 - DNA, 924 bp, Acinetobacter baumannii
atgcgggacttagtagttaaagataatgccttaattaatgcgagttataacttagacttagtagaacaacgtttgatcttattagctatcgtcgaagcaagagatagtggtcgaggaatcaatgcaaatgaccccttagaagtgcatgctgagagttatgtaaatcaatttaatgttgcaagacaaacagcttaccaagcgttaaaagatgcttgtaaggatctatttgtacgtcaatttagctatcaagagattaataaaagaggaaatgtagagaatgttttaagtcgctgggtgagcgagattagatatatcgatgatgaggctacagtaaagttaatatttgcccctgcaatcgtgccacttattacacgtttagaagaacaattcactaaatatgagttacaacagattagtaatctcagcagtgcttatgctgtgcggttgtatgaattattaattgcttggcgtagtacgggtcaaactccaattatcgaactagcagagttcagacaaaaaataggcgttcttgatgatgaatatacaagaatgggaaatttcaaagatcgagtattaaatctagctattgcccaaattaatgaacacacggatattaacgtccaatgtcagcaacataaaaagggacgtaatatttctggtttttcattcaactttaaactgaaaaaagtcgttatagctcataacaaagagcaagctgctcttgagattttctcaaaatttaccgatgcacagcgtcatctttttgccagtaaactgtctgagcttccagagatgaataaatattctcaaggtactgaaagctactcacaatttgcagttcgaatttctgaaatgctacgagatccacaaaaatttgaagaactactcccatatctaaaaaaagtaggctttaatacaaaataa

SEQ ID NO: 53735 - DNA, 276 bp, Acinetobacter baumannii
atggctgaacaaaatgtcatcacttctatgctagacgatttatcaaacgaacagcctattcatactgcactttgtattggccagaaaattgaccagaataacgcaattcaatggcactattttaccgtaactgagctgttaagtctgccttttactcagcgttatgatttgggttttgtattgtttgatactgatgaaatggcaaaaatcacaattattagtaaagctaagagatttattagcaaaacgaattgttgtcgtgagcaaacgcagtga

SEQ ID NO: 53736 - DNA, 1626 bp, Acinetobacter baumannii
atgaagttttttaaatatttaattttcataatcataacgattttttctgctccagtattcgctgactctttaattgtcgtttctggggttggtgcctacaatggaaagcaagcatctggatctactattgatgctgcatgtaaagcgttttatacatcttatctaaatcctgctacgcatggaccaattagtaatatggttggttcgggaaatgcttgctatctttcaggttctttatatgcttctaaagtcagtgaaacatatatttgcccaccgattgattatcctgcttattactattttgatgcgggttctccgattcctatacaagagtgttatccaactggagacaagttttgcgtttttaaagctaaacctaattcaattattttgaatcatgcaaataaccgtcaatccactgttttatataacacttcaccaacgcctgttgcttcatgtacatctcttaaatcaggacagtgtgataaaaatgacccttatggtgattgttatcagcctcctaatgatggttgtactcgtttagctgatggctctattacttgtcctgatggtgctgctcctccaagtcctacgggtacttgtagtggtgctacttactgtaatagaccgcccacaggttgtggcactggttacgtttctggctcattcaatggtcaggcgttatgtgttaaatcttctaattcaggtactggttctggcactggtacaggttctggtgatggtggttcaggtactggtacaggttctggtgatggtggtggtggttctggttcaggtacaccaattgatactggtactggtagtactaatattaataactctggttctggttcaggttcttctacaggtggttctggtggtggaactacttcaacaagctttactattgatttatcacctgttgttagggctatttctgctttatccgataaattgacttgggttaagtctgaattggttaatgctgtttctcgtgttgaagataaacttacccagactaatagcaagttagatacaactaattctaaacttgattctgttaagtcttcagttgatcaaacaactgctgctgttaatgctaacgctactactgtaaaaacggctgtagaagcgaatacggctgctacaaacaatgttaaatcggctgtcgatgctaataccaactctacagctaataagcttaatgaagtcgttaatgcaattaataataagcctgttggcggtggtggtggcggaactaccgatgttaagcctgttgttgatgctattgagaaacagactactgattttaaagatatgatgaagactgattcatcagactttgatacatcacagtatgagaaaattggagatgcttcagacgatccacgctatttaaatgcccagtcagaagctaccaatgcacttcagaatttatctaataaattaactttttctaatactgcatgcgtacaggactttacggttgattttccttattttggttcttttgtagttccaatttctcgttggtgtgaactcttagcactaataaaaatattgatacatctcagtacattaattcttgcttttagaatgcttgattcaacagtgagggctatctaa

SEQ ID NO: 53737 - DNA, 258 bp, Acinetobacter baumannii
atgatgtctttagctgatatttctgcattacataaccttgttattcatatttttgtagctggtgcaatattaggtttcatcttgtctggcttctttaaaactctattaaatatgtgggcttatcgttttgagagacctaaaagaattaagactgatacaggctttttgtatttttggaggggtaaatattatcctttagaacaacgtaataagtttattgaagaacatcgaaaaaaaattcgagcatctttttcttga

SEQ ID NO: 53738 - DNA, 231 bp, Acinetobacter baumannii
atgagttacaaacacaataatctgatggcaatgcgtcaccgtttttgggatgagtcttcagatcatgtattaaagtactttttctatacactgcctagcatcgttattgtaaaggctcatgcgcttggttttatgcatgattccgtcaagcaaatggttattcaacatattcaagctaatcgtatgcatttaatgcaaaaggctgaattgaaaattcaatttaaaatgtaa

SEQ ID NO: 53739 - DNA, 150 bp, Acinetobacter baumannii
atggcaaaagttccagcgattggttttaacgcgacaacttcgttcaatcgctctgactttggtttaggtaactatgtgccgaatgtaggtgataagatcactgtaaacattacaactgaagcaactgcggctagtgcagctaaaaaataa

SEQ ID NO: 53740 - DNA, 672 bp, Acinetobacter baumannii
atgtttatcgtacttgttgaagatgatccatatattgctcaaagtattattgcggcgctagattatctgaatatttcagttgagcatgtcgatacagccaaggctgctgattattttattcgcaacagtgcggttgatttatgtttattggatttgggattgcccgatcaagatggtcttgatctattaaatatatggcgtaaagaacaaatacatacccctattctggtactcacagcacgtaatcaaactcagcaatgtgtagatgctttaaacataggggcagatgattatctgaccaagccttttgatttaaaagaactgattgctagagttcatgctttagcaagacgaaatcgtggctactcctcaaatgtactacatatgggcgaattagagattcatcaggacactcaagaggttcattaccaaggaaaaatcctcgccctatccagacgggaatatagtttacttgaagcctttatgctttatcccaaccaagttttaaaaacagaacaactaattgataaaatttatggttatcaggatagtattgaaagcaatgcattgaatgttcatatccatcacctcagacaaaaacttcatcctgatatgatacaaacggtgcgcggcgtaggctatatgttcaaaatgccagagcaaaatacatga

SEQ ID NO: 53741 - DNA, 1887 bp, Acinetobacter baumannii
atgttgattaaaccatttatagcgattgtattaggcataatcacaacatcggtatgtgcaaatcaggattttctgccaccagagcaggcatttaaatttcaagcaacttccctgtctgaaaaaacagccgagttaaaatgggatattgccccgcattattatttatatcacgaccaatttaaggtgaccctagaccagcaggaattgtctttaaaattacctcaaggtcaagaaaaggatgatccaacttttggtgtaactaatgtgcattacaatcaagtgttggcacaattgaatgtaaaaccagacagcaaatatatagtcagttggcagggatgttcggaagatggcttatgttatccagtacaacggactacgattacaactgatgcagcaggactgcttccacaacaggatttaaccgtaaaaacctctggttttaaatctttaagagaccggaaaaatacctcagaaatagtactacaatctaaccccaaaactgttcaggaaaaattaaatcctgaaatttcctcaactgtacaggaggatgagttagccgtaccttctaatgataaggtacaagaccaaattaaaactaaaccccaaatagcatctttaaataatgactggaataatgatcaattctttttagcccttttgtccgataaaagtgtcatttttaacattatcctatttttaggactgggcattctgcttgcctttttaccttgctcattacctttgattcctattctttcaggcattttggtgcagcgtaataaaggctataaagctgggatcattgcattgacctttgtactgagtatggcattggtctatggactcatgggtattgtggtttcacaaattggttatggtattcaacgctggttccaaaatcctgtattcattggcttatttgccttgatgtttattgtatttgcgttgaacttatttggtttatatcaactatccttaccacaaggcttattacaacgtttagaccagatacaacaacgccaaaagggcggcacattgctgggtgctggtattatgggcgcagtatcagcgctgatcgtaggtccatgcatgagtgcaccactagcaggagctttgctctatgtctctcatcttgagcatagcctactcggtggtttctacctcttcttattaggactcggaataggtatacccttatttattaccagtgtctttggagctaaatatttacctaagcccggtttatggatggatcgattaaagtttagttttggctttatcatgctggcaatggcagtgtattttgctcgtcctttactgcctctaactttttactatctaggactcgccttaattttgatggcaatggcaggctatttacttggtattttacgccatgttgtccatatcccttataaagctgtcattttaattttaatctgtggttgtgttgtgagtggagtctggcatatcacacaagcggtttctaatgttaagaccacagaaagtgattcacttcaatcgtggattatggttaaaaatcaacaagagttaaatcatgcgttagcagtacatgctaaagaccctattgtaattgatgtctatgcagactggtgtgttgcctgtcagcctattgaaagagatgttttaccaaggactgatgttcaggatgcattgaaaaatgtggttcgtattaaactggatttaacccagtatgaagcttcacaagacctcattctgaaacaatggcagattcttggcccaccgactgtactatttcttgggcctaatcagaaagagcaacgtaatcttcgtcttacaggtgcttataccgcagcacaactgattcaaaatattgagcatttaaatgtggagaatcagccttga

SEQ ID NO: 53742 - DNA, 834 bp, Acinetobacter baumannii
ttgatttctgctcaagctctgcatctaagtatatttatactgccatggtctttattaatcttattcacaggattaatgggtgtattgtttattggaaaatattttaaacagcatgatcaatggtctgatgatatttggcaagcttataaagactcattatggacggctttatggattggcttaatttcagccagacttacctttgtactaattcatgctgatttatatttagctcatccagtagatattctaaaggttcaggataaaggatttaatcttaatgtaggtatcattattggtagcggttggtttattttgagaaatcgctcattaaagatacctgtattggtgtgctgttttttatcgtttatcacaattcagtttgggggtatcaatctactcaactattggaatgcacagcaattctatccagatttagtatttaacgacttcaaacagcaaccgcaatctctgactcaatttattggtaaaccaactgtagtgaatttatgggcgagttggtgtccaccttgtcatcgcgaaatgcctgtactgtatcaggcccagcaagattatccaggtgttcagttcattatgctcaatcagggagaaacacctgaagcgatcacgaactacctccatcgttatcatttgaattttaaaaatgtctggtttgatacgaatgggcagatggttcaacacatgaatatgtatggattacccagcaccttattttttaatgctcagggaaagcttatagatcgtcatcttggtgaattaagccaagccatgctccagcaatatttgcaaaaaattactaatccatcaaactga

SEQ ID NO: 53743 - DNA, 747 bp, Acinetobacter baumannii
atgaattatcatctaaagttaatatctggctttatattgtcgctgagtaccttaccggtatttgcttctaccccaaccattaagcagaagctagagaaagagggttttacctttataaagcaaatcgaagcccccgcacaaatgactggttgggcagggcatatgcaacaaaaccctgccactatctttatttctaatgaccagaaatattacattattggtgatttacataatgctaaaggagacaatcttactgttgatgctctaaataagcatgttaaaaaatccgtattggatgatgtttggaaaagtttgggtaaatccgcttatattcaagatggcaatgttaatgctccacgtgtcatttatgttttttcagatccaaactgcccatactgtcatatgctttgggaaaaagcgcgtccttatgtaaaatcaggaaaagtccagttacgtcatattcaagtagcagtaattcgcccggaaagtagagggcaggctgccacattacttgctgctacaaatccagcaaagctttttgaagaatttaatgcggctaaaggtaagcagaaattaaaggaaatgaaacctataccagcagatattgctaaaaaaattgaaagtaatgaagaaatgatgaccaagtatggtttttatgccacgcctggaatgatctggaaaaatagtaaaggacaaatggaaactacttctggcgtaccaaaagacttgaaagagatttttgaataa

SEQ ID NO: 53744 - DNA, 765 bp, Acinetobacter baumannii
  misc_feature (693)..(702): n is a, c, g, or t
atgacttcaatgtcgaacactacccaaaagcattttattgttgagcagtttcctttaccgacttgggtcagtgatgaaaaaggcttaattttatactgcaatacggagtgcacaaagtactggcgcgatacttctcctccattgtttcaacaatggctagatttcgtgtaccctgccgatttagaagaagttaaaaacaaatggttagatgcgatacgactccgatcaagaattgaatttaaatgccgtcttttgcataaaacccattattatcgatggtgtaaaatttctattcaattgtcgaaataccatgaatcttctcaagaaaatgaatggtttattagttttctagatattgaccaagatatacaagagcagcaaagcttacgaaaagatatcgatatacaaaatcaaatgctcgatatcagtgtcgattgtattaaggttttaaatacagatggcactgtatctcatatgaataaatcaggatgccttgcattaggtatacctgtagatgaaaaaaaattcggtatgcgatggttagatcttttaccaccccatattcgtaaacgcggaagagttgccttaaaaaaagccttacagggtaaagtggcccgattcgctggcatgagttgcttaccaaatcaagatccagaatattgggataacatgcttaccccaattcaacatacnnnnnnnnnnttattcagatattgtgtgtttcgcgaaatgtcactcaacagtatcttaccgaaaaccgtctaa

SEQ ID NO: 53745 - DNA, 243 bp, Acinetobacter baumannii
atgatgaatattaaacaaaaccaaattgttaaggtctttactattattactgctgtgtttttatcactaacattggtaggtacattttatgagatggactttgatgtaatgcctgaattatcttgggagcacggttttttatattgtatcatacttactttagcagtagcgataatacctttagcatatattaaatacaaaggttggttacgttattctatatccagaatgtgctctttctga

SEQ ID NO: 53746 - DNA, 579 bp, Acinetobacter baumannii
atgtttaataatatttttcagatcttagagagttttggttttctctcacagcatcgttcggtgtatctccagttttcagatgcatccctgaatagtcaggtttttttacaacgtatagatgggcaacattatcttaatcagggcatgacagccgagctgatttgtttatcaaccaatgctcatattccactcaaaacatttattggggtgcaggttgctgttgatcaagtaacagatcgaggaagttttttccgtactacaggtattattactggagcatcacaagggcagagtgatggtgctttaactttatataaacttgctataagtgatccaacttatctctggcataaacgcagaaatagccgtgtgtttatgaacaagagtgtgaaagaaattagtgaaattctgtttcaagagtggcaaggaaaaagcctattatttgcttctagtctgactctagatttgagcggcttgaaacagacctacgatgtccgtccttttgttatgcagctcaatgaaagcgactatgactttttaactcgcttatggcgtagtgaaggtattagctggctctag

SEQ ID NO: 53747 - DNA, 321 bp, Acinetobacter baumannii
atgagaaatggtatttactcgctattttttaaaagcgagggacataattttgggaatggaattttagtagtgcaagatggatttgcaaatggcgctgatactatatattcctataatggaaagattgagcaagatagattgattcttacgcttaataaatataattatgatgttgattcatatttcggagctatgagtgagattaaaattaatcttatttttcataaggatagtgcaggttatttaatgaatggtaatgttgaaaatttgcaaactatacctttaattgttcaggcagtatgtgttggtgagctattttaa

SEQ ID NO: 53748 - DNA, 225 bp, Acinetobacter baumannii
gtgggaactccgcaacttaatgaagtaaataaaatgtctgattttaaagatttttcccaaaaggcaacaaatgacttaacttcttctaaccagatcaaagctaatgagcatactgaattaaatactcctcctaaacctacacctcctgcaacaccgaaacctgaaacggatataaaagataagggtgttcaaccagatcacaataccagcaagccaaactcttaa

SEQ ID NO: 53749 - DNA, 222 bp, Acinetobacter baumannii
gtgatattgaaaatatgtattggtggtgatttggatggtgtgaaaatagatctgaataagaaaagctttaaagctactgagattgatagtttgaaatcttcagaatattttaaacaagtatatgtaaaaaatgagaaaatttatagtttctggatatgcaaagatttgagtcccaaagaggctgctaaaagagcagaggatattttggttaagctaaaatag

SEQ ID NO: 53750 - DNA, 222 bp, Acinetobacter baumannii
atgaacatttttatatctggcattttggatggacaaattttacctatagaggaatataaagctgatattttcaagatttcaaacattgatactttggaatgtattgaatatatgcgtaatgtctttgagaaacaccatcttacacatgttttttggatacctgaaagtctagatagaaaatatgtttatgaaagaattgcagagtatttaggtgataagtaa

SEQ ID NO: 53751 - DNA, 930 bp, Acinetobacter baumannii
atgagtgaattaatcgtaaaggataatgctttaattcaagctagctataccctagatacagttgaacaaaggctgatcctattagccattgctgaagctcgggaaacagggcacgggataactgaaaatagccttttagaagtacatgcaagtagttatatcaatacctttaatgtcgagaaacacactgcttataccgtgcttagggatgcatctaaaagcttgtttgatcgctatgtcacgtatcatgacattaatcctaagactggtaaggatcgtagctttcactgtcgttgggtcgataaaattggatatgaacctcaatccgggatcgttttcctacgtttcacgcaagacattgttccactcataactcgactggaagaaaactttactaaatatgaattggagcaggtttcgagattaactagctcttatgctattcggttatacgagttattaattcaatggagatctgctggtaaaacgccaatttttgatctatcgatctttagacaacaacttggtgtcgaagctcatcaatacaaaacaatgagtaattttaaaacgtatgttttagattttgccctcaagcaagtaaatgagttaaccgatgtaaaggctaaatatgaacaacataaaaaaggacgttcaatttccggtttttctttcagttttaagcagaaaaaaaccaactctgacaaagtaattaagggaacggatacattagcccttttcaccaaaatgagtgataaacaacgtcatctctttgccaacaaactttctgaattacctgagatggggcaatattcagaaggcaccgaaagtttccaacaatttgctatacgcattgcagaaatgctccaagattatcaaaaattccaagaattatttccttatcttcaaaaagttggctatcaagctgcctaa

SEQ ID NO: 53752 - DNA, 483 bp, Acinetobacter baumannii
atgaaaataatcttacttgtgttgattagtctacttatagcactcacagctatttattattttaataaaaaagaatctgatatatctccaacagaatttgttctcaattggggagaaagaatgaaaaactcaccgaatggtggaccaggaagaaattgcttccctactgcttactcctcagttcgttaccctgaattaaaagaagaattattagaagctaaaaaacttaatatgtttcatcccgatcaatcaggaaatggacttttagagatccctttaagaaactgttttagtgaagcaaagcttgttgaattaaaatttgataaatctagaaatatggcttgggctgtatatcgctgtgagaaagatggaatggggctagaagtaaaattatctagttatgaggaatggtgcagctataccacatatctaaaaaaatggaattttcctataggaaaatatactcctatttctatgccttag

SEQ ID NO: 53753 - DNA, 840 bp, Acinetobacter baumannii
atgtgtataagagacaggctatggacagctgccgttaacctgtcgggcggtacagcgattcactataagtgtgatgaagaaaacagttggtatcctgatattgccgatattgaaagtaaaattacttcaaacacacgtggtattgtcattatcaatccgaacaacccaactggttcggtatatccacgtcatgtgcttgagcaaattgtggcacttgcaaagaaacatgacctgattttatttgctgacgaaatttacgacaaaatcgtttacgatggcattgaacatgttgctgttgcttctttagcaggcgaccaattatgtatttctttcaatgggctatcaaaagcatatcgtattgctggtttccgttcaggctggatggcaatcacaggcgataagagccgtgcagcagactatatcgaaggtctggatatgttagcttcaatgcgtttatgtgcaaacgtacaagctcagtatgcaattcaaacagcgcttggtggctatcagtctattaatgacttgatccgaccaggtggacgtttatatgaacagcgtaatatcgcatgggaaatgttaaatgaaattcctggggtaagctgtgttaaaccagaaggcgcaatgtattgtttcccgcgtcttgatcctaacatttacccaatcgaagatgatgaaaagttaatgttagatttacttcgtgctgaaaaagtactattagttcaaggaacaggttttaactggccaacaccagaccatttccgtgttgttttcttaccagcagaaaacgaattacgtgaagcaattggtcgtttaggccgtttcttagccaatcgccgttaa

SEQ ID NO: 53754 - DNA, 471 bp, Acinetobacter baumannii
atggcgacactaaaagagcctgtgaaaatctttatagttcagtctcttgcttgtcgtgatacacctcaagaagtagctgaactcgtaaaacaagaatttggcgttgatatagatcgtgttcaagttgcaacttatgaccctacaaaggttgctggtaagaacttaagcaaaaagtatgtcgaactatttgaaaaaaccagagatgagtttgataaaggcttaattgatattcctattgccaataagtactaccgattgaagcaataccaaagacaacttgagaagactagaaacgtcaaaacagccttaaaaattcttgagcaagccgctaaagacattggtggtcaatttactaatcgccaagaaattacaggcaaagacggcggaccagtccaaacagttaattctgaaattcaagttccaatggaagattacttaaaagcgcggagggaagtcttagatgagtactga

SEQ ID NO: 53755 - DNA, 1446 bp, Acinetobacter baumannii
atgagtgatgtaacttttcaacatgctgaatatgttaagaacttgccatactggcaaaaacttgatgatgtttgtgaaggtgaagatgcagttaaggctaaaggtgaaaaatatttgccgatgccaaatgctcatgatcaatcacctgcaaataaaagtgcttatgaggcttatcgtactcgggcagtcttttatgaagtaacggggactacatctaatagtttagttggtgcagcttttgcaaccgatccaagttttaaatttcctccggaacttgctcatttagaacgtaatgcaaatggtgctggtcttagtacttatcaattggctcaaaatggtattcgccatttattaaagcattatcgttgtgctttatatgtagattacccggatgtattaccagctcgcaatctcgcggaatttaaagcgcaaaaagcctatccaatgattcatttattgaatgccatagatgtagtgaattgggattcagtaatggtcgataaccaaaaaaaactttgtctcgtggttatccgtgaatttaggtctgagcgcggtgctgatggctttagtaaaaccgaacaagaccaatatcgtgtacttcgtttagagcaagagggtaatggggaatatatctattcagtacaggtatacacaaagggagaaaagggcaattggcttggtggagagaagaaatttccaacggattataatggtaatttttggacttatattccatttacctttgtaggagccaatgataattctgaagagattaagaagccgccattacttcctttggccaatctcaatttagcccattatcgtgacagtgcggactttcaagagtccgttttttttatgggtcaacctcaatactatgcgaaaggtgttaattgggagtggtatgaccaagcgaagaaacgtggcatctatattggcgcgaaagttcttttgcctttacctgaaaatggtggattaggaattgttcaagccgaccctaatactcttgcccgagaagcgatgaaagataagtgggaaaaaatgaaggagatgggggcgcgtttaattgagaagggtactgcgggtaaaaagaccgccaccgaagcgaatagcgatgacgccgttcagcattcagttctttcgctctgtgtagtcaatatgaatgaagccttgtcagcagcattacgatgggcagcaaagtttgtaatgccagatgttgatgttctctctaaggacgaattggtatttgaaattagtcaggaatttaacaagcaaggttatttagctgagttagctagacagttatttgaagcagctttacaaggccgatcttcatttaaatcatggtgggaatacaaccaaacaggtatgttccctaaacaaaaatatgaagaagagctacagaatgttgaagcagagcaagatggaactttaaatcaaaggtag

SEQ ID NO: 53756 - DNA, 624 bp, Acinetobacter baumannii
atggagcaagccgcaccgtatgtatttgccgggcagtaccgacaaatgccatcaccgccagcaggcggtttttttaagcctgacaatatccaaattgttgaggctttgcctgcagatgtattgaaacaagttagggcttgggactttggggcaactgaaaatgaaggtgactttacagtaggtgtgcgagaagctctaggcgcagatggttttacttacattgtcgatgtgacaagaggacagcttggcccagacaatgtgaataagcgtttagaacaaacagcaaaaatagatgggaaaaaagtttctgtgcgtctaccacaagatcccggtcaagctggtaaatctcaagctagttcatttgtgaagcttcttgcgggttatagcgtgatagctaagccaatttcaggtgacaagctcacacgggcacaaccatttgcggcccaagttaacgtaggaaatgtacgaatgctcaaaggtgaatggaataaggattttattgatgagcttcgtcattttcctaatggcacacatgacgaccaagtggatgcagcctcagatgcatttaatgaattacatgaaggttttgaagccttttttgctgatatgggatttgctcgatga

SEQ ID NO: 53757 - DNA, 444 bp, Acinetobacter baumannii
atgaattaccgacatattattgtacctgtagatggttctgagatttctttggcagcagcacgacaagcggcccatatcgctaaagcttttggtagtaaacttacagcaattagtctggttgtagtggacccgtttagtggtgtcgatttctattacatctctcctgttgtaaaagattattttgttgaagcgcgtgctaatgcagaaaaaacacttgcgaaagtaaaagccctatgcgctgaagaaggtgttgatattgaaacacaaattattcaaggtgaaatctcatctgatggcattcttaaagctgtagaagagttgggttcagacctgattgttattggttcacatggtcgtaaaggtttccaaaaacttattttgggtagttttgcgcaagatgttctaaacagcactaaaatccaagttttggtggtaaaagaataa

SEQ ID NO: 53758 - DNA, 807 bp, Acinetobacter baumannii
gtggaagaagtaaagttatatgccatgacatgtggctggatcacaatgccttatggtttttttatggctggtgaaacaggaaatttggcgattcctgttccatgttatttgattgagcatccaaaaggaacagttttatttgatacagggctagaattgccattacagtcaaaagatgaattagttgtcaaaaaagccttgggagtgtttgcagacttaacaactgtagattttgttccaggcgaagatgttgcaaaacgtttagaaacatttggtgttgatccattaaaaatcaacttcattattaattctcatctacattttgatcattgcggtggtaacgcttgcataccgaatgcacgtcttattattcaaaagcgcgagtgggaagctgctaaaaatgaagagaatattgaaaaagaaatttatgtaccacgtcattatgatttaggtcacgatcgccttgaggttgaaggagaacatgatttatttggtgatggttcagttgtattaattcccagttttggccatacaccaggccatcaatctctcaaagttaaattagagggaaaagatgtagtgattacagcagatgcttgttatttaaaagcttcccttgaaaagatggttcttcctgatgcgatggtcgtaaataatgcagaggctatgttaaaaaattttaatttatttaaacagttaaagtctaaaggtgcttttgttttgtatggtcatgatccagaacaatcgaaattattgacagatggagctattcgcagaatcacctctgagactttagcaaatctgtaa

SEQ ID NO: 53759 - DNA, 798 bp, Acinetobacter baumannii
ttgtttggtgaaaataaagtagaacagaaaggcttaccattaattgtattacccacaaccgccggcaccggttcagaagtaactaatattgctattttatcggatactgcaaatcagataaaaaaagggatcgttagtgattacctgctaccagatgtagctattattgctccagaaatgacggtaagctgcccaccttcggttacagcagcaagtggtgttgatgcactggtgcatgcgattgaatcattcatttcagtgaatgcttctcctttaactaacgcctttgcaattcaggcgatgactttgattattaaatcgctgccagttgcctatgctaatccagaaaatatattggcaagggaagacttagctaatgcaagcttaatggcaggtcttgcattcggtaatgctggggtaggagcagtacatgctctggcttatccattggggggacgtttccatattccacatggggtgagtaacgctctattgctgccttatgtgatggagtataacaaagtcgcatgcttagataagtttagggtgattgctcagtgttttgatgagcctactgtcggttgtaattcaattcagatcgcaaacaaagtaatcgatagattatatcttttatgtgagatggttaatattccaaaaggattaaatcatttcaatataccaaaagacattattccagagttggcggctgaagcaattaaaatcgaaagattactgagaaataatccaagaaagctaaatcttcaagaaattgaaaaaatatatgaggcagcctactaa

SEQ ID NO: 53760 - DNA, 315 bp, Acinetobacter baumannii; identical to SEQ ID NO: 46412

SEQ ID NO: 53761 - DNA, 933 bp, Acinetobacter baumannii
atgaaaaaagaactagtcgttaaagataatgcactaataaatgccagttataatttagacctatcagaacaacgtttaatactgttagccatacttgaagctaggcaatcaaatacacccaatgataaagatttgacgattcatgctgaaagctatatcaaccatttcaatgttcatagaaatacagcctataaagttcttaaagatgcttgcaaaagcctatttgatcgtagatttagctatcaaaaactgactcaaaagggcaacattgagaatgtaataagtcgatgggtacaacgaatatcttatgtagagaatgaagctcttgttcgtattaagttttctgatgatgttgtaccgttgattacaaatttagaaaaacacttcactagttatgaactagagcaagtcagcagtttaactagtgtttacgctatacgcttgtatgagttgcttatcgcatggcgtagtacgggcaaagtgactatggtagagctagaagagctaagattaaaactaggcatagaacccaatgaatacaagagaatggggcaatttaaagaaaaagttttacaccttgccattgatcaaattaataagtacacagatataaaagcagagtatgaacaacacaaacgtggtcgttcaattattggtttttcatttaagtttaagcagaaacaacaaccgaaaaaattagattctaagcgtgacccaaacacacctgacttttttatcagaatgaccgatgcacaacgccacttatttgggaacaaactagcccatgatgctcgtgtacaaagcgaatacagccatttaattggtactggaagctatgaagactttgcaaaattactggcggatatgcttgcagaagaacagcattttaagatgttttaccctttgcttgtagagcatggttacaaagcataa

SEQ ID NO: 53762 - DNA, 642 bp, Acinetobacter baumannii
atgagaaagacacttaccttaattattcttggcacagcacttctgggtgggtgtagtaaagcttctgaaagcacagatcagtcggcggcaaaagctgaaacaccagcgcctaaaaaactatctgctagagaccagcagattttggaaaaacataatgaatacgtgcaaaagtattctcttgaaagcccagatgttctaaaaaaacgaatgcaagagttattgcctgaaatcaacacaatggaagatcagggcaagcgagaaatgcttcaaatgaatgtatacttagctgcacagatgtatgatgaagcattggctttaaatgagaaacaaattgcaagaaagcctgaaaatcctgctttgtatctagctaaatgccaaatctttactatgcaacaaaaagataagcaaacaattaatcaatgctttgatacagcagcaacagttctaaaaacagcattagataaaccagaaaacaagacggaacctgactataagcaaggcgagttttcatacttacttgctaagtacaaagctggtcatctggaatacaaagagaaaatgcaaaagttcatcgcggatacgcaagatgaaaaactgaagaacgcattcaaaacaatttatgatgcagaagttcaaaactga

SEQ ID NO: 53763 - DNA, 324 bp, Acinetobacter baumannii
atggatagtaaatggattgaagcgcaacgccgtgaaatggaaaaacttatttcaccagagctaatcaagtcgagggatttagcacgtcaaagttacttcgatcagatggaaaaagaaatggctgaccacgtatcacgctcaattgaaccactcagcggtaaaaagcaaagcactctggttgaactaagtgagtcaattgaaaaactggctcagaagtataaacaagatgctcattcatccagccttttaggtgatcaggataaagcgcgagtttataactgctttgctaatcaattggaccatttgctgaaaggtggtgcttga

SEQ ID NO: 53764 - DNA, 228 bp, Acinetobacter baumannii
atgggtaaagttcgtgttagatataaagatggtactgaagaagaattagttgaagttccagaaagaaacggaaatacaataaatatatatcatcgtaatgccaatggagactttattagtcaatatcttccacctcacagaaggttagaagttcataatatgggatctggcttggattatcgtttaggtgataatattgttcatgtaattcgactggattatccataa

SEQ ID NO: 53765 - DNA, 255 bp, Acinetobacter baumannii
atgaaactcaacaaatctactgttgatgctattccattaactgaaaaaggtcaaaaaatatatagagatgcagaactgaaagatgcctttgattttggagcccctgatggtgagaaagatcaattccagatggaaactgaaatgaccatcaaatggctccaagatggttatgacggtgaaggatactactgttggtatgctgatttacctgaggaaggttgcattaagttgggtgttagcgaatcgggagcttag

SEQ ID NO: 53766 - DNA, 777 bp, Acinetobacter baumannii
gtgcgttttttagaaggccctgctagagcttacgataatagaattcactccgccgaaatgtcggagcttttatataattttaatgatatggctcaaaagctagaggtttccgttaaaaatgcgcaagtttggaatgcagccatcgcacatgagttaagaacgcctataacgatactacaaggtcgtttacagggaattattgatggcgtttttaaacctgatgaagtcctatttaaaagtcttttaaatcaagttgaaggtttatctcacttagtcgaagacttacggactttaagcttagtagagaaccagcaactccggttaaattatgaattgtttgactttaaggcggtagttgaaaaagttcttaaagcatttgaagatcgtttggatcaagctaagctaataccagaacttgacctaacgtccactcctgtatattgcgaccgccgtcgtatagagcaagttttaattgctttaattgataatgcgattcgctattcaaatgcaggcaaacttaaattttcctcggaagtaatatcacaaaactggatattaaaaattgaggatgaaggccccggcattgcaaccgagttccaagacgatttatttaagcctttctttagattagaagaatcaaggaataaagaatttggcggcacaggtttaggtcttgctgttgtacatgcaattgttgtggcactgaaaggcactattcaatattgcaatcaaggctcgaaaagtgttttcaccataaaaatttctctgaataactaa

SEQ ID NO: 53767 - DNA, 840 bp, Acinetobacter baumannii
ttgcctgtaggcaaagttcaatacagtgcatggcgttggacgcgatatgcagattcaggttactttgatttagataaaaaattaaaagattatagtgaaaaagaatgggacttatttttgtatgctcctcagcacaagcctttaaacccgacaagtaaatggagaaaaaccgcactttatgaaggactaattcccagatttgagcgtaactttttaaaaggtgaagcacaggaaagaaatcgttatagaaataaacttgagcgaattattacaatcaaagaatgctccttatgtaaaggacaacggctaaatcaaaaatccttatcttgtaaaattaacggtaaaaatattgcggaatgtacggccctatccgtatcaagtcttttagagtttctcgaatcgataaaaagtgaaaaatttgaaaccgttttgcacgaaataaaaaataaactcaataacttaaatctcgttggactcagctatttaaaccttaaccgcgtcagcaatacattgtcgggaggagaatcacaacgaattaaaatggttaaacatttgggtaatagtctggttgacctactctatatttttgatgaaccaagtattggcctgcaccccaaagatttagataatattattaaaattattcaaaaaattagagataagggaaatagtgttttattggttgaacatgatcctgatcttatcagaacagctgatcatgtcgttgatatggggcctctttctggtatcaacggcggcgaaattatttaccaaggatcttttgaagaattaaaaaattcatcaggtttaacaggtgcgttttttagaaggccctgctag

SEQ ID NO: 53768 - DNA, 981 bp, Acinetobacter baumannii
atgggaccttgctctagtacaaacaaagcagtctttcaaaaagctgtagaacagaacccatattacattggtaaaaaaatgttttttcaacatcaaattccagttcaagatttcactatagagctaactaaccaaaatgataaaaacctagagtattctttaaataatatggctttagcatgctatgctaaaatgagtggaaagccatggttacttaagtcaacaccgaccatatctcacgaattagtaataggtattggtagttccaatatcattattgaagaagatggattaaatcaaaggattatgggaattacgactgtcttttctggagatgggagttatatagtaagtaatacttccaaggcggtagtgccaaatgaatattgcaatgcattagttgatacattagaacaaacaattaaaaaagtagaaaaacttatgaattggcaaagcaatgatactattcgcctaatatttcatgcagcagttaaaacctttaataaaaatgaaatttcagctgtaaaagaagtaattaaaaaatatagtggatacaaaattgaatatgcttttttaaaaatctcatcagatcatggtttacatttatttgatcattctactaaaagtgagatcagaggaaaacttgctcctaagcgaggtaaatattttgaattatcttctcatgaaattttactttacttggtaggtcaaaaagaattaaaacaagtatctgatggtcatcctcaaggagttatagttagtttacataaagattcttctttccaagacttaaaatatttatctaatcaaatttttagtttttcctcacactcatggcgtagctatttccctagccctttaccagttactattcattattctgatttaattgcagagaacttaggatggttaaataaactatctggttgggatgatactattcttttaggtaaattaggtcagacacaatggttcttataa

SEQ ID NO: 53769 - DNA, 513 bp, Acinetobacter baumannii
  misc_feature (472)..(481): n is a, c, g, or t
atgtcaaaaaaatttgaagatttcgataatccaagacaaaaggcattactggggatgaagaatagtattcctacagaacagtgggaagaaaatctaaaatttctcaaacaattaagagcgagaattgctgaattaccagtatgtaaacatccggcgatcgaagttttaaataatggattgcttgataaattcactttaacaagaattcatttagaatatcgtcatgcgattgttcagatttttactgatgccttattaatggcccagttccagacaaaacaattggagcctaaactccattctggagctaaaatgtttccacgtgttttattaagtttaaatgtacttgatgaatttggttttagaccaggaacagacccagacaattattatctaggtaatccggagtatgcacattatcctttatatgaagatttattaaatgattatggtttgagtgagaaggaccgtnnnnnnnnnngtatcaaccttcaaaaattgcagatcaggtaa

SEQ ID NO: 53770 - DNA, 957 bp, Acinetobacter baumannii
atgactacgacagttaattccaacatgatcatctacaaccaactggcccaaacagcgtatttagaacgtttacaagacaatttgaatgtctttaatgaagcttccaatggtgcgattatttatcgtaatgaaatcattcaaggtgacttcaataaaaatgcattctacaaagttggtggtagcattaaacatcgtgatgtgaactccaatgcaaaagtaactccggaaaaaatcggtgcaggtgagtctgtaggtgtaaaaattccatataaatatggtccttatgcatcaactgaagaggcatttaagcgccgtgctcgtacaccagaagaatttgctatggttgttggttacgatcttgcagatgcattggttgcaggacgtttagagtacagcttagcttctttaaaagctgctatttctagcaatcccgacatggttgcgaaagggagtatcgttgttgacggccgcaaagcattaactcgtggtatgcgaaagtttggtgataagtttggccgtattggtttatgggtgatgaactcagatacatatttcgatattgtcgatgatgcaatcactaagcaaatttatggtgaatctgaaatcgttatctatggtggtttacccggtacattaggtaagccagtcttggtgactgatgctgtaggggataacgatgcttttggtttgcagtatggcgctgtcactgtaactgaatcacaagtaccgggcttccgagcttatgacatcaatgatgaagaaaacttagcaatcggtatgcgtgctgaaggtgcatttaacctagatattcttggttatagttgggatacatcgaaaggtgaaaatcctgaccttacattacttggttcaagcgctaactggatcaaatatgcaaccagcaacaaaatgacagcaggtaccttacttgatttatcgggtacagcgacaactggttaa

SEQ ID NO: 53771 - DNA, 957 bp, Acinetobacter baumannii
atgactacaacagttaattcagacatgatcatctacaaccaattggctcaaactgcttatttagagcgtttgcaagacaatttgaacgtatttaaccaggcctctaatggtgcaattgtatatcgcaatgagattattgaaggtgatttcaataaagaggcattttacaaagtgggcggtagcatcaagcatcgtgatgtgaattcaaccgccaaagtagtgcctgagaagattgggtctggtgaatctgtaggcgtaaaagtcccatataaatatggtccttatgcttcaaccgaagaggcattcaaacgccgtgcacgcacacctgaagagtttgccatgattcttggttatgatttagcagatgcattagttgcaggacgtttacagtacagtttagcctccttaaaagcagctatttctagcaacccggatatggttgccaaaggcagtattgctgtagatgggcgtaaagcattaacacgtggtatgcgtaagtttggcgataagtttggacgtattagtttatgggtaatgaactcagatacatatttcgatattgtcgatgatgcaatcactaatcaaatttatggcgaatctgaaatcgttatctatggtggtttaccgggtaccttaggtaagccggtattggttacagatgccgtaggtgatgatgatgcatttggtttgcaaatgggtgcagttactgttacagaatcacaagtaccaggcttccgcgcgtatgacatcaatgatgaagaaaacttggcaatcggtatgcgtgctgagggtacatttaacctagatattcttggttatagctgggatacatcaaaaggtgaaaaccctgaccttactttacttggttcaagtgccaactggaaaaaacatgctactagcaacaaaatgacagcaggcacattgcttgatctatctggcacaacaacaactggttaa

SEQ ID NO: 53772 - DNA, 1269 bp, Acinetobacter baumannii
atgtctgtcattgaagaaattaaccaacaagctcagtttgaacaaaagcagcaacaacgttcttatgaagtcctgcaaaatgaaaaaagtatgccagtcaaaatgtggactaaaggcgtgcttgttgatgacaactcaaaacaacaattattacaaacagctcaaatgccttttatttataaatggatggctgttatgccagatgtacacttcggtttaggagcaactattggtagcgtaattccaactaaaggggcaattattcctgctgctgtgggtgtagatattggttgtggaatgatggcaacccgtacaagcttaactgcttcagatttaccagataacttacatgcactacgtactgaacttgaacgtttaatcccacatggaatgaccaagcgcggacgtgatcgtgggtcatgggaaactccaccagaaatggtagatcaagcttggaccgatctggttgcagattttgagtacatttgcgcaaaacacccacgtttaaaaaacaccaacaaccgcaaacatttgggaactttaggtactggaaaccactttgtagaaatctgtttagatgagcatgatcatgtctggattatgttgcactcaggttctcgtggtgtaggaaatgctatcggtaatcattttattgaacttgcacgtaaagacatgcagaaacatttcattaatttgccaaataaagatttagcatacctagtggaaggaactgaacattttgatgattactggtttgcggtaggttgggctcaacgctttgcgatgaagaaccgagaaatcatgatgcaatctgcaattaaagccttggctacgattgtaccaaagccttttcaagcacgtttggaagcagtgaactgtcaccataactatgtggaaaaggaagaacactacggtgaagaagtgatggtcacccgtaaaggtgcagtccgtgcgcgcctaggtgaatacggaattattccaggttcaatgggtgcgaaatcgtttattgtccgcgggcttggaaatcaggaggctttctgctcatgttcgcatggtgcaggccgtgttatgagccgtactgaagcaaaacgacgctttactgttgaagatcaaattgcccaaactgaaggtgtggaatgccgtaaagatgcagcagttattgatgaaattccatcggcatataaaccgattgaagatgtaatgaaagcacaaggtgatttggttgaagtggtttatacattaagacaagtggtatgtgttaaaggttga

SEQ ID NO: 53773 - DNA, 267 bp, Acinetobacter baumannii
atgaataaaatattaattttacttatagaggttcaatctcaaaatataaaaaactgtagtcccaaaatggccgaaaaatttgaaacagatgaaattatagtaccccccttaaaatattcagtttttctaaatgacgatattgttgaagatttcaggtctcggcgtagacctcatttagatggagtgcaggctaaaacagaaattattgaggctattaatgaatatgcaaaaatataccccatatacatttctgagatagttccttag

SEQ ID NO: 53774 - DNA, 903 bp, Acinetobacter baumannii
atgctcacagatcttgatgatttttattgttttgcccttgttgttgagcatggtggatttagtgccgccgaacgtgttacggacattccaaaatcaaaattaagtcgtcgtgtttataacttagaggaaaatttaggggttcgcttaattcagcgcagttctcgtcattttgcagttaccgatattggtatggatatttatagacacgcccaagtcatgatgaatgccgcacaagcagctcatgatttggttgatcacttaagtattcaacctaggggggtagtcaaagtaagcgttcctgtagatatagcacaaaaccagctacccaaaattttgccagcatttttaaaaaaatatcctgaaattcgtttacaacttattgtaagtaatcgacgcgttgatgtaattaatgaaggaattgatattgctctacgggtcagatctaaactagatgatgaccctagtctggtactaagacagtttgcgctaatagaacaaagtctctttgcaagccaagcttatttaaatgagtttggtaatattaagtcacctgatgagttaagtgatcatcgtattttaagcttgtctgaagagcatttagatcaacaatttatattgcatggcccagacaaccaactgaagaaagtgaaagttagcccaaccatcatgggaacaaatatttatatgcttgcccaacttgcaagtcaaaattgtggtattgccttgttacctgacacagcagctgaggattttgtaaaatcaggtcagcttgtgcaaatcttgccagattggaaagcagcccacggtatattccatgctgtttatccgtcacgaagaggcttactgccagctgtacgtgtatttattgattatttggtagaacatctttcagaacatccataa

SEQ ID NO: 53775 - DNA, 192 bp, Acinetobacter baumannii
atggtctttacaattgaacctatggttaatgcaggcaaacctcaggtaaaagagctaaatgacggctggaccgtaattactcaggatcattcattatctgctcaatgggaacacatggttgctgttacagatactggatttgaattattaacaccgtggcccgaaggtgtgggaaattatccagaaatttaa

SEQ ID NO: 53776 - DNA, 240 bp, Acinetobacter baumannii
ttgcctgacttaaatttaatgaatcgttatatttacggtaatggagttgaaaactcacagactaaagatggccgagaacatggttttgaaactgaaatcagctataccatcaaaacaggatggttaaaatctctaagtatcaaagcacgacattctgaaattcgtagaaattggggtaatactaatagttttaatgataatagacttatcctaagttacaccattcctgtgttcaattag

SEQ ID NO: 53777 - DNA, 315 bp, Acinetobacter baumannii
  misc_feature (10)..(19): n is a, c, g, or t
gtgttggttnnnnnnnnnnaagaggcacaatttgcttacaagctagctaataaaacgcttccatttagccaaaaagtccaagatgaagtgcaatccatgctattcatagaagaaaagaatggaaataaaatatacgcaaaaagtggttggggatgggatgtaaacccacaagtaggctggttaactggatgggttgttcagcctcaagggaatattgtagcgttctcccttaacttagaaatgaaaaaaggaatacctagctctgttcgaaaagagattacttataaaagcttagaacaattaggtattttatag

SEQ ID NO: 53778 - DNA, 204 bp, Acinetobacter baumannii
atgcataaatgcaaccactgtgaagctgagcaattaattaattcgtatggtggtcttccagaagcaaaggcttacatgaggcgttatttcaagctgaatggaggattaggaaataagtatccaagaacaggcgctttgataactcaaaagatgaatgaattgcagagtgcaattttaactgtagagggcttaaacaatggatag

SEQ ID NO: 53779 - DNA, 324 bp, Acinetobacter baumannii; identical to SEQ ID NO: 53763

SEQ ID NO: 53780 - DNA, 588 bp, Acinetobacter baumannii
atgataattgagatagagacccatccactgcaaccgtttttgccagaaaatgcccgtttattaatgttaggaagttttccaccgccacgtaataaatggaagatggacttttactatccgaactttcaaaacgatatgtggagaatttttggtttaatcttttttcaagataaaacttattttttaagtgagaaccaaaaaagctttaacgaagaagctatccgcagctttctgattgagacaggcattgctattttcgatacggcatatcaaattaaacgcctcaaaggtaatgcttccgacaaatttcttgaaattgtcactccgacagacttagcagttttattgaaacagattcctcaatgtcacactattatgactacgggcgataaagccacagataccttaatctcagttttacctgagaacacggaaaaacctttaattgggacatctacatcaacttattttgcagaccgcgatattaatttatatcgattaccgtcatcttctagagcatatccattagctctcgagaaaaaagcagaaacctaccagaaattttttaaggaaatcggtttcttgtaa

SEQ ID NO: 53781 - DNA, 366 bp, Acinetobacter baumannii
atggaacaggaatataaagggaacatgaactatccctttcaagaccatattgttctaaatatggaggaaaatattgttaattttccaagctctaacctacgtaagtgccagcatatacaagtcgaaattgatagcaaggctttagaacttatttgtatgaaatgcaaggcaaaagttaatcccgtaatctggattaaagatactttgaaatattggtcaagacaacaaactcagataacagagcagaaaaagcagattaaagaagatcttgatgagctcaaaaagcgggctcgtactaagtgtcaacactgccaaaaaatgactgctatcaatctgaaaaattataaattttcaattattggatga

SEQ ID NO: 53782 - DNA, 291 bp, Acinetobacter baumannii
atgatgcgtaacatcccagactctttgtcgcttccgttcacagtatggatgtgtgaaaacggattttatccatctcataaaaatggattcatggttttaaaacgtggcaaagaagtagcaaagatatcaatgaatgaaacaaaatacggtttcccaatgaatgatatttgccaaaagaaatttgcctcgttctgcagagcatggatgaacagagataaacactttattgaacaattacgtttgcgtggtttagcaagattaaatcaaaaaagttatcagttggtggcgtaa

SEQ ID NO: 53783 - DNA, 138 bp, Acinetobacter baumannii
atgcataatttaggcaataaaaaagcccttcagagaattcttggcggaatcaaagggctttggattgctaacacaagaagtattaacggtgaacagtattttacaagtgatagagaaaaatcaagtctacgatattaa

SEQ ID NO: 53784 - DNA, 552 bp, Acinetobacter baumannii
atgaatagagtcttgataatttttgccctatgtttggtgggtgctggttgcgaaaaagacaataaaatatcttcttctatcgcttcagaaagcagggaaaaagtttctgaatccaattggaaggttgtagttagtaaagatgaaatgcgtaataaggaattaaaatggcttgctgttaggtcggagaataatgcagatctaaaattcccatatgatggagaaaatagacttcaactagatatattagattctaaaacaggcacaccaagagtttttttaacaatagataaaggccaatatgattgcgggcgatatggatgtgatgtttttgtgaaatttggcgaaaattcagtacagaaaatggatgtttccattcatgatgtacaaggtacagatgggactattcttgccttctatggtaattctgctgcttttttagaaaatattaaaaaatttaattcaattactattgaggttccattttatagaaatggaacaagacaattcaaatttaacacaactggttttagtgaggctgagagtaaactttaa

SEQ ID NO: 53785 - DNA, 474 bp, Acinetobacter baumannii
atggctaatgtaaaaacacaaggtacacaggtcttcaccgtgattgatgggcaggttgtccgttttatctgtgtgaagaaaattggatttggtcaagactcgttcggtaaaattgatgtgacttgccttgatgctgaaactaaagaatatattcgcgggatgcgtgatccgggcgaaggtgcttttgatattgactatgatgacacaaatacaagtcatgacaaattagctgagattgcagaaagtggcgaaaagcttgattggtatgttggctctagtcattcaaaaaccccaccaacatatgatgcaaccactggtattgatttaccagaggaccgcatgtggtggtcttttaagggttatttaaatgatgcagcgccaaatgatatcgaagttgatgcagcgcttgggtattcttacaccttagtccgtacttcgaaggtaactcgtactaaacgcacggtgactccataa

SEQ ID NO: 53786 - DNA, 201 bp, Acinetobacter baumannii
atggccgaaaaatttgaaacagatgaaattatagtaccccccttaaaatattcagtttttctaaatgacgatattgttgaagatttcaggtctcggcgtagacctcatttagatggagtgcaggctaaaacagaaattattgaggctattaatgaatatgcaaaaatataccccatatacatttctgagatagttccttag

SEQ ID NO: 53787 - DNA, 519 bp, Acinetobacter baumannii; identical to SEQ ID NO: 49328

SEQ ID NO: 53788 - DNA, 135 bp, Acinetobacter baumannii
atggctctctacacaggctttaaagtgaaagagggtactaaagttgatccttatgtttatatgcctcatgaacagcctccagaagataactcactttctttgattgattacctagaaaaagtagctagtgattaa

SEQ ID NO: 53789 - DNA, 534 bp, Acinetobacter baumannii; identical to SEQ ID NO: 22864

SEQ ID NO: 53790 - DNA, 159 bp, Acinetobacter baumannii; identical to SEQ ID NO: 52639

SEQ ID NO: 53791 - DNA, 405 bp, Acinetobacter baumannii
atgaaaacatggttttcggtaaaaagagaaaatggtttccctgtcattggggtagtagatgagtcaggtaagttattaggatttgccagttggggaacatttagagcgtttccagcttataaatatacggttgagcatagtatctatattcatcatgaacatcgcggctgtggtctaagtaaagttttaatgcaagcgttaattcaacgagctcaacaggctcaacttcatgtgctcattggttgtattgatgcgacaaatcaagccagtataggccttcatgagaaaatgggctttacccacgctggtacttttaaacaagtgggctttaaatttgggcaatggcttgacgctgctttttaccaactaattttgaatactccatttgaaccaatggatggatag

SEQ ID NO: 53792 - DNA, 264 bp, Acinetobacter baumannii
atgaatgcacttaaagacgaattgtggaaacaatatgaatattggtgtcaagaaaaagatatggaaccctatattagtaaagaagattttaaagtaagtgaaaatttctacatcaatcaatcaggtggtattacatttgattttcagctttacgaattagctccatatgtcttaggtcccgtgagtttagagctacatgatacagaccaactgataaaacctgagtttttaccaccaaggcctgttttaaaaacagaagtgtag

SEQ ID NO: 53793 - DNA, 150 bp, Acinetobacter baumannii
atgttggcttgtttgatttatgggtcggaccagacgacatgtattgggtatttaaacatgggtttggtgactggtctttttgctgctttagtagttttgtacggtctcagctatgtttttaaaatcgttctaaaactaatgggtttttaa

SEQ ID NO: 53794 - DNA, 2538 bp, Acinetobacter baumannii
atggcgattatcactgaagaaaaaatgcagaatcttgatcgcgatattgaggatgctgggaaatgcctaaatattgatggaattattaccccacgatatggggagctttttaaatcgtttcctatggtatcgcgtgaaggtgaagaaaactttttatttgccactcaacaaattattgaagcaggattgttagaaggttttacaactgaagctgaattgttagcaagtagaccgactgtttcaaagaaatatgcaaaagcaaacgatactaaaatcgtatggttttggaataaaccagtaggggcaagtgatggtaattactggataagcactggattaagtgaatatagtcagtcaaaaaactattttgatcagtatagttcgcttacaaaaaatgcgactgtgttttatcctttttcgagcaccaagcgaaataatgtgaatgctagtagtgtttccgcatcacatgaagcttacttgaaaccgtatattttaaatattacggtgaatggtgctgatccaaataaatattatcgtattcagcagattagcactcccacaaatgcttccgtgccgaaccgttgggtttttgaagttctaaaccgaacaaattttgatacttcagaaacggtagaaaaaactattccagttgtttttcctattgtgaataacacaggtattaaaactttcagtgttgttgatggtgatgtcactattattgtgacagttgatacaagtaaagtgcctacaggtgatttctactcagttgcttcaggtgatagctcatatacatacattattgacccaagccgttatgtattttcagcatttaaaaaatctgatgcagtcggttatgttgattcaattagtacactgacaaagaactcaactgttttattcccgtttagtacattaaaacggaataatgtgaatgaaagcactgtaggttcacacgacaatattttgcgtaatttcatacttgatgttcgagtaatgaatgctgatccaaataaatattatcgcttgcaacagatgagcagtcccgatcaagcaacaaatccgaatcgctggatatttgaagagcttgatcgcgctaattttgatacagtagagacaaaaggtaaggcgattactgcagtttttccaattgtcaaaaatactgggatcaaaaactttgttgttaaagagggtgatttaagtatttcagttacagtaaatactaataaaacgccttctaatagcttttattcagttgcctcaacagataactcatatacgtatattattgatccaagtttgtattcttatgctgcggttacaagctcagacattaatgcagttaatacacgtattgataagtttactaagccgatgcagcttaaaaacttgctcaatgatttacgaaatccaattcaggatgttgatattattttcggtcctgccgattctattacctatggattaggagcaactggaaatgaaggaggtacaggacagcccggaacgcatggaccagctactacgcaaacatatgtaaatatctttcgtaattttctaggtacagctttttgtacaagtccccgctatggtgatgatacgattacacagactggtacagcctatttcacaagtgaaggcacaagtgtattaagtgctgagcttgcgaactatacatttaagaatagtgttactggtaaagtgtttacacttacggaaatgcaatcattaattggcattaatggtagctctccgacgggaagttttcttgatttaaaaagcccttcagtcgctggagcagtgacagatatggaatttaatttcaatggaaatgcattcactatcaattacgcaagactcggaaacggaagtgctactgaatcaaacattgatgtttttgtagatgatgttttgcactctagctttaacgtgtacacagcatctacacctgattttttaggaacttatacagtaggcgaactacctgaaggtcagaagaaaattcgtatcgctaacagattatctaactcgactatttatgctcgattgatgtctattacagctacgcgaaaaatctcagttactaatgaagggctttctggtacaaactctaaacaatggcttgataataactggattccaaacgtaattaccgctaaagctaattatgttttcatgatgattggtactaacgatcggcacactacgcagaagatagggacatttaaaaatcaatatcttcagttgattgaccgtattactgcaaagaatccaaaagcacaaatcattatcatgtcaccgcctgccgtgactcaaaatgaagatcctaatacgacggtatataaatttaggattgcagatctgaattatgcattaagtcagattgcgcagctaagaggtcattcttttattagtctctttgaggcaacatccaagctcaaagctaaaggtgaaaactatttgtttgatcaaatacatccaaatgattatggttatggagtgattgccgaatacattattaatcaaatcttgaatgcataa

SEQ ID NO: 53795 - DNA, 360 bp, Acinetobacter baumannii
atgtctttaattaataaatttttagaaatcaccgaaaagcctgctattgaagttgttgaaatcgagcaattgggtaaagtgggtttgcgccaacttacgattgcaacacgtgaagagtggactgaagctcaaaaaaatgaccccaaaacagcggttggcgttctttttaaaagtacagtttgtgacccagattctggcgagcttgctttggttgatctgcaagaagaacaattacttaaattacctattgtggttgtaaatgatctgtttttgaaaatctgtaaagcaaatggtattaaaactcaagatgaaataaagcaggaagttgagttaaaaaactccgaagccgaccagaattaa

SEQ ID NO: 53796 - DNA, 201 bp, Acinetobacter baumannii
atgttagtcaagattaattcaaatatatacgttcttgcatctgatgttatctcgattaaaaaaaaccagagaacaggctcagatagttacgggaaatggttcgcatacgttaagacggatcaaaacattactggttttgaagttcctgaagatgaagtaaaaattctcgttcaagatatcaatcgatttttagaaaaatag

SEQ ID NO: 53797 - DNA, 222 bp, Acinetobacter baumannii
atgagttgcgaaagagaagttattttgcttggtgatccggttgtatatcgtgatgacttgaaagggttcgatgaacttggtgttgttgttgaagctggctcatgtctcaaagtcttatggaatggtgaagatcatccacgatctgaaatacaagaacggttacgcggtgctcgacttgatgaagttgatgcaagtcaacggatgattcgggagaatttttaa

SEQ ID NO: 53798 - DNA, 480 bp, Acinetobacter baumannii
atgaataaaccaattctcgacccttgctctggttcacgcatgttttggttcaatcgccaaaatccacatgtggtttatggggatattcgccaggaaaaacacattttatgtgatggacgttcactaattattgaacccgacattgttatggattttagagatatgccattcaaagacggacaatttaatttagtggtttttgacccacctcacttaataaaagctggagagaaaagctggctagcattgaagtatggaaagctaaatcaagattggcgtgaagatattcgaaagggtttccaggaatgtttccgggtattggccaaaggtggagttctcattttcaagtggaatgaaacccaaattaagacaaatgaaattttagcattaaccaagcatgcccccctattcggtcactcaagcggcaagcgtagtaatacgcattggttcggttttatgaaatttgaggacgaaatttaa

SEQ ID NO: 53799 - DNA, 474 bp, Acinetobacter baumannii
atgaggggaattattccgcaagaagggttcaccttggtcgagctaatggtgacgattgcggtcatggctattattgcactgatggctgcaccatcaatgtcaaatttattagaaagtaaacgtttagatgctaatcaaagagacttaatcaacactttatcagaagcgaaaagtcaggcaattttaggacgtcagaatgtttctgttaacttgaactcaacagcttcaaatacacccacttcattaaattggcagacagcttctaataatactcttgagctaaaaaatatagccgctgatggtacgcaaagttctttaacgactaccactttagcttttaacgcaaatggagtagtggcaaatataactcaagatacgcttttatctatttgtaattctagaataaataaaaagaaagtcattattttgaccaagcttggcactttaatttttaaggccgaggagacttgttaa

SEQ ID NO: 53800 - DNA, 1278 bp, Acinetobacter baumannii
atggataagcaaattatttttgaagacgaacacattagagccatttttttacaaggcgattctaatacattagttctctcttttggcgatttgattacccgggcgagtggcttatctatcaatgctgaaaagtctctaataaagtatcaatacaatgtcattggggtgatgccaaaacaaaaatcatggttcccaaaggccagtatggttgagttggcaaaagtcattttgcctattattcagcgttttaaaaatattgtaggttatggtggctcaatgggcggctatgcagcaattaaatattcgaatttattaaatatgaatcgaatcattgcatttgtgcctcagtattcaattgaccctgaacaagttgaagaccgacgctatgctgagttcttcgatgctgtcgcgaataaagacatgcaaattcagccgcaagatgtagatgcaagtcgtgaatacattattgtttatgatccttacttttcaattgatcgcgaacattacttaaaaataaaagaggtcttaccaagtttacatacaattcatttgccttttacaggacatgaagctttatctgtattggccagctcaagccttttacatgattttattgagcatgaatttgatgaaacgtatttctatcaacaagttcgtaaaatcaaaaaacaaagcaagttctattatcgtaatgttcttgcaaacgtgctgacataccatgacagcatgttattgaaaatattgcgtcaaaatgactttcagttagatgaacgttatttagacaatccacttaagcaagcagtcactcgtagtcttattaaaacaaagcaagctacagagcaagatttccagaagcttggaattaaaattcagtatagccagcaagctgaaaaccataaaaagggtttgaaaaatcaatttgaggcaatactggtatttaatttgattaatctaaagcttgaaacctatgctgtagatgtagtgttggcgaacccattatatttgattccgattgtggcagaacacactggggttgttcagattgaattaaataatgaactttatttgttagggatgaatgaccgaaaaattattaaattgtttaaacagggtgatgcactcacttcggatatgagtccgtttgttattaaacaatattctgatttctttgcgttaagctacaagcaattaaatttaaattgtgatgaacaaggtgtatgtgattacgttgaaagttccattcagccatctcaacagtttgtattgaccagttactaa

SEQ ID NO: 53801 - DNA, 534 bp, Acinetobacter baumannii
atgttaaaaaaaacgcctcatatcatcttaatgtctttgctcagctctagcctattattgacggcttgtaaaaaagcagatgagccagcaaagactgaacaatctcatacaagttcatctaccgatcaggtcttggaaaaactcaatgaaagaccagtgaagaaattcccagctactgcggatgacgctcatgatattgcgctactagaagattacgatcgccgctttactgaaatgagtgacgagatggaaaatgagttagcgaaaatgcatgaggctggcacactcaccgcagagtttgaacaaaaacgtacgcttgataatgtgcgctcagcattgaccatgttaaaagacctcgatttaaaaactgaacaaggtcgttatattcagggcttactctatcaatattgggaaaaccaagaaaagaactttagtgataagcaggcaagtaaagatgaacaggtcaaacagcttgctgactatttacaagcacaaaatcagttaaagtactggaaagcctcacagcagcattaa

SEQ ID NO: 53802 - DNA, 564 bp, Acinetobacter baumannii
atgaaaaaacaacgtttgatgatagctttgctggcaactttaggcatgggttcagcatttgcatcaacctcgagtgaatacaatattgccaatggcttgcttccagttgaaaaagatcaatcaatttctgtattacaaccatttcagggaaattttaggattttaggttcaaaaatttatcacaatgatgagcaagccaaattttcaccgattgattatgcggtaagttggggtttatttgctcaacctgaaatcgcgcgacatatttcagtgaaacaatatgaccgctatttaaactggaaaatagcaaaacttcctgtaccagctgagcaagcaatgcagatggtgtcgaatatgcacattattcctgcaaaccctgaaatcgcccaacaaattaagcaagttaaacgtggtgatttggtttatttaaaaggtgatctggttgaaatcaaagataaagatttggtttggaagtcatctttgaccccaactgataccggcgatggtgcatgtgaactcttccgtgttcaatccattcactgggttgaaaaacaaaatatttaa

SEQ ID NO: 53803 - DNA, 468 bp, Acinetobacter baumannii
atgtccgtatggctggccatgcttattggtgctggtattggtattattatcacgacgctcattttatcaaatacccgtaatggccgaatcaaggctgaatacgagcaatatattgccgagttggagcttgagcatcaacaagcccttgcccaagcacaaaagagaagtgtgaatacgagccgcgccgtattaaaaggaaaaatggcagaacaatttgcgccagtcttgccggaatttcagtatttgccaagtgatgccaagtttatgggcgacccggttgattatattattttcgatggctataccgattttcgagatggagacggaactgccgatgatattcaaattattttgctggatgtcaaaagcggaggggcacgtttaacaaaagggcagcaagcgattgctcaggcaattaaggaagggaaagttcgctttgaaactttaagaatagattttgaagattaa

SEQ ID NO: 53804 - DNA, 597 bp, Acinetobacter baumannii
atgacagccattacgttggcaacagctttggcacaaaaaggatataaagtagcattggcagattctgacaaccagaaatcttccttacaatggttaaagcaacgtccagataacgtagctgtaattcaaagcctcgactggcgtcaagaaaaatcaattggtgatgcacctaaaaatttagactatttaattattgatgcaccgggtgccctttcaggtgatcatgctgaacaattagttagcgaagcccatgcgattattactccacttcagccttcatttttcgatatcgacagtacacgacgttttctcaagcatttgcaagatattaaacgtattcgtaaaggtaaagtacaaattttactacttgcaaaccgagttaaaccgaatagcgccagctcaaaagatattcagcaattttttgaaaaaatcgaacatgaacctattgcatggattgcagagcgtagtgcttatggcagtttagcaatgcaaggtttaagtgtatttgataaaccacaaaagaactttattgcaattcaaagccagtggcagcctcttttaaataaactgattgaagataaatctgagtggttctaa

SEQ ID NO: 53805 - DNA, 1119 bp, Acinetobacter baumannii
gtgcatccatacgctcctactttacagcgcgttttattgtttgggctgttttttatcctgatctttttaggatttaacatcctgaagtactttattgtacctgtactttgggctgccattattgcctacatgacttggccgatttatttaagaattcagcatttttttggtgaaaatcgaaataatttaaatgctacagttatgattagcttagtcattttaattgttggtgtgccatttacatgtgctatttttattctacaacatgaaggtcgaaacctttattttgatttacagcgtcaagtcttttcaggtcatttaagcgttcccgattttattcgtaatcttccgtttattggtaaagaaatatctcgcacactcaacgaaattaacacagaccctaatagtactattcaaaatattgcagcttgggtacaaagccatttaagttatgggcgtgtattattaaatgaaattagtaaaaatatcgtcaaactttgttttgcgattttaagccttttcttcttttatcgtgatggccacacgatcttaacccaagtgagtaaagccttggaaatggtgattgggccacgtattcatcattatctcgacacaatttcagaaaccactcgtgccgttgtgtatggcgtgggtttaactgcaattgctcaagcagtactggctggattaagttatttcgtcgctggtgtacctaacccaatggttctcaccattgcaacgttcttattagccctaattccgtttggtactcctgtttcctacttaggcgttggactatggttgttctctcaaggtcaaaccatggaagctattggcgtcatcttatggggtgtgctgattgtaagtagttcagacaacgtgatccgtccgcttgtaatctctggtgcgactcaaattccgtttttattgattatgttcggtgtattgggtggaattgcaagttttggtttagttggtctatttattggccctgttattttagctgttttattagcaatttggcgtgaatggcttcacgagacaattgaccctgaacccatgccaaaaacaaccatgatttatgattcagatgatgatttaccgccatctaaaaactaa

SEQ ID NO: 53806 - DNA, 366 bp, Acinetobacter baumannii
atgaaaaagattggtttactcatgatgtgtaatttgttgattctgagtgcttgtacaccaaatacaaatccacctacacctcaagcgaacagtccgatacaagctgttttactcgatcaacctaatcttttaaataatgccagtaatttaagtatttcacagcaaatgaatgccttagaggatccttctaatgctcaagttactattttgcagacagagccgagtgaggatgctgtttcgaaaacacgtactgagtatttattaaaaaaagatcagactgtttggaaaatcgtgaataaaaaacaaagttatcaatgtacaaaaggcgaggaaacagcagactttcaagttaatccttgtccttaa

SEQ ID NO: 53807 - DNA, 588 bp, Acinetobacter baumannii
atgagcaatattttagtcattaatggtgccaaacaatttgcccactcaaatggtgaattaaatgacacactcacgacattagcgacgaatcatctcactgaactcggtcatgaagtaaaagtcactcgtgcagatagtgactacaatgctgaagctgaagtagaaaaatatttatgggcagatgtcgtgatttatcaaatgcctggctggtggatgggtgcaccgtggaccgtaaaaaaatatattgacgatgtatttacgacaggtcatggttctctttatgcaaacgatggtcgtagccgctctgatgcctcaaaaaaatatggttcaggtggtttaattcatgacaaaaaatatatgttgtcacttacttggaatgcgccaatggaagcatttgacgatgcggatcagtttttccatggcgtgggtgtagatggtgtttatttaccatttcataaagcaaatcagttcttaggtatgagtaccctaccaacatttattgtaaatgatgtaattaaaatgcctgatgtagatagttatgtggaagcatataaagcacatttgaacacactatttgcagcagcctaa

SEQ ID NO: 53808 - DNA, 369 bp, Acinetobacter baumannii
atgcaacgtttatttttaatttctgcactctgtgctggacttatgacgggttgtgcaaccacaagtaaattaattccttttgtgggctcagaaaccccaatgcaacaagtacttaaaacgcaacccgagattgtaaaagagcataacaatacttcagttcagcaggtatttaaccgagtagaatccccaactgtttctcgcattactgttatacaaaccggtttaatggatgactctgtctcagcaattcggacggaatatttatttaaattggttgatgaaaagtggcaattgcaaaataagcaaaagagctaccaatgtgcaagaggaaaaggttctagaggtttccaaacgcagctttgttcttaa

SEQ ID NO: 53809 - DNA, 1410 bp, Acinetobacter baumannii
atgaatgctccagtcgctttaacacctgagttactcacccaattaacagcaatcgtcggtgaaaaccgtattaaaaccgatgctgatagtctcgaaaactggggtaaagatcataccaagcattttaatccgaacccatcggtcatcgtttttccatcaacgactgaacaagttcaggaagttgtgaagcttgcaaaccagtttaatatcgcaattacaccgtcaggtggacgtacaggactttctgctggtgctgtagcaaccaatggtgaaattgtcattagcatggacaaaatgaaccagattcttgagttcttcccggcagaccgtatggttcgtgtacaagctggtgttgtgactgagcaattgcaaaattatgcagaagagcagggtatgtattatccggttgactttgcgtcagcgggttctagtcagattggcggtaatatcggtaccaacgctggtggtattaaagtcattaaatatggcatgacgcgtaactgggtactcggtttaactgtagtgacgggtaagggcgacattttacgtttaaacaaaggcatgattaaaaatgcaactggttatgcattacagcatttgtttattggtggtgaaggtacattaggtttagtgactgaagcagaaattaaacttgagcgtcaaccacaaaacctacaagttttagttttaggtgttcctgattttgatgcagtaatgcctgtgttacatgctttccaaaaagatatcgacttaactgcatttgagttctttggtgagcttgcaatgcaaaaagtactcgaccgtggtcatgttcaacgtccatttgaaactcaatgtccattctatgtattgcttgagtttgaagcgccatacgaaccgattatcgacaaagcaatggagattttcgagcactgtatggaacaaggttgggtacttgatggtgtaatgagccagagccttgaccaagtagagagcttgtggcgtttacgcgaagatatttctgaatcaatcgcgccgtttattccatacaaaaacgatatttcagtattaattactcacgtacctgcatttattcgtgaaattgatgcgattgttcaagaaaactatcctgactttgaaatttgctggttcggccatatcggcgacggtaacttgcacttaaatattttaaaacctgaaaacttaaccaaggatgagttctttgcgaaatgtcaggtggtgaataaatatgtgtttgataccgttaaaaaatacgatggctcaatctctgccgagcatggcgtaggtatgacgaaaaagccatatttggaatattcgcgctcagctgaagaaatcgaatatatgaaagctttgaaaaaagtatttgacccgaaaggtattatgaatccaggtaaattattcgatctttaa

SEQ ID NO: 53810 - DNA, 1233 bp, Acinetobacter baumannii
atgagccaacatctttcactacctaaagataaaatccgtttccttttgttagaaggcgttcaccaaaacgcagtcgatactttaaacgctgcgggttataccaacattgactatcgcaaaactgctcttgaaggcgaagcgcttaaagaagcaattaaagatgctcactttattggtattcgttcgcgtacccaattgactgaagaagttttcgaagctgcaaataaattgatcgcagtaggttgtttctgtatcggaacaaaccaagtagatcttaaagcagcgatggcacgtggtattcctgtatttaacgcaccgtattcaaatacgcgttcggttgcagagctcgtacttgctgaaactattcttcttcttcgccgtgttcctgaaaagtcagcggcttgtcatcgtggtggttgggacaaatctgctgtgggttcttttgaaactcgtggcaaaactttaggtattgtgggttacggttccatcggttctcaactttcagttcttgctgaaagtatgggtatgcatgtcatttattatgatgcagtcactaaattaccaatgggtaatgctcgccaagttggttctttagatgaacttttagcaactgctgatgttgtgactttgcatgtaccggatgttccgtctacacgtaacttcttcactaaagaacaatttgcaaaaatgaaagaaggcgcgatcttcttaaatgctgcacgtggtacatgtgtagtaatcgaagatttagctgatgcaatcaaatctggtcaccttgcaggtgcggcagttgacgtattcccgaaagaaccaaaagcaaatggtgaagaattccagtctccacttcgtggtttagacaacgtgatcttgactcctcacgttggtggttcaacaatggaagctcaagcaaatatcggtttagaagtagcagagaaatttgttgcttactctgataagggtatgacactttctgcggtaaacttcccagaaatcgcgttgccattgacagcgggtcaacaccgtttactacacatccacaaaaacgtaccgggtgtattgtctaaaatcaacaacttgtttgctgaacaaggcatcaacatttctggtcagtcacttatgactaaaggcgacatcggttaccttgtaatggacgtagatgcttctgcttctcaagaagctttagatatgttgcatgaagttgaaggcacaattcgcgtacgcgtattgttctaa

SEQ ID NO: 53811 - DNA, 885 bp, Acinetobacter baumannii
atgtccagtccaagccagaaatcccagcttcatgctttgggctttcttattcttgccatgttaagtgtccaaagtagcgcatccttagctaaagtcctgtttcagaactttcctgtactgactgtttctgcaatgcgtttatgtatgggggcatttattttggctttcatttttcagatctggaaaattaattttagtcaggtccgatggaaagctattttgagctatggctttgctcttgctggcatgaatgctcttttctatttatcgcttgaacgtttacccattggtattgcggttgcatttgaatttattggtccactcagtgtggccctttaccatgctaaacaaaaatatgattttgtctgggtcactttcgcaattattggtctcattttattatttccttttaaccaagcacatagtttggactggatcggagtcctatttgcgatgagtgcgggtgcttgttgggccctatatattattgcggggcaaaagccttctggtatctcaggcaaccatacagtttgtttgggcatgactgtaggtgcttgtatacttttacccattacttttttctcaggctcgattgggcaagttatagaattaccatactttttttattttattggtctcgccgttttagccagtgcacttccattctctttagaaatgttagctctacgcaatttaacacctttaagttttggaacattgatgagcctagagccagctgttgctgcactttccggttttatcttcttaggtgaatacctgttatggaatcaatggttggcactcgccaccattattgctgcttctgtgggttgtaccataaccacccaaagagcccgacaacaacgtgaaaaaacagtaagttaa

SEQ ID NO: 53812 - DNA, 861 bp, Acinetobacter baumannii
atgcaaaatcttccaattattgctgtgctctatatgattttgtcgatggtttcgtatcaaatcagcgcttcatttgccaagcaacttattgcggctttagatccgcttaccgttactattttaagattatgttttgcagcagtgattgttgccgttatgttccgttcttggaaaatctggtctcgcttaccttatttaaaatggcgtgatttattaatgtactgcgcatcattagggttaatgaatatcttattttatacctctcttggaaaattgccccaagggattgcggtaggtctagaatttattggtccattaggcctagccctagtttctatcaaacaaaagagcgattatatctgggtagcttttgccatgctgggtattgcactcatggtaccttggcaagatccaactcaacaccacttttcttacgtaggtgcagcctgtgctttaggcgcagggctttgttgggcattctatatttattttggccaaaaagttgtaactcaaaatataggaatgcatgccttaaccatagggattaccgtatctgccctctccttattaccaattggtatttggtataatggcccagcattacttgatacacagtactggggcaaagccttacttattgcagttttagcgactgctattccctatgcacttgacctaatggcactcaaacaacttaataaattaacttatggcaccctaacaagtttagcgccagcattggcagcattaacaggtttcttattacttcacgaagaaatcagcatgctgcaatgggtggctttagcttgcgtaatgctagcgtcaattggggttactttaagaagtaaaacagcatcatag

SEQ ID NO: 53813 - DNA, 444 bp, Acinetobacter baumannii
atgaatattttcgaagcattaagagaaagccacgaaaatcaacgcaacctttctgaacaattaatccagacacatggtttaaccgaagaacgaaaagaattatttgatgcattaaaaaacgaactttatgctcactcagttgccgaagaccgttatttatatattcctttaatgtttgatgatgtcggtttggatattacgagacatgctttatctgaacaccatgaaatggatgagttggtcgagcaacttgaaaaaacggatatgagtagcccaagttggttggcaaccgctaaacagttgagcgaaaaagtccatcaccacttaaaagaagaagagcataagttttttcagcaagccggtaaaattcttaaagacagtgaaaaagaaacgctaggcaataaatatttaaaggaatataaaaagtataaaaaacagcaataa

SEQ ID NO: 53814 - DNA, 777 bp, Acinetobacter baumannii
atgggcatggaatgggatgttatccttagtttgatcttttttgcgtttactgcgggagcaattgatgctgctgttggtggcggcggactcatccagattcccgggatcatgagcacttttcctaacatgtcgactgctacggtgattggtaccaataaagtctcatccatttttggtacggcatcggcagcttatacatttgctaaaaaagtaaagttgcaatggaagcttttagccgttattgccatttgtgccttgattagttctttcgctggtgcggcttgtttgtcgcttatccctcaatcggtattgcgtccttttgttttcgtgatgttgattgtgattgcgatttataccctagttaaaaagaacttcggacaagtccataccgagcaaaaaattactacgaaaatgctcgttttagctggtatcggtagtctggcgattggcttttatgacggtattttcgggccgggtactggtagtttctttatctttttcttcattcgttttttacaagtcgattttttacatgcttcggcgttgtcaaaaatcggtaattttatgactaacttagctgcgctgagtttcctcatcccaactgggcacgctattttacatattggtttaatgatggcagcggctaatgtgctaggttctattgttggggtgcgtaccgcgcttaaatatggtagtggttttgtacgtattatctttttaattttggtgagtatcctgatttgccgtttgggatatcaaatgtttgttacaggttaa

SEQ ID NO: 53815 - DNA, 906 bp, Acinetobacter baumannii
atgacgacaaaaaatcaaaaaatttctcgtcgccatatcagtggtgtatttcttttaaataaaccattagggctaagttctaacgctgctttgcaaaaagtgcgttggctttaccgtgcccaaaaggcgggtcatactggtgcattagatccattagcaaccggtttacttcctatttgtttaggagaggccactaaattctcacattacttgctggactcgacaaagcgttatcaaactactgttcgattaggccaaactacaacaacaggtgatgttgaaggcgacattttacaagaacgtcctatcccggttcttagcaaagagcttattgagcaaactttagaaaagtttagtggcgatattcaacaagttccaccgatgtactcggcattaaaaaaagaaggtaagccactatatgagctggccagaaagggtatagagattgagcgtgaagcacgcccagttacgatttatgctttagaactcattgaatttactgaaaatagtatcactttagatgtaacttgttctaaaggaacatatattcgtgtgctaggtgaagatattggtgaggcacttggttgtggtggtcatttaaccatgcttcaccgtattcaaactggacattttgaactcatcccaagttataccattgaatatttggaaagcttaacggaagagcaaagagaagctttgctactgcccgtatatgctccaattgaccatttcttaaaaattcaggttcccgaaggacgggaaaaatatttttgtaatggtctagaaagcaatattgatcattctgcagaagcagaagtgttggttttttcggatgaacgctgtctaggtttagctgaaattaccgataaaaaacggttggtacctaaacgtatcttaaatttgtag

SEQ ID NO: 53816 - DNA, 1035 bp, Acinetobacter baumannii
atgcaaaggatgcagaaaaagatatggtggtgtgtgctcggattttttattttgagcatcatcgcatgtgtgtattggctaagcccagactcggaaaatacttcacctcagccaaatcaggatgaagctaaaagtttggtagctacttcacaatctactttaaattcaccattaaacgaaaatacttatttgagtaaaagtcagcaagatactcaagttaactgccaattaaaaattaatagttcacagcatttagttgtgaatagccaaacccgtgactgctttgaatattttattacgcagtatggcgagagcaatttacaacaagttaaaactcattttgagaaatttatacaagatcaatatttagagccagcccgctcacagattattgatttgtggacgcgttatttaaaataccgtgagcagcttgcacaaattcaaccgcctcaatctaaacaacaagatcaaaattattttcaaaagatcttcagttcaattcaagatataagaaaacgtttcttctctgcttctgaaattgaagggttattttcaacagaagacatttatcagaactacacattagatcgcatgaagattttagaagattcatctttaagcgaaattgaaaaagctaaaaacctcaaagagcgctttgaacaattaccagaagactggcaagaaaacctacaagaactctcaaagcttgatgatttacacacactgaccaaacaaattaaagctcgcaatggttcagcagaggaacttcggcaaatgcgtacagcacttgttggagccgaggcaactcaacgattagaaactttagatatacagcgtaatgcgtggcaacagcgagtgactggctacttaaatcaacgtgatgaagtcctgcatagcaatatgagtgacagcgctaaaaaacaagctattcaacaactacgccaacaacaatttagctcatcgcaagaacagcttcgtcttagaacttttgaaacagtccatgaccaaggaggtgaactaccctttaactactag

SEQ ID NO: 53817 - DNA, 975 bp, Acinetobacter baumannii
atgaaaaggaacttaatatttttctgtgctgcaatactctcaggactgagtgtttcagcaacccatgccacaaatgcagagcaagtcaaaagctcattcgtctattcaacttatgcacaaaccaaatatccattggtttttaaccatggtatggcgggttttaaccgagttggaacagatacgcttggtctggactactggtatcagattcttcctgatcttgcgcgtaacggaggaaatgtctgggcaacaagagtttcaccgtttaactcaactgaagttcgtggagaacaacttgcccaacaagtagaagaaattattgccatcaccggaaagcctaaagtcaacttgatcggacatagccacgggggaccaacaattcgctatgtcgctgggatcatgcctgaaaaagtcgcttcgcttactactattggtgcacctcacaaaggatcgccaatggcagatgtcatcctgaatgttgagggtactcctctatccggactggcaacattagtaaactggttttccgcagcaattacttgggcaggaggtctagacccaaatagttatccgcatgactccctagcaggtgcccacagtttatcgactcaaggctctgcacagtttaatgcccagtttccaatgggtgttcctaccacgtcttgtggtgagggtgcttatcaggagaaaggcatttatatgtattcattctctggtaataaagcgctgacaaacccattagatccatttgatatagcattgacaggaagtagtctagtggttgacccatttggggataatgatgggctggtttctcgatgcagtgccaaatttggtaaaactattcgtgacgactataactggaatcatttagatgaagtcaatcaggtcatgggaatacgttctatttttgcagcagaccctgtctcggtttaccgtcaacatgctaaccgtttaaaacttcaaggattataa

SEQ ID NO: 53818 - DNA, 369 bp, Acinetobacter baumannii; identical to SEQ ID NO: 43520

SEQ ID NO: 53819 - DNA, 741 bp, Acinetobacter baumannii
gtgttttttgcagtcattacgctttttcctgaaatgtttgacgcgattacagcctacgggattagcgggcgtgcagcaaaacgtgacatagtacaagtcacttgtattaatccacgtgattttgctgaagggaattaccgaagagtggatgaacgtccatttggtggtggccctggtatggtgatgatggcggagcctttggcaaaagcaattaaccatgccaaacaacttgcttcgcgagcaggatgtgttcatgtacctgtggtgtatatgtctccacaaggcaaaactttaaatgaacaggcagtacagcagtttgtcgattatgatggcttaattgtattgtgtgggcgttatgaaggcgtcgatgagcgtttgatccagcattatgttgatcaggaatggtcgattggagattacgtcttatctggtggtgaactacctgccatggtgttgcttgatagtattattcgccgtttgccgaatgtaatgtcagatgagcaatcagcgatacaggattcttttgtagatggtcttttggattgtccgcaatacactaagccagaccagtttgaagggttagatgttcctgaaattttaaagtcgggacatcatgccaatattgagaaatggcgttttttgcagcgttatcaacgaactttagagcgtcgacctgagttgattgaacaggttacgttgactaagcagcaaaaaaaatggctgtcagatgaacaagggtaa

SEQ ID NO: 53820 - DNA, 549 bp, Acinetobacter baumannii
atgacaccaacacagaatgttcccgaagatcgtattcagattggacagttacgttcagcttatggattaaatgggtggctctgggtgtattccaatacagaacccatgagcaatatgtttgactacttgccttggtacatcgagaccaaggccggttggcaaatcgttgatgtaaaacgttggaaaccacatggcaaaggtctagttgttgctctaaaaggtgtgagtgatcgcacaggagcagaaagcttggttggcgctaatatctggattgctaaatctcaactgccgaaagcagatgtagatgagtactactggtcagatttgaaaggcttaacagtgttaggtcttgatgacgacgaacaggaagtgaacttggggcaaattcatgagttgtttgaaactggagccaatgatgtgatggttgtacgcgctacaccagacagcattgattcagaagaacgcatgatcccgtggcataaagatgtggtgcaacgtgttgatcttgaagctggtcgcatttacgtcaattggggcgtagattattaa

SEQ ID NO: 53821 - DNA, 252 bp, Acinetobacter baumannii; identical to SEQ ID NO: 43517

SEQ ID NO: 53822 - DNA, 426 bp, Acinetobacter baumannii
gtgaagaatggtttttctttaattgaaattatggtcgtggtagcaatagttgcaattttagcggctatagccaccccttcatatttacaatatttgcgtaaaggacatcgtactgctgttcaatccgaaatgatgaatattgcgcagactttagagtctcaaaaaatagtaaataaccgttatccttcggatgcaactatacaatcaatttatggttctaatgtgagtcctatacaaggtcaggctctatataagttagcttttgcaactctaaatgattcaacttgggtacttactgcaatacctatttctactagctcacaagcaggtgatggaattatttgtttaaatgaccaagggcaaaaattttgggcaaagggtgccacagtttgtgcactatctgcttcatcgagttggaccgagtaa

SEQ ID NO: 53823 - DNA, 483 bp, Acinetobacter baumannii
atgaataagtactacattttacggttcaatcagggttttaccttgattgagcttatggtcgtgattgttatcgttgctatttttgcttcaattgctatcccttcatatcaaagttatagccgtagagctactgcatctgcggctaaaagtgaaattttgaaattagctgaacaattagaacagcataaatcaagaaattttacttataggggttttaccacaacctctataaccctacctcgcgggggatatacgattcaaattactgatgatacgaccacaggaaatttattgacgaatgctgctgcaaatgggcaaacatgggtcattaaagcaaccacaacagattcgagaaattttaattttattgctaaaaattcaggtatacgttgtcaaagtttaacagttacagccgttgataatgattgtggtggtacgactacttgtaatacatgtgaaacgaacagtgaggtttggcagtga

SEQ ID NO: 53824 - DNA, 3867 bp, Acinetobacter baumannii
atggggaatatcatgaaactaaaattgaagaattttaagccaaataatttatggtatgccgtctgttcaagctcaatgatattcacatggctgatgacaagctctgtggtgcaggcaagtgatttacaaatttatgcctcacctacagcaggtaaaaaaacaattgtgatgatgttggatacatcaggaagtatgaccaacaatagttatggtgaaaaccgcttagccatgcttaaaaatggtatgaatgcttttttggctagcaataaccctgtcttaaatgatacgcgagtaggtttaggaaatttctcggcaaatggtgacagccgaagtggacaaattttagtggctgctgctcctttaggtgatgcaagtactttaaatacggtaggctcacaacgttataaattaaaacaagctgttgctaatttaactgcgggaggctcaacaccttcagcccacgcttatgctgaagcagctgcttacttaatggggacaactacatattcagagacgaattatgctattcgtaaagatagttatatcaaacgtgtaagaagatctgataatagaactgaatattcatattgtactaattaccgtgattcgcaaattgatacagccaacctatggcaaccttgtcgttcaaatagttattggagtagctggtcaacaaataatccaggtgtggataatgctactgcttatgatacttcatctgactggacttattactatacttattactacaccacttttaattatgctgtagcaaatgcagatagcggtattccaaaatctaaatcaaatgatacagctagcaatccgaatattgttgtagaccgaaatgctactaactccaatgcagtgtatcagtcacctttacctgcagtagcgaatcgccagagttgtgatgggcaaggtatttacttcttatcggatggcgaaccgaacaatacaacaaatacacgttcggcaagtgtcatgtcgactgctttaggtagtacttttggagctgattttaattgttctggaggtttatctaatactacggcagactctggttgggcttgtatgggggagtttgcaaaaagattatttgataaaacaaagaaccctgccggagtctctattcaaacagcatttgtcggttttggtagtgacttttctagtttgagttcttctgatgtaaaaaatgcctgccgtttaagttcgagaacccagtctgaccgaaaaggagatgatgcgtgttcaccgaatcaatctacaaatgcggtagctgcaccaggttatggaaatggtggttttttccctactcagagttcacaaggcgtaacagacagcgttatcgcatttattaataatttagataaagttcctttagaacccttaaccacaggtgctatctcagttccatatgatgcattgaatcccaaaaatttacaggaatatggttatttacgagcttttgagccaaatccagctaacacgtacttaacatggcgtggaaatttaaagaaatatcatgttgttttatctggagcgaatgcaggtgcttttgaggccaattctggcggattagtctacaatgcaagtggggcttttaggactggaacaaaggattattggaatagctctacttatactgacggaggcaaagtctttttaggtggttcatatgcgaatgtgcctttacccattgctggacaacctgaaacacgtgatgcagaaggaaatatcacaaaatattattacgcagtacaaagtaaaatccgcaacttatttactgatgtttccgccgttgcagcagatggtagcttaacgaaaatttcaacttctggaactaatttgctaaaaattccagctgttccaccagaaggaactaatccttttgatacggtggctaatacagcaagttatgttttaggtaaatttgatccatcaactggacaaaatattttaaaagcttttcctataagcttgaaattaaaaatattaaattatttaggttattcaacagatattaatgcaacaactctgccttcatctttggttacatcgaatgaaccttatttatcgatggggggaagtattcactctttaccggttcaactaacctacaatggaacactagatgataatgggaatttaacatctgcccgagaacaatccatcctctatggaaccatggaaggcggattacatattgtggatgcttcatctggtattgagcaaatggtctttgttcctgcagatattttaaatgattcagttgcttccaaagctttagttgttggtcaaagtgatgcttcagctcccgctcatggtatggacggagcttgggtatctgatccagcctataatattactacagtgggaagtggtagctcggcagtatcaaaagtaactgcaaagcaaatgaatatttatggcggcatgcgtatgggaggaagtagctactacggactagatgtattaagccctacttcaccgaaactgctttttagaataggggcagaccagactgactatagccgtatgggtcaaagctggtctaaacccgtactcgcgaacatccgttataacggttctattagacgcgtcctgattgttggcggtggttatgatcagtgttatgaaaaaccaaatattacgttgactgacgcttgctttaccaatggaaaagcaaaaggaaatgctgtctatattattgacgcaaaaactggtcagcgtttgtggtggacaagtgatacaggttctaatactgataacgccaatatgaagcatagtattgttagccgtattagtactttagaccgtgatgctgatggcttagtcgaccatctatattttggagatttaggcggacaaatttttcgcgtggaccttaataataatcagacaaaaaccaattcgacctatagcagttttggtgtcagagttgtgcgtttagcgaatttagcaacaaatgattcaacttatgatggcacaaatgattatacaggtgggaatgctcctcgtttttatgagcctcccacagtaacgatccacgattatggaattcacacttttattacagtaggtattgcatcaggagaccgtagtacacctttagacgtttacccactcacaggccgtgaaggtatgctgcctgcaagtgcattaagtggacgtcctgtaaataatgtatatggaattattgatagagactttgttaaaaagaacttaatgtctttaactgataatcagcttgaaacaaaagatattacacggacaggcttaagaaaaaatcctcaaattctaagaacaggtgaaacaagagtagctcaaattttcttcccaactacaggagtaggtaaaggtggttggtatcgctcgctttctagtacgagcgatggtacagaaaaagctaataatagttttcgtattaaaggaggactcaaagcttttgaggaaccaatggcaattacgggtaatttaattattccagtttatgaccctcaaggaacgggaattgttgcggcagatccttgcctacctcgtgttgtgggagaaacagaccgacaaacttattgtttaccatttggagcttgtcttaattctgatgggtcaatcgatcaaaataaagagaatcacagtgggtttgaaacacaaactggtactaattgcccagtaggggcttctgaatgtaataaaaacgttattggctctggtattcgtagcgtaacatttgtaccaacggaggataacccacctacgactaatagttgtgggaaattaaagctgtctggtaatgagcaagggactggacagtggcaatgtacgagtcatttagttcctacgcgttggtatgagcgttatcgttaa

SEQ ID NO: 53825 - DNA, 819 bp, Acinetobacter baumannii
atgacccatttaaattataaaaatatcaaaggtcgatctaaggaaacgggtgccacacttattgttgtacttattattttattgattgttatttctgtcggggttttggcaataagagtagcgattgtttctctaaaagttgcaactaatagccaagttggccaattaaactttcaatcttcagatactccgttagagcttattgtacagatgaacccaaccacattgacaaatattaccaatgtgattggagcagcactgaaagcacatgaaagtaaccctggtgcggaatataacttttgctataaaccaacttctacatctgtaagttttgctcaaactcggggagcaagtttgcttcgggctggcagcgccaataatgctgtggttgaagacggtggagtagcaggtttctgcgatttaacaagtgactatgggagtaatcgtcaagcggtagttactcaagttgctgtcaatatcccaaccgatgccatggctgatattccgggttcaaatctacctcgggacataaatctttccgaaggaacccaacttcctaaaagcatgctatctacgcaacgtattcgggttattacaacagcgtttttacctgcttatgcctcaaattctttagaaactctgcaatctgattgcttaagtacgagttccgcaaaaattagtgacaactttgatagtgcattaacggataagcaaactctagctgattgtttggcaaaccataacgtaccttttagtactcaagttcaagaatttaactataccaataagctgactgaaatcacggcaccaggttcataa

SEQ ID NO: 53826 - DNA, 615 bp, Acinetobacter baumannii
atggtttataatttttttgttgaatctgaagcgatgccaaaacacggcaaaaacttcaatgatgcgacccgagtacagcacatcacaccgatttcagcagggtccttgacaggatcatatacgttcatcgagttattagtgaacagcagtgatggtgtgatgcgtagaatactcattcctcttgctaccattcttaaagaggaatccaacataaattcggaggtcgtggctatgaaggctcagcagattcagcatagtggagatgtttctcagaacatatttctggcagtaatgattttaatcatgataattgtgctattaattagcccttttagcatcgagacactactgtcatgttttgttacaattttctgcttggcaaatgacttagtaaaatgctataataaaacggctataagttatttgcaaaactgcactcaggttgaatctgaagcgatgccaaaacacggcaaaaacttcaatgatgcgacccgagtacagcacatcacaccgatttcagcagggtccttgacaggatcatatacgttcatcgaaaaattagtgaacagcagtgatggtgtgatgcgtagaatcacttcgtacctgtatgggtag

SEQ ID NO: 53827 - DNA, 1197 bp, Acinetobacter baumannii
atgaattttgaaacttacgtgaaagagaatttcattgcaactttcaacaaattatttagaaaacaatcatctaacctattaactattaagtactatccagaagatctatcttttaatgaattcaatttaaaaaaagaaaaaattttagctgaggttttaaatgacttggctactaaaacatattcacctacatccctacatcctagctttctagaaaagtcagatgggtcattaagattaatctgtattccctctataaaagaccgagtcatacaaaaactcattttaaaatatattaaagaacatcacgaaagtaagtatattttggctactaatcatgatttctcagctaaaatttcagaagctggagcaataaaagcaagaactaaagctttaattttgagaaaccaaaatccatatgtgttaaaaaccgatatttcatctttttttgataatttagatcgtcgattagctataaaaactgtcaaagaaaagcttgatatacctgaaataaattatttactggaaagaattattaaggtcgaaacaagatttcaaaaagataatttaaacaatgaaaaagaaaacgctcttttgaaatcaaaaaaaggcaaaggaattagacaaggtatgcccatgtcatcatttcttgcatcactttatcttcatgattttgataattttattgagaaagaaaatattaaatgtgtaagatatgcagacgacttaattattttttgttcatctcgtaaacaagccttaaattatctagaaaaagtaactatagagttagaaaaaataaaactaaatattcctcctttggaggataaatcaaaaactcaaatagtaaaaaataaacctattgatttcttagggctggaatttagatttggtggtactaaatttaaagcctatgtgccggatgtagtttttaaaacaattcatcgtaaattagaagtctatgattctctaaataaaaatctcaaaaataaaaaagatttttctgatgtaattcaagatataaaatacatctcaaatggatatagtgcagctttccctgatgcttgtaatattagtgaactagaatatgaaataaatacgaagagaataattattttttcaaagcttttaacatcacttggattagatatagaacgccttagtgctcgtcaaaagaaattcttttttagcatataa

SEQ ID NO: 53828 - DNA, 426 bp, Acinetobacter baumannii
atgtgtgaatgtcaaaatgtcggtgaattttttgtatgccctgacagcttttcaaatattttcagcaataactatgaaatgaaaaataggtttcctcactacattattgaagaagctccatgcgaagaaactcatccaaaatttgactatagcgagttttattatgcctgctctgagtgtgagcaagcatggtatttcgagtgttatccagatacaccgacagcacctgtttttggaattaaactttcagacgtgaaccaaaccttaagccaaaatcgaataaacagtattaagcaattcttagttgttttagctcatgaaggcttttcagaaaacaagtgcattcataaaggctgtacggactattcacttaacggaattaacgtatgccttaatcattttggttataagttgagtacccgataa

SEQ ID NO: 53829 - DNA, 636 bp, Acinetobacter baumannii
gtggcttttgtatctgtaaaagaagtagctgataaagcgcagcattttagtgtccacgaacaaatgattatagggattaattattgtttaggattaaatggacatgaacaagacattaatgaggggcgagcatggttgtggatagcagctacatattatcggtcttttattgctcagtataattgggctttaacatggacaagtatgccttgttataaagttgaaaaagatatttctttagaagaattacaaatattggcaaatgaaaataatttggcagcgatctacatgctaggtgttcattttagagaacctgatcctattttagctattgaatactatcaaaaggcggcaaaagaaaatttttatccagcaataaataatttagctgatatatatgaaaacggctctggtgttgaacagaacattaataaagctgttgaactttataacattgctgctgaacaaggtattgctgctgctgagtggagtttaggattgctttatttcaatggagatcttgtggatcaaaacattccattagctcaatattggttacaaaaagcagaagcaaatggatggtttccagcgcaggatcttttgatttctatcgatgaaaattatcaaaaaatttaa

SEQ ID NO: 53830 - DNA, 789 bp, Acinetobacter baumannii
atgcttaataaattaaagaagttaataggacttgtcggcttaacatcactttctacagtaagttgcgctcaacaagatcaagaagctatctggcaaaatgtgtataacactagaactcaatattatgaagaaaatataggtaaattaccggatgatattctaaaaatagctcacatggctggtgtttggcctggtggtggtttatatgtaattccagctgataaaattggcaaagatattacggtctattctacttttggacttacaaactctgatatgcctgctcaagcaactgtttcagatgtaaaagttgagaaagataatttaggacgagttgtttcaagttcagcaaatgtaaaatcaaaaacacaaactgcggctctctctggtgcagcaggttatggatatgaattaatattaatgactaaagataaaaatgctgaatggccactttggtttttacaatgggcagtacaagctgaattattaaatgatgcaggctttctaaaaagagttgaaaagtataatggattgactgtagaagccatatcagttggagaaaatgagaatgacaaaattaatgtcttaatcaccaaagcccaaaaacctctacctcttggtacacaacttccaaatggaaaaatggagtttctagtcgcaatagttattacggatgaagaaatgaaatggtctatgaaaaatggacgaaatgaattagctagtaagctcatggaagcaggggttggtcaactcagtgatcgaaatagaccatctgtcataggtcattaa

SEQ ID NO: 53831 - DNA, 423 bp, Acinetobacter baumannii
atgaatcaactagaattaattctaaaaacctttcatgagtatgagtttaaggaaggtttagatgatttattctatttatcaggtaactttctcaaagaaatttatccaacgattatgctcgaatatgaccaagatacagcattcttcatggctttaaaaaccttattagaaagtggtgatatttctctattttataatctaaactttgaagactcatctagagatggcgaattgctaactggatcagcagaagaacaaattaagcagttaaaaaaagtctggatcggcagtgatgctatcaataagatggatgaggaaaataattacataggatggtacttcttaatacagtgcccttatgcattagctcacaaaatttatgataaagatggaaacttcgaacattggttttgtactggctag

SEQ ID NO: 53832 - DNA, 474 bp, Acinetobacter baumannii; identical to SEQ ID NO: 42070

SEQ ID NO: 53833 - DNA, 372 bp, Acinetobacter baumannii
atgaacgaccctttaacaattaaatcattgccgtgggtaattaaaatctgggcggcagtcatgggcggcatttttgcgctcatgttgagcggtgatatagacattgaaggcaagattaaaatcaaccttagtgtcattttgaaattatcaatcagcatcactatcagcttatacggcggttccgcttttattgaataccaaaatttaggcaaccttcacccaatgacacatggttttatcatgctgatttttgcagtgttcgggatgctcttaattggtatctggtaccaagcgattaggttgtggaaaggtaaaacgatgagtgaactaatctttgaaataaaagaagcgttcaaagctctattcaaatag

SEQ ID NO: 53834 - DNA, 327 bp, Acinetobacter baumannii
atgccaaagtatttagctatagcggagaaagtatacaaggaaattaaaaaagataatttatttactgaagataccattcaaaatttaaattgtttaattagcttgattcgcaaagcaattaaaggtactgagttcaaacttaagtacaattttataaattttgaagaatgcttaaatcaatttaataaagaaaaatcagtgcatattgacttaagtctacttcctcgttttgagtatagagatgaatttattttgtggctcactaattttattagaaatattagtgtgcaaaaaaagttcgtaaaacaaaagtactattttaattag

SEQ ID NO: 53835 - DNA, 216 bp, Acinetobacter baumannii
atgtctaatactactggtacagtaaaatggtttaatgaaactaaaggtttcggttttattcaaactgatgaaggtaaagatgtttttgcacatttttctgagattcaaacacaaggctttaaagttcttttagaaggtcagcgtgttcagtttactgtaacacagggtaaaaaaggcccacaagcttcaaatatcacaattgtgacgaatgcttaa

SEQ ID NO: 53836 - DNA, 1284 bp, Acinetobacter baumannii
gtggcaaatgaagaactttttgatgaatttcaaaaatctgatttagttttttctcagtttttaagagattttctgaaatcatcatttaaggaaaggtttaagaaaataaaggatgaggataaatataattttgagctttttttaccatatttatttcctactagaccttattcacctgcagagatttctgaactggcaccagaatgcgtgggcctgcccaaaaataataaaaaattttgtaaaataaaaccaactaagatatgggcaagatattgccaagcagtgcgtggaatatggataaaacctacattattggcaactgaaaatgataatagtgataaagtaaattgttctagatctttgcggataggtactgatagtaaaaatcaggtaatagttgcgttaacaaatttaaaaacatctgagcaagattgggcttattcagcggttaataaacctaacttaagtttagagcgatatcaaagaattgctgatttagtaaatgatattttacgattaaaacctaggccagattatgtatttttccccgagttatctattcctttagagtgggttgatagtattgcatctaggctttgtaatgctggaataagtattattgctggaacagaatatagacatactgcaaatgataagctaattagcgaagctttattaatattatctgataaccggctagggtattatacattttctaaaatttggcaacctaaacttgaacctgcagtgggcgaagataaagagttgataagtgtatatggtaaatcttgggattttactagaacaaaatacaagaataaaaaaggtcaattaaaagttttaaaaaaaccaatatatatacataataattttcattttggagttatggtttgttctgaattgcaaaatagcaaatcaagaataagtttccaaggaaaagttgatgctctttcagtacttagttggaaccaagatttagaaacattctctacattaatagaatctgcagctcttgatgttcatgcttacacaattcttgttaacaatagaaaatatggagatagtcgaattcgagtacctgctaaacaatctttcaatcgtgatttagcacgagtcagaggtggagaaaatgattttgttgtagcagctattcttgatattaatgaattaagagcttttcagagtcgagcaaaaagatggactcaagatggtgataaatttaagcctctaccagaaggttttgtgatatctaaaactcgtaaattatcaccaccaaataagtag

SEQ ID NO: 53837 - DNA, 525 bp, Acinetobacter baumannii
atgataaatagctttaacttaaaaaaaggaattagtattaagattagtttttttaagaagatgttggcaactttggttgttggtattagcgctattcttattctttgggaggagattgaggacatctttgtaaaaaaagtaatgtataaaatggatgatgggggaggtgttacaggtggaagaaatgaagtttgggatgcaattattgataacagtttaatgtttggtcatggtagattttctccacacttagaatattttgatttagcagcccataatacttttttaagtatatatgatcagtttggatggttaagttgttctttcttcgccataactgttgttttcgttgcttttaatgtttttaatcccaaaaatataagaagttatggaattactccaagttttatatgcttttcttttcttttcttatcaatttctgaaagtatgattaataaaactattttcttttgttttttaatgattgtaaatttaaattcttttaaaaagaatagtgttttataa

SEQ ID NO: 53838 - DNA, 936 bp, Acinetobacter baumannii
atgactagaagtgtctctattgatgtgctaaaagttattttggcactttttgttatagctctacactctaaaatatttatagattttaatgatatattatattttttttcagttaatggtatttttaggatagcagttcctgtttttttagtcattacaggttactatttttatttagttactaattttggtgcgtggttaaagagagttgcttttttatatataatatggatgtttttttacggtctgttttatattgatttttctttatctgtttatgctttattgaaaaatatttattttattttatttggttatcatcatttatggtatttaataggaaccgtttttggtggtattttgttattttatttaaaagattctaatgttaaatttcaattttttttagcaattctattttttactttaggatgtatagttcaatatttaggaaacttccatttatttaactctaagtgggatatggtgttaaatgctaatcctatttatagaaattttttaaccgtttgttatccctttttaacttttggttatcttattcataaatttaatttaactgctaaatataaaaaaattgccccatttgctgtaataatttctttaattcttctatatgttgaagtttatattaattatttctttataagcaaaacagatccattagatctaatgtttttcttaatgttattatgtccttctcttttcatatttgtttttaatttaaatattgaagggcaagggaaaaagttggcactcttttcaacagctttatatctgatacatcctttatttcaaaatttacttaaatcttttaatatcaattcaattgaattgtttctcgtaacagttgttctcagttgtttagcttctatcgtattgatcatgttaaacaaaaaaattaaggttattttgtga

SEQ ID NO: 53839 - DNA, 1164 bp, Acinetobacter baumannii
gtgagtgaagttgaaaacaaaatgaaatttttaatgattagtagttttttaccttcagttctaaattttcgtggaaaattactagaggctattcatcatcaaagccatgaaattcatattattgccccagatcttgagcttttccagcctgaaatggataagctaaaatctcttggttactcagtttactctgttgaaatgcaaagaacgggaactaatccaattgcagatataaagacactatttgaaatctataaaattacaaagaaaattaagccagactatgtcttgtcatatacgattaagcctgtgatttatggcacgcttgccgcttatttggcaaaagtaccaaatcgtttttcactcatcacaggattgggatatgcttttcagaatgtagacagtacaagtaaaagaagcacgtttcaaaaaatcgtacattggctttataaacaagcattaataagatcatccaaagttttttttcaaaatcctgatgaccttgctttattcaaacaattaaatttattaagtaataaggtgccagccgtagttgtcaacgggtctggtgttaatgtgactgattttgaagttgtaaatttgcctcgtgctgtgaatggtgaagttagggtttcatttttattaattgctcgattattacaagataaaggaataagagagtatgtagaagctgctaaattaattaaaaaagaatatcctcaaattgaatttaatttagtgggttggatagatgaaaatccaaccgcaatcaaacaacaagaattagattcatggattgatggaaaaattattaaatattggggaaagctttctgatgttcgtcccgctattgctgaaagttcaatttatgtattaccttcatatagagaaggcacacctcgtactgttttagaagcaatgtctatgggacgagctattattacaacagatgctcctggatgtagagaaactgtagagcacgatggaaatggttatttagttgaagtaaagtctgtcactagcttagagatggcaatgagaaagttcattcagaatcctgaattgactgaaattatgggaacacgttctagagagattgcattacataaatatgatgtacatcaagtgaatcatcatatgatgacagaaatgggaattaaataa

SEQ ID NO: 53840 - DNA, 1260 bp, Acinetobacter baumannii
atggtaagactatataaatggatatttagccctaaatttgctatcacaactttatgcgttgcgatagcaagtatttctgtatcttatgcagacggtttttatacaattattgggccagatgggcggcctatgattgtaccaagtaaaagaattgatcagaaaaaacaacctatccctaaaatagaggaaagaaaaccacaaactcagcagaatcaacctatagtagatgttgtacaaaaaacatctaaagaaaaagaacaaactaaaaatttaccgaaaaaactggaacaacatgtccaagaaaaattaaatactgcaccgactgcaccgactgcaccgactgcaccgactgcaccgactgcaccgactgcaccgcaaaaaactcagaaaaatacaaaaactgtttcagtagtcagtgatgatttaaaaacatccacagaaaaaaataaaattattgagagcggaaatgccccttcagtatctaataatgaatggcaaaaaaagttagttctcgttcctccaccaataaagagtacacctcaagctgcaccatcctccgattcttcactcgataaatctaaatttacaactattgatggcgtagagtatgtaaataatgaatatcttgaagatcaagaatttaacattgaaggtaagaagcggttttaccttatgcctgatggtttggggcgcactgaatcagtagagcggaaaaagggtgtaagtcgatcaactttagatcagcttttcaatcgacaaactcaagaccaagactctactgttgttttagcgccgacgtatatgcgtttgtcttcacaagagctagaagcagcttttgaacaagataagtgctttattaaagattataaaaaatcaattaaaacgcttagcaccaataaggaagtaaacttatggccacggaagccattgaaagaaaaatttgaatatgagttggtacagttaaatccttctgttcagcatttaaaagttatgtcttttgcttctagtaatgagaagcctctatattattggccactcgttgtatttttggatgataaaggctgtattctggaaggagtgagtggatttaaaagcaaatcttatccttcgactatgttacagcatgcatcgattcaaggagttttaaaagtaccgccttcagcacattatattatgatgacgcctttatcttctgccgtggatgttacagaaaaagagttaacaaatcagggacaaattcaaatttcggtattacgttaa

SEQ ID NO: 53841 - DNA, 525 bp, Acinetobacter baumannii
atggaagcttgtaatcttaattgggacttggtgataaagtttattcaaataataattccacttggaattgcattatttgtttatcatatttggcatgaacaaaaaggaaaagaggtcgttgcaaacgaagtaaaagaactccttaagaatattttggaggaaatgacaattatttcacttttgagatatgagactcaaaaagatttaaaattaattgaagaaaaaattgaaagattaaataatctcactcaaattaatatgcgcagcgcactttttatagaaaattgtcttcatgaaaaagaattaggcatgttatttactaattataatatggtgtctacagatacttatgttttacttagaaataacgcgttgaaagctaaagatcctaaagaatatatgaattttaatattcaatctagaatcaatttagatgcatataacaaaccaacagaagctataattaaaaagttgtccccatttgcaatatatacaaagaaaataagtttgaaaaagtttaagtaa

SEQ ID NO: 53842 - DNA, 309 bp, Acinetobacter baumannii
atgaaaccagaacagtttattcgtgagtttgggcctaacactttcagaatatcaatgtcatttgtcaacactgctaagtatttggtggttcatgaaggtgaaattgattttacagatgaaatcaagcctcaccatggcgaacgtgtatttgagcgtgatgtggtcaatcgcctcatagagtctttggatttggtcaagaagcttggtggcttacaaggtgcaaaagcatatgttccagatggttacaaatcagatcgtttgaagcaagcaatcaaagaccacgaatcaatatacggaggcggggaatga

SEQ ID NO: 53843 - DNA, 1122 bp, Acinetobacter baumannii
atggctctaccgattattactgctgaccaaactttattggttcaagcaattattgtgtacctatacgctgatccgggtttaggtaaatcatcgatgggctttactgcggaaaaagcaatttcttttgactttgaccgtggtgctcaccgtactggtgaattacgtcgtggtgcggttgtacagattcaacaatggagtgatgttgcaaaccttactccgcaggacttagcaccatataaaaccgtagtgattgataccgtgggtgcaatgcttgaatgcattaaaacccacctgttacttacggcaaataaccgtcaaaaagatggttctttaaagttaaaggctcaaggtctagcgaaccaaaccttcaagcaatacatcaatactttgatcagtttaggtaaagatgttgttttcattgcacacgcatcagaagatcaaaacggtgatcaaattatttaccgaccagatctaggtggtaaaaaccgtaacgagctttaccgtatcgcagatgtcatgggttatctaacaactgttactactggtgaaggtaaaaatgcccgcgttattaatttcaaaccttcgcctacacatcatgcgaaaaactcaggtgctttaggcggtgaaaccggtgaagtatgggtacctgatcttaaagcacaccctactttcttggctgacctgattactcaagctaaagatcacattaacaccttaacgcctgcacaacttgcagcagctaaagcccaagaagagctagaaaactggaaacaaagctgtgaggaagcagagcatgcaggtgaccttaatcaattaactgagtcgcttgataaagaacatatgtattaccagaacatgcgccaagcaatgttaatgagggctaaagcattgaattgcacgtttgataagcaacgtggcacttggattagtccacctgaatttaacggtatctcagatcaacaaagagatgaacttcaaaactttattgctgaacgtggcctcgatgtaaaaacagtttgtgagcacttaggtatcgatgcccttatccaaattgaagcggcaaaacttaaggcagttaaacaagaaattgaaaccttagcgaaaacggggatgacagcatga

SEQ ID NO: 53844 - DNA, 780 bp, Acinetobacter baumannii
atgaacaaaacaatccaaagcttagtcgtagcagcttttgctggtttcgcagtcacaacttatgcaaatgaacaggctcagccacaggaaattcattttccagcgattgaaaagagttatttgaaacaagtaaaacgttatgaataccaagatattgctcgtttagatacaggactaaataaagatcaaattcgagctttactaggcaatccacaatttagtgaagggctttttgcagtaaaagtttggaactatgtattagatgttcgtgttcctaacacaaaccagtaccaacgttgccagttacgtgttgattttgataagcactatttagcagaacgtttatcttggagaggtgaagcatgtgaaggtttggttgcttggggtgaaaataatcaggcaccagaacgtagcactgtaattgcagatcgtacagcgagtgtcctatttgcttttgatcgatttgatgcgagtgcgattgaagaaggtactaatagcgttgtgaaaattgctgagcaaattaagaaaagtccaacaacaaccccaattattgtttctggattcacagacccattgggtaagtttagttataaccaagagttatcatctaaacgagcgaatacggttgccaagttactggtacgacaaggtgttgaaccaagccgtatacaaatacaggcgaatagccagaccgacgtatacaagcagtgtagtgataacaatagttcacaacttattcaatgtttagcgccaaatagacgtgttaatataagttggtaa

SEQ ID NO: 53845 - DNA, 225 bp, Acinetobacter baumannii
atgaatctatatgaatgtaacaaagagataaaagaatacgagactgtaattgaagaatattctcctaaatcaaaggaggaatatgaacctatatataaaaaaatagtgttattaagaaaaattgatgtgataacaaataagatgtatatcataggtttatgtttcttctgtatgtggtttggttttctgatatatgcttgggatgaaaactttaatgttttttaa

SEQ ID NO: 53846 - DNA, 282 bp, Acinetobacter baumannii
atgttcattgtgaaatttgtaggtgataaggcaagtaaaaataagataagaacaatattaaaaaataaaattctatatctatcagatacagattcttttaatgaattagaaagtgacttttacaaacagattgactatctatgcaataaaaatatggtgtttagacgtaaagttgatgaagtacgaaaagcgagagaaaataaagttctattttttgattatgagcagcttcatacgaaagaaatttttgagctttataaagtaaaaaataatcttacttga

SEQ ID NO: 53847 - DNA, 192 bp, Acinetobacter baumannii
atggtacaaagcgttaggcttaacgacaaagagcaagaagagcttagaaagaaagctgtcgaacttaacaaagttttaattgctaaaggtcaacaacctattcgagatagtgagttagttcacattctaatagaaaacggactagatcttgtagagattagtaacagcggtaagttacacataccaaaataa

SEQ ID NO: 53848 - DNA, 1263 bp, Acinetobacter baumannii
atgcatgcatgtttacatggtggggaaatgttagacaaaatcgtgatgcacataccagttgatgcttcgctagtcgatattgatagcgaaggtcggtactgtgtatttggttttgatttactggaccttgggttaagagttggctcttacgatgtatacaaagacgaagatggtaacgttaaacatcaagttctaaatcatgcatattctaaacttccgacttcttacacgaagatggcttttaagtttttccatgaaggtcgtacttatccttatgttgaacttaaagctagtcctgcgaagattcttcaaggacataatgtgtatggaacggattggatagagcagggcgcgcttgaaatgctcggctatttagctgaatcgcatcctacactttacagtatgttggccattggtgagacggaagttaaacagttagatgcaacttattcagcacgcttacgtgatgataaccaagttgctgatgctattgactttttacgcaatgtaactactcaacatatccgtaaatcgactaagcaagttacctataagaacactaactattatggttctgaacgttgtaaacgttttgctcgtaaagtttacggtaaatctgctgaatttcagtctcaacttgaagagcaaattaagcttgctaaggcaaatgataaatgtgctcaacgtgttgtagctgttatgtcagatccagatttacagcagtgggttaaaggtctcttgcgatttgaaacaggcattaaagcctacgttatgaaagaactcggtattccgactaatttatttgaacttattcgttatcaacgctctaaccctaattttttacgtgatatctggattaaagcaaacgctcagttatttaaagccctagagggtacagccatgaaagctactgaccacgatactgtatttaaaaatctctgtaatgtttttggaactgtgacacctaaaggccgtcaaagttttactaaggctcgtaatgtcttcaatttttactgcgcattagaaatgaatggttatgaggttatgaagacacgttatggtgagcgtcagtattaccaatatatggctgatttaattgctgcgggttactcaaaagcattcttgcagaatctacatgtagagtctaaatccaacattattccatttcttaaacttgtcgaaattaatttcgaaaatcaagtacctagcaactttgttgaaccaatttctatttttaatcagcgtgaattacgcatcgcataa

SEQ ID NO: 53849 - DNA, 315 bp, Acinetobacter baumannii
atgtctcaaattatttttaaagcaaagctacttaacgttgatttaactacaaatgagaaaggattaaacatgcgtttaatctttgaatcacaacgctatgacaaaggtctcgatcagtgggttccgtgttcacagaacgtgaaagttgttgaagatcatcaccacctgaaagatttttatttgtcgtacaaaggtcgtgaaatctatttaccaatcgaaatgacagcgatggaccgcaacattttttataagactactggtgacggtaagccgttgcaggttgaggaaaagaaagcgactgatataaaagcttaa

SEQ ID NO: 53850 - DNA, 207 bp, Acinetobacter baumannii
atgtcagtaatgcacgtttgtagccaattatctcaacctgacgctaacgggttgcaagtgtgccttgaatgggtcctgattaatcagtccattcttccgcctttaactctcgaagatgccactatattgggcgggggtttttggttggtttgtgttgtcgctaagtcatatcgaatgctagcggattttatttcatcttttagatag

SEQ ID NO: 53851 - DNA, 270 bp, Acinetobacter baumannii
atggctttacaaaatgttgaggtgattcaacaagaagctcataaaaaaacatggttccaacgtttccgcaagtctgcgaaatactcgttggttgttcctacaatgttggccgtaaatgcctatgcagcagatgcacccgcaggacctgaaacaacatcaattattacttatatcggtttggttgtggttgctgtaggtgctgttggtgctgcatggattatggttccgcttgcagccaaaggaattaaagcgctcgttcgagcattctaa

SEQ ID NO: 53852 - DNA, 1602 bp, Acinetobacter baumannii
atgagaaatctaaaatatttgatttttataataataagtttattttctataaacgcttattcatataatccacagcttcaatttttatggaagtctagcgcttcaggtaaactttatgaagctattgagccttcctgtgattatttgaatcaggttaataatggtgcgggtatccctggctattcgttttcgcgttaccagctcaatgcatcaggaacacgagcagaatgttattataatagttctaattggtcttattcattgcaagtacctaatcccgactatgatcctaattcaataaagtgtcctaaatctggttctccaattcctatttattttgatcctaacacaccaattccgttaagaacttgtaggaagaatcctaacggtacttattgtattactgagtggactggtgataagaatagacctattgttatttcaggtaataattatcagagcattacacatgcatctgtgagcgaaatacctagtccttcttgtactccgttattttcacaagatacatgtaatcctagtgacccatatgggggatgttataaaccgcctaatgacaactgtaatcgtatggcagatggatctatttattgcccaccagacgagccaccaccacctattaaatcaggctgtcaaaatggtgcgacttattgtgatatgcctccaactggttgcggtacaggttatgttccgggtacgttcaacggtaagcagatttgtgtaaaaaatagcaatccgcctccgactgatccaccagatcaaccacctccggcatctgatccaccgccgatcactccgcctgatcctagtgatccgcctgatccgggtgatccaccaccgccaccgccaccaccaccgccatctagcaatgatcctcttttacgggcgattcttgatgctattaatgcagtgaacaataagctgacatggcttaaaaacgagttggttaactctcttaattacattgctaaaaagatagatgtaactaattcaaagcttgatacaaccaatcaaaagcttgatacggttaattcttcaattaaagagactaccgctgctgtaaacgcaaatggtgacaagattaaggctgctgtagatgctaacgcaacaactgtaaaaacggctgtagaagcgaatacggctgctacaaatggcgttaaatctgcggttgaggctaatactacctctacagctaataagcttaatgatgttgtaaatgcgattaacaacaagcctgttgggggcggtggtactgctgtcaatttagagcctacgaataatttattaaaaggcattcaggattggcttgcagtatcggatgacactaatcctgaagatggcgaaattaaggtagtcaaaaatgaaatagatactaattttgatggaaatctagttaatgctacgggtacttgtcctcagcctatgcagatttctttctcgattgtgcagacttatacaatccaatttagttatgaaaccttttgtttaggtgcatctttggctcgaccgtggattatttttgtcggcatgttaacggctttctttattgttactggtcattatcgaggtggtagcaatgattag

SEQ ID NO: 53853 - DNA, 291 bp, Acinetobacter baumannii
atgattagaggattagtctttttattgatgtatgtaggtgagaaattcttatctactgcatttaaaaaattactgcttggtgcaggtttgggccttgtttcttttgggctttcacaatcagttttttcaattttacttaactatgtaaataatcaatttcagcaactttctgggcttttttacctaattgatcttgctggggttgatgttgctattagctatattttgtctgctatttcaatacgcataacaatggacgcgggcaaattatcgattaggaaacttcaataa

SEQ ID NO: 53854 - DNA, 1473 bp, Acinetobacter baumannii
atgttatacgctatcgttgcaaagcctggtcaggggaaatcgtattttgctgtagttagaatgtatgaagaacagcaaaaaaatttagaaaatctaaaaaagaatgctgctatttttgatgaaaatagaaagttattagaggaacgtgatttactagaacgggacttcacgtataactatgaaattggtaatcagaagtttgaaaagacttcaaattatgaatattttgattgtctcgaagatgctgaacaattccctgaatattttgaatattactttttctacaacaagtacatcgagcaaattactaaagatgaaggcattgcattaactgccttgcttccagttagacagatttactcgaatatcaatggattaaaaattcagggtgtactgccatttcctagtctcgattggcgtaaaacaccgatgggatcgattcattatattgatgaaatccgtgatcatcctccttacaactgggatggccgaaaagtatgtgaagacccgataattaaagaaatgtctaaggttcgtcatactgacaaggatgtatggttaattacccaagatgctgaggattttaactattcacttagacagttaatcgataagctgtattttgttaaaagacctcctcaaaacccacaggcttgcggtatttatgtattcgataaatacattagtcgcccacgtgatgcagcagattcattacgcgatccgaagaagtatgttgattactttctgttagtttataaaaagaaatatcaacgaatgtatgtgagtgcgtcttcacatacatcaatgaaatttaggattccacctaaagtttttttctactcactattgtttattgccatatttacgattgccattgtcggctttatgaaaatacctatatttcaaagttttggcagtgcaattaagcaaatgacaggacaggaaaaagatgcatttagtcagttaaaagcaggtcctcaagctactccaaatccatctgaaacgattgctgacaagttaaaacgtgaagctgagtgcggtactttaacaccagaacaatgtgctgatttgaagcatccagaagtcagaaataatcagcttcagcaagtaaatgacgtgcgtatggagaccattgcagttaagtacaatccgaatagaccatatgaaatggatacttctaagattgaatatcaggtgacttctaaacctgtctttgctggttgtatgaagaaaaacggtagatatgttgcctacactgaacagggcacaattttacatgatgtaagtcaatcagactgtcgaaagctgattgaagataatgatcgcccatacaactattttaagcagcaggcacaaggttttaatggtcagccacagcaagtgcaacagcaaattacaccccaaccagttcaacattatgacgctgaatttatcgctaaatatcaagcagctaaagcacaaggtttaatttaa

SEQ ID NO: 53855 - DNA, 1263 bp, Acinetobacter baumannii; identical to SEQ ID NO: 53848

SEQ ID NO: 53856 - DNA, 315 bp, Acinetobacter baumannii; identical to SEQ ID NO: 53849

SEQ ID NO: 53857 - DNA, 222 bp, Acinetobacter baumannii
atggaacttgtacgaccagaccaccctattgctcatgaagcctatgaaacagttaaagccatgacttgcgaatatattaagattgtggcacggacgtattcaaagacacaaactgaagctggctattttattagtggaattttcccatgtacgcccgatgatggattcaatcgtaaagaatggatttcaacatttgaagaattacaaggagtaaataaatga

SEQ ID NO: 53858 - DNA, 738 bp, Acinetobacter baumannii
atgacagctcttatttttgatactgaaacccataaattacatggtgacattattgaagctgctgcaatggaagtagtttttcctcaaatttcagcagatattctaattattccaaccatgtttgatttcaccaaacgttataaaccaagtgaacctatttcactcggtgcaatggcagtccaccatatcgttgatgaagatcttgtaaagtgtccatcattcaaaacatttaaatggccaaaagagaatatccagtatttgattggccacaatattgattatgacatcgaggcagtaaaaagagctggtgcagatacaacaggaattaaatctatttgtactttagctatggctcgctacctttggccaacattggaagcccataacctaactgcactggcctatcacataagccgagaccgtaaatcgacaagacgtggattaaagaatgcacattcagccttgaatgattgcaagacaacctatggacttttacacaccattgttcaggaaaaaaacataaagagttttcaagaactgtacctcttttcagagaaggcccgaatccctacccatattttctatgggaaatacaaaggttcagctattgcagatcttgatatgcatgccctcgcgtttttagctcgtaaaacagaggatcaataccttttaaaagcaatcgattatgaactattccaacgttcaaattctgattttacaaatgaattgccttggtga

SEQ ID NO: 53859 - DNA, 171 bp, Acinetobacter baumannii
atgaatcatgatgaagaattagttcaattctgccgttgtagaaataaacacttggttaaagatcgcttacgccaaccaaataaatctacctatgggctaatggatctggtgtgtccacgttgcaaagctcaaagttattacaaagttaatgaggtgaagaaaaatgtctaa

SEQ ID NO: 53860 - DNA, 333 bp, Acinetobacter baumannii
atgattacaaatgtttgggctgaactagaccctaatgaactgccttttattgataaggaaattggtccagaagatttcaaaactcaatacctttgtagttgggatcctggccatgacattacccatcaacttaaagatgaccagcgcaatattgatgaggctatttttcaggtcaaaacctgcattaacaatttggaaaattcgacatcacgtttagtacgaaagaacgcaaaggaggttttacaagtcataaaacaaaatttgaactgggaaaaacacccggaacttaaccagaaaatccacttattacaaagcctgttatatcgaggctag

SEQ ID NO: 53861 - DNA, 261 bp, Acinetobacter baumannii
ttgattatcaccataaatagtactaaattagagttactgtatagccaagtaactataaatggtgattttcgcatgaacaagtcaattgatcaaactaagcaacacacagaaaccactatggtccgttggacaaaagatcaacttgagaccattcgtaatgaggcctttcaacaaagaaaagctccagctgtgttcatccgtgaatttttattggaaaaccatcctgcatttaaaccaaaaaaaacggatgagcgattgtaa

SEQ ID NO: 53862 - DNA, 216 bp, Acinetobacter baumannii
atgcactcaacacttgaaattaacagccacaagaaaatgacggctgaggaaatacttgaagaaattgaatatccacttgagaatctagaaaactttttgctagccatgactaaaatgaaagtggttgaacgcctagaagaaaaagagttttcggcaatcatcaacacacttcattaccaagtaagcaatattaagcgcgcagtacacaccaaatga

SEQ ID NO: 53863 - DNA, 816 bp, Acinetobacter baumannii
atgaatacacttacacagcttgacgatgctgtatttatccaagatcaacaggtaaaaaccgatagcctgaaagttgcagaggtatttggtaaacctcataaagatgtattacaaaaaatccgaaccttagatagttcacctgattttaacgagcgaaatttttcgcccgttgaatatttagacagtaaaggtgaatctcgtccaatgtacgaaatgaccaaagacggttttattttcttggtcatgggttttactggagctgctgctgcaaaaatcaaagaagcttatatcaacacctttaatcaaatggctgccgtcctttacaacaatgatggcaatcaccaacagatccatgaaggtgctgtagtccagctaaaatctggtggcccgctttacaccattagtaaaatcttttatgaccaaaatggttatatgcagaatgctgaagtcatatggcacaacaaggccaatctctacagagaactattgcccattaactgtttaacgcttgaatccaagaacctgattcaaaacaaaacactagaagatttttgggcatcactgcacaattttggagttggtaaactcaaccacagccggaaccaaaatattctggcacttaatctcatgcaaatttaccaatgcattgaaggtttaccacctaaaaaccaactgtcagcaatcctaatgcatagcagcaatcccttccccatttatatgcagcacaatcatgcggtcagtagtgccattaccaataaaacggtgaaatgctggatatttaataccaaacaacagcaaatcccattgctatggtaa

SEQ ID NO: 53864 - DNA, 195 bp, Acinetobacter baumannii
atgaaaattttagctgctacatattcgcatactcaaaataatgtaaaagaacatagccctgtctatgacctagatgcttatgaaaaacgtcagcgtcaattcaaacgtaaaaaactcctgaagaatcttttcgacactgccatatttgccagtgctgctggcttcactttctcaatgttgttttggggagcctaa

SEQ ID NO: 53865 - DNA, 879 bp, Acinetobacter baumannii
atggaattagatttaaatcgtataaattacaacgcaaatcaaagtaaattaggcaatttatttttaggtttttttgaaggtttatttttagatggccgagtgagacttcaagaaattgaagccttaattaaatgggtagaacaatacccggatgctgtaacagttccacattttgaaccactttatcaggtgttgcttaaagcagctgaagatcctcagtttttattggctaatcaccaagaagttcaaacacatttagatttatttaaaaactcaaagtattttaaagaacatacttgtgatgtccaacgtttacatggtgtattggcaggtttggcctgtgatagtgattatactgatgatgaggtactggccttaaatgcttggctggatcgttatgattatttgaaagatgacccaatctataaagaaataattgttgctttgaatcatgtacgtattttaaaccgtgtaagtggtgataccaaggaagttctgcgtttaacgttgggcaaatatatccaactcaataattttggtttacctcaagttagagtatccagtactgaagataataaaaatcctgacttctaccatggcaatgttgagctcattggcaagacaatttgcttaactggtgcatctgctcgttatagcaaagcagaatggaaaaaagttatagaatcacaagggggaatttttaaagatgacctcaccaaaacagttgattaccttgtcatatgtaataagggtaatcctcattgggcacatatgagttatgggcgtaagtttgaacaagcattgaagtggcaaaaagatggtgcaaatattcgtattttgactgaagatgattttgtgaaagttttggaagaaaattaa

SEQ ID NO: 53866 - DNA, 282 bp, Acinetobacter baumannii
atgaaaaagtttttatgtttaatgatttgttcactaagttttgttggctgttcaaatgaacctgaaccacaaataatgagtgcaaaatttaactcaatggaagagtgcttagcttcaatcaaaagtaaaactggtgaagctttagatccaatgactgataaacctgaacatgtatctggattcttgggtaaaacaggacttcaatttaattgtgaagttaaacatacaggtacggaaggtaattatgttgatggctggtatcaggaaaaaattacaaattaa

SEQ ID NO: 53867 - DNA, 240 bp, Acinetobacter baumannii
atggctcgacctcgttcacgttataaatgcccccattgtggtgaaccttttgcaatacgttcaagtgatgcattaagtccactactccgtatgttccaggcacagtgccaaaatctgaattgtggctttacagctcaaggctacatggaattgaagttccagctttcacctccagcccaaccaaatcctgaaattaatttacctactccggaccgcacttggaaaatggagccagcatga

SEQ ID NO: 53868 - DNA, 1953 bp, Acinetobacter baumannii
atggcagcactttatcattcacttttcactgaaaaaggtttggagctacttcgagagtcaattcaaaatggcactaaattaggtattactcatatgtcttttggtgacggtggtggggatttacctattcctgatgcttcattcactcagatgataaatgaagtttatcgagtccagttaaaccgacttgccccctcaagagataatcctaactggttagaagcggatggtgttattccctctgctgtaggtggttttaatattcgtgaagttggcctgtgggcagaggatgttatggtggcttatgccaattatccaccaacatataagccttcgggggatcaaggtactgctcaaatcaaaacaattcgtattgttctgcaaattgataatacggccaattttgaattaaaaatcgatgcctcagttgtaatggcaaccttacaatctgtagaagaagccaaactagaagcgatgaatcatgctgattcattagtgaaagaacaaatacgttatgtagataaccttaactctctgaatgacattgagaaccctcaagataaacaaatagtctacgtcacgggaatgggagagtttgaatacagcctgaccctaatgacatgggctcccaaacaacgttctgataatacaattctaactgccgaagggcgttttcaacgtgataaaaataaagattatttagatctaaaggactatatctttttagctgaaggaaaagactggactaaagcaattaaacaagcagaaacagatgcgtttaacttaaagatgggtcttaaaattccttctggaatctttggttattctgaagatattacatttagatgccatacatttggacagggtatttcaaatacatggcttcaaaagttaaagccttgttcagtaataattttaggtggttcattaagagatttaacggtcagtcctgagggttatcttgataacgatcaaagtgatggaattattgcagataattcagatagaaaattaatattgaatgttttaactgagtatcatggcggtaatggctttgtttttaaaaaaggtaacctttcaagatttataattcgatctagatataataaaggtaaaggagtgctttttacaccagatgcacctggtgataacaaggcagctcaattatggcttgaatgtactggtaataaaagatcaggatttttcatggatcatagtttagtaaatccatcttacaattcgggtaatcattttggaacgattatttcacaagggaatggagcagaccttgtgaatgatgacaaatatgatgtcgttctttcaggtaattataataatttaacaatttatacagaatatggtgctggttgttggcataaggatactttgaaaggttctagaatattttataccaatatgtcacatataaattggaaagatgaagctggagactcaaatgaagtttcatatataccaagtgcaaatggaacgagagtaatcaaatacggaaaatttcagaatgtagttgtccaaaatgaaaatggtcaatattcaggaaaattaacattcacgcatacagctaataataaatttgagtatattctcggtaactctacagcagaccaaaatatttactaccctgacaaactatttttaagaaaaggtaaaggtacttttcagcccatatttccaagagataatgttgttttaaattttggaaccattcctgccggaaggtctgttgagaaatctctctcattgttacagctaggcttaagctctgcaaataacactgttgttgttaacccagtcggcaatatcggggctggattattatggagttgttatattgattcaaatgacttggatcgagttgtgataagactatttaactctaactccatagatgttactactgctgattttccgtggaaagtttcagtctttttataa

SEQ ID NO: 53869 - DNA, 450 bp, Acinetobacter baumannii
atgaacaacattcaggatcttgctctttatctgcagccattattggatcgattgtctccaggtgaaagggcaaaactggctaagaatattggacgagatcttcgtacaagccaacgccaacgtattacagcacaacaaaatcccgatggttcatcatatacagctagacgtacacgcttacgtgaccagaaaggaaaaattaaaagaaaaatgttctctcggattaaatccaatacccacttaaaagtattaagtaatagtgaatcaattgccgtaggttttattggacgtattaatcgaattgcgaaggtacatcaatacggattaagagacagagctaccagatctgcccctgatacagtttacccaaaacgtgaattattaggatttacagataaagaaattaatctggttgagtcatcattcattaagcacatcaatattaagtag

SEQ ID NO: 53870 - DNA, 747 bp, Acinetobacter baumannii
atgttgagtccagctcgacgacatcgcctacaggctttggcagcgaaagaagctgccaaggctgatgaatttggtggtgtacgtccagacgcaagcgtctatcaattacaactgaccgaactcaaaaatgatattcatgtcttgcgttcaattcagtcacaagaaaaacgtgctgaagcaaaaaaagaattaattccaaagcatatgccatatgtgttgggcgtcgttcaatcgggtgcaaaagttgaacaagatgaagtgattacgacaatcatgttgtggtgctttgactgttgcttgtttgaacaaggtttaagtattgccgaatatgctttagaacagaacctaaaaatgcctgattcttttagccgttctactgcaactattgttgctgaagaaattggtaatgcagcgcgtattgcttataagcaaggcgaaatattcaaaataaatattttagaaaaggctcataagatcactacctcatttgatatgcctgatgaagtacgtgccaagttattagtggcattaggtcgatcatacttacaaagtgacttataccatttagctgttcttttccttaaatctgcaattgctaagcatgaaaaatgtggcggtaagcaagatttacaaaaagctgaaaagctattgaaagaacaatcaaaaaattcacctgaaccgatgctgaatgctgatggttcacaggtcgtcgatgatcaaggcaacttgatgtttcatccgacgtaa

SEQ ID NO: 53871 - DNA, 990 bp, Acinetobacter baumannii
atgcgtaacgatacacgtaaaaaatttaatcatagtttggcaaaggttgctgaactaaacggtgttgagtctgcacaggtgcaattcactgtagcaccagcaccggcacaaaaaatggaagaaaaaattcaggcttcaagcgaatttcttcaaaagattaatgtcgttcctgttgaagcacaaacaggtgaagcgattggtttatctgtcaattcaacgattgcaggtcgcaccgacacatctggcaatggcgaacgaaatccaactgatccgactggttttggtgtggacaaatacgaatgtaaacagaccaattttgatgtcgcgattacatatgcaaaacttgatgcttgggcaccgtttgcagacttccatcaacgttggacaaatgccgttgcaaaagcaattggtttagaccgtatcatgatcggtttcaatggtacctctgctgctgaaaccactgatcgggttgccaatccaaaactgcaggatgtgaacattggctggttgcaaaaaatccgtaccaatgcacctgatcgtgtgatgtcagcagtcaccgttggtgcagctggcacatataaaaacttagatgctttggtagtggatgcagtcaatgaactcattgatgaagtacatcaagatgatacggatcttgtagtgatctgtggacgttcactcttggcagacaaaaacttcccaatggtgaatgatgcgtctgacaataccaatgtattggctggtcaagtattgttaagccaaaaacaaattggtggtttacctgcagcacgtgtaccacacttccctgacaatgcacttttgatcacgtcttttgacaacctgtcaatctactatcaaaaagatgcaaagcgtcgttacattcaggaaaaaccaagcaaaaaccgcattgaagattatcaatcttcaaatgaagcgtatgtgatcgaagcatacgaaaaagttgcattggttgaaggcatcacaattcaataa

SEQ ID NO: 53872 - DNA, 1815 bp, Acinetobacter baumannii
atgcttatgtattggcttaatgagccaatggataaagcacttaataccccgacaaacttgacctttgataaccgtctcactgccaaatttttgtattggatggggtggcgaatcagctcgattgcagaattcttaaaagaaaacgataaaaatgtgcatgcatggaaagctcgtgacgaatgggaaaaagatgcaccagcagggcgtgttgcacaagccttagaggctcaacttgtaaagctgatcattcttgagaaaaaaacaccaggtgatttcaaggaaattgatttgctcatgcgccagctggagcgtatggcacgtattgacaagtattccaacggtgggaatgaaaccgatcttaatccaaaacttaaaaacagaacttcaggtccacgaaagccaactgctaaaaatcaactgacagaagaacaaatagaaaaactatgtgaagactttgacgacggtttatttgaatatcaaaaagtatggtaccgagcacgtgaacaacgtaaccgtgctgtactaaaatcacgtcagattggtgcgacattctattttgcacgtgaagcattgattaaagctgttactactggtcgaaatcaaatttttctatctgcctctaaagcccaggcacatggttttaaaacatacatcaaaaactttgtcatgcaatctattgagattgatctgcaaggtgatccgatttctatcacattgccatgtggtaatacagttcagctgattttcttgggtaccaatgcaaaaacagctcagtcatatcatggcgatttgtattttgacgaatttttctgggtgcatggctttgctactttgaaaaaagttgcatcggcaatggctgcccaaaaacaatataaaaagacttatttcagtacaccttccagtaaaactcatgaagcacacgcattctggacaggggacgcatttaataaaggtcgcaccaaagaaaatcgagttgagatcgacaccagtcatgcaaatttaagagacggtgcattatgtggcgacaaaatgtggcgacatattgtcaatattcaagatgctgaacgccaaggctgtgacttatttgatattgaagaattaattgccgaaaacagtcctgaagaattcgcaaatttatatatgtgtgaatttgtcgatgatggtcacagtgtttttccactgtccgtcattcagccgtgcatggtcgattcatgggaagtatggtccaaagattttaagcctttggctttacgtccattcggaaataagccagtttggattggatacgatccagcagaaagtggtgacagtgcagggcttgtggtcattgcaccacctgaacctgattatcctaaattcagattgcttgaacatcatcaattcaaaggcatggactttgccagccaagcacaatacatcaaaaaattaacgaccaaatataacgtcaaatatatcggcttagacaagtcaggtatgggtactggtgtggctcaattggttcttgatttcttccctaatttaacgaccttcaattatagcgtcgatgtaaaaacacaattggttatgaaagccatggatgtgattaacaaagaacgttttgaatttgatgccggatccactgacgtggccatgtctattatggcgattcgcaaaacactgacagcttcacaaagacaaatgacatttgaagcctcacgtgcagaaaacattggtcatgctgatttggcttttgccattttccatgcgtttgctaatgagcctttaacccttgatgaccaaacaaaatctaaaaaatcctctatggagatttactaa

SEQ ID NO: 53873 - DNA, 999 bp, Acinetobacter baumannii
atgtccgacagcaaagtgcaggcatttacattcggtgacgctgaaccggtgatgaatggccgtgacttatcacaattttatgaaacatggttatgtggtaattattacgagccacatatcagtatgaatgctttggcgaaatcatttaaagcgatgccttatttgtcgactgcagtgttttataaaaagaatcaactggtatcatcatttatcccaaataaattgatcaagtcttcagagtttgaacgcattgcatttgattatttagtttttggtaatggttacctgcaacagatcgataatcgtttgaatgaaccacatcactatgacggactcatggccaaatacaccagacgcatgaaaagatctaatgaatttttacaattgctgaatgggtttgaagaacatatttttaaacctggtaccgtttgccacatcaaaggcattgatgtcgaccaagaaatctatggtactcctgaatatatcgctgcgcttcagtcagtttggttgaatgaatcggcgactttattccgtcgcaaatattataacaatggatctcatgctggcttcatcttgtatatgactgactcaggtattgatgatgatgatgtggagggtctgaaacaggccatgaaagattcacgtggtccaggtaactttcggaatttattccttcatgcacctggtggaaaaaaggatgggttgcagcttattcctatcagtgaattggctgctaaagatgaattcttgaatattaaaaacgttacacgtgatgatgtacttgcatcccaacgtaccccaccacaattactcggcatcattccatccaatgctggtggattcggatctataagtgaagcgcgtgaagcatattggtattccgagattgttccacttcagaatttatttgcaaacacagtgaatgagtgggcaggtgaccagatcatccgtttcaaagagtttagtcagcttcaattcaaacaagaaaaaccacaatga

SEQ ID NO: 53874 - DNA, 2385 bp, Acinetobacter baumannii
atgctggccaacaacaccaagatgtcagcaaaagaaattgatgagtttgctaaaaaactatcaacaatggacacggtagatgcattaggccaaatcaccacaaagcttgatgacatgggagcaactgcagctgaaaagcgctttgtgctagagtcattagcgagtgatttgggtgatttagccccattatttgcaaacaactctgaattaattaaagagtatggcgatcagttgcacgaggctggcgttgttcgcacgcaagagagtattgataagtcacttgttttaaatgctcaaactcaagccttaggcacacaatttcagggattcaaaaaccagctagcgagtcagatgactcctgtcttgagtaatttgattcaatattttgtagatggcgctgtaaaaagcggaagctttggaactgttttaagtgctgttggtacggttgctaaagtggtgggcattgctattgttggagttgcaagtgcggtttcagtggtcattcagtcaattagtggttttgcaagtctaattgaccatgtgggcaatgttgcagcaaggttagatgctgctacttcgataaaggagcaaattaacgtccttaagactggttttagcgaagggaaggccatttgggttgatactgcctctgggattgacaagacaatcaccagcacgattaaccttgtaagcaatattaaaacaggagctatgcctgctttaacaggcttatctgctgcacagttaaaagtcaatcaagcaaatttggccaattcaaaaagtaccattacagacacagaaacagctaaagaaaatgccaaagccaaagaggagcaagcaaaggcagcagctaaggctgctaaagcgcagcaagatcttaacaaaatggttggggcatctgctttaagtggtttacggatcaaaggtgcagaatctattgctggtggtcaggttagagcatacacagcaagctttgctcaactaacacaatccgcattaggcaagggtctgaacagatttactgcattcaatgacctttatcacaaagggacaaatagcaagcacgcaacaggtaatgcatttgacttcacgctagatgatgcgaaaaagtctggtgaggctgttacacaacttgagcaaatggctaaaagatacggctttgtcattcgcgttcttgatgagtacaagaagaagtctgctcgtgcaaccggggggcatattcatgtatctgtgcttggctacaaaggcacagcagatgcattaaaagatgcaaatgcagagcttgatattgttcagaaagcaaatgatgaagctacaaaaattcaggaagagcgacaaaaacagcagcttgctatcactgctaaatacgcaacccctgaacaaaaacttgcattggacaatgctgaagcaattaaacaaatcaagttggcatatgctaatgatccagttgctgccgaagtttttttaaatcttcaagcgaaggcttatcaaaaagatttagaggaatatcgtacagcacagaatcagaagctcataagtgctactgaaactgcagctcaggcggctgaaaagtggaatagcaactttgcagatatggctgggttttcgcctttatatggattgcagcaagagaaaagcagcagatacgaagaatcatttgcagtttttgattcacaatcagctatgcttgatcaacaagagcaagacccaaatgctgacttagagtcaattgcagagcaacgtgaatctctatggcagcagcatactgaccgaatgattttgattgatcaggactataaccgtaaaaaagcatcaatgggtttgcagtcagccagtgaaacgcttggagggatggcagacttaatgggcggcttacttggtgaacaatcggcaggctataaagccatgtttgcaatgtccaaagcattcgccgttgctcaagcattaattaatgctccgcaaactttctctaacgtctacacctcggtttctgcaatcccgctaattggtccatatattgccccggcgcttgccgctgcagcagtaggtgtacagttagcacaggctgctcaaattaaacaaacctctcttacgggtatggcgcataacggtatcgataatgttcctagagaaggtacttggttgcttgatggtggtgagcgtgtattgaatcccaaccaaaacaaggaccttactaactatttgaataatcaaaaagatagcggacctcaagttgtggtttacaacaacagcaaagcaaatgttgaaacgaatgttggtgatgatgggaaggtgtatgtgaccattgatgatgtatacaacccaaacagcaagtacagccaagcaatgcaggaaagtttcaatatctcaagaaacagggggtaa

SEQ ID NO: 53875 - DNA, 429 bp, Acinetobacter baumannii
atggctgctggttcattaggtcgtttaacacttgatctggttgcgaaagttggttcatttgttgagggaatgagtcaggcagaaagaaaggcaaaagaagcttctgacaacataaagaagtcttttaaaagctttggtgatcagatacaagatgcaattggtggtactcaaattggttccgcaattgagggtattactggcaaattaggtgctttgcgtggtggtgtcttggtagctggtgctgcattagctggtatggcagtaggtggtacagttttggcagctggtgcactaggtcaaatggcgattgagctagcaaaagccgatgctcaacttaaccagttatcacgtagagcggtaacttctgccgaaaacttccagattgtggcgggggagcaagtgcatttggtgttgagcaggaaaagctaa

SEQ ID NO: 53876 - DNA, 363 bp, Acinetobacter baumannii
gtgagaaaagcaatatttttaatttctgcgcttttttcagtaggtttacacgctaaccctgtaaattgtgaagatattacgaaaaaaattgatgaaaaaacaaaatcaattgcctttgaaaaggtttttgaagttgaacgagctaagtcggttgatgggatgatgtttgttaagtccagaaagattccgcagtatcaaaatgaaataagcttgttcatgcaacaaagccgcgatatgggttgtcctgcctacacaggtgatatcacgggggcgccgtattttaagcacgctcagaagtgtattgattcaaaattaagggatagagaggcgtgtgacaaacgcaactgggaaaacaccccttaa

SEQ ID NO: 53877 - DNA, 183 bp, Acinetobacter baumannii
atgagacgcggctctctttttcttggtcgccgtattgagcaagcaattggtaatttggcagcagtttatatcaggagtcactcaaaaaatcctgagcaaatagatgcactcaattttatgcctcatgaatacaaacaagagcttagtttggccgactatctagaacaattggtagacgaataa

SEQ ID NO: 53878 - DNA, 531 bp, Acinetobacter baumannii
atgactaaagtaaatattaaagcatttaaaaaggtcactaaaattggtgcgccagttgaaagaacagtcaaatgggttgtggaagtaacagaagataatattgattttcttacctctcaacttaaacgcgaactgactcttggtgaaaaagcagaagtggaagggcaagtttttattaaaaagctagcctttaatgatcttcatgaaatttctaaagcgtatgactgggaaattaatgaagacaatattgctgattcgaaacttaagtcggtaagtgttaagcgtatgcaagcaggtcatttgcttggatcagtttgtgaagatgcaaaaggcacaccgttctttagctctgttcaagacgtacttgattctgaaatcccttttattgagtcgctttatgctgtggccgatgaagtgaataactttatgggaaagtcacggaagaagaacttgacgaatacgaattctggtgtgagcttgccctcggaatcggaaccaccatcgaagaagccaagcaaaaaatcagcttaa

SEQ ID NO: 53879 - DNA, 474 bp, Acinetobacter baumannii
atggctaacgttaaaacacaaggtacacagttatttactgtgattgacggacaagtggttcgctttgtctgcattaaaaaaattggctttggtcaagattcgtttagtaaattggacgttacttgtcttgaggctgaaagtagagagtatgagcgcggcatgcgtgatccgggtgagggtgcattcggtatcgattacaatgacacaaataccagtcacgacaagttagctgaaatcgcagactctggtgaaaagttagattggtatgtgggttctggtgactcaaaaaccccgcctacttatgatgcaactactggcatcgacctcccagatgaccgtacttggttgacatttaaagggtatttaaatgacgctgctcctaatgacattgaagttgatgcggtctgggggtatgaatacacccttgtgcggacttcaaaagtaactcgaactaaacgcgcggtgacaccataa

SEQ ID NO: 53880 - DNA, 222 bp, Acinetobacter baumannii
atgaggctacccatagttgaagctattattatgttagtgatagtcctatgttttatatttcttggttttcaaatctggaaagaatttacgagtcaaaaaattgaattaaataaagacgaatggatctgctcaaaaagcgaggtatctgttcagaatattatgattggtggaaagttaatgcctcaagccatcaataaatgcgtggaatacaaactcaggtaa

SEQ ID NO: 53881 - DNA, 375 bp, Acinetobacter baumannii
atgattgatattccaatatttaaaatagctaaagctgacccagccgtgagatctcttcttgaaagtgacaatattttgcgggtttggcgttttgggaaggctccagagcagccagaaacaccctatgtcacatggcagatcataacaggtgaaccaaataacaatcttgattcaagaccggactctgacaatgcagtgattcaaatagatgtttatgcaactgatgaggatgttgtggagcaggtcgcagaatctcttcaattcgcaattgagctagattgctacattgttcgttatggggaggttgataatgaccctataacaaatatgcctcattactcatttgatgttagttgggttgtgaataggagttga

SEQ ID NO: 53882 - DNA, 351 bp, Acinetobacter baumannii
atgcaagctggtaaattaaaacatcgtattacgatacaaaggccaattaacacacaagacccggttactggaaaattaattcagacttgggaaaatttcaaaagtatttttgcggaagttaccgacttatcaacacgcgatgttattgctgccaaagctgccaatagctcaattcaggcacgagcaaaagttcgctacagcactacaaccaaacaaattaacagcactatgcgggtattatttggtggttactattacagaattgatggtaaccctatgcgagatccagactcacgccgtgagtatttaaccatcaacttatctacaggcgaaaaagcatggaatgggtga

SEQ ID NO: 53883 - DNA, 474 bp, Acinetobacter baumannii
atgtcagtgatttcaataaataaggctatggcgcacttgcgtgtcgatgaggacattgacaatgacattgcaagtaaacttgagtctgctgagcgcatagctaaagagtatctaaataggaatttttatttagataaggccgcgcttgatttagctaaagaagaaatacctttgatactttctgaggcaaaagttcagtacgaccatgatgtggattttgctagaacactcgaaggcgatttgattgataaattcatccacacagcttcactgaattacgatacagcaattcggaaggccaaaatgattagtcttggcattgtggtaaatgaagcaattgaaatcggcgttttattgattcttggcaatctttatgagaatcgcgaagacctaacaacagcaaacgtttacgaattgcctagaggtgcagagtggcatttacacccatttagaacagatctgggggttagttaa

SEQ ID NO: 53884 - DNA, 363 bp, Acinetobacter baumannii
atgaaagttaaatttcttgatgtaatccagatgggtactcacctttataaatctggtgaggttggtgagttctcaagtcaaacggccgaagagcttattaaaaaaggtttagctgttttagatgatggcattgaaactgccggaaccacaccagatcaaaagccaaaaactggtaagggtggcaaaggtagtaaaggtaaaaatgcagagccaccaaaaaatgaaaacggtgctgatggtgaagaaaacaaaggttcgggtgttgaggccaatgattcaactaaagaaaccaatggttcagaagataaaaataaatctgatgaaaacacccaaacaccaagcgaagacacgaaaccagaataa

SEQ ID NO: 53885 - DNA, 1221 bp, Acinetobacter baumannii
atgtctgaacgtacaaatgaccaagcagcagaacaacttaagcaagttaatgcgacccttaaagatttaacagaaaaagttcagccaatggctgagaaagctttgaaagaagctaaagatgctggtgacttatcaaccaaaactaaagaagcggttgaccaagcactaacagatctgaacttgcttcgccaaacacaaaatgaattgcaaacgcaattgggtgaagcggagcaaatgtttgcacgcatcggcaaaggtggtaacaataataatggtgtgtcagatcgcgctggtgatcttgttattaaagatgagtctttaatcaacttcacaaaggatgttcgtggtggaactcgcttaaacgtgaatgtgccacgtaatgcattgatctcttttgctgtaaatccagttgatggtactaccccgattattgccaagccgaaccagcgcttaacaattcgcgacttacttgcaccgggtcgcactggttcaaatgcaattgcatatttgcgtgaaactggctttacaaataatgctgctctggttccagaaaacacagcaaaaccttactctgaaatcacattcgaagaagtgatggaaagtgtaaaaaccattgctcacatgttgaaagcatctaagcaaattttagatgacttgccacaacttcaaagcttcatcaataaccgcatgttaaacggattgaagcgcgcagaagatacacagcttttgttcggctcaggcgttggaaacaacctaaacgggatctacacccaagcaaccccttatagtgcaccaatcactattgcgaacccgactaaggtggacatcattcgtttagcaatgcttcaagcggcattagctgattactatgctactggtacagttttacactcaaaagactggaccgaaattcagttgctaaaagacaccacaggcgcttacttgtttacaagcccatttgggaccatgactccttcactgtggggcctaccagttgccgaaacgaaccaagctggtttggatggcaaattcttaacaggtgcttttgcagaaggcgctcaaatctttgatcgtgaagatgccaatgtggtgatttctacagaaaaccaagacgactttgaaaagaacatgatttcagttcgttgtgaagagcgtcttgcacttgctgtgtatcgtccagaagcattcgttaaaggcacattcccagtacctgcaccttaa

SEQ ID NO: 53886 - DNA, 840 bp, Acinetobacter baumannii
atgggtaaacgaagtttattacctagagccgactttaaatcagaaaagcacgggttttcattgccccttgcgctggatcgctggaatccagcaataaaagctgcagacgaaagtgataatacaattagcatcatggatcccattggttatgactggtggactgaaacaggcgttactgcaaaacgaattagtgcggctctccggtccttgaatggtgctgatgttgttgtgaatatcaactcccccggcggtgatgtttttgagggtttaacaatttataacctgcttcgcgaatatgaaggacatgtcacggttcgagttcttgggcttgctgcttctgctgcctcgtttattgctatggctgcagatgagattcagatcgcacgagcgggcttttttatgattcacaatgcgtggacaggggtttggggcaatcgcaacgatatgcgcgaaacagccgactttcttgagcaaattgacgagactattgcggacatttacagcattcgcacaggtttatctattgatgagttaaaagctcaaatggataaggaatcttggattaatggcaagaattctgtagagcaaggatttgcagatagttaccttgactctgatgttgttgaggaaagcactacaaactctacaaaagaccgcattgcggctcacaagatcgacttaattatggcgaaggctggaataagtcgaagtgaacgccgtgacctaatgaaagattttaagggcacgccaagcgctgccaaagagcagactacgccaagcgctagtcttgatttatctggcttaataaaagacatgcaagacgctgctcgaaaattctaa

SEQ ID NO: 53887 - DNA, 1254 bp, Acinetobacter baumannii
atgaataagaaaccaaaccgcttagccagagcggctaaggcggctttgcggtttctggggctaaatggtcaatttagcttaacccctgatgtgctccagaatttacagagcacagcaagcggaaagtttgtcacggtagattcggcgcttcaattgagcgccgtttttgcatgtgtaagacttgtatcggaaaccgtctcaactttgcccttaaaactttataaggcaaatcctgatggcagcagtacattagcaaaagaacatccgctgtataacgtgttatgtagttcaccaaactatgaaatgacacaaagccggttcctactttttatcgtagcaagcattgttttatggggtaattcctatactgaaattatccgaagtgcaaatggtagaaggattgtttcattagatccattattgcctcaaaacatgcaggttataagaaataaagtaagtggcgctttagagtatttttataccgttgatggtgttcgccgtcagataaatgaaaaagacattatgcacattagaagcttcggcattgatggtgtaatggggatttttaccatttccaaaggtcgcgagacatttgggacggcaatgtcagccgagcaaacagcggccaagttttttgaaaatgggctacaaacttctggctttttgagcaccgataaaaccaatactccagaacaaagacagcaactcaagaaaaacattgaaagctttatgggttctaaaaatgccggaaaggtcatggttcttgaaaatggctattcatataacggcattactatgaatccagaagcggctcagatgctagaaactcgcagttttgagattgaggagatttgtcgctggttccgtgttccacctttcatgattggtcatctcgacaagcaaagctcttgggcggcctctgctgaggctcaagatttacagttcttaaaatattcattacgtccgctgctggtgaatattgaacaagaaatttctcgttgcttaattggccgcctagagagtgaggtttactttgttagcttcaatattgaaggcttattgagagcggatagtaaaacgcgttctgagtattacgcctcagccgcagatcatggctggatgaatcgaaatgaaattcgtgcaaaagagaatttgccaccaattccgggtggggatatctacacaatccaatctgcattaataccacttgaccaagtgggaacaaattataaaaaggggatgactgatgggtaa

SEQ ID NO: 53888 - DNA, 1719 bp, Acinetobacter baumannii
atggctgctacataccccaatgttgacgctgccaacagatgggctaaggcagttattgctggaaaaatccctgcatgtaagtgggtaaaattagcctgtcaacgtcacctagatgatttaaaaaaatcaaaaaaacgtgattttccttataaatttgagcctagacttgctgaaaaaaagatactttttgtcgaactattacctcacacaaaaggtgagtgggctttaaaaagactaaaaatttctttagaagattggcaaaaattcggtctggcagtcacattcggatgggtcagaaaaaaagacggttatcgccgctttcgtgaaagctattgggaaatacctcgtaagaatggcaaatcagccattgctgctggtgtggcgctcaatatgttttgcaatgatggtgagttcggatcggaagtgtattctggagccacaactgagaaacaggcgtgggaagtatttaagccagcaagattgatggcgagcagatctccagacttactagaggctacaggtattgttgtaaatgctgctagccttgaggtccctacagatggctccatttttgagccattaattggtgatcctcctgatggtcagtccccacattgtgcaattgttgatgaataccatgagcatattgactcacgtctctatgacaccatgcaaactggtatgggggcacgtaggcagcctctaattttcactatcactactgctggatttaacattgaaggcccatgctatgacttgcgtgagcgagttatacagatgctttctggtgttattgaggatgacgagttattcggctggatttggaccattgatgaggatgacgattggacaaatcccaaagtattgcagaaagctaacccaaattatgatgtttctgtatatggcgattacttggagtctcagcaaaaaaaggcagttcaacatccttctcgtcaaaatacatttaaaacaaagcatctaaatgtatgggtatctgcaagaactgcattttttaatattgagaaatggaaagcttgtgaaaacaaggatcttgatattgagcaatttaaagcggttccatgtttaattagtgccgacttggcttcaaaaatcgacttggctgcagcggtgaatttattttatcgccgtgaaagtgacgggaaaattcattactactgtgtagctcccaaattttatattcccgaagacacaatttttaatggtgaagaaaagcaggttatcaagctttatcagaaatggcacaacatgggcctaattgatgcgcatgatactgctgaaaatgaccttaataagattgcagacgatattactgacatggcccagcatgtggctttgactgaggtcccattggatgaatggggtggatttcaaatcgttagtaagattgaggaaaagggatacacagcagtcaagattccaaagacaactaagtcattctctccagcaatgcgagagttagaggcggctattgctgcaaagcgttttcaccacgatgggaacccaattctaacttggatgattagtaatgttgttgccaagcctgatgctaatgacaacgtttttccgcgtaaaccaaacaactccaaaaagattgatggggcaattgctctgttaatgggaattaatcgcgccatgttcttagctggcgaggcagatccaaacgacttttatgatgatccaattatggtgggtgtatga

SEQ ID NO: 53889 - DNA, 492 bp, Acinetobacter baumannii
atgggtggaattgcgtccgtgccggggcggggtagaaagcccaagccagtcgaaacaaaacgagcatccggcaacgttggaaaacggccattaaacaacaatgcgcctgaatttacagaagtcacaaatattgatgttccctcttatatggaaaatttagagttcgcatcaatgatttggaagtctattgttcccgaactccttaaaaacaaagtccttcgcataacagacatgcataacgtagagggtttttgtttggcttatgaaaactggagaaagtcacagcgcgaagttcaatgtcacggaatagttgttgagggtgcgcaaggtgggccagttaaaaaccctgcacttacagcagcaaatgaagcagccagacaaatgactatgtttggcgctttgcttgggctagatcctgcatcccggaacagaattaccggaatcgggcaaaagaaaaaaggcaatgcatttgcaggagtcttagaaatgtga

SEQ ID NO: 53890 - DNA, 216 bp, Acinetobacter baumannii
atgacttcaaaacttattcatgcgcatgatgttgataaaggttctgatgtttactttgatccaattggggttgaaggcgctctaattgaatggacaggaaagaaggactatagccaatacatttatagcgtgaagctttacatgagaagcgggaacataatcagttgtgttgttaatgaagatggtaagaagaagattcttgagcatgttcactga

SEQ ID NO: 53891 - DNA, 357 bp, Acinetobacter baumannii
atgacaacaagaacctttaaaacaattgatggtcgtaagcttgagtttactgttactcaagaacaatcttcatgtgctcatgactcaatcattccacatccaaatagattctatgatgagcacaagcatacatatcaatgtgctaaatgcgggtggttgttttctcatgatcagttattgctgcttaagtttggcggtaaggacaaagtgaatgatgcaactaataccaaagcaatggatgatgtttattgctgggagttgaagaagtggtttaatcacaagtattgggttgcgaagatgaaagacacccatacaggtgtgacactacgtgaattagtaatagcagcaaaactctaa

SEQ ID NO: 53892 - DNA, 351 bp, Acinetobacter baumannii
atgtccagaccctgccgagaattcggatgcacaaacttagttaagtccgctagtcagaaaggctattgtgatgatcatgcacataagcgaagtggttggggtaaacagcaagaccgaacaggatcaacaaccgagcgtggttatggtcatgcatggcgtaagttacgcgaaagtatattagagcgtgacggctatctatgcgtgcactgccgcgccgttggtcgtgtatcaccagcaacagacgttgaccatatcaaggctaaagcttttggtggtactgatgatccagacaacctacaaagcctttgtggtacttgtcataaagagaagacagcaaaggagagtggctaa

SEQ ID NO: 53893 - DNA, 531 bp, Acinetobacter baumannii
atgcctagaatagtaagcatcattccaccagagagtaaaggaactgccactctttccactggtacaaaagttttacttgataatggtgaatatctccagcatgtaaacaaaataactttagtggcggagccggggcagccgtggaaggcaatcattgaggtgcatccaaccaatcaagagcaaatagatgcactgttaactgatcttgaagtggttaaacgcaatgaggcttttaatcgtctgcaagaaatacaagaggaaatgcaacaccttcaggatgaaaaactatttcttgagcataagtatctttcaggggttactggtgtttctattgatggtgttaaggatgtacccaaagaaggtacatggttattaaaagaagatgaaaagattttatctctacctaacatcatagatgccaaacaactcttaaagaatttttctttacatggctcgtgttgtgccacaccagatttaaaaggtaatgacaaatgtccagaccctgccgagaattcggatgcacaaacttag

SEQ ID NO: 53894 - DNA, 234 bp, Acinetobacter baumannii
atgaattttaatattgagcagatcaaacctgacaccaaatatctattagttaaatacgactcaacaagatttgtctcatcacaccagcaggaatctttccataaagcattgcgcacattagcagataaaactggtttaaatgtggcagcaatagataagtcgatagccattgagcagctaagtgatgaagatttagcgaatgttggcttaatgaggattaataacaatgcctag

SEQ ID NO: 53895 - DNA, 204 bp, Acinetobacter baumannii
gtggaagataacaaaacattagcagaagtggctctggaacttattaagcaaaatactgagttagttaagcagacaaacaagctgatagagcaaaacacaataatcatgcaaatcaatgctgaacaatcagcgcagcttagcgaggtgctcgcaatgtttgatgatgttgagccaccacaaaaagctaagtctttggatgggtga

SEQ ID NO: 53896 - DNA, 192 bp, Acinetobacter baumannii
atggctgacaaatcagaagttaaaaaggatctggatttttgttcgtgtgagcttgagaaatatcagaacctttcacgcactggtttatctcgtgacgagctaatcactatcgattcaataattgttcggctgaaaggacgtatacgtaatttgcgtgagctgaaaggtgaggagcctaagagtggaagataa

SEQ ID NO: 53897 - DNA, 387 bp, Acinetobacter baumannii
atgaaaacaaaaatgctatgtgtaggtcttgctgctgccctaatgtttgttggatgttcgcgtgatgcacaagtagcttctaagaatctttcttatgctgctgacaacttccagctagaccgaagaattgttttttataacggcattactggtgactacattcttacaatcgaaggtaaatgctcttttgatgcagtaagtgaaaagaaagtcgatgtaacttgtaagacaggtgattctgaatttaaaaaacattcattgggtatttctgacaatgttacttatttctctgagcagctaaccagtaagggtgtgagtacgtatcattacaaagtagcgtttaaacctcaatcaatcatccctgatattgatttgaaagttaattaa

SEQ ID NO: 53898 - DNA, 459 bp, Acinetobacter baumannii
atgaatgcagttacagcaagtcaaggtcgtaaacattttacagttgctattgattggaatgagcatccgattgaatggcatttggagcaatacgggtcatggttattgttagacggtaatggggaaacctatttaggttcaagaggcattcttggtcatgtcattgatgctgagaatggtgtgcaagttgaccgccgttttagagcgccgcctcgttgtaagattgatgtgtttcatgcgatggcagtagaggatctattaagtcacatgatggagacagaaaataaaaaggttaggcactggattaaatgcgtggttctttaccatgtagatttcaagaaggaagatgaaatagcaaaaaaacttggtgtttctgaatattcggtacaacgtgacaaaatgcttggtttggttcgcatggcatcacgttttaagttcacaagcaaattgatggggtaa

SEQ ID NO: 53899 - DNA, 495 bp, Acinetobacter baumannii
atgatcaagcctaaatgggggagttatcgtttttcagttgacaagaataagactggtaaaaaacggactaatagagatccatcaccacaaatcccagcatttttaattaagggccagagttatgaatgtgatgttaatacgctgcttagctgtagcgtaaacatcataccgccgtctatgaacaattattggcttgattctggaaaaaccagtaagcgtttaagtaagcgggctaatcattttgttgaggtgatgaagcgttttattcagcctcttcaatacaaaggcgatgtgcaggtcattatcgattaccacatgccagacaagaaagtacgagacatcgataatattttaaaaccttgccttgatgctttaaccaagtgcgggcttattgatgacgactctcaagtaaaaagcctttcagtaaacgctcgtccaattgtggcgggtggtcaaatcgatattcaagtaagaaaacataacacaggggcttaa

SEQ ID NO: 53900 - DNA, 270 bp, Acinetobacter baumannii
atgacaatttttgaagcactagcattaaaggttttaatttcaattgcactaggtttagccattggtgtttggatacttgtgcgatatatcaaaaatcgcacaaaagcagaacaggaatttttaaaacgtcatgggattggttctcactttgtatggcaacgcaaatgggaatcagatttcttatatggcaataagagtaatgacaactctgtaccagaggcaattattgaagctactgaaaatcgccgaggtgaaaatgatcaagcctaa

SEQ ID NO: 53901 - DNA, 420 bp, Acinetobacter baumannii
atgaaagctgcaaaattaattagggataaaggctttaaatacgcaaaggaaattgttgattcagcaccagaaaacgcaaccgagtggaatgagggttatgagttccaatgtggtcaaagtgtagaagtcagcccagcagatcttgagaagtattttgtagatttggttgagcttaaacgtttggtggagtctttgggctatataagcagatggggcggcattgaacgatgcaaaaagctttacttcgaatcttcatttaaaagagaccagcacataaaagatttgaaacgatacattcgcgactacgaatcagtttatcaactcaaatgctcacatggttatgacgttgcatgccttatctgtggttttggaacagttaatggcgagcgtgtttatcacaataaaggaaaatcaaaatga

SEQ ID NO: 53902 - DNA, 288 bp, Acinetobacter baumannii
atggatcttgaatggttagagaaacaacgaagagagctggagaagcgctttaatccagaacttcacaaactaaatgagtgggcaagaaaagtggagttagacgaactgcacaagcaactatcaactccgaaaatttgtaccgcagatattacaccaattaacaaaagagcattgccgcaagagctttggaaagaccgaaaaatcaaagagcttgaacaggagaataaagaacttagacgcaagttagcaatgcatgttttaacgtacagaaatggggaatcaatatga

SEQ ID NO: 53903 - DNA, 591 bp, Acinetobacter baumannii
atgaatatgaatttcaaacctcaagcaaaaaaaatgaaagttttagttgcgtgtgaatactctggtcgtgttcgtgatgttttgtataaaggttgggatcttgttgttgctcatcctccttgcacctttctatctgtagctggcaatcgttggtttaacgttgagcgttacgggcaaaaagctattacccggctgaaagatcgtgaacaagcaatagcatttttcaaactctttacggatctggagtgtgaaatggtggctattgaaaaccctattggatgcatgagcaaaacctatcaaaagccatcacaagttattcatccgtacatgtttggcgatcctgagcgaaaagctacctgtttatggttgaaaggcttgccagctttacaggcaactaatgtggttgagccaacgattgtgaaatacaaaaacggaaaaggcactgatagtccgtggcatttggataccttgaaactaccagcagaagaacgcagaaaagctagaagcttaacatttcaaggcattgctaatgctatggctttgcaatggggtggtgatgttcgtcatttagccatgagggaagcggtatga

SEQ ID NO: 53904 - DNA, 1356 bp, Acinetobacter baumannii
atgatcgatttattttctatcccggttgagcaatcagtgcttgttacattgctaacggtcgaacaaggcgctggtgagtatatcgattcacttgaggtttctgacttctattcagaccgtcaccaaatcattttcaaacacatcaaggagcagcacgaaaaaggcgaaggacataacgagattttaatctgggaattaattcgctctcatacgcttgaagttaagaccgtaccagagcaatacatgattgagctaatgtctggcgcagtcgtttacacaatgcttggcagcttggttaaaaaacttaaagatttctctactcgccgtaagatccaagagttatcaaaaaatatcggtgtggttgcggttgatacggttagctatagcgctgaggcagctttagaccgagttcagacgttggtatctagccttgatggtaattcgcatgaaaacaaaaccatgtctgcaggcgatctatcaaaacaggtcttggcaaacattcttgataagcatgaaaagatccacgctggtgttgaggttaagcgcggcattaaaactggtttctttgagttagataacaagcttgattgtatcgatcaaactgacttggtgattattggtgctcgtccttcgatgggtaaaacaacactggcgcaaaacatcttgagcgatgtttcagtgaatcaaggtgaaccagctctgtttatgtctggcgagatgaacaaagagcagatcatggaacgcctcatttctggcataggtcaaattgaacttaagaaaattcgctctggccgctttcagtctgaggatgcaggtttaattcaccgtgcaatgacgattattggcaacacaaaaatcgaaattaacgaccaaagcgcaccaagcctaagcgacatacgccgagaagcgcgcaaaatggtccgtaagtacgggaaagtgggtttgataatggttgactaccttcaaatcatgacaccgcctcagcgcacgggaaaccccactcaggagatgggtgatatttctcgtggactcaagaaacttgcaaaagattttaattgcccagttgtcgctttgtcgcaattaaaccgttcactcgaaaacagaccaaacaaacgcccaatcatgtcggatcttcgtgactcaggacagattgagcaagatgcggatgtgattttgtttatttatcgagatgaggtttacaacaaagaaagtaaagacgctggtattgcggaaatcatcgtaggtaaggctcgtaatggaacggttgggaccgtgcgattagctaccgacttggctagatcaacttttcttgatttggatccgcagtattaccacgcaatggaggaggcagtatga

SEQ ID NO: 53905 - DNA, 825 bp, Acinetobacter baumannii
atggctaattttatctctaatgcatttatgctgcctaatgaccttgttgacaaaggtttcatggcccaaatgagaggggcggctttaccgtgctatttgtacattgttcgcaaaacacgcggctggaataaaactgatgatgatataagcatttctcagcttgtggagggtacaggatacaaaaaagatgcggttttagctggtattgatattttgctcggattaggaattattgagaaaattacctatgtaaatcgtccgtcaaattacactttaactgacaatattattgctgtcggaaaaaccgacaccgagcaatctgctgtcggaaaaacagatagcgaaaccgaatctgctgtcggaaattccgacaccaaaagtggttctgctgtcggaaaaaccgacaagttgctgtcggaaaaaccgacacacaataacaatataaaaacaaatacaaaaacaaaggggaatttttcagaagaatttgaaattttctggaatgcatatccgacttgcaaacgtaaatcagataaatctggaacctttaaaacttttgaaaaatacactcgagtaatttcacttgaaaaactcatcgcaattttgaacgcattcaagttggattcccagtggatcaaaaacgatggtgaatatatcccagcaccttcggcatggttgaacaaaaaacattgggaaaatgatttctggttgaaagctgctggtttagttgagcaacaaccacaatcagcagaaacacctgaatacgcaaatccacaacgccgtcacatcccaacaatgccaaaacgctttaaggggatgaacgcatga

SEQ ID NO: 53906 - DNA, 375 bp, Acinetobacter baumannii
atgacaagtagagctacaagagtgcagatcaaaggcgaggatccaaaatatccgatcgcatttgatgtggagcttattgcaccagtgcgtatttatactgcggttgaattagcagctatgccactctcacaaatgattcgttgtcgtgatgctcaagaggagttttacatcaacaacaaaaagctttcaggcagagcaaaagacataaaagatcgtcttgttgcaggtgagaaattaacacttgtgcttgaaaaaaaacattcaagagtaactcagacgtatttcattggcgaagagattgtgggcaaaagaattgtcaagcaactcgaaacacgccgttttatacgcctcccaaaagtggagggtatagcgtga

SEQ ID NO: 53907 - DNA, 303 bp, Acinetobacter baumannii
atgagcacacaatttcaatctcaagcagattttaagcaaacaagccaagtccaatcgttttatgagccagcaatggcggttgttaatgagttgatggctgttaagaaatctaaccttaaaagtaaaggctacgatgagaataacgctgctattacgaaagaagagttgcgccaatctttaatgcgccgtttacgtataagccatttcatggcctctcaaatagtcaccagtttgtctaaatctggtcatatccgtgagtttgggggttatgttgctcctaaggcggtgagtaatgacaagtag

SEQ ID NO: 53908 - DNA, 204 bp, Acinetobacter baumannii
atgaaaactaatttatcacaacacccttgtgaaaacaaatgctctaaattcaatggggaacagtgccgaacttgtttaattggtgaagatcttggcgatgaccgccatcttgctaatcacatttctgtaaagtgccaagttattcctcatgacgaattaaagcacctcaatcgcgcacaccaagcaataggggaagtttcatga

SEQ ID NO: 53909 - DNA, 534 bp, Acinetobacter baumannii
atgttttacaaaactaataaaccagaagctattgaagcacatgttcagttttttaaagaaaaagctgctcttcatgagtctgcaagaaaatttgcagcagagtatgacgcaaccgaagttgttttacataatcgctgccaaatcttttttgctggccttcaattaaaaacatcaaacaaagttaatttgcatgtttggcgaaagcccgctgttcactattacaacattagccatcttcgtgttaaggcaaccaagaaagaacataaagctgaatgggaaagagaaaaagagcgatatgcagagttgttaaaaaaacactttccaaatggcgaaaaggtttcacttgagccgttttttaactcactaggaatttctgcaggcagcctaattatgagtggttttggttggttcgttcatgatggatggatgtatatcgataccagtctgaaactggaccacttaactgaaattttgggttctgaatatctcgctgcacagcaagcaaaaaccaaatctgagaaggaggctgtctaa

SEQ ID NO: 53910 - DNA, 264 bp, Acinetobacter baumannii
atgggattagctagattttctgcaaagctcaactacacctccgaatatggttgtgcatatcaagaaacgtataaacagagccaagacaatccggatgccaagaaagtttttttggatttggttgaacacttagcttggatgggtgcggttggtggtcaagcatccgaagttgttgaggcttttaataaaggtcataaacaaggcttagaacgtcgtaaagaattagataaacaagaggcggtttcaaatgaagatgttaaataa

SEQ ID NO: 53911 - DNA, 882 bp, Acinetobacter baumannii
atgaagatgttaaataaaagcgaagctaagcttgcatgggcaaacggcgaaccgcttcttataaacaataacggctggacagactttcaccctcttgagtggagcatttcagtatttgataaatatgaatttgccctaaaacctcgtgaaattaaaattggtgaaatgctggtccctgagcctattagagaagcaccgaagaaaggaactgtttgcttctccccttctattttgactgaaaaggcttaccagcagtttaaatggcgtgactctaagcaagataagttgcttcttgagcgtggcatggtccatttagatgagttcaatgtaattaagcatgcggttgctttggttcggataagcggtggtagttgcgtaatcaacttggatgctcagtctgacgattcagctattgaggtgagtgcggatattccagatccatcagaagttgagctttgtttaggtacgcattttaaagatggtgaagcgccaaaagaacaatctttggaattaacttctgaatcaaattatgaagttgaattgaaaagcctgttggatgaattggaaaacactacttcaccaggaagcgccaatgatttagttagtcgcacacgccactggagcgaagagcaacgcaaaccattattggatgcgattaataagcgcctaacaacttttactcagccacaagccaaagaaccgccatcactaatggttcaaatacaaacggctccagacttagcaaccttagatattcttgaggttgatataggtggcaaaccgcaagaaatccaaacgaaattgatggattttgtcaaaaaacgccgatttgagttgatggaagctgcaaaaacagcaagcgaggtttcacatgccgtttga

SEQ ID NO: 53912 - DNA, 336 bp, Acinetobacter baumannii
atgccgtttgaatggattaatcaaaattatggtgttaaggccgagatcggactgtgtgtaaacgttgatggcaagccggggattattgcgaaggattgcgggaattatttgggcgtcaattttgatgaggataaacccggagttatccgcaattgtcatccaacttggaaggttgaatatcttggaatgggaaaaattcgccaaatgaccgcaggtcagaaacgataccaagagtttttaaatgctgattggtttgacggcaactttgctcaatggcttggggtggataaggagtcaagagatcgccgcgaatttgcaaaaagatatggttactag

SEQ ID NO: 53913 - DNA, 483 bp, Acinetobacter baumannii
atgaatgcacaaattttagatccatgctgcggctcaaagatgatgtggtttgaccgtaacaatccaaacgtaatttatggggatatcagaaaagaagaacatacattgtgtgatggtcgctctttagtgattgaaccagatgtgatgatggacttccgtgacatgccatttaaagacggccaattcactttagttgtgtttgacccgcctcacctagtgaaggctggcaaacaaagttggttagccgccaagtatggaaagttatcagaagattggcgcgaagatattcgtaaaggttttgcagagtgctttcgcgtgttggctaatggtggtgttttaattttcaaatggaatgaaacacagatcaaagttagtgagcttttagaactgacagatcaaaaaccattgtttggacacattagtggaaaacgcagcaatacgcattggattacttttatgaaaattgaggtagctgagggatga

SEQ ID NO: 53914 - DNA, 327 bp, Acinetobacter baumannii
atgaaatatcaaatacaaccaacacaagtaccagatgatctttcaggctgctggtttcatcctgatattgaacagcatgacactattggagaccacgctgagttttatacaaaagaacaatgggcacaactgcaaaagaatcttggtatttcaatactaattgaacgttttgattatatggaaatcgaggaaatacccgatgaagactccggtgattggtctaaatggaaaccaaaagcaccaaaacaaaacttgtttttaatagcagcttttgattctgaggatggccccattctttggtgggcaaatccgaatcaagttaattaa

SEQ ID NO: 53915 - DNA, 1152 bp, Acinetobacter baumannii
atggctgacggagcaagcgcaaagtcgctaccaaaaggcgtgcggattagatcaggagcaatccaaatctattttgagcgaaacaagcaagcctacaacatcacgttaccacaccccccgactgcggaaggtattagcgcagccgctaaaattagaagccaattaattacaaaggctgagtggggaattttaaccgataaagatattgctgaggctaaaggagaaacgattgataaaaagcacctcatcctcaatagcaatgaggtgctttttcaagaagtagcacagaagtatttgcgccagtgcgaggcgaatttagactctagaaagggttatgtaagaattctgaattgtcactggatgccacactttgcactaagaccaataaatcaaatcactaatgatgaaataagagatttgattatcgataaaaacttcaagacagccaaaacccttaataacagcttaatacctttgcgcggtgtatttgagacggcaatgaatagcaagttgattttggataatccaatgcatggcattgagaataagaggatccagcaagctatacctgatccttttagcagagcagaaatgaatgctttgctgaaatggcttgatgtaaatcttgagggcacaaaccgtctttactattggtattacgagcttgctttttggtctggatgtcgcccttctgaactttttgctttgcgctggaatgatattgactggttcaatggaacaatgcgaatcagtaagagccgggtacggggttatgagaaatcggtaacgaaaactcatacagtacgggatgtatatttgaatgacagatctacacgcgccctaactgaaatacaaaagcttgggctaagtagagactatgtgatgatttgccctgaaactggcctacctttctatgatgaaagaccgccaagattcaggctaaatgaggcaatgaaggcttgtaggattcgtcacagacctgcttataacgctcggcatacctatgcaacaatgatgcttatggatggtgtgaaccctgtgtttgtagctgatcaaatgggtcatagtttgcaaatgctaatgaagcgctatgcgaaatggatgcacggcgacaagaataaaattgagatggctaaactcaacacatcttga

SEQ ID NO: 53916 - DNA, 1233 bp, Acinetobacter baumannii
atgaagaatttctatactttagaagaggtgttatctgcctcagatgagccattatctctcttagatattattgattattgccgaagaagcatgctgcatccgtgtgtatatcttgatggtaatttagtctgtatagaagaaactcgcgaacaccatagtgaggataaaagagattatcctgaacatgtagtggaggctaaatggcacgtaccatttcaaggatatgtttttagtcaggatctgattgagcaattacgatcaaaaaaccaaacttttaatctattaaaaattgatcaaattatatctcaatattctgaaataccacttaatgaaccagaacttaaccaatctcttcacgtatatgagcgtaggtatgatgatgacgttaaggattttttttggattagggatatgaaggatgaggaatacaaaggaattgaatattctaaaaaagagatagtgtttcatattgaagagttaaaaagaataaattttaatgatcctgataaaagaaagtttgacgccttacggcgtgaatacaatcatgaagaatataaacatctactattctcaaaaccatcattctcaattcatgaagcagcttcaattgtttctatgaataatccactattcgtagaagtttatcgagatcaaccgaatttcgttaaatactttcagcattatttacattcttataatttaattagctcatggtctgaagatggcattttaggtgaatcagaaatgatccctgctgaattattaaaagagactcttaagaaaaacaaaattcttatccagagttttaatgcgcatctaataataatggaagaaggtaatctcactgtcgagcacaaaagaattaatgagcaaaatgaagaaatagaaagactgagagaaactattaaaaacttaaatacacaaattgagcaattacagtcggaacaatcattagagccagtaaagtcatataacctactagatttaattctagacagcactgacaatgaaagatacgcgcctgatctagcttatgctattcaattatgggaatcagtttatgttactaaccccaaatcaggcaagcatagtaataaagcaaatatttggatcaaaaataatacaccctattccggcgatcgagatgatacgtatacgcgcagactacgagatataacatcaccgttaattggatggcatgatgatagaaaaaaattattaatcaacaattaa

SEQ ID NO: 53917 - DNA, 315 bp, Acinetobacter baumannii
atgacatatccaactatttttagccttgcccttttcaaattaattttattgatctatattacaagtgtctggtgcaaaatcatcagatcagctttggtcggctgtttatatctaggcgcacagtccgctttcagggctttttttgtgcgtaatccttccgcatctgtgtcttatggcagggccgaagggggacactttcgagtgtgcgagtcacctagattactcgtcgaccaacccccttttgctttgccaccatatctcttggtcgtgataattggcaaagcttctaataatctaggagcgcattcatcatga

SEQ ID NO: 53918 - DNA, 555 bp, Acinetobacter baumannii
atgaacgctaaagtacaaattcaattacaagagcaattagtccctttctataatgctactaattatttaaatgcttataaaattgcatatgaaacggctactcaacttcgcactctactcaatcaaattagtaagtctgcaatcttcgttaaaacctatgctgaagagcataatttagataattcaatcttcatagaggttgaaaatttaatcgcaatctcgcttcaactttccaactcttatgctgatacatgtaacgctgtgattaaaagacatcgtaaagcaccacatgatcaatacgacgctggtgatctaaatgaagcttacgcacttgctcatgaatatacgacctggttagaaactttaatttctaaaattagaatagaagttaagttggttaaagaagcagtaaaagatgtcattcacagctctgtctttgcgacacttgaaagtttaattaatattgctgagtactttgctgaaatcaatgttaatactttttctattgaaagtgaaaagtatgaagctgaatttgaggtatctaaaaatggataa

SEQ ID NO: 53919 - DNA, 168 bp, Acinetobacter baumannii
atggataaacctcaagtttcaatcaataaaaattcggttcagccaagtgcagaaccaaaaccaacctcacaatcttctacatatgtagaatccgtccgaatgacacctgagcgcatccttaacgccgtaattaaaacaactcggcaaggagggtcgagtgagcattga

SEQ ID NO: 53920 - DNA, 825 bp, Acinetobacter baumannii
gtgagcattgatgcaacaagatgggcttggactgctccagtaaataactcatcacagcgtctcgttctgctttcattagcagaccgggctggtgaagatcatacagcgtggccgagtatcgatcgcttggcaaaagatactgttctagacaagaaaacagttcagaaagttcttatagagctaatcaatcttgatctggtgaaagatactggagagcgtacaggaccgacaaaacgagtacgtattctcaagctaaacggcgtaaaagggcgcggagaatcaacccagaatcgggatatttcaagtgctaaaaaggctattaaatctaaacctaatcaatccgaaaacgggaacattcaacactcccaaaaacggaatgattccaaaaatgggaatgatcccgaaaacggtgcattgaataacccccaaaatgggatgttaaacgatcccaaaaacgggatgcagaatctatcagggaatctaccaatgaatctctctcaagaacataagtggattcctgatgtagatcagttgataacaaagataaagatggcaggtcatggcaacaatatagacctaatctttggcctacctagctttgaattcgagttgagtgcattcaattcttattttgataatagcggactatctgacagtaaaaaactacataagttcacggcttggatcgtagacaagtttgatcgctacaaaaagcagaatccagaatatggcagtcagtctccgatcggacagcaagctattactgctcggccatttatcaatttgccgactaagcctaaaagcttattaggagatgctcaatga

SEQ ID NO: 53921 - DNA, 531 bp, Acinetobacter baumannii
atgtggaattatttagtaagtttttctacttgggcggaaaataactcagggcaaatacagatagttattgctgtagttgccttgtggttagctatattaggttataaaaaagttataaaacaaattcagatggctaaagagcaagaagaacagaactatcagcagcgtaattatgaaattaaaattgaagtgattaatttactttttaagatttcagattcaattcataagaaattaaaaggtctttatgacctacaaactggtttaaaaaacagtgaagaagattttaaaaccaaagaagaatcaattctgttaaacgatacacttaaaacagttcaagagaaaatcgataaaacattagagattagagaacaattaaacagcacattagagagttttattaaaaaagacgatattgactataagctatttgaaaaaaaattaaatactctttatttagcactaattaaagaaaataaggagactaatgaggttgatcttctaaaagctgaattctttattgaggattag

SEQ ID NO: 53922 - DNA, 564 bp, Acinetobacter baumannii
atgtctttagcatgctttagtgcatttaattgtatcgctgtggcagcttcagaatttgatatagctgatatctttaactctgatgggacacctaaagaaggatctatcaatggagttaaatttatttcagctaaagagaatggattactaactttagccctatttgatagtgagtcgattccaaacaagagcggtgataattactggtttttaagctgtaactcttacaaagataattataatatgaatgcagttatatgcggagcacagagaggggaattcaaaattttgttgggctcgttaggatatattattgaaatggaaaataagccaagaggtgggggacgctatatagtggcatttgataaggagcctagttttgaggcaacttaccgtattgttgataaggtcgaagttaagaaattcttagccaaaatgatcgattcaaaaaagatgcagtactcttataaaaatgagaaaaataaatatatttctaatgaaagaaaaattcagaatacaggcctaacaatttctctcctcaaggatatgagagattattattaa

SEQ ID NO: 53923 - DNA, 2637 bp, Acinetobacter baumannii
atggattttttagcagatgatgaattaacgttaaatcaagaagatcctcgttttaaacctaaaagtgaacgcggtggaattagtgacggtgctttaggtgtggtttccggtgttgccatgggtactattgaggctgctactgcaccggatgccttgattcgtggtgacaagaaagcagcggctctaagagcacaaaaccttgagatctttaaacctgatgatctcggtggagttggtgagtttacttatggcctaaccaaagactttactcgtattggctggaacgccgtcactacactaggtacaggcggtgtacctggtttagctctaaactctggactatttgggtaccagacctttgaagcagaaaaatcagacttactgaataaaggggcagacataaaaacggcccgaaccggtggggctattaaagggattacagatgctctgggctttgctattcctacccatggtgttgctaaatcggtagtagctgatgctgtggctactactacgctggctactggagctggcgtagctggtgattatctggaaggttcatttcttgaaaacaatgaaaataaaaaggtcgctcaatacggtgaagcattaaaggaaaatgctttaagtccatccacattagcatcaaacggcgggatggcactcctactcaacttgtgggccaataaaggccgattgaggcctgagcaggtaaaagaacacggcaatgttgatacgatgaatgatgctgctcatgtacaagcgaaccttgagcatgcagaagggatgaatccttttaatccagaaaatgcaaaagaagccaattcacactttgatgcattggatagtgcaatggagagtgcattgaatgatgagttggtcagcttaagagcaccagtgagcggaacacccaaagcaatcgtaacgagtacaccagtggtaccaataacaggtacaccgaaagctattgtaagaccaagcgctatcaatactgatgaacataaagcgccagtaatagcggagcttttgactaatcctgtatttgataaaaaaccttggacaaaaacgattgttcaggaagcctctaaacggggtatcaatccagtggatgccttggtcatttctcatttggaaactggtggcacttttgatccaaagattcagccaccaatcgataaaaagacaggaaagccaatatcatctgctactggtttattccaaacccttgatggcacttttgcccgtatgggaggtaagaataagtttgatggtaatgatcaaattaaagcgggcctgaactactacgagcacaatgccaaggtttttcgtactcactttaatcgagatccgaatggcctagagctttactacctgcatttctttggtgagggtggtggaccagcatttttaaaggctaaggataatgagctttttgttgatgtggccacacgctggagtaaaggcaatcagaaaaagactgcaagacagattgcagaaggtatcacttcaagtcatcaattcaatggtatgaccgtaggacaagtaaaggccaaatacgaaaagcgctggaacgaaatcgcaagtctttatagtgatgttagtccagatgcttcagtaagatctactgaagtccgagggagcgaatcagagttcccacagtttgagtctgatataactgcgccacctgcttacaagtcccaatctgatgctgaaattgaagcaatgccttttgtactcagtgcagatgagcatagtgtgaagtcactccaggaagagtttgaagccctatcttctccattgaccaaggaggatctggaatacctcaaggctacggcgcattatcagtattctgaaggtggtgcttaccgaacgccgtatgttgaacctcaagtcgatttatctggtcccggtaatagcgctaaccgtaatttggatacattggactctgatctttaccagcttgagccagaacaacaacgcgttattcttccaggtccagaatcgaacactttagatatcaataccagaacatcagattcaaatattcagcaaaactcaattatcgcaggggtagataattggactccaaccagatcgcaaaactaccttaaacgagagcggtcaatggatgatgggggagttattcaagagctacacaatagtacttctaatacgacattccagcgccaagttaatcaagatggcaccattagcccggtaaaggctacacgtaatggaaatgacctatttgcccatcctgctaatggtaaagccgatagtcctgaattaactgcggtacagcataaagctactcaggcattggaacgggagttttggaagccaggtaaatctaaggttgatggtgcaccggacttaaccaagtctagtaaaggggaatacggtgcattcactgacacggcagacggcagggaagcagtttcaattctggaagcagatcccgatatggaagtgacctttacgcgtctggatgaaaacggggatgaggaaattgtgacgatgtcatcccgagatctattggactatgtcaaagagcaagaagaaatcgcaaaagatgaaattcaggcagtgaaagcattggcaagctgcgcattaagatttgggagtgaagcagcatga

SEQ ID NO: 53924 - DNA, 870 bp, Acinetobacter baumannii
atgtcaattcaaaccatatcttcaacaattacaagacttaataaagagcttgctgatataactcatagaatgagcttggagcataaaaaatctaccgacatatccaccaagattattcagattcaaacctccattactaagacgacaagtattagcacagtgaaatcaaaactgtctgagattagtagaaaggaacaagaacattctcgtatacaaataaaaatttcagagcttcaaaaaaagaaaactgacatccaaaacaagctgattaaagaaaatcaaaatttagcaaaagctgaagcggttgagcgtaaaaaaatagatgccttggtcaagaaacagcaaaaagaagagattgaacatcagaaaaaactaaaacgtgaaattgagagtattaaggtctctacccaacttacaggtattagcacatcaccatatatcgatatgacgcctgaaccagaatatgatttatttatttcccatgcttcggaagataaagaggattttgtaagaccacttgccgaaacattacaagaactaggtataaaggtttggtacgatgaatttagtttaaaagttggtgacagtttacgaagaaaaattgatagtggtcttagaaactctaaatatggaactgtagtactttcagcagacttcatgaaaaaagaatggaccaattatgaattagatgcattggtagcaagagaaatgaatggccataaaatgatattaccaatatggcataaaatatccaaaactgatgttattaactatagccctaatcttgcagataaggttgcactgaatacatcaattagtactattcaagaaattgctgaacagttagcagatgttattttagaaaaataa

SEQ ID NO: 53925 - DNA, 537 bp, Acinetobacter baumannii; identical to SEQ ID NO: 49176

SEQ ID NO: 53926 - DNA, 180 bp, Acinetobacter baumannii; identical to SEQ ID NO: 49180

SEQ ID NO: 53927 - DNA, 573 bp, Acinetobacter baumannii; identical to SEQ ID NO: 49181

SEQ ID NO: 53928 - DNA, 258 bp, Acinetobacter baumannii; identical to SEQ ID NO: 49182

SEQ ID NO: 53929 - DNA, 1281 bp, Acinetobacter baumannii; identical to SEQ ID NO: 49183

SEQ ID NO: 53930 - DNA, 1104 bp, Acinetobacter baumannii
atgttaaataatgaattaacaacacaagtattttcaattgaaaatgaaatggaaaaacttgatcttgatattgatagaaaagatgaagttttagcaatagttgaaaacttagatctaattaagaacccacaaaaggtacttgagttgggggctaataaccgtgattcgttagctgatctttctaaccaaatgctgtcattagttactaatgatcagttgggagttatgggagaattaatgacggatattactgtaaaattaaaaagaacagacttttccattggtagtgataaatcaaatataccgttgataggggggctgttagcaaaaattggtaattcaaaagacaggcttattactaaatttaagacagtagaatcacaattaaatgataatttattgcaagtagcagaagctcaaaaagggttgcaattaaataatgatagcttgacgaaattatttgagcatacaatttctgtttatactcaactaggttttgctgtcatagctggtcgatataaaaaaaatgagcttattggcttgattgagtcacttaacagtgaaggtacagatctagcaaagcaaagagcaaatgcatattcacaaatcttagagcgtttagataagcgtattacggatctagaattgttgagattaagtgccttacaaacgttgcctcagattacttttttgcagaacaataatattgcgttaattgaaaagttccaaactatatctggcttaactattccagcctggcaaagacaattaatgttggccttgaatattttagatcaaaagaaatactcacaattaggtgaggaaattgataatttcacaaacgaaacacttctagaaagcgcgaaagattttaaagaaacttcaattcatattgcaaaacaaagcaatcgccaagttatagatattgagacacttcagaaggtgcagcttgatacattaactgcttttgaagaagttatggcaatcaacaaaacttcagctcagaagcgaaaagaaacacaattacaggcacaacaattaaatgatcagctcaaaagcctggtcgttgcggatccgcaacaattaaaaatcagtgcagattaa

SEQ ID NO: 53931 - DNA, 270 bp, Acinetobacter baumannii; identical to SEQ ID NO: 49185

SEQ ID NO: 53932 - DNA, 234 bp, Acinetobacter baumannii; identical to SEQ ID NO: 49186

SEQ ID NO: 53933 - DNA, 1230 bp, Acinetobacter baumannii; identical to SEQ ID NO: 49187

SEQ ID NO: 53934 - DNA, 1257 bp, Acinetobacter baumannii; identical to SEQ ID NO: 49188

SEQ ID NO: 53935 - DNA, 774 bp, Acinetobacter baumannii; identical to SEQ ID NO: 49189

SEQ ID NO: 53936 - DNA, 777 bp, Acinetobacter baumannii
gtgaattcaaaagttaacattggtaaaacttatagtgttttgaaaagtgagtttatacataccttaaaaagtatcgaccaatctaaaaacatttatgaaatatttcatgactttgttttttgttcagcagcagcattaagaaactcaattggtcatagatatcaaaatttgtttaaccaaaatattgaaaatgaatatcttcaacgtatcaatcgttacgatgttagtggacgtttaaaaataaaaaacctgttttatctgttggtggatttatgcgaagcaaagggtgagccatacgatgtgttaggtagcatttacatggaactagaaattggtaatgatcatatcggccaatattttacaccaagtgaggtatcaaatttatgtgctcaagttgtaattaccgaccttaaaaaacaacttgaggaagagggggtgatttcgatttccgatccagcttgtggagctggctcaactttactttcaactgtaaaactctgtttggaatctaagatacaagtgcaagatcacttgtatattgaggcagcagacattgatagaaatgttgctttaatgtgttatatacaactaagtttgtgggcagtgccttgccgtatttttgttggtgataccctcaagttaaagtatcgtgaatgctggtgtagcttaatgtattacgtaaaagggtgggacataaaattgcatagtcaaaaattaaaggaaattgtacataaagctgaagattatgtgcctaatttcattttaattaatgattga

SEQ ID NO: 53937 - DNA, 498 bp, Acinetobacter baumannii; identical to SEQ ID NO: 49192

SEQ ID NO: 53938 - DNA, 207 bp, Acinetobacter baumannii; identical to SEQ ID NO: 49193

SEQ ID NO: 53939 - DNA, 237 bp, Acinetobacter baumannii; identical to SEQ ID NO: 49194

SEQ ID NO: 53940 - DNA, 690 bp, Acinetobacter baumannii; identical to SEQ ID NO: 49195

SEQ ID NO: 53941 - DNA, 405 bp, Acinetobacter baumannii; identical to SEQ ID NO: 49196

SEQ ID NO: 53942 - DNA, 333 bp, Acinetobacter baumannii; identical to SEQ ID NO: 49197

SEQ ID NO: 53943 - DNA, 297 bp, Acinetobacter baumannii; identical to SEQ ID NO: 49198

SEQ ID NO: 53944 - DNA, 189 bp, Acinetobacter baumannii; identical to SEQ ID NO: 49199

SEQ ID NO: 53945 - DNA, 327 bp, Acinetobacter baumannii; identical to SEQ ID NO: 49200

SEQ ID NO: 53946 - DNA, 477 bp, Acinetobacter baumannii
atgaaagtagctggaataaagatatttttaggtagcttattgttagtaagtaacattgctaacgctgactttgttgcaagagtaattggtgtgactgatggagatacaataacagttttagacagatcaaataatcaaataaaggtgcgtctagcagatattgatgcaccagaaaaaagccagccatttggagcaaaggctaagcaagctttatcagatttaacttttaatagaaatgtttatatccaggaaaaaggatatgacaagtatcatcgattgataggaactgttctagtaggtgtggatcctattaataggataatggttaaaaatggtatggcatgggcctttcgtgaatatttagatgatccaataatgctggatctagagtcatacgcacgaaaaaataaaattggtctttggcaagatgctaagccggtatatccgagtatgtggcgaaagaatcaatcacagtag

SEQ ID NO: 53947 - DNA, 216 bp, Acinetobacter baumannii; identical to SEQ ID NO: 49202

SEQ ID NO: 53948 - DNA, 168 bp, Acinetobacter baumannii
atgaaaattatagctttacttgcaccattagtaattttactagctctcatatttttagggagtaagcaactaattaaacaagcttgtgaaagcggaaatacctatgttggcgaaacaacttgtgaagaaaatgggtttaaaaaaagatcattaatttcaagtaattga

SEQ ID NO: 53949 - DNA, 192 bp, Acinetobacter baumannii; identical to SEQ ID NO: 49204

SEQ ID NO: 53950 - DNA, 597 bp, Acinetobacter baumannii; identical to SEQ ID NO: 49205

SEQ ID NO: 53951 - DNA, 375 bp, Acinetobacter baumannii; identical to SEQ ID NO: 49206

SEQ ID NO: 53952 - DNA, 381 bp, Acinetobacter baumannii; identical to SEQ ID NO: 49207

SEQ ID NO: 53953 - DNA, 525 bp, Acinetobacter baumannii; identical to SEQ ID NO: 49208

SEQ ID NO: 53954 - DNA, 1266 bp, Acinetobacter baumannii
atgaaactattatttggtgaagatgtaattagtagtgattttgaaggactacaatcattattaaaacaatactatgagaagcggaaacgtccactttgtttatgtactaataatggtgttgaaatgtacatagcaaaaataaatgaaagttatattctaaaaagaatgcctaaaacaggtggaagacattcaccagtctgtttaagttttgagcctcctgaagaactttccgggcttggagaggtacaaggacaggcaatacaagaaaatcctgaagatggtactacaaatttaaaattagatttcagtttaactaaaatgccaggtaaagctccgccagccccttctggagcagatagtgactcggtaagaactgatggaaaaaaacttacattacgtggattacttcattatctttttgaagaagctaagttaaattatttcaatccagacattccgaagagaaattggtatacagtaagaaaagcactgcttaatgctagtgattctaaaatcgccaaaagagcttcattaaccgataatctctatattcctgaaacatataatgatcagaagaaaaaagaaataatagcaagaagaaatgaaaaaatggcccatatgaatacgggcaaagcaacacaaaacctcatgattttaataggaatagttaaagaaatttcagaagccagatatgatttcaaaatggttataaagcattgtccagatttccatttttttatgaataaggatctacataaaagaatatttaaacggttccaagaggacttagagctttggggtgctcacgaaaactctcaattaattactatctcaacttttactagaggaatttctggtgtagctaatttagaagaagttagtttaattgttgtaaatgaacagtggattccttatgagaatatgtatgaatatgatcttataaatgaaatgatcagagaaaatagaccttttattaaagggttgcgttacaatctggatagaaaaaaaccgttgtcgagtttagtggctcttgatactttgcctgttcctacggcaatgtatatcattccggcagcacaatctcacacgtataaagaaagtgtagttaatttgattgaagctagtgaatatgaaggttggatatgggaggctgaaatggcgatgcctgatcttccaaaacttggattattaactacagattcagaaattttagaggacaatttaaaaccaaatgagcagttattcgatacaaatcggacaagttaa

SEQ ID NO: 53955 - DNA, 1083 bp, Acinetobacter baumannii; identical to SEQ ID NO: 49210

SEQ ID NO: 53956 - DNA, 1176 bp, Acinetobacter baumannii
atgggcatacttatgactgtaaactctgttaatttaaattctaaaaaagactttataatcaatagattatatgaaaacctaccaaaaaaaccttactgtaccagtgacttcttcggattaaagattcgtgacaagaaacaagctatacgtcactcacatatacaaattaatcatccgaattttaaaagatatatagttattgatgctgattatccaggcgcagcaacagcttggcggtatgattttgatgacaatattccagtaccaaatttaattgtagttaatccagaaaatactcattgccatttttactatgaacttgaagctccagtaagttttactgaaagttccagcaagagagctcaagaattttataattcagtttctaaaaagctcactgaagtattaaaaggtgacagcaagtacgtgggactaatagcaaagaatcctgcacatgaaaaatggattgtagaagtaccacgattagaaaagtattcattgcatgaacttgttgaacatttagaacttaagccacatgaatacagaaatataaattcagaaaaacccggtatagagaaatttgtaattaacggccgaaatgatcatctatttaacgaaatacggcatcaagcatatatcgacattagaagttatagaagtaaaacatttgttgagtggtttgatcatgtaaaaagcttattaataaatgcaaataagaattttagcgttccgctaccatattcagaagtttgtgctacagcaaaatcaatcgcaaaatattgttggaaaaaagatagctactgctttcaagagttttgtgaaaggcaacatattaaagcaaaaaaaggtggacgtgcaaaatccgataaatatgttgaaatgaggcgcacggctgcgcgtttattgcgttctggtaaaactaaaacctatatatcagaattacttcaagtatcgtacagaagcgttctgcgttggcttcaaggcataaaagtacaagctgctataatgcatttatcagaattaaaaaagttatgtgacaatgcccaaaatcagatattagcctgtttcattgcttctctaatcgttattattttagatgagcacatttatgatcttaatgaatctgaagaattaaaaattaccatcaaattcaaattaaaagttccaattcaataa

SEQ ID NO: 53957 - DNA, 234 bp, Acinetobacter baumannii; identical to SEQ ID NO: 49212

SEQ ID NO: 53958 - DNA, 252 bp, Acinetobacter baumannii; identical to SEQ ID NO: 49213

SEQ ID NO: 53959 - DNA, 1041 bp, Acinetobacter baumannii; identical to SEQ ID NO: 49214

SEQ ID NO: 53960 - DNA, 1293 bp, Acinetobacter baumannii; identical to SEQ ID NO: 49215

SEQ ID NO: 53961 - DNA, 993 bp, Acinetobacter baumannii; identical to SEQ ID NO: 49216

SEQ ID NO: 53962 - DNA, 519 bp, Acinetobacter baumannii; identical to SEQ ID NO: 49217

SEQ ID NO: 53963 - DNA, 3003 bp, Acinetobacter baumannii
atggactttacaattgaaacgtactggaacgttgaaagtacctacttaatccttaatgctgttgcatctctcatgggaagtagcgactgggtaggggctttaaaattcatctttttaactgcgatcatggcttcgctttttgtatttgctttagatagagatttaggaaagtttgttagaaattttggttgggcttactttattgtagtaatcattatggcgccggttagttcagtggccgtagttgataaacttaagcaagagccaccaaaaattgtgggtaatgttccctggctgttagcaatgggagcattcacaacaaatttcacaacgggatggataactaaagaatatgaaacacttacttccgtacctagcagcctaagtttaacaggaactggtgatatgggctttggtcaagccctaataagaaacacaaataaaatgagtatcactagtcctagtttgcgtgctgatattatgcaatatatcaaagaatgttcaatttacgacatgcaagatggggtattgaatgctgaagatttgatgcagaaaacagatagttggaacaagctattttccaatacaaatccagcgcgatttgtaactctgggtattttgaaaggtgcacctgaaaccgtcacatgtgtcgaaggagcaacaagattaaagcaacaagttaacgatggtattgcagcagcaatgcgctattacggaaaaaatgcatttatagattttaatgaagcgactgctttatctatgtatacaaatgctgttggaacaagttatagctggatacttggagctaatcaaagtgcttctgatgctgttaaacaaagtatgtttaataacattatgaaagatgcaaatactgaattaccggcacttattaatgatcaaactcgtatacaagaattaatggcatcggcaggtgcagcagcagcttcagaacaaatgaaaggtgcagccgcagttttatcaaaattagcatttgaagtcattccgatagtgagaaattggctagaagttgttctatatgcaacattcccaatagcggtcatgttaatagttttaaaaccgagtacggcagtaaatattttatccggttactttacaagctttttaacgcttggcctttttcctctaattttcgcattaattaatcatgcttcaatgctatatctaagacggaaagcagaagctctagattttagtgagggcattccctttactaaaatgggggtattagactccacagtcgttgatattcaaactgttattggattatttgtaattctaactatacctctagctgcatggatagcacgaggattttatggtgatatagctgcaattggaaatcaaatagttgggcgctttacctcagcaggttcgtcgatcggcagttcaatggcaatgggtaatatgacattgggtgaaactaatattgattcatcttcagtcaacaacacttcaatgaacaaatatgatagcaatctttcacaaagccgaggtttaacaactttaacaaatgagtatggaactagccatacactaaccccatctggagttatgaatactcaaaagcttgaagatacaacagcgcaatctcttcatacaggccaatcaataagcagaagcaacgaaaaccgatatggacagagtacagattctgtatatggcgttggtgcgacatatgacacagcaactggttcaacgaatacaaactcatataacagatctgaaacatatggcttaacggatgagaggggtgtatctaattcttcagtaacaggagttggaaattcgaaagggtatacgactggaacgaaccaaaacgaatcagatactacacatacgggtgtttcattaagtaagacagattatacggccatgtctgccggagcaaacggaaatttaggcttaggtggtggtgccggaagtggtggtggaggctctgaagaaaaacgtgttgctggctctccaactaatccggggaatgttcaacctgaatctaaaggtgaaggtggtaaaggtggtaaaggtggtaaagctggagttggtattcaagctggtgttggagtctatgcacaaggtcagaaaggtattaactggagtggtacacaagatgaaggtcaaaacagaacttcagcagttgatgagtatcgcggtgtatctaccggagttaattatcgtaatgatctagaacataacaaacatgaaagtcaaaatgaaactcacacctcatcaaatggtcatgaacgttcggccagcctttatgaaaataatagttatgcagaaaatagaaatgcacaattaagttcaagaaatgaagaagcacgtagtacttcttttgcaagctctcattcaatggaaagtggttataactatgcacaagatcctaagtttaaaaaagaagttgctcaacattttggcctagaccaggttcaatttagtaatttaagtccgcagcaacaaacccaatacatgcaagattatttagctaatgaaactgcacgaattaaagagactccaagcacatatgctgacggaaagccaattgaatttaatttgccaagtgactttagatcaaataaaggcaatgtgggaagccgaagtgggatcagtgcggattttgctgaaaattctagcaatattggtactggaattaaacaagtgtcagtgaatacggggccatcttcagcaattagtggtgtgaaaaatagtctggatgatattgaaggtaatatgtcagttattcagcagaatcaacataataaaactgagcacacaaaagatagaaactttgagcttgaagtaaaagtaggagaatggaaacgtaaagatattaaggacacgattgattttgatcctattggtcatgcgaaagaagcatttaccgagttgaaagaaaaggttatgccaaaaaatgaaacccatataaacagtaatggtgcttcatttggccagtggaacagaagagatattgacccaaaaaagtaa

SEQ ID NO: 53964 - DNA, 1428 bp, Acinetobacter baumannii; identical to SEQ ID NO: 49219

SEQ ID NO: 53965 - DNA, 330 bp, Acinetobacter baumannii; identical to SEQ ID NO: 49220

SEQ ID NO: 53966 - DNA, 813 bp, Acinetobacter baumannii; identical to SEQ ID NO: 49221

SEQ ID NO: 53967 - DNA, 2058 bp, Acinetobacter baumannii
atgattaagaaacatcatgtattagcaacaatattgagttttgcatgtatgtcaagcctcatacatgcaaaaacagcagaagaggaagggagagattttggccaaaattctattgagtccacatcctctttagtaaattctcaaaatggtcagaatacagtaccaaatttttcaactaacgcacctgaatccgcctattatcaaaatggaatgggaaacgttaatagtattggaaaccagaaagttacgaactgccaaaaccaaaatatgagtggaagcaatcaacttaacttggaatgtgaggctattaatttagttaataagagtgctacatctagaccaatttatgaaattgatccaaaaaaagatcccctagtaaaagactctaaggaaactataaaggtatctggtgaaagtgctacacaagcaagcattgaaggttctacaaatcagttttgtttcaataaagaattcgatgttaaaccagtttttgaaaataaacagtgctcagtattttcaactagttctacagaaagctgcataaacaaaattctctttactgattgtatttctccaataaaagacatgatttgtggagaagatggaagcggaattgatcatactactttaaaagtgactaaaccatttcataattcaacaatcacaatggaaaatggctttttaaaaattggcctatttggaactgatggttctaaaggagtacatactgccgaatatagttttgaagttaagaatctggaatctttggctgaatttcgcctcactgattttatgaataacgacggttcaagactttatatcaatggtaaagaagcatggagttttaattgggggggcgctcattgttgctcaggaacaacgaatgtggatctaaaaccattcatcaaagaaggcattaatacagttagacttgaaaactggaatgcacgcacagattggtggacaagtgtaaatattaaaacaagaattgcgtgcgcatgtaaaaaacaaaaggttaatggttgttatgataaatacaacccgactattaaaccatgcaaagagataaaatcagaatgcaaaaaaacaattgatggcgaatgtgtttatgaagaaaaacaattcatgtgtgcggaaaaaactaatgtgtctgattgtcaaaacttaatagatgctggttgttctcaaattaaaagtgtttgttcatccaaagactcagcaggtaattgcttaacttatagtcaaacatatcaatgcaaaacttcagaagcacgaaaagaaaatcgaagagtatgtgtagaggctaaatgtactgacggtaaatgctatcaagaatcttcagaaccggataaagattttggtcaagcaattgcaatgatggaagctacgcgagaagcgggcgtgtatggcgaaaaagattcaacaggttcgttgagagtattcaatggagaagggggaacatgtactgtaaagctattagctggtcataacatcatgagctgttgtaaagaaataaaagttgacgtttctaaagcttcaaacaatgcaactggaagtaagcaaactcaagctatgggtaataacccggaacaagcagctcagcaaacagaaggctcaacttatcaatatgatgatttatataacgatgattcaatgatgaaaaaccttcagggagatctgactggtggatggcttcaatgtaacgaagaagaacgggacttggccgtaaaacgtggcggtagtttatgtactcatgcgcggacatggtgctcatcaaaaactatttttggttgtactgaagagagtcgttcctattgctgtttcaaaagtatcttggcaaagataattaaccgagagggcagaaaacagcttggtctttcattagaaacttgtgaaggaattactgttgagcaattgcaaaaattagatttctctaaaattgatatgactgaatttcaaaactcagtagtgccaaaaaacgttgatttgggagataaagcagaaaagattagagaacgggtaaataagcaagccgtcggaggttactacagtgaataa

SEQ ID NO: 53968 - DNA, 708 bp, Acinetobacter baumannii; identical to SEQ ID NO: 49223

SEQ ID NO: 53969 - DNA, 1044 bp, Acinetobacter baumannii
atgaagaaattttttactattttattccttttaattttcactaatttaagcttcgccgctgactctggatcaaataataatggatctaaaagcttacgttgcccaggcgaatttgctaatccaattagcgatatctgttggtcttgcatttttcctatcagcatgggaggaatgccattgtggaaaggtggacaagaagataatagtaatccatcgcaattgttctgtagttgtgctgtcccaagaatttatttaggaattcaaacaggtttttgggagccagtaagacgagtagatgtaactcgtactccttattgtatggtttcattaggaactgaattggacgtaggtgtagaagcaccggaaggtgaagtacgtttgcatgatgacaacaataggcactcattttatcaagcgcactggtatacagatccaatcatgatgtggttagaagtgatctatgagcatccatgtactgaaactggatactttgatatcggatatatgactgagttggatccgatgtggaatgatgatgagttgtctgcaattttatctccagaagcagccttattcacaaacccacttacacaagctgcatgtgcaggggattgcgtattagcatcagcaggttttggttcaaatggtctgttctggtgtgctggatgtaatggttcaatttatccattaaatgggaacgttggcgcacatgttagtcatattcaagcttcatcactaattgcacaacgattagcagcaaaaatgcatcgtcagttcctaacttggggaaccaatggagaagctggattgtgtggcgtttatccgcaaccaattatggataaaacagcatataaatatcagatgctctatccagtggcacaaactaaaaaaattaatggtaaatgctgtcagccattcggcagaacgacaagtgtatggggtgccgggaaatcatggccggtaactggcgaacatttctcatatgaattattcagaaagaaaaattgctgtttgggccctatttcaccgttctatgtgtattaa

SEQ ID NO: 53970 - DNA, 639 bp, Acinetobacter baumannii; identical to SEQ ID NO: 49225

SEQ ID NO: 53971 - DNA, 501 bp, Acinetobacter baumannii
atgaataatgaagttaaaaggtttaaggttgtaaacgtcttactagtgacatttgttttgatgttgattgtcagtgtagggctaatgttatgtcaaaaatggtttatctatacggtcaatcacacaacaagcttgagtgggaaagtatatgtaattaaaaaaggtgagcctgtacaaaagggtgatttagttggttttttatggcaaggccagatcaaatatcctaaagacgttatttttgtaaaaattgtatcaggtgttgaaggtgatcgtatcgttgttaaagatcgagacgtctttataaatgataaatacattggtagagcaaaaaaacaaagtgcagatggaaagcttcagctcgaagttatctcatcacaagtaattcctaaaaatgaaatatttgtaagcactcctcataaagactcgcttgatagtcgttacgcaaaggtcggaacaattaacaagcaatatattttggggaaagcttatgaaattttctaa

SEQ ID NO: 53972 - DNA, 396 bp, Acinetobacter baumannii
atgaaactttcaactatgcaaaaaatgactcaaggtttagttttaacaatcatcgtaatagttattgcgggagctatggattattacaaagatatgaaacgtccaaagatagctacgatcgatattctgacactggtaaaagaacatgagaaaaagctaacagacttgttatatcaaggcgttaaaaatcttgattcagcaaatgttgatttagctcaacaatcaaaaatagcagatatcgaaaatcaaaaatttactaagcaacttaatagtgcagttcaaaaaatcagtgacgaatgcaaatgtattttggttaataaagcagcgcttttaagtgatactaatcgtgtaaaagattacacacaacaggttagagaaacaatctatcaaaaataa

SEQ ID NO: 53973 - DNA, 2727 bp, Acinetobacter baumannii
atgactggaaataacaaactaatcaattttagagccatgctcgcaaactggtttaaggtccacgtattaggtgatgatccgacaggtaaaaaattctcaactgtagatttaacgaataagattcttgaaagctacggcatgtatcagatatttaaatacaacatgtttaatgtgaaaagaagtctttattataatgatggcccttccgtaagctttgctctagaaatcataccgcagacaggatcaaatgaggacttcgtttctcgcatagtatctattatttcaagtttccctgcggaaacaggtattcagatattaaacttcggtaatacaatttttgaagatgatcttcaagagtacttggatttacgtgttgcggaatatcagaatggtaaagtgtctgatttcgcaatagaatttgcaaagaatcgaatcaaacatatccagtctcgtaaaggacggccacagttcggaagagactcatattatgttattaaaaaaccaaaaattattctatcagttacacgttcgggtagttataaagacccacaactaattaagcaaatggaagagttgttgcatcagacaagtgctcaactacaacaagctaaattacctaatattgttttaacaccaatgttactgcttaaaataattaagccaatgcttgaccctgagagtttatttagaaccgttccaccagaacatgaattccaagtttctcgctcatactacagtgaagattataatcgtctagaatcaataaaaagtcagttaacaccacgtggtcattcagcaacagttggtgtgtctgaaatagtatttggtcaacctataattgataaaactaaggggactaatagatcagtaagagtctatgattctgaatggattgaagaagatgacgatgaagatctagaagaagacaatcgaattgcatttcgtggttttggagttatgaggtatccaaaattcaaacatctttatgaaatgggaaatgtaattggcgatttttttgaaaattcccttcagtatccatgcccttacataatttcgatgggtattcatatcttagataaaacatcttctgaaaccaaagcaagaataaagcaagctcgatcaacacagaatgctgaaagtaaaatggcaaaatggcagcctgagtatgctgaaattgctagagattggaatgcgatcacatatcacctacataaaggtggagggatgtgcgagctctatcatacaatcgggatattcgctccaagatcacaactagatagttattctgcaaacgttgacaatttatggaagtcaaacggctttagcgtaatgccgttatcttgcttacaactgccacttctttattcatcaatgcctatgattttgacaaaaaaggcaagagatgatttgaagaaattaaagctgattacgactaaaacaactattaatgccgtagatatgatgccaattttgtcagaatggcaaggtttcggtaaaccggtaattatggtatttggccgcagaggaacaccttgtttttttgatttattttcaaataaacaggggaactataatttttatatttgtggtacgtcaggcgctggtaaatctgttttctctcttgaaattttggcagcttacaaaagcttgggcttcaaaatatatattattgacgtaggacgctcatttaaaaacttcgtagcgctcggtaaaggacaagcaattgatttcgcaaagcgcgaaaagatttgtatgaatcctttcacatggctagaggtaattgaagatgaggaactttcggaaaaagaaggaaccttaaatacatttgcccaagagatgaaaatgctcttgcctatgtatgcaaaaatggcttcaccatccaaaccattagacgattacgataaagctctcctttcaagagctattagagagacatggttaaaattccgcaataacaatggcgtagaccaaatctctgacttcttgaaagaaattagagatcaaaacggaaatattgatgcacgaggttgggctcttggtactcagttagaaaatttcaaaacaaacgggatgtatggaagttactttaatggtaaagccaacatcgatatgaataacgagatgatatatctcgaactggaagaactaaaagactcacctgaattaaaaacggttgtgcttttcggtgttatgaaccgaatcatgcgagatatgtatttatcgcgatctcaagggaaaatcgtgtttgtagatgaagcatggcaactacttgacgatacagaagaaacagcagcttttattgaagaaggttatcgtagagcacgtaaatactttggttcatttggcatgggtactcaaggtattgatgacgcatttgcgaatgatgctgctagagctgcatataattcttcagactggaaattcttcttacgccaagatgaacaaagctttgaaaagttacttcaagagaaaaaagcgaacttttctgaagctgtcattaaacaaattaagtcaattgaaagtatccacggttggtattcagaaattatggttacttcaccaaacggtcagcacatcgtaagacatgttgcggatccgttttctttagctatggcatcaacaaacaaagacgactacaacttcattgaagaatgcacgaataaaggcatgagtatgacagaagcaacatacgctttaatgcgtaaaaaagaggctgaagcagtatga

SEQ ID NO: 53974 - DNA, 645 bp, Acinetobacter baumannii
atgaaaagaaaaggtattttactttgcttggcaatcaatctaagtggatgtgcagcatttaacggagggttcgacggtttaaatggtcaaagctcattttcatgcaaagcgccagatggaattttgtgtgactcaatgtcaggtgtaatggcgaatttgaatgcaaacaatttgccgtcacagcaagttaaacatggcaatagtaaagaagtaattgcaaatacatatatgcagcgtacacgtgcgactaaagataatgcaatgccagtagctccatacgcagatgaaccattactacgccaaccgaaaactctcagaatttgggtagctccgtgggaatcttcggatagaactttattcgatcaacaatatttctatctagtaatcgacaattggaagtggatgattgaacacaattctcgacgtctacaagatgcatacgcaccaattggagccccaatttcaaactattcaagtccagccattacagttgcggatccgcaatctactaaaacaggttcagatggtcctataccagtaaatgcttcagttaatagccagccaaatagtaaagaaattttgaatggaataaatactgaaataaaagacttgaatgtcgatatctctaagtttactagacagtga

SEQ ID NO: 53975 - DNA, 261 bp, Acinetobacter baumannii; identical to SEQ ID NO: 49230

SEQ ID NO: 53976 - DNA, 723 bp, Acinetobacter baumannii
atgaaaaaatttttattaacttttgccgtagcaattagttcctattcaatagcatatgcagatgtagcagaagatattaagtctaatatccaaaaaaactatccggcaactactgttactcaagtgaataaaactcctttaaccggcatatatgaagtcgtaatgggtagaaatgtggcatataccgataaagatggtagatatttcatttttggaaatttgtttgatatgaaaacacaaacagatttaacaacgactccaacaagttcaaacaaagttgaagttggtttcccgaatgctgatcgtttaaaagatgcaataaaaacagttaaaggcaatgggaaaagaaagctcgtagtatttagcgatcctgattgcccatattgccaacaattagaacgtaatttgcaatcgattgataatgtaacgatttatacattcctttatccgttagagagtattcacccaactgctaaaacaacagcagtatcaatttggtgttctaagaatcctggtaaagcatttcaagattacatgattgaaaatattaagccttcatccaaaaattgcgctcacccaatagatcgtaatattgaatttgcatcaagtatgaatattcaaggtacaccttcattaatatttgaagacggttcaatggtgcctggagcagtgggtgtttctgaactagaacgacttctcaattcatctcagaaatcaaaataa

SEQ ID NO: 53977 - DNA, 1317 bp, Acinetobacter baumannii
atgagtaacgatatcgatttagaaaatcctaatgacaaactcaagaaaaaacaaattaaatggttggccatattaggcacaatattattcattattgttgcgattttcttgttttctggaagtccaccagaagaaacgaataaaactcaagcacctgaaaatgcggcaaatgttgaaaaaccgggtgatgctgaagagcaagataaatggagacaaacggccgcaattgatcaagaagctcaaaaaaagcaaattgatgatttaactcaaaccgttaactctcaagttgctcaaaatgatgcgttaaagtcagaactatcaataatgaacgagcgtattagtcaaattgctaatcgttccgaatcaagagtggtagcacaaccaacaaatacaaatccaccaaatcttgggggaatagctggtacatcttcagcttatccaaataaacaaggattgcatggacaaagtattctatcagatccaaatggaactggtatcgatcctcagacaggcgagcgaatacctttaccaaataatatagctccagttaaaacctttggcattattgacatgaataagtcaattgatgaacaaggaaatacaacatctacttcagttaaaagccaacgacctgagaaaacaacatttatcccggatgggagttttgttcgtgtcgtaatgattaatggcgtagatgcaccaactggtggacaagcacagtcggacccaattcctgttgtattccaaacagttgggaaattcgatatgccaaataattataaaatgaacatcaaaggatgtcgttttgtaggagccgcttggggtgaattatcgagtgaacgtgttaaagcaacaattcaaagtggtaactgcattattaatggtcaaacagtaccaattcaaattaaaggtcaagtcgttggagaagacggcaaaactggtattcgtggccgtgtagtaagtaaacaaggtcaaattcttgctaaagctgcattagcatccgcaatggaggctataggtggactgtacggtagtacagttggtacagcaagccaatcggcgctaggtactgttagaacgatttcaggaagtgaactgaagcaagccgcagtaggtggtgcgatttcaggtggagcagaaaaactttctgatttctatatgcaacgggcaaatgacttatttcctgttattgaagttagtgcagggcgaactttagagattgttgttcaacaaggtggcacagtagcgaatcaatttttgataactaaaagtgcaactccaatgaatcaacaaaaacgcattttaatggatgactaa

SEQ ID NO: 53978 - DNA, 723 bp, Acinetobacter baumannii; identical to SEQ ID NO: 49233

SEQ ID NO: 53979 - DNA, 579 bp, Acinetobacter baumannii; identical to SEQ ID NO: 49234

SEQ ID NO: 53980 - DNA, 294 bp, Acinetobacter baumannii; identical to SEQ ID NO: 49235

SEQ ID NO: 53981 - DNA, 354 bp, Acinetobacter baumannii; identical to SEQ ID NO: 49236

SEQ ID NO: 53982 - DNA, 237 bp, Acinetobacter baumannii; identical to SEQ ID NO: 49237

SEQ ID NO: 53983 - DNA, 627 bp, Acinetobacter baumannii
atgattgaagctatgcaaagagctaaaacttacaacatacataactcaattataaaactttcagcaatcgtatttggagcttgtgttacatcaacaacatatgctgtttgttgggatgaagccgcaagtatgtatggtacggatcctattttattaaaagcaattggatggaaagagagtagaggccatgttggtgcagttggttctttacttaaagatggcaatagagcattaggactaatgcagataaataccattcatttaccagctttaagaaaacaaggaattactcgtaatgatttattcgatccttgtacttctcaaaaaattgcttcatgggttcttgctgattgtttaaaaaaatttggtgaagtctggagagcagtagggtgttactacggaggacctgcttctaaagcatatacggcaatgaatcaatattctgccgatgttagaagatactttgaaggctataaaagaaaagcgggcttaccagcagtttataccccattacaacctcaaagtataaaagctcagtcagttaattataacgaagatattccaaattattcttcagtgaatcaaacaattaagaaaacttcaaatttccaaataattcgattctaa

SEQ ID NO: 53984 - DNA, 336 bp, Acinetobacter baumannii; identical to SEQ ID NO: 50830

SEQ ID NO: 53985 - DNA, 432 bp, Acinetobacter baumannii; identical to SEQ ID NO: 49240

SEQ ID NO: 53986 - DNA, 639 bp, Acinetobacter baumannii; identical to SEQ ID NO: 49241

SEQ ID NO: 53987 - DNA, 630 bp, Acinetobacter baumannii
atgatccatgaaaatatctacatgcatgatgtaatcgatatattcgatgtttatcaaaaagacgatctgcttaagaaatccaaactaggactcatgaaaaaatgggatactttctcaattatagccatatttttatccataattgctttaatcggtggttccctatggttagttggtttagttagtcatgaaaaatctaataatgttgatactgcatttatgatagcaattagcggacttgtatcgatcattattaattactatttaaataaaaaaataacagaaataattttaagaaaagttttttattcttcaaaagaaaaagaatttaaattatctagaccaatgtatattaacttagtattactttcagattacgaaagatgctctgcccttattgaaagagaaataaccgaagatatgtataaaaaggtaacatatctaaaagaaaaatataatctcccattaaaaaaaccgctcgaaaagatcatgatagaaagaggatttatatcatattttgactatgaatttttatttattgaattagaaacaataaaagaatcaaagatcttagaagcaagagaatgtgtcggtgcagcctataatatcgctaatgataataaggagtaa

SEQ ID NO: 53988 - DNA, 948 bp, Acinetobacter baumannii
ttgcaagaatataaagatcccctgaatttaaatcagagttatagtttcgaagttttagttagaaataatgatacaaattttgcgggtaagctaaacctttcacctgaagggtgtactttaagaataatgggtgagcgagaatttacatcagattattatactattgaaacttttgaatgttacacatcaagaaatcatttcttattgtcagaagttaaatttaaatctggtagatttgcaagtcttaggttaaataatccacgcgatcgaggacggttttttgaactagagtttactgtgggctttgtaattaaagcgaatactaatacatcacttaaaaaggaggcgatatttagtggctttagtattgaagctgatatgattagaaaatggacaggtattacaaataaacaagaagatttattactgcaaaatagtggtagttcgtttccatctaatgctgatgatgatttgaaattatttgaaattccattggaaaatataggttttttatatctagcttatagtttaaatttgcatactgatattgatagtatgagttctggcgtaaaacttacaccacaattgggtgcacacttttttgagtgtaaaaatattagtttgttgctaaaagaaattaggaaaatatatgcattactttctttcttttggggagacgattttacaataaataatttaaaaatcaccttgccacatgtaagaggtggtggtgcttcgggttactacgcaagtaattatataactaacaataaaatgtctccaatattgccgttagggtttgatgtaaggagtcgctataattcttacgaaggtttgccattagatctatttcagaaatattataatttagaggatagtaaagttgaatattttattaaatatcttcgctataaaagaatgaaatcaaatgaaaaaatatttaattaa

SEQ ID NO: 53989 - DNA, 1023 bp, Acinetobacter baumannii
atgaatcgctatgaagaagtattggagcagcttaagagcaatcctaaaacatggttaataacgggtgttgcgggttttatcggatcaaatctgttagaaactctattaaaattaaatcaaaaagtaattggcttagacaactttgctacaggtcatcaatataatctggatgaagtagagactttagtgagcagtgaccaatggaagaattttactttctataatagtgacattcgtaacttagaggattgtcagaaggcatgcgctaacgttgactatgttttacatcaagccgctctaggttctgttccgcgttcaattgctgatccaatattgacaaatagtgccaatattacgggttttttaaatatgctcgttgcagcaagagacgctcaagtcaaaagttttacttatgctgcgagtagctctacatatggtgatcatccggcattaccaaaagtagaagaaaatattggtaatccattatctccttatgcggtaaccaaatatgtaaatgaactttacgctgaagtttttgctcgtgcatatggttttaaatcaataggtttgcgctattttaatgtgtttggtaaacgtcaagatcctaatggagcttatgcggcagttattccaaaatggacagcagctatgattcaaggagacgatgtatttattaatggcgatggcgagaccagtcgtgatttttgttatatcgaaaatacagtacaagccaatattttagcagctgtagcaaatgatgaagctaaaaatcaagtctataatgtggcggtaggagatagaactaccctaaatgatttatttaaggctattaaatctgctttgaaagaaaatggaatttcttatgacaaagaacctggttatcgtgaatttagagctggtgatgtaaggcattctcaagcagatgtaactaaaatcaaaacattactaggatatgatccaaaatttagaatttttgaaggtatctcacaatcaatggtctggtataagcatttcttaaattaa

SEQ ID NO: 53990 - DNA, 165 bp, Acinetobacter baumannii
atggataaaaaggatggcgatttaagttttgaaagttttaaaaatacaaataaaccaaatttctttggtgatattgagtatatttactcaatttttaaaattaaagaactccccgtagatttgctttttaagattctaaatttagttttcctgatttccttataa

SEQ ID NO: 53991 - DNA, 558 bp, Acinetobacter baumannii
atgatcgattttgttaaagaactatctgcctgccgtgttgagggaacaaaacttcctttttatcctgaaaaagtacaaggttatactgagaaagaggtagagttgattgctaaaaatcttaatcttgatatacatggacaatttagagaatttcttcttcaaatggggaggtgttctgggggattaatatggagtgatgagttctatatgtataaaaatttatggaacccaaacaagtttagacatgctcaacaatctgaaaaagaagatttgggttatatattaacaagtaaaggtaaactagatcctgttgatatgaaaatgttttacttatcaagagagtatgagacatatttttactatctattaactgctgaaaatgatgactttatatggtcattacatgatgctgacgactgtgtattagaaaaaacaaatataactttattagagtatttaaaagattatgtttttgaaaaaaataaaagaaatcgatttgtagattttggtttaacagaagaacaaattaatagatctattacaggtcgtttgttatag

SEQ ID NO: 53992 - DNA, 471 bp, Acinetobacter baumannii
  misc_feature (24)..(25): n is a, c, g, or t
atgatgaccgtggccgttcaggcnngtcgcagccgttatgatgacgacgatgaagatgatgaccgtggccgttcaggtggccgaggccgtggtcgcagccgtcgtgacgatgacgacgaagatgatgatcgtggccgttcaggtggccgaggccgtggtcgcagccgttatgatgacgacgatgaagatgatgaccgtggccgttcaggtggccgaggccgtggtcgcagccgtcgtgatgatgatgacgaagatgatgatcgcggtcgttcaggtggtcgaggccgtggccgcagtcgttatgatgatgacgatgaagatgatgatcgtggtcgttcaggtggccgaggccgtggtcgcagccgtcgtgatgacgatgacgacgatgatgaccgccgtggccgttcagatggtcgtggccagaactctcgtaatcaaaaacgcgatgcttatggacgctttacgtcttaa

SEQ ID NO: 53993 - DNA, 135 bp, Acinetobacter baumannii
atgaacactcaaactccatttatcaataagcgaatcaaagccgtgtttacagttggcgaattaatcggatttgtaattgccctgcttttcattattgctttggcagttttcgcaggctttacggctgctcaataa

SEQ ID NO: 53994 - DNA, 219 bp, Acinetobacter baumannii
atggaaattgaacgtaatcaaatcaaaaaagccgaaggcacttggtctttagaaatatgggctgaatgcccgcattgcaaagaagacgttgactttacctgtagtgctgattttttcgaaggtttcaaatttgaaactatcgggcctgttactgattgggaatgcgtttgtcctaattgtaatggtgacgttttacttaacgtagaggcagggctttga

SEQ ID NO: 53995 - DNA, 261 bp, Acinetobacter baumannii
atggaaattaacggcaaaacagttccatttaccgcgacccactaccattggcattcacgcgagtttttaaggataggtaaacatggttacgctcaatgccttatcaatggcaagcactgggttgattgcggcaatttgacaaatgcccaattggttgcgggtgaacacagaacaattatgaagttgttcaaaacaggcttgtcacgtgacatatgcaatatgcgccttttcttcattggttcaacatatcggattgggtga

SEQ ID NO: 53996 - DNA, 879 bp, Acinetobacter baumannii
ttgggaaaattaacttttaaaaggcattatttattttatatttctgctctgtatcttctgtctgcatcagtaggggattttgattttgactatggattttatcaacttttaagatttgtggcttttttcagttttggattcgcctcttttgctgcttacgtacataagcagcaaattacgccttttatattgggtttgattgctatcgtttttaatccatttttgcctatttatcttgagcgagaaacgtggcaattagtagatgctatgagcggaattctcttaattgtatgggctgctacatcttttaaagatgccttatattccttttttaacagagctattaagaaaaataaaaaagcctctattgctgttttatctgttgttgcggttgcattccttctgattttagtaggatggccttttgtccataaagtagaagaacctgccgccgccagctcagagtacttgtattctgaccctctcgcggttgatcatcaggaaccaaagcagcaaagtgaagtgtttgaatccgttatggaatctgatgatgcttctaatgctgtgctaactgaacatagtagtgacaaacccaatatcgattacttagctttaataaccacaactaccgaaggtttgacaattggagaagcccaacaaatcaataaaagacgaagagaactgggtctccctgctttacaagaaaaaactaatgagggagccccaccgcctaaccttgaaaggccttttaagtccgaacagatcaataatctttatcaaagctcccttaataaaaccgaacaagagattgaagacccgaaattagatgaagaaggcgaagagctttcagatgcatcatctgaagcgattagtcaataa

SEQ ID NO: 53997 - DNA, 1833 bp, Acinetobacter baumannii
atgacagttcaggtatcggatcggttaagtcaactatatgttgggaatgggattaatacgcgatttgattttacatttcgagcttttgagcaagaagatgaaacaggcataggtgtacgcgtaaaagttggtaatgattttgaatttattgatgagtctgaatatgctgttactcttaatccagataatttaggcggatatgtaacctttgttgaaccacctagtgcagttacctttttttatatcgcaggcaaaactcctgtagatcagcttcttgacattactaattatgacaatttctatcctgatgccattgaacgagcattggataagctgacagcaattttacaagaatggaaacacttagttgattttgaaactcaagcacgtaatttagctgacatcgattatgatgaactggcaaaacaacgtgaagcagatttaaaatcatatattgacggtattgcaagtgcggttatcggtaatcccgtaatagggttgccttcaaaatatgttgttgaagaaaacggaaggactcagcgtgaaattaataatcaatatttgcatctaactgactttaaacatcttgctatagttggcttagcggacgggtatgattggtctgatgcaattattgcagctgaagctgaggcatatagcagaaacatggggttaaatatcccaagcggtatttacggttattcaaaaaatataacatttcgtgttcatgtctttggtcaaggtcaacacaatacacaactcaaaaaactcgcacctgcaacaatcactcttctgaatggatcattgcgtgatattacgattggggtaaaaacaccagaggagcttctacccggcgatacaagtgatggtttagtggctgatggtttagatcgaaaatatattgaaaatgttcttgttaattgccacggaggtcgcggctttgtttataaaagaggtaacttgtcacgcttctttctgcgaagtcgtggaaatcttaagcaaggaattttctttgctaaagagccacttactggcgacaataaatgtgttgagttttggtttgaatccactggtaactgggagaatggttttgaaattgaagattcaacgaatcaaagggatgtaagtggacaacaccgtggatacttaatagcacaaaataacggcaggtcaaataagcccgatgcgaactttgatgcagttttcacaggaattggaaatgatatcactgtttatacagaatatggctacggaacatggcataaatctggattaaaagcatctcgtattttttatcaaaatatgagtcaccctcagtttagagatgaagcaaatagaacaaatatcgtctcattcgccgatagcgcgctcggaagtcgtaccactttgtatgaaatttttaatactatagaaattcaaaatgccaaaatggtcgggcagctagttttaacccagatcggagataggaaattttcacttgattgtacaggctctactgctgatcaagatttaattattggcgataagctaatacttaaaaagggcacaatggagtatttaagagcttataacatcggagcaacactgaattttgggtcagttcctgctaattcaagtgttgaacgtcctatcccaattggagtgtcattagcaaactcaagagttaatgttactgcaactccatctactccattaccagatggtctcttatacaattactttgtgaaaccagacgacttatcaaatgtaactgtccgagtcagaaatgtaactggttcggccattaatgcaggcggggatattatctggcaagcgttagtatatctaagataa

SEQ ID NO: 53998 - DNA, 264 bp, Acinetobacter baumannii
atggcaaataatcagcaggatgatcatcgagtcgtaaaaatagggtgtgcctctgggttttggggagataccaatactgccgcttttcagttagtgcatttgaccgatattaattatttggtttttgattatttgtccgagattaccatgtcgattatggcaaaagcgaagatggtagaaccgaaacatggttacgctttagattttgtcagccgagtcatggcacccttactaaaaaaattgctgaaaaaaagattaaagtga

SEQ ID NO: 53999 - DNA, 1395 bp, Acinetobacter baumannii
atgacagctagaccattcatcccgcacgattaccaacattctattatcaatcacattcttgataatgatcgttgtgcggtttttgcgggaatgggcacaggtaaaacatcttctaccctcaccgctttagaaattcttgaaatgttcgagccggggcctgcgcttgtagttgcgcctttgcgcgttgctgctaccacttggcctgatgaggctaagaaatggcagcacctacaaaattttaaagtcgttgcgattgtcggttcacctgaagaccgcgtacgcgctttaaaacagaaagccaacgtctacaccattaactatgaaaatttaccatggttaattgattttctaggcggtaaatggcctttctcaaaagtggttgcagatgaaagcaccaagttaaaaggttttcgtttaagacaaggttcggttcgtgctcgcgccttaggtaaagttgcgcatactcgagtcaaaagattcattgaattaacgggaacccctgcgcccaacgggcttaaagacctatggggtcaactctggtttatcgaccgtggtcaaagattaggcacaagtttcggcgcatttactgctcgttggttccaacaagtacaagtaggcgcagaccgtaatgctgtaaatcttgtgccgtttgaacatagtcaaagcgaaattcaagcgcgaattaaagacgtgtgtttgagcattgaagccaaagactactttgatattaaagagccgatctttcgcccgatcgagatagagcttacaggcaaagccctaaagacctatgaagagatggaaaaggaaatgttcattgagcttgcagaaacaattgaagttgaagcattcaatgcagcatcaaaaacaatgaaatgtttgcagattgcaagcggctctatttataccgatgaaaacggcacttggcacccaatccatgatttaaaaattcaggcgcttgaatcggtaattgaagaagcggcaggcatgcctgtattggttgcataccattttaaaagcgaccttgagcgtttattaaaggcatttccaaaaggtcgtcatttagataaaaacccgcaaacaattcacgattggaacgcaggcaaaatccctgtgctatttgctcatcctgcgagcgcaggccacgggctgaatttacaagacggtggaaacatccttgtgttcttttctcactggtgggatttagaacagtaccaacagattatcgaacgtattggaccaacgcgccaagcgcaagcgggctatgaccgccctgtttatatctaccacatcatcgctaaaaacacgatggatgaaattgttatggaacgccgtgagtctaaacgcgaagtacaagatttattaatggaggctatgaaaaagcgatgcgaagtttaa

SEQ ID NO: 54000 - DNA, 258 bp, Acinetobacter baumannii
atggctaaacggatgaaaacaccgcccccaaaaggagggaaaaaagttcgcgattggataggtaaaagagtagtaaatattcgtgatttcgaaagctattctcaaaaaatgcctgccaactctcacggtacagttactgatgcgggtaatggttgtggattaagaattacctttgataaatgcgaatgctgcggtttacaagcaatttttacaggtgtcgatagccgagacctacaagagattgaggcaactagatga

SEQ ID NO: 54001 - DNA, 270 bp, Acinetobacter baumannii
atgcgcgaatcagtaattgaaaaacgtctagtgcaatgtgttgaagcactaggcggtgaagtacgcaaagttaaatggattggtcgcaactctgcccccgaccgtattgtgatgctaccagacaatactttttgggcagaactaaaagcaccaaaccaaaagccaacagcagcacaagcccgtgagcatgaacgcatgcgcaagatgggtcaacgagttgaagtcatagacagcttagagcgaattgaggagttactacaaaatggctaa

SEQ ID NO: 54002 - DNA, 168 bp, Acinetobacter baumannii
atggttgaacaagataacgagccaagttggcaagaaatggataaggctattcgcattttagaaaacgcgcttgacgatattgggtatttaccaacaaacgcaacgatggaagccctttatttagaacttagaaaggtagcccttgaacatgcgcgaatcagtaattga

SEQ ID NO: 54003 - DNA, 483 bp, Acinetobacter baumannii
atggaccaatcggaattaaagaacaaatttgtttatgaacctgatactggaatgctaagacaaacagcagcgggtcgtaaggattacccatggagaaacacaggctttcagggtcgctatttagctcatacacataaaggtaaaacaatttatttacaccatgctgtttggttatatcaccacggatacattccaaaaatgcttgaccatattaatggtaatgggcacgacaaccgcatagaaaacttacgcgaatgcgatggtactcaaaatcagtttaatactccgatgaaggccaataatcgttcgggagcaaaaggagttgtttttcataaaggtgtggtaaacaaaccatggcaagcaaaaatttcatgtaaaggtaaaagaatcagccttggatactttgccactaaagagcaagcggctcaagcatacgcaacggcagcaaataaatacgcaggcgcatttgcgcgaatcagttag

SEQ ID NO: 54004 - DNA, 348 bp, Acinetobacter baumannii
ttggcagcatcaggtcgctacagccgattggcagcatcaggtgacgacagccaattggcagcatcaggttacgacagccgattggcagcatcaggttacaacagccgattggcagcatcaggtgacgacagccaattggcagcatcaggtgaaaactcaatcgtagcttgttccggattagattcaacgttcaacgttggtaaaggcggatgcgtggctatcgcatatcgagatgcgcaagacaaagtacgttttgccgtagcttacgaaggtgaaaacgttaaagcggacacttggtatcgagtaaatgcagaaggcgaatttattgaagtagaggcgcagtcatga

SEQ ID NO: 54005 - DNA, 1350 bp, Acinetobacter baumannii
atgaaccaaagtaatatcgctgttgaaaggacacaaaagaaaatcaatgcatatgcatggtatgtggtcatactttgtatgttggcctatatattttcatttattgaccgtcaaattctggccttgatgattgaacccatcaaagcagaccttcaactttcagatactcaatttagcttgttacatggccttgccttttcactattctatgctgtgatgggcttaccattagcctatattgctgatcgtttttcccgaccaaaactgatttcaatcgggattattgtctggagcttagcaacagcaacttgcggtttaagtaaaaactttattcaactattcctaagccgtatggctgtgggcgttggtgaagcagctttatctccagcggcctattcaatgtttagtgacatgtttagtaaagacaaactaggccgcgcggtcgggatctattcaattggtgctttcttaggtggaggtatcgcctttttagttggcggttatgtgattaacctgcttaaaggcgtgacactcattgaagttcctttattaggtgcactcaaggcatggcaaattgcctttttagtggtggggttacccggcattattattggtttgctatttattttgacagttaaagatcctgcacgtaaaggacagcagctcaaccaaagcggacaagttgaccaagttaaattcacgcagtgccttcagtttatcaagaaacatgcaaaaacttttgcttgtcactatttaggttttaccttttatgcaatggcactctacagtctgactagttggacaccagcattttatattcgtaagtttcaactcgcgccgactgaaacaggctatatgctcggcactatattgctagttgcaaatactttaggcgtgttttgtgcaggatggctaaacgactggtttattaaaaaaggacgccaagatgcaccgatgttcacgggtgtgattggtattgttggcctgattattccaattgcatttttcacccaaacagatcaactctggctttcagtaactttgctcattcctgcaatgttctttgcctccttcccacttgtgatttcggcaacagcattgcaaatgttagcacccaaccaatttagagcacgcctttctgccctattccttttggtaagtaacttaattggactaggtgttggtacaacattagtggcaattattacagataaggtttttggcaatccattaatggtgggttcttctttatctattgtgggtggtttgtcctgtgtactggctttggctctactttttaaaggctgtaaatcctttagtgaaagcatgaagcttgaaaaattacgttaa

SEQ ID NO: 54006 - DNA, 717 bp, Acinetobacter baumannii
atgacaagttacgccaatttattaaaaccattacatttgggcttcacaaccattaaaaaccgtgtggtcatgggatctatgcatacgggattagaagaccgcttttttaattacccaaaactggcagcttattttgaagagcgtgccaaaggtggagttggtttgattgtgactggcggtatttctccgaaccgtcaaggatggttggctccggctggcggaaccatgaatagtttatttgatattccgcagcaccgtttggtgactcatgccgtccataaacatggttcaaaaattttgatgcaaattttgcatgcaggacgctatggttaccagccatttgtagtgtcttcgagtgcaataaaatcaccaatttcaccatttaaaccacgtcaactttctgaaaaaaatattctcagtacaattgaagattatgcacagtgtgccgacattgccaaaaaggcaggctacgacggcgttgaaattatggggtcggaaggatatctgattaaccagtttttaagtcgccatgtaaaccagcgtacagaccgttggggcggtgaaattgaaaaccgtatgcgttttcctgttgaaattgtcaaagcgatccgcgcaaaagttggcgaaaatttattatctgtttccgtttatcgctgcttgaccttgtgcatgacggtaacactatgcaagaagtggttacggttgcgaaagctttag

SEQ ID NO: 54007 - DNA, 1809 bp, Acinetobacter baumannii
atgcacgtgaataattcccaactcaatattagtgaagataaaaagcatatctttattgaggttgctgttgatgaaggtagccaatttaaatttggtcaaactaaattcttaggtgatgcactttataagcctgaagaattacaagcattaaaaatttataaagatggtgatacctattcacaagaaaaagtaaatgcagttaagcaattacttttacgtaagtatggtaatgcaggttattactttgcagatgtaaatattgtgccgcagattaataatgaaactggcgttgttgacttaaattattatgtgaatccaggtcaacaagttaccgtacgtcgtattaattttactggtaatagcaaaacttctgatgaagtattacgtcgtgaaatgcgtcagatggaaggtgcattagcgagcaatgaaaaaattgacttatctaaagttcgtttagagcgtacaggtttctttaaaacagttgatattaaacctgctcgtattccaaactctccagaccaagttgacttaaacgtgaatgttgaagaacaacattcaggtactactacattagcggtcggttattcgcaaagtggtggtattacgttccaagcaggacttagtcaaactaactttatgggtacaggtaaccgagttgcaattgacttatctcgttctgaaactcaagactattacaacttaagtgttactgacccttactttacaattgatggagtaagccgcggttataatgtctattatcgtaaaacgaagctgaatgatgactataacgttaataactatgtaacggatagtttcggtggtagtttaagttttggttacccaattgacgaaaatcaaagtttaagtgcttcggtgggcgttgataacactaaagtaaccacaggtccttatgtttctacatatgtacgtgattacttattggcaaatggcggtaaggcaactggtaagtcatcttggtgtccaagtggtaagaataaaacagatcctaacacgcaacaaccaatacctgatacatgtgaaggcggttttgaagactataatagtgcttttgagggtgaattttttacctataacttaaacttgggctggtcttataacacattaaacagaccaattttcccaacatctggtatgtctcaccgtgtaggtcttgaaattggtttaccaggtagcgatgttgattatcaaaaagtaacttatgatactcaagcatttttccctatcggcagtaccggctttgtacttcgtggttatggtaagttaggctatggtaatgatttgccattctataaaaacttctatgcgggtggttacggttctgtgcgtggctatgacaacagtaccttgggacctaaatatgcgagtgtaaatctacaagaaactaaacaaaatgatggttcaccggaagaagtgggcggtaatgctctggtccaatttggtacagagttagttttaccaatgccatttaaaggtgactggactcgacaagtacgtcctgttctttttgctgaaggcggtcaggtttttgatactaaatgtaatattgataactctgtttatggcaacaaaggtatgaagattaatggccagaccattacggatgttagaaaatattgtgaagataattatggatttgatttaggtaacttacgttatagtgtgggtgttggtgtaacctggattaccatgattggtccattgtcacttagctatgcattcccgttaaatgataaaccgggtgatgaaactaaagaaatccagtttgaaattggtcgtactttctaa

SEQ ID NO: 54008 - DNA, 555 bp, Acinetobacter baumannii
atgccaaatttagctcttccaacacgtgccttatatgttgtaaataaagcgattgatctgttccatcaccgtggttttcaccttattggcgtcgacagaatcgtgaaagaatcagagattacaaaagcgactttttataattactttcactctaaagaacggcttattgaaatctgccttatggtgcaaaaagaaaagctccaagagcaagtagtagcaatggtggaatatgaccaagactcaagcgtgagagacaaactcaacaaattgtattatttacatactgacttagaaggacagtattacctgttatttaaagccatttttgaaactaaaaatacctactccaacgcatatcaaactgctattagatatagaacttggctgaccaatgaaatctatagccagcttagatcgttaaaagcagattcttcatttcacgatgccaaactacttctgcatgtaattgaaggaactattattcaaaggctcagttataacgatgtagatgagcgggataagcaattcgaatatttcatagcaatgctttcgtag

SEQ ID NO: 54009 - DNA, 1686 bp, Acinetobacter baumannii
gtgattgaatatttatatagacaaattttagaagatagaataaaaatactaggaaaatataatagcgaagatataattcacactcagttttcattaataaattatttataccatcaaatattaaaacatacagacaccataaaagagaaagaatataaatattttgaaaatcttatgaatgcaaaatcagaatattttaatggagatgatttagataaacatattgaagagctatcaaaagttttttatatgactttaatgatatcttcatatgaaaataattggtttaacaaaaaatctcatgaggcaataataccttatgaaatattcaataaaaataaagaaaaaaataaattagatgaagaaataaaaatatctgaagaacttgtttttaatacaggattttgggatataacagaagatatagattttaaattacgtttctttaaagatgaaatagttatagaaaatggtaaaatttattataccaataaaatatgggaggaattaggtaattatgcattaattgcaaaaataagacaacaaagaatgctggctcaaaaaactttcgaagcaagtgcaattttatataattttggattaaaagattcagttaaacttaactatttaagtcttcaagcacaatttgaagatttatattacgttgatatcgaaaaggataatattcaatacaaaaatctaactcttaaagaatggattaaatcattattagcatttaaagaaattgtaaaaaatgagggttttaatttaataagttttgatcaattttttaaggtattacaaaaacatggaattcctacttctaaaaatagaattgtattagaaaattttacttttagatcgaatagtaaagatttatataataaccctattttaagattctcaaataatcaaatactaatattcccactaactatgctttaccctgatatcattactattcttaactctatactttcagaaaataatttagcaatcaaagataaaggttacgactttgaaaattatgtttttaattatcttttagaaaaatctgctcatcttgataactttaatgttacacaaccaaaatttaagaacaaagatggagaatttcagtatgatgtattaattgaatgggaaaactatatttttataattgaatgtaagaatagatctatccccaacacaacagcaatgtctcttaaagattttcgagaaaaatctaatgaatatattaaacaaattttgcgattaaaagaagggttattaaatcatcctaggcaacacaacattaaccttaataataaaatcattgtacccattttattgaactcattacctttttcattagattattcaatttcagatatctactttttagatttgtcatgtttttcagcttttttcaataataaaaacttatatttgcaatcatcttttcaaggaaaaattcaaaaagagcgtatagttcatactaattggtcatcagacaaaccttctgtcgatgattttttgaattttataaaatctccattccatgttagccagctcaaatcatgccttagagaacatattacttttcatacaattggaaattatgaaattgcattagaaagaaaatactttgatcttcattctgaagaatatgagaaaatattagaagttaaaaaaaatatgcactga

SEQ ID NO: 54010 - DNA, 549 bp, Acinetobacter baumannii
atgtcaaacaagactaagttattcgttgtttgttcaacattagccgccgcttttggcggcttagttatttatgggcctagtgatcaacaagttcaagcaacggccataaaagaggggtatacagcgaagcctacgattccggtaaaaggtgaccgaccaacgattggtaatggtacaactttttacccggatggccgcgccgtaaaaatgacggatccagcaattacacgaaagcaagcttttgaatatctcaagttcacaatgaataaggatgcaaaagcatttaataaaacgttgctgaacattcccatatctcaaactgaatacgacctttaccttgatttttcttatcagtacggtgtgccaacatttgcaaaatcttcaatgcttaagcatttaaaagctgggcagtacaaagcagcttgtgactcattacttaaatataagtacgttgcaaaacgtgattgttcgattcgtaaaaatggctgctatggggtttggaccagacagcttgaacgacatgccaaatgtatgggagctaattcatga

SEQ ID NO: 54011 - DNA, 636 bp, Acinetobacter baumannii
atgtcgctcccctggaaatcgatcgacagcctcggaagcatcgaaacaacaccggaagcaaaagtggacgaccaaagcgataatcttagcggatcggcatatcgaaatttcctcgcagttttgccgatctctgatggagtggtgacaatcagagcgatgtcggatgaggacgcagaagcctacgccgccggaacgggcgatgctctggtcaggcgcttcgctcacctgccgttggagaaatattcgccgcagattgttcgtgagctcatccacagcgtgattggagctggattgcgcgatggaactttggctgtcctgacgatcgccgattcaagctcggattcgttccttggaagcctagtgttctttgacatcaatcaggatgatgccgagattggctattgggtcgctcctgagcatcgcggccgaaaagtatcgggccgggcgctcgcgctggctttgcaaatttctcgcatcctgggtctgaaaaggcttcgtgctcgaacggttcaggacaatcctgcttccgagagggttcttctaaatgcaggatttaaacaggagggcgaagcgcggccggagattgttccctccggcaaaaccgaaatgagcgtgagctatctcattgaagtgtga

SEQ ID NO: 54012 - DNA, 501 bp, Acinetobacter baumannii
atgcactatcaggtcgacgtgttcgacatcctcttcggtaaagagccatcgcccttgctggaccggtgtaacgctctgatccgaagctggcgcgccactggccggcccgtgctgttccccaacttttcgctcggcgaagagtatgaacatgcgccgccggcgacgaatcgccaaatctcaccgtatctcccgagcggacgatttcgcaccggtctgcccgtcgaagggcttgcgatcgaacggggcgaccttttctatgcatgtccgcgagccagcgtcttttatggcacggcgctcgacgccgaccttcggacgcgcggcgtaagcacgcttgtcatggccgggataagcaccaccggcgttgttctttcaagcgtcgcctgggctagtgatgcggactacgacgtgcgtttggtccaggactgctgctacgacccggatcgggatgcccacgaagctctgttgcgttccgggttcggcggacgtgtacaggtcgtgtaa

SEQ ID NO: 54013 - DNA, 885 bp, Acinetobacter baumannii
atgtcattacgcacgcccgatttattgttcacagcgatagcacctgccatttggggcagcacctacattgtcaccacccaatacctgccgaacttctcaccgatgacggtcgcgatgctgcgggcgttgccggcgggtttattgctcgtgatgatcgtccgacagattccaacgggaatctggtggatgcgcatcttcatcctcggcgcacttaatatttcgctattctggagcttgttgtttatttcggtctaccgcctgccgggcggggtcgcggcgacggtaggcgctgtgcagccgctgatggtcgtgttcatctctgccgctctgctaggtagcccgatacgattgatggcggtcctgggggctatttgcggaactgcgggcgtggcgctgttggtgttgacaccaaacgcagcgctagatcctgtcggcgtcgcagcgggcctggcgggggcggtttccatggcgttcggaaccgtgctgacccgcaagtggcaacctcccgtgcctctgctcacctttaccgcctggcaactggcggccggaggacttctgctcgttccagtagctttagtgtttgatccgccaatcccgatgcctacaggaaccaatgttctcggcctggcgtggctcggcctgatcggagcgggtttaacctacttcctttggttccgggggatctcgcgactcgaacctacagttgtttccttactgggctttctcagcccggggaccgccgtgttgctaggatggttgttcttggatcagacgctgagtgcgcttcaaatcatcggcgtcctgctcgtgatcgggagtatctggctgggccaacgttccaaccgcactcctagggcgcgtatagcttgccggaagtcgccttga

SEQ ID NO: 54014 - DNA, 1275 bp, Acinetobacter baumannii
atgtccaccaacttatcagtgataaagaatccgcgcgttcaatcggaccagcggaggctggtccggaggccagacgtgaaacccaacagacccctgatcgtaattctgagcactgtcgcgctcgacgctgtcggcatcggcctgattatgccggtgctgccgggcctcctgcgcgatctggttcactcgaacgacgtcaccgcccactatggcattctgctggcgctgtatgcgttggtgcaatttgcctgcgcacctgtgctgggcgcgctgtcggatcgtttcgggcggcggccaatcttgctcgtctcgctggccggcgccactgtcgactacgccatcatggcgacagcgcctttcctttgggttctctatatcgggcggatcgtggccggcatcaccggggcgactggggcggtagccggcgcttatattgccgatatcactgatggcgatgagcgcgcgcggctcttcggcttcatgagcgcctgtttcgggttcgggatggtcgcgggacctgtgctcggtgggctgatgggcggtttctccccccacgctccgttcttcgccgcggcagccttgaacggcctcaatttcctgacgggctgtttccttttgccggagtcgcacaaaggcgaacgccggccgttacgccgggaggctctcaacccgctcgcttcgttccggtgggcccggggcatgaccgtcgtcgccgccctgatggcggtcttcttcatcatgcaacttgtcggacaggtgccggccgcgctttgggtcattttcggcgaggatcgctttcactgggacgcgaccacgatcggcatttcgcttgccgcatttggcattctgcattcactcgcccaggcaatgatcaccggccctgtagccgcccggctcggcgaaaggcgggcactcatgctcggaatgattgccgacggcacaggctacatcctgcttgccttcgcgacacggggatggatggcgttcccgatcatggtcctgcttgcttcgggtggcatcggaatgccggcgctgcaagcaatgttgtccaggcaggtggatgaggaacgtcaggggcagctgcaaggctcactggcggcgctcaccagcctgacctcgatcgtcggacccctcctcttcacggcgatctatgcggcttctataacaacgtggaacgggtgggcatggattgcaggcgctgccctctacttgctctgcctgccggcgctgcgtcgcgggctttggagcggcgcagggcaacgagccgatcgctga

SEQ ID NO: 54015 - DNA, 678 bp, Acinetobacter baumannii
atgtttatcagtgataaagtgtcaagcatgacaaagttgcagccgaatacagtgatccgtgccgccctggacctgttgaacgaggtcggcgtagacggtctgacgacacgcaaactggcggaacggttgggggttcagcagccggcgctttactggcacttcaggaacaagcgggcgctgctcgacgcactggccgaagccatgctggcggagaatcatacgcattcggtgccgagagccgacgacgactggcgctcatttctgatcgggaatgcccgcagcttcaggcaggcgctgctcgcctaccgcgatggcgcgcgcatccatgccggcacgcgaccgggcgcaccgcagatggaaacggccgacgcgcagcttcgcttcctctgcgaggcgggtttttcggccggggacgccgtcaatgcgctgatgacaatcagctacttcactgttggggccgtgcttgaggagcaggccggcgacagcgatgccggcgagcgcggcggcaccgttgaacaggctccgctctcgccgctgttgcgggccgcgatagacgccttcgacgaagccggtccggacgcagcgttcgagcagggactcgcggtgattgtcgatggattggcgaaaaggaggctcgttgtcaggaacgttgaaggaccgagaaagggtgacgattga

SEQ ID NO: 54016 - DNA, 174 bp, Acinetobacter baumannii
atgcatcttagatttaatgaacttacaactgttttatgtattgccgccaatgcgattataattcttggaatccttatcataagaaaaggacgacatattggtattggtcaagcatttattttcactggacttatccttaatacaaattgctttgtttttgctttaaaggcctaa

SEQ ID NO: 54017 - DNA, 5100 bp, Acinetobacter baumannii
atgcaaaacatacttacttttattaaaaatggtcaaaaatttactttagatgcaagcaatattaaaagtgtaagagatacgggaaatggttttgaaatcactcttaaaagtggtgagataattcaagctgagtcctatagtgttactcctaatactcagccagtggagcaagtttctagtcagcaagtagaaaataattctgaagctgatgaggaatttgaaaaagaagaagttttaaaagaaaagagtttattggattcacaaacaatgttatggggtggtgctgcgatcgcacttggtggtattgcgatagcagcatcaggtagtggtggttcagcaccttctgatcaaactcctccagcaagtttaactaaaatactgtctaaagatggtaaagctgtaagtggtttaacagaagctggagcaactgttatagttgaaaattcggctggaaaagtaatcggttctgccaaagcaggagcagatgggacatatttaattaatttagataaagcctatattaatggtgaaatactaaaagtttctgctcaagatactgccggtaatagtacagttaaacaagagcttatcgcttctgatattacagctcctactttaacacatgctatttcttctaacggtaaaactattacaggtttgacagaggctaattcaactgtcaccgttaaagattcatctggaaaaatcattggaactgcaaagtctgataatgatggaaaatatacagtcatactggataaagcttatttaaatggtgaaaatcttactatttctgccgaagatttagttggtaataaatcaacaattcaaacaattttggctgacgataaaactgcgccaataggtttaacagttgcaattgatacagcgggtaaagtagttaaaggtgtaactgaagccaatgctgttgtgacagttaagaatgctgcaggaattgtagttggtacagctacggctgataccgcaggtaaatactcgattacactagataaagtatatttaaatggtgaaagcttaagcgctactgcatcagatcaatctggtaatgctacagcaccaaaaaccattatcgcaccagataccacggcaccatcaagtttaactgcaagtattggtactgcgggtaaagtagttacaggtgtaactgaagccaatgctgttgtgacagttaagaatgctgcaggaattgtagttggtacagctacggctgataccgcaggtaaatactcgattacactagataaagtatatttaaatggtgaaagcttaagcgctactgcatcagatcaatctggtaatgctacagcaccaaaaaccattatcgcaccagataccacggcaccatcaagtttaactgcaagtattggtactgcgggtaaagtagttacaggtgtaactgaagccaatgctgttgtgacagttaagaatgctgcaggaattgtagttggtacagctacggctgatgccacaggtaaatattcagttaccctaaataaagcttacttgaatggtgaaagcttaaatgtaacggctgcggataaagcgggtaatgctaccgtaccaaaaacaattgttgcaccggataccacagcaccatcaagtctgactgcaacgattgatgccgcaggtaaagcaattacaggtgtgactgaggccaatgcaacagtaacagttaagaacgtggtaggaaccatagtgggtacaggtacagctgatgccacaggtaaatattcagttaccctagataaaatttatctaaatggcgaaagcttaagtgcaatagcggcagataaagcgggtaatactacagccgcgacaacaattattgcatcggataccacggcaccttcaagtttaattgcaacgattgatgcttcaggtaaagtcgttacgggcgtaaccgaagcgaatgctgttgtaacagttaaaaatacagcaggaaccgtagtgggtacaggtacagctgatgccacaggtaaatattcaattacgctagataaagcttatctaaatggtgaaagcttaaatgctattgcagcagataaagtaggtaatactacaacaccaaaaacaattattgcaccggataccacggcaccttcaagtttaattgcaacgattgatgccgcaggtaaagtggttgcaggtgtaacggaagcagatgcaagagtaacagtagaacaagtaactgctgtttataaagaagtaacggttttagaaacccaatttattctaagtgagtcagtacagacaaattatttatcgaagacatattattttgaagttacaggtacaaatgcacatgtttctttaaatttgagttcctcgactaattcactttctggtagttatagttcaattctttctggagcgagtttaaatacaagactaactggtaatgtttcccaagctggagacggcaattacagtattgatttagcacaaggttcggtattaccgcctggaacctatactttgacagtaaattattctagttcaatggtccccgttataaacgtaaatgtaacgcaagaagtgccaaaaactattttagaagtagaccattacgaaacaaaagtcgtaggtgcagctaatgcagatgaggcaggaaattattccataactcttgataaagcttacttaaatggcgaaagcttaagtgtaacggcagcagatcaatcggataataaaactgaagtgaaagaggttattgcaccagatagtacgccaccaattttgcatcaaccaactattcaaggtggatggactgaagggcaatcagtacaaggtacaactgaagcaaatgccacaataattgttaaaaatactgcaggtgatgtaatcggttcggcaatagctgatgcatccgggtattacaatgtaattttgaatacggtttatgaagatggtgaactattaaaagtaattgctgcggatgctaaaggtaatgaaagttcaattaatataaatacacctgatattacagcacctatattagctaatttgtttaattatgatgttagtacagataaaattatttttaatgcgccaagtgatagttatattgttgagcaaaaaattggtgatgcttgggttcaggtaaatgttgaggaaaaattcgattggttgaatacagaattcagagtaactgctaaagatctagctgggaatagctctcaaccactaaccattataattaatactgcatcgggaacttataagccaactgatcctacatttattcaaattattaaaggatctataggaaatgattatctttatggtggtaatggggatgatacattagtttctaatacaggctctgattatttgtatggtggctcaggtaatgatacgttgatttatggtggtaattccaatgtgtatacggctttacaaggtcaagctgggaatgatacttatattgtagataaagcattacttacttcatcaagctctattcatattttagataatgcagctgaagaaaatatccttcaattaaaatcagtgtcctctggtgatatttcacttaagcagtcggattcactcatcataatatcattcaatgattcagcatcgacaatacgttttggtgaggggcaattatcttctattgtatttgatgatggaacagtctggaataaagcacaaattgaagctaatactattggtaaattattaggtactgatgcagcagataatcttcaagcagatgctgagatttcaactatttatggtttgggaggcaatgatacgattcaaggtggtgtacagaatgattatctgtatggtgatgatggagacgatacattagtttctaatacaggctctgattatttgtatggtggtgcaggtaatgacacattgatttatggcggtaattccaatgtgtatacggctttacaaggtcaagctgggaatgacacttatattatagataaagcattacttacttcatcaagctatatccatattttagataatgcaactgaagaaaatacccttcaattaaaatcagtatcctctagtgatatttcacttaagcaatccgattcattaatcataatatctttcaatgattcagcatcaacaatacgttttggtaaggataatttatcttttattgtatttgatgatggaactgtttgggataaagctcaaattgaagctaatactattggtaaattattaggtactgatgcagcagataatcttcaagcagatgctgagatttcaactatttatagtttgggaggcaatgatacgattcaaggtggtgtacagaatgattatctgtatggtggtgatggagatgatacattagtttctaatacaggctctgattatttgtatggtggctcaggtaatgatacgttgatttatggtggtaattccaatgtgtatacggctttacaaggtcaagctgggaatgatacttatattgtagataaagcattacttacttcatcaagctctattcatattttagataatgcagctgaagaaaatatccttcaattaaaatcagtgtcctctggtgatatttcacttaagcagtcggatttactcatcataatatcattcaatgattcagcatcgacaatacgttttggtgagggacaattatcttctattgtatttgatgatggaactgtttgggataaagctcaaattgaacaacatattgccgaacctgtatttggcacaactgttaacgatgtaatcgagacaaacataccaaatcagagttactcttatattctaggagatggtgcagatactgtagtttttaatattctcgataatacagataatttaggtggaaatgttaagactgaatggacagattttaatcttgtagagaatgataaaattgatttttctcaactgtttataaatgacagtggagatcttcaagattatattactgtaaaagatactgaggcgggactaattatttcagttgatagagatggctctagtcaatctacgtatcattcgcaagaattaattttgcttactggtaagcactatacgttagaggatttaatggcttcaaatgcatttattcattaa

SEQ ID NO: 54018 - DNA, 462 bp, Acinetobacter baumannii
atgattactcgtgaacagtgtttgtattgggatcaggaagatgaactcaaaaaatttaaagatgaatttgcattgccagaaggcgttatttatttagatggtaactctttaggtgctagaccaaagaaatctttggctgtcgctcagcatattatttcccaagaatggggagaagatctgatcaatagctggaataaggcagactggtgggggctaccaacacggctgggtgacaaagtcgctaaactggttggtgcggaacaaggtgaagttgttatttcagattcaactacactgaacttatttaaagttttatctgcagcggtaaaaattcaggctgataaattccctgaacacaaaattattgtggcagaaaaagatgcttttccaacagatatttacattattgaaggtttcattgacttaattcaaaagggctatcaggcttatctcgtgctttag

SEQ ID NO: 54019 - DNA, 369 bp, Acinetobacter baumannii
atggaggcgttcgctgaacggttgcgagatgccgtggcattcggcgcctacatcgacggcgagatcattgggctgtcggtcttcaaacaggaggacggccccaaggacgctcacaaggcgcatctgtccggcgttttcgtggagcccgaacagcgaggccgaggggtcgccggtatgctgctgcgggcggtgatagactatggccgcgagcatgtggagcagatcatgctgacggttgcggaagggaacgaagccgctataaacctctacgaaaagcatggcttcaagacttacggcgtcgaaccgcgcgctatgaagaacggctccgagtatcgcgacgaaattctgatggcattaatcctgcgctga

SEQ ID NO: 54020 - DNA, 1149 bp, Acinetobacter baumannii
atgaatcggacgtttgaccggaaggcatacaggcaagaactgatcgacgcggggttttccgccgaggatgccgaaaccatcgcaagccgcaccgtcatgcgtgcgccccgcgaaaccttccagtccgtcggctcgatggtccagcaagctacggccaagatcgagcgcgacagcgtgcaactggctccccctgccctgcccgcgccatcggccgccgtggagcgttcgcgtcgtctcgaacaggaggcggcaggtttggcgaagtcgatgaccatcgacacgcgaggaactatgacgaccaagaagcgaaaaaccgccggcgaggacctggcaaaacaggtcagcgaggccaagcaggccgcgttgctgaaacacacgaagcagcagatcaaggaaatgcagctttccttgttcgatattgcgccgtggccggacacgatgcgagcgatgccaaacgacacggcccgctctgccctgttcaccacgcgcaacaagaaaatcccgcgcgaggcgctgcaaaacaaggtcattttccacgtcaacaaggacgtgaagatcacctacaccggcgtcgagctgcgggccgacgatgacgaactggtgtggcagcaggtgttggagtacgcgaagcgcacccctatcggcgagccgatcaccttcacgttctacgagctttgccaggacctgggctggtcgatcaatggccggtattacacgaaggccgaggaatgcctgtcgcgcctacaggcgacggcgatgggcttcacgtccgaccgcgttgggcacctggaatcggtgtcgctgctgcaccgcttccgcgtcctggaccgtggcaagaaaacgtcccgttgccaggtcctgatcgacgaggaaatcgtcgtgctgtttgctggcgaccactacacgaaattcatatgggagaagtaccgcaagctgtcgccgacggcccgacggatgttcgactatttcagctcgcaccgggagccgtacccgctcaagctggaaaccttccgcctcatgtgcggatcggattccacccgcgtgaagaagtggcgcgagcaggtcggcgaagcctgcgaagagttgcgaggcagcggcctggtggaacacgcctgggtcaatgatgacctggtgcattgcaaacgctag

SEQ ID NO: 54021 - DNA, 534 bp, Acinetobacter baumannii
atggtcgttgatatccgtagagccaaaaaacaaaaagacttaggctattcaggtgctgctgctgaagtctgtaaatatgctctcaaatttggtgatctttctgtagaaaagacttgggaagctttcaaagttttaaaaggtaagcgattaagtggtgcttttggatctctttggggcgtgaaaattcctgaatcattaattgatgatttaccagatgattctgatttaccttatctagaaatgatttataagttcgtcttttctaagaagtcttattacgatttacaacttactcgtcatgtcgaacctacaggtaaggacgccgccgacgagcttcgaggagtagaaggacgcaacctgttggtgagcatggacgggcgaggagtgagcgacgctgggagggcccgcactggcgcgcttgccccgcagcacggacgaaaaaaacaacactggcaaatcccaccagttactcgtgttcgggttcggaagcgaatccgaagatgggacggatatttatgtgttttacatttatag

SEQ ID NO: 54022 - DNA, 216 bp, Acinetobacter baumannii
atggctaacgcgaatactactgttttagaacttttaggcaaacaagtttcttttgtttatgttcttaagtctgattcagatgaatattctttcacctgttctggtgttgtgactgatgtaattattagtcttaactctgaactacagctctctgttgataatggggatttttatatttattcggatttaaaggatttctctatcaagtctgaataa

SEQ ID NO: 54023 - DNA, 318 bp, Acinetobacter baumannii
atgagcaatccatcaaaattagatacacttgttgcagaaattagtggtactgctgaatctgaatatattggtctttataagcagattccttttcgtgtaagacttcccctttttgcacgtttatcagcacttcataccattcaaaattcccataataaaactccgcgtaatgcgttgttgaatgacttacttgaaatcgccatggatcaagttatgtttaaattagatgaggaaactttggaagctctgggacatttagaagctcaatattatgaagagctttctcaatatgattctggagaactttcagatgattag

SEQ ID NO: 54024 - DNA, 174 bp, Acinetobacter baumannii
atgattagaaaaccacgaattataagtaacacctctatggaaagcctggatgaagcatgtacttactttagacaggttctccaggaacatttagataaaaagagacaaattacattttttaccattgctatggtcgatggtcgtttgaagttaattgaggggataccagaatga

SEQ ID NO: 54025 - DNA, 291 bp, Acinetobacter baumannii
atgattaagcttgaaggtacagttttaaatacataccacttagatggtgggactaataaaaagggcgaagaatatgaagctcgagataaggtccagcttctaggttcgttggagcttcccaacggacaaattaaaaatgaattaatcgaccttactgttgaagattctcgtatttatgatgatttcaaaaataagcttattagcatcagttgtggcgctatggctgttggtcgtaacgttattttttatgttcgaaaaggtgcgaaacctgttttagcagatcacctatga

SEQ ID NO: 54026 - DNA, 246 bp, Acinetobacter baumannii
atggttgcaggttttattctttatgtttgtacagttttaggctatacattaacagctattggttttattaaaaaacaagcttttttgttttcaatagttttaatttttagtttattaatctcatatctatgtattcctgaatatggagtgctaggaggaatatacactttaataggtagttatagcatacaatgtatcctgtctatatttgttatattatttttatctaaagagaaattaaaatga

SEQ ID NO: 54027 - DNA, 1014 bp, Acinetobacter baumannii
atgaaagttatgttgtttattactggtttaggcatgggaggagccgagaaagttgtttgcgaattagctgataaattatatgagttgggacatgaagtctgtattgtatattttacgggtgaaattagttcacttatttttagtgtatattcagttatgaaactagttgatcaatggaaacctgatgtaatccattcacatatgtttcatgcaaatataattgcaagattggcaaaaataagaagaaaaaatattcgtataatttgtagttcgcattctaattatgaaggtggagcattacgtatgatgatgtatgctatgactgaaaaattatgtgatgtacatacaaatgtaagttctaatgctgctactgcattaatgcatgctggagcagtaagaaaaagaaaaattaaagctgtttataatggtattaatataaaagactatcattttgatgaagtagaaaacaagtacttacataaagcgtttaacttgaaaaatgaagctaaaactatacttgcaataggaaggatagatactcctaaagattatccaaatttattaaaagctttcaaaataatttatgagatagacaatagtgttcatctatttatagctggaaatgggccaaaaaaagaagaaatcatgctattggctaataatttaggtattaatagcaatgttaaatttttaggcatacggaatgatattcctaagctattaaattcatgtgatttatttatttcatcgtctgcatgggaaggatttggactagctatattagaggcgatgatttgtaaaaaacctattgtagcaactgaaactgatggtgccaaagaattattaaataatgaaaatttggttgaaattggaaatccagagcttttggctaaaaaagctctgcaaaaacttaatagtaatttaggtttaattgaatatagtgggattgagagctttgattggaatgaaatatctaaaacttggctatctttatatgaaggaaaagatttttaa

SEQ ID NO: 54028 - DNA, 1125 bp, Acinetobacter baumannii; identical to SEQ ID NO: 50158

SEQ ID NO: 54029 - DNA, 654 bp, Acinetobacter baumannii
atgagctaccagaaactcagccgtgaccagattgcaaaacgtgtggcacaagatattcccgatggtgcctatgtgaacttgggtattggtttaccgaccaagattgccagctacctacctgctgacaaagatgtcttcctacattctgaaaatggcctgttggcttttggcccaccaccagctgcaggtgaagaagaccctgaactgattaatgcgggtaaagagtttgtgaccatgcttgaaggcggcagctttttccaccatggagactcctttgccatgatgcgtggtggtcatcttgatattgcggtgcttggggcatttcaggtggcagccaatggtgacttggcgaactggcacacgggtgcaccggatgcgattcctgccgtaggtggtgcgatggatttagcggttggtgccaagaaagtatttatcactacggaccatgtaaccaaacaaggtgagccaaagattgtcgctgagctgacttatccggtaacgggtaagcactgtgtggatcgtatttacactgacctgtgtgtgattgatgtgaccagagatggtttaaaggtgattgagaaagttgaaggtcttagctttgatgagttacaggctttaaccggtgcaactttgattgatgcgactcaagggtaa

SEQ ID NO: 54030 - DNA, 189 bp, Acinetobacter baumannii
atgagaatactaataggttttgtatttagcttcttttgtttgattattcatgctggacaaatagattgggctgttgcaaaaacttcatttccgagtgatcaaagtattggtgatactgggcatgaaaagacacctaatggttatgtagatttaatgagtggtaatctagttttacagcatccttattaa

SEQ ID NO: 54031 - DNA, 447 bp, Acinetobacter baumannii
atgaataataaaaaaattgtaatagactacttagataaaaacaatgaactctcaaaagagttaatatggggagagatgtgcaagactgatcaatactttgttagaagtattcctttctttgcgcctaaccttgcatttaatgatcttattcaggttgaaatggatgataaaacgctctattttgatgatttaataaagccatctaataattcaacattaagaattgtatttttatataacgatattaaatatattgaaaaaatattaactactttggagtctcatttatgtggttgggaggggtttgaaggtggactctattatgcaattaatatacctaaaaaggttgattatgctctaattaaaaaatgtttagatgataagagtgattttcttgattatgaggaatcatgcttgtcagataagcattcaagtgatttgttttag

SEQ ID NO: 54032 - DNA, 780 bp, Acinetobacter baumannii
atggaattgcccaatattattcaacaatttatcggaaacagcgttttagagccaaataaaattggtcagtcgccatcggatgtttattcttttaatcgaaataatgaaactttttttcttaagcgatctagcactttatatacagagaccacatacagtgtctctcgtgaagcgaaaatgttgagttggctctctgagaaattaaaggtgcctgaactcatcatgacttttcaggatgagcagtttgaattcatgatcactaaagcgatcaatgcaaaaccaatttcagcgctttttttaacagaccaagaattgcttgctatctataaggaggcactcaatctgttaaattcaattgctattattgattgtccatttatttcaaacattgatcatcggttaaaagagtcaaaattttttattgataaccaactccttgacgatatagatcaagatgattttgacactgaattatggggagaccataaaacttacctaagtctatggaatgagttaaccgagactcgtgttgaagaaagattggttttttctcatggcgatatcacggatagtaatatttttatagataaattcaatgaaatttattttttagatcttggtcgtgctgggttagcagatgaatttgtagatatatcctttgttgaacgttgcctaagagaggatgcatcggaggaaactgcgaaaatatttttaaagcatttaaaaaatgatagacctgacaaaaggaattattttttaaaacttgatgaattgaattga

SEQ ID NO: 54033 - DNA, 255 bp, Acinetobacter baumannii
atggatttagcggttggtgccaagaaagtatttatcactacggaccatgtaaccaaacaaggtgagccaaagattgtcgctgagctgacttatccagttactggtaaacattgtgttgaccgtatttacactgacctgtgtgtaattgatgtgaccagagatggtttaaaggtgattgagaaagttgaaggtcttagctttgatgagttacaggctttaaccggtgcaactttgattgatgcgactcaagggtaa

SEQ ID NO: 54034 - DNA, 162 bp, Acinetobacter baumannii; identical to SEQ ID NO: 53079

SEQ ID NO: 54035 - DNA, 438 bp, Acinetobacter baumannii
atgacttcaatgtcgaacactacccaaaagcattttattgttgagcagtttcctttaccgacttgggtcagtgatgaaaaaggcttaattttatactgcaatacggagtgtacaaagtactggcgcgatacttctcctccattgtttcaacaatggctagatttcgtgtaccctgccgatttagaagaagttaaaaacaaatggttagatgcgatacgactccgatcaagaattgaatttaaatgccgtcttttgcataaaacccattattatcgatggtgtaaaatttctattcaattgtcgaaataccatgaatcttctcaagaaaatgaatggtttattagttttctagatattgaccaagatatacaagagcagcaaagcttacgaaaagatatcgatatacaaaatcaaatgctcgatatcagggcagagtaa

SEQ ID NO: 54036 - DNA, 252 bp, Acinetobacter baumannii
atgtcatacgccgacagaacaccgatggcaaaattctttgatgcgctggcttatgaaaagaatgaagtaaaagttacgcacacaaaggataaaaagggcgtccatgattcgattcatgtgaagttaagtagtggttttgcaaaatttgaaaagaacgatcaaaaatatgaatttgtctttaatcatcaaaaacaagtgattgatcatgattgctttgaagcttttgtagaaaatttcacaattaaatcataa

SEQ ID NO: 54037 - DNA, 516 bp, Acinetobacter baumannii
atgccacaacctgatcaacaactcgaaagaaaatacatcacccacgcagaattgcacgacctattcttcgtaatcagtcagcatataggcttcactattgaagacattgaggattacgaagaagacatctttaacctaatcgagctttggcgagagcaaggttacatcgatatatacatagaagatagcgatagacgctacggcagagccaaaagtatggcttctgtacgaaattccgttccatactatctaaatatgtatcatgcccgcgttgttaaaggcgagtacgatcctttacttgttataacttttgaagataccgaccaagtacatcccgatggtcacgaaatgaaagtggcaagtattcgttttatggctattcatgatgatttatttggcgaacaagatccaagagtaaaattcaatgatgctgccatgaagcaaattcgaaagaaaattgatgcctatagaaaacaaggcgatcaatacaatcaagaaaagaaaggctcgcaataa

SEQ ID NO: 54038 - DNA, 420 bp, Acinetobacter baumannii
atgcctgttaataatgacaaaataacgactattgattgcttcccaaacgataatattagtcgagtggtttatagatatggtggacttgttagaaacgaagataacgattcaactaatccttttgttgaagtgttattaattgagattagaaaaagtgatcaatggttatttttagataagtgctcaacattccttgttcccgtacttgatcttgatgctgttcaacatggcagtatttgggatggaaatgttttaaccgatcaatcctatcggttttcaggaaaactcattacaaaacgattttctttcgacttcaccaataataaacctaagaatataaaacttacggacagaatccccaatacttctgactactacattcctttaaaaaactactctgtacacgacaaaaatagataa

SEQ ID NO: 54039 - DNA, 468 bp, Acinetobacter baumannii
atgtccgtatggctggccatgcttattggtgctggtattggtattattatcacgacgctcattttatcaaatacccgtaatggccgaatcaaggctgaatacgagcaatatattgccgagttggagcttgagcatcaacaagcccttgcccaagcacaaaagagaagtgtgaatacgagccgcgccgtattaaaaggaaaaatggcagaacaatttgcgccggtcttgccggagtttcagtatttgccaagtgatgccaagtttatgggcgacccggttgattatattattttcgatggctataccgattttcgagatggagacggaactgccgatgatattcaaattattttgctggatgtcaaaagtggaggggcacgtttaacaaaggggcagcaagcaattgctcaggcaattaaggaagggaaagttcgctttgaaactttaagaatagattttgaagattaa

SEQ ID NO: 54040 - DNA, 738 bp, Acinetobacter baumannii
atgaaacaggttgttttagtgacaggtgctgcttctggactcggtaatgtgattgctgaatattttgcgagccaaggtcatcaagtgattttgtcagccagtacgcttgaaaaagccgaaaatgctaaggcacaaagtcagtatgcccaaaatatatttcctttaaagctggatatttcggtcgaggcagattttcatgcagcggtgcaatggattgaagagaaattttctaaacttgatgtgttaattaacaatgccaccgtcaccaaagcaacgcctgtattagaaattaccgcagccgattttgattgggtgacccaagttaaccaacgcggcacctttcaggcttgtcaaattattggtcaatacatggccaaaaaaggttatggacgcatcattaatatggcgtctttagcgggacaaaacggcggtactgcaacgggtgcacactacgcggcaaccaaaggggccattgtgacgttaaccaaaatttttgccaaagagtttgcggcaaaaggtgttacggtcaatgcgattgcaccgggaccgatggagtcaccgatcgttcatagtgtggtgccagacgaaaaaatggaacagttcatccagaatattccggttaaagccttaggaagtatgcattttattgctgaaacttgtgggttgcttgcgagtccaaatgcgagttttgtgactggtgcaacatgggatattaacggtggtttattcatgcgctaa

SEQ ID NO: 54041 - DNA, 252 bp, Acinetobacter baumannii
atggaagctaaaaaaccattacgcgtgttgttttgcatgggtattaaccagaacttttttgatgcagaacctgctgaagcaaaagcggtttgggcagcatttggtgaaatgtggaatggcattcatgacctacctggtgtgcatgtttttgggaatcttgatgatgaccaaagcatggtgggtgcaagtacgggctggccttggaccacttatttgcttgcagatgttccggatttgggcagcatttggtga

SEQ ID NO: 54042 - DNA, 1110 bp, Acinetobacter baumannii
atgaatattattagccaaagtgtgcaaaaaggaagcggcaaacttaaggtgatggtgaaggacacaattgatattcaaggactaaaaaccattgctggcagtaaagctttattagaagttgaacctgcgcacgatgatgcagaggtggttaaaaacatcttaaaagctgattgcgaaattattggcaagacaaatttgcacgaattggcttttggaattacgggcattaaccatgcttttggtacacctatcaatcctaaatatcctgaacttattccgggcggctcttcaagtggttcagccgcggcagttgcagcaaaacaagctgactttactctaggcaccgacacgggcggctctatccgtatgcccgctgcgtgctgcggagtttttggtttaaaaccgacttttggtcgggtaagtcgcgaaggcgtatacccgccgtcaagttctttggattgcgttggtccttttgcaaattcagtcgagatgattgaaaaagctatgcaaattattgatccaacttttaagccggctgaatgcactcgtacaccaaaacttgcgctgctcaatgtcaaagcagatgaggttgtttggaactgtatttatcaagcacttcaaaaagcgaatttagagaccgttttagaaaaagttgaacattttgaagcagcttatgatgcaggcatgcagattattaactatgaaaactggcaagcttttggtgagttaacccaaacaggcttaattggttctgatgtaaataatcgtttattaaaagcagcccaaaccactttagagcaagtaaaacaagcagaagttgtgaaagcacaactgacagaggaactcgatgctttattagaaaaatatgacgcattggttctgccgacacttccacaaattccaccaaaagtttctgaagctgaaaacacggtcgcttttttgaacctaaccggtttagttcgaccatttaatttatcaggccatccagctatttcagtgccacttgaaaccagtgaaggtttgcctgtgggcttacagatcgtatcaaagcatcaaaaagatgagcaattatgtgcaatagctaaattttgtgttgatgcaatgcaataa

SEQ ID NO: 54043 - DNA, 561 bp, Acinetobacter baumannii
atgcaaaatttaaaaacttcttccaaaaaattacaggttattcatactgccatacgtctatttgttacttatggttttcatacgacgggtgtagacctaattattaaagaagccaaaataaccaaggcgactttttataattactttcactcaaaagaacggttaattgaaatgtgcattgcttttcaaaaaagcctgctgaaagaagaagtacttgccattatttactcaagtcgttaccgcacttcaaaggacaaactcaaagaaattattaacttacacgttaaatttaatagcttatattaccttttgcttaaagccttttttgaaatcaaaaatacctacccaaatgcatatacaaccgccgtgagatatagaacatggctaatcaatgaaatctataatcagcttagagtacttaaacccgatgcttcctttactgatgccaaattatttttatatatgatcgaaggcgccattattcagcgtttaagctcggatgaggttgatgaaagaatggttgaggtgtttttgagggggatgtcggcaactaagatttaa

SEQ ID NO: 54044 - DNA, 366 bp, Acinetobacter baumannii
atgataaaaaagaaaatccaagttgagggttctaaagttctagtattaggcctaagctttaaagaaaattgccctgacatccgcaatactaaagtgattgatatcgtaaaagaattagaagaatatcatatggatgttgatgtatatgatccttggattgatagtgaagaaactcaacacgaatatggtattactccagttaagcaacctaaagcgggtcaatatgatgctgtaatattagcagttgctcataatgagtttaaagaaatgggtatagaggcaattcgctctttaggtaaagcatctcatgttctttatgatttgaaatatgtcttagatcaatctgagtcagatatccgtctataa

SEQ ID NO: 54045 - DNA, 408 bp, Acinetobacter baumannii
atgagtcattttcatgatgtgcaaactattcaggttgataaagacaagcaggttattcaattcacacgcaagcgtgaaattagtgaatgtgatcatggccatatccaaatttctgaagaagacagtgaagttttatgcactgactgcaacacgaaattaaaccctgttttatggatagcaaaatatttaaaagatcttaatcaagttactcagcgcaataacagaatgctggcagaggtccgtgaaatacaggcaaagcttgaaaagaaaaataagtttatgtgcaaacactgccatgaagtaaacactattgattttaagaagcttccttcacaagcagctgtagtgcgcggtatggccgtaattgatcaagagtttgacggtatgaaagtggagcatagccgatga

SEQ ID NO: 54046 - DNA, 399 bp, Acinetobacter baumannii
atgattaaggctgaagttgttgttgatggcgactggttgaaaattggtaatcgcagtatccgtatgaaccaatatcttgattgggttgttctattagacggggtagcagaaaaacaatttcgcttacttgaagacgctatcaaacattgtttggaacaaaaatatgattggtctgtaattcctgcacatgtcaactttatggcaacagatgaggatgggatggcatgtggttggttggttgagcctcatattgttggtaatgcatggcgaaaccaatctcatctttcagcgttttttaacttaacgaaacgccaaaaccccttcagaggtgattggaaagactcacttgagaaacgtcctgaatatgtagagccagtgcttaaggatggtgaaaaatga

SEQ ID NO: 54047 - DNA, 537 bp, Acinetobacter baumannii
  misc_feature (465)..(474): n is a, c, g, or t
ttggctcaagttttccgtattttgagtaaaggcgacgcaaatgttggtcagattccacaaaatcagattagcctgttaaacctgattgaaatcatgggtacagaacaacaaaaacaatttatcttttcagaaatattagccggtaaacgtcttgccaacggtggtcccgaacgaaatacccatgactcaaaaaccttaaaaactactcttactattgaaaacggcaaatatattttaaacggcgaaaaattttattcgacgggaacaagttttgcgcattggcttgcaattaaagcgattcatccagaaggccatgtcgttttagtgattgttaaccgagatgctcaaggcattgaagttattaatgactggaatgggtttggtcagcgtactacagcgagtggtacggttaaattaaatcgagttgaagttaatcctgaacttatttttgatgagcgattattnnnnnnnnnnattattaacacaagttccaacctatcgcggtgcgtattcgcagttattacaagtggcaattga

SEQ ID NO: 54048 - DNA, 597 bp, Acinetobacter baumannii
atgaatcacgtattccgtcagttttctatgggggctgtagctattgcgattatgcaggctgcatctgcacaggtcagcatgaccaacattgtaccaatgcaaattgcaggtcagggcacagaaattagagtcatgtttaatggcttgccaccacaaccacaagcttaccaacttgaaaatccttcacgtttaatccttgattttgataaggcacagcaaggtttaaaacagtctaaaattagtgttgcaactaatgaggctagttctgtagatgttacttcagatgaccagcgttcacgtttaactgtaaacctaaaagatgctggagcatttacaacacgagtagaaggtaatacctttattttaaaaattaattctgctcaaacaagtaataagccgctacctgtggtctcagcacaaccacaaggtgtttcaaatattggctttcaacgtggtagtcagggagaaggtctggttgttgtagatcttttaggaagtaatacgcctgtagatgttcagcagcagggtagtaaagtcgttctctgtacacgacaaatttcacagaacccttatcctatcagggttctgccttcttaa

SEQ ID NO: 54049 - DNA, 741 bp, Acinetobacter baumannii
atgagtcaagacgaacttcaagaattgtcattagaacaattatctgcaaagaaaaagaaatttaatctcgataaattccttcagcaatttaatacgctggatatgaacaactacggtagttggccaatatctgtaaaaattacgtgttggatttttattttctttgctgtgttagctttggggtatttcattgttattcaaccgaaattacaagctattgataatgctcaagctcaggaaagcaatttattaaacgaatttcgtgaaaaagactcgaaattacgtaacctgcaacagtatcaggtgcaacttcaagagatgcaggcaaatttcaaccagcaactagagcagttaccaaaagaaactgagattccgagtttagttgaagatatcaacttaacaggagtgaactctggattgaaatttaaaaatattcgcttggaagatgaagtaaagcaggaaatttttattgagcaaccaattgccatagaagcgaccggggactatcacgcatttggagcttttgtaagtagtatcgctgctttgcctcgtattgtaaccattcacgattttactgttgatgtatcgccagctaaagataacaagtctgatattcctgtgctgaactattccattaaagcaaaaacataccgatacgtaggggcaacagatacatcggagcaaacaggcaaagctccagcagcatctgcttcaacgaacactactgttcagccgaaatag

SEQ ID NO: 54050 - DNA, 231 bp, Acinetobacter baumannii
gtgcaatttaatgattacccaagtgatcagcctgttaaatttctgttaaatcttaaaaagatttttccaagtactggtgatttattattacctgttttacctgaagataatgatctggaaaatgtaacttgggaatcaacctcaaaagactttgaaatcttcaaaaagttattggcaggttgggggatgccattaccgcttataaagataaaaattttgcaaatgagctaa

SEQ ID NO: 54051 - DNA, 1281 bp, Acinetobacter baumannii; identical to SEQ ID NO: 51245

SEQ ID NO: 54052 - DNA, 393 bp, Acinetobacter baumannii
gtgactcttcctactgtttctaaacaaactttagctgttgctggggatgttgctggccgtactcctttccaaatcaacttagctaactgttcacaaggtaaagtagctacttactttgaaccaggtgcaactgttgacttcaatactggtcgtttacttaaccaagacgctactggtgctaaaaacgttaacgttcaacttttaggtagcaacaataacttcatcccagtacttgctgctggtgcaaacggtgctcaagctaactctcaatgggttgacgtagctgaaggtgcaagtgctgaccttaactactatgctgaatactatgcaactggtgcttctactgctggtaaagtaactacttctgttcaatacacaattatctatcaataa

SEQ ID NO: 54053 - DNA, 2700 bp, Acinetobacter baumannii; identical to SEQ ID NO: 51618

SEQ ID NO: 54054 - DNA, 3177 bp, Acinetobacter baumannii; identical to SEQ ID NO: 53535

SEQ ID NO: 54055 - DNA, 708 bp, Acinetobacter baumannii
atggagcatgcttgcccagatgtactaaaagattctgtttatggtttaaccgagttaaatcgtgaaaaaattaagcaagctcaagtcattggtaatccgggttgttacccaacgactgttcaactgggcttggctccacttttaaaatcagcacaagcattgattgaaacaaagaatattattattgatgcaaaatctggtgtttctggtgctggtcgtaaagcaagtttgggcatgatttacagtgaaaatgcggataactttaaagcttatggtgttgcaggccatcgccaccatccagagattgtagaggctttggaaaatattgcaggtaagaaagatgtttttgagggtcttttatttgttccgcacctagtaccgatgattcgcggtatgttaagtacaatttatgtagacttaacagaagcgggtaaacaaacagacttacaagctttgtatgaaaacttctatgcaaatgaaaaatttgtagatgtcatgcctgctaatagctcacctgaaactcgcagcgtgcgcggagcaaatgaattacgtattgctttgtataaaccacaaccaaataaactcattattttggcggctcaagataaccttgtaaaaggtgcatctggccaagctgtacaaaatatgaaccttatgtttggctttaatgaagatgaaggcttacaagggattggtttattaccataa

SEQ ID NO: 54056 - DNA, 372 bp, Acinetobacter baumannii
atgccagaaggcttacaggtctacaatgagaaggctgaattaatcttagatttaacagacttaacaggtaaggtatttgggtacattgaggtgcctcagcagtatgctaataccagttattctgtgactgattcacgttttatcaatgcgcatccttttatctttagtccggataacagtttggccgattatacaacgtggagagtatatgactataacaccgaatatgccgactcatctggccatgtgcgaatgcgaaaaaatcttctttacatctttattggtgagttagtaggggacaccttaactattaatgttaactgttacagttcaggtgatacccctatacgtatttattacggagcatactaa

SEQ ID NO: 54057 - DNA, 180 bp, Acinetobacter baumannii; identical to SEQ ID NO: 51115

SEQ ID NO: 54058 - DNA, 405 bp, Acinetobacter baumannii
  misc_feature (35)..(44): n is a, c, g, or t
atggcggtattgactctgcccttacgcttgctatnnnnnnnnnngtggttgtctacccatgaaaaagtagaaaaggtctattatggcgggcttccaactcatgaaggtcatgaacttgcagcaaaacagcaaaatggctttggcgggattgtttcttttgtagttaaaggtgagcgtgaaggcgcgtggaaggttattgataatactaagtttatctcgattactggtaatctaggtgatgtgaaatcgacgattacccatccagcaaccacaactcatggcaaactttctgttgaagcaaaagaagctgctggtattcaagaaggcttaatccgcgtttcggttggcttagaagatattaacgatattattggtgatatctcacgtggattagatttgatctaa

SEQ ID NO: 54059 - DNA, 1263 bp, Acinetobacter baumannii
atgaaaatcgcagtatttggaacgacgttacatgccggtgtaatggccgcattattggctgaatatggtaatcaaatttattggtgtacctgtgtaagttgtgaagaaaatatttctgtactttcgtatcaagatcaagaagtaaatcattatttaaacaaacagcgaaaagctggttttttaaaagaaagccctttttctgaaattcctttagatatcgaagtttatgtattttgttttagtcctacacaaattgaacttgcgttaaaaactgttgaaaaactaagtgaacggccaattattcatcctaaattaatgattaatggctctacttttggtttacatggtacagagaaattaaaacagcacttgccgaaagatgaatgggtgtatttccctgatgtgattcaagaaggtaatgcaattaatagtgtactagatgtaaaacatgtcattgtaggtgtagagtctagagacgcaagtgaaattatgcaggaattgttgcgtccttttttccaatttagttatcaatacttatttatgccgattttagatgctgagtttaccaaacttagtatttcgggcatgttagctactcgtattagctatatgaatgatcttgcgatggtcgctgaaaaactcggtattgatattgcaaatgtaaagcatggtattgctgctgatacacgtattggtgccgcatatttatcaccaggtgtgggatttggcggtgagaatttttcgcatgatattttaacactttcaagcacagtgttagaaacgggaacaaaaagccgacttttggagcaagtctgggctattaatgagcaacagaaagaaattttgttccggaagttatggaattattatcactgtgacttgagtggtaaaactgttgcgatttggggagcctcttttaaagaaaatacttcaaatatacataactcacccattcatattttattggctgcgttatgggcgcaaggggtaaaagtacgtttacatgaccctcaggctctagatgaaattgcctcaatatatggctctcgggaagatcttattttatgtagtgatcaatacgaggctgcacaaaatgctcatgctttatgtttagtaaccgcatggaaacaatattggagtcctgactttaagcgactacaacagttaatgaagcatcctttaattttagatgggcgtaatatttatgacccagcatatgtaaaggctagaggttttgcttacgaaggagttggacgcttatga

SEQ ID NO: 54060 - DNA, 1131 bp, Acinetobacter baumannii
gtgaaaaagttaaaattaatgacagtggtgggcacacgtccagaaattattcgtttatctcgtgtaatggctgcatgtgatgaatattttgatcatattcttgttcatactggacaaaactatgactatgaattgaatgaaattttctttactgatttgggtatccgtaaacctgaccatttcttaaatgcagctggtgcgacaggcgcagaaacaatcggtaatgtaattattgcagttgataaaattttagaagaagtgcaacccgaggctctacttgttttgggtgacactaacagctgtatggcagtgctaccagcaaaacgtcgtaaaattccgactttccatatggaagctggtaatcgttgttttgatatgcgagtccctgaagaaattaaccgtcgaattgtcgatcatacggctgatattaatttaacctacagtacgattgctcgcgattatttattagcagaaggattgcccgctgatttagtaatcaaaacaggtagcccaatgttcgaagtgcttcatcattataaagcgaaaatcgaagcttctgatgtacttgaacgcttaaatttaaaagagcatgaatattttattgtgagtgctcaccgtgaagaaaacattaactcagatcagaattttttagatttggtagaaatgttaaatgcagttgcagataaatataaatatcctgtgattgtatcgacacatcctcgtacacgtaagcgtattgaagagttaaatgttgagtttcatcctttaattcaattgttaaaacctttaggttttagcgactataacaagttacagctttctgcaaaggctgcgttgtctgatagtggaacaattaacgaagaatcatcaatcttaaatttccctgcacttaatttacgtcaagcacatgagcgtcccgaaggaatggaagaagcggctgtaatgatggtagggttgaaagcggaacgcattttacaaggtttggcaattttagaaggtcaaactagaggcgaaaatcgtcttttgcgtttagttgaagactacagtatgccaaatgtgagtgaaaaagttgtgcgtatcattatgagttacacagattatgtaaatcgagtgatttggaagaagtattga

SEQ ID NO: 54061 - DNA, 288 bp, Acinetobacter baumannii
atgaaaaaagttctcttgtttgacctagatcaaactattcttaaccgaaatgaatcacttttaaaatttcttaactggcaagtaagctacttaaacttagtaccccatgagctaaaaaaatcttttattaaccgattcatagagctagacaataacggaagcgtttggaaagatattgtttacagtcaattaattaaagattttaatatcaaaaaatatgattctctacagcatttgaaaatgctccaaaaactattcaaaatcttcatgctcaaggatacacattag

SEQ ID NO: 54062 - DNA, 759 bp, Acinetobacter baumannii
atgggtttgcaagatgcttccaatttaggtgcgaactatcactttgaattaccgtctgctactaaagtagatttggcttattttgcaactgatggtggtaactaccacggaagtagtaaagactcagcacgttatacggctaatgttgttacctcatctgatccactcaaaacaaacctgaatgaaaaaaacatgtggatggcacgtgtcgatcaagatcttaagtttttaagtacagatgatctcaaagtatcggtggggggaagttattggtattcagacattgagaataaaaaaacttctgcagatggtacgagaaatacatgggcgctatttaaccgtattaactataaaaatctgaatgtcgtgcttactggagggcgacaatcgattagtaataaagatgcattaagtccagctagctcaactttcggttcttttgatggcgaatatgacattgcgaacaaaggatatttctatactgttgatacgagctatgtttttaagaatgttaaagattcgctcaatgttacgccgtatgttgtttttagtggttttaacaagaaagaaaatggatttgatgactctcagcgcaacattgttggagtggcgtgggactataaaaatatttctttatataccgaatatgtgatgagtaaaaacgatccgtttgttggcggcaatggtagttctcttgcagcaggtgatgatgggaagtggaacaaactcctcaatctaatgttgatttatagcttctaa

SEQ ID NO: 54063 - DNA, 237 bp, Acinetobacter baumannii; identical to SEQ ID NO: 51659

SEQ ID NO: 54064 - DNA, 294 bp, Acinetobacter baumannii; identical to SEQ ID NO: 46219

SEQ ID NO: 54065 - DNA, 1302 bp, Acinetobacter baumannii; identical to SEQ ID NO: 46190

SEQ ID NO: 54066 - DNA, 723 bp, Acinetobacter baumannii; identical to SEQ ID NO: 45758

SEQ ID NO: 54067 - DNA, 150 bp, Acinetobacter baumannii
atgcttttaaaacatatcaacctgaacattatagatgggcttattattgacgggactattaacaaaccagaaattaactctgaagaaacatggtcttatataaataaactcattgaacttgaaacaaaacaaaaatatgaagccgcttaa

SEQ ID NO: 54068 - DNA, 324 bp, Acinetobacter baumannii
atgtctaatttcaaaaagcaccccgacggctacatgtcatttttaggccgtgatgataaagggctgtattcagttcgtattggctggcaagtgtacgcatctaatgctaatggctcagttctttacaaagttaaagacggagttaagacgcctttaaatgtgttcaggttccgaacttcttatccaaaagtttggaatgaactcacccaagaaatcgattttcagcgcagaaagcagctcgctataaaactgcgtgaaacaaatatccctacttatgaccgcaaagcttacaaaactaaacgcggcttcaccggctctagatga

SEQ ID NO: 54069 - DNA, 795 bp, Acinetobacter baumannii
atgaatagattattagtaacatcacttatttttgtatgtagttacagccttgctcatgaaccttatgttgcgccattagcgtataaaactgagcagacgcaagtaccggtcgttgctggttatgctgaagaagcactaaatagtgaatacgctttaaaagatgccaagcttaccgtcattacccctaaacaagatcctaaagttattaatgctgaaactctacataaatctgtaactgttttcgatgttcctttaccggaagacggtacatatattctgcaaactcaggcaagttaccctttaaaatatgtatatgatcaaaaggagtggcatttattttttgatttaccagctgataaagctccgccaaaaaaagagcgtgactatctaattcctgctgatcttaaaactaaaaaaattaaaacagaggaagtaacaagagaatgggtgttacaaagttatctttcaaaaggtaaagtttcagatattcaacttccaaatacaccagttaaagttaatttttctgttcatcctaaccagcttaaagttactcaagcagttcagctaaccataagtgaaaaaggcaagaacctaccttatgctgaaattaatttaagagagaaaggtgcaactgataaacaagtactacattttaaagctgatgataaaggacaagttgaacttaaatttccaaaagctggagaatatttaatggaagtcacagctccagtggatttaaagttaaagcctaaaaatcaaaattatatgattgttagcttacaagtgaccgagtaa

SEQ ID NO: 54070 - DNA, 183 bp, Acinetobacter baumannii
gtgaatttaaagaatcttgaagcattttactgggtggtgactttaaatagcttcaataaggcagcaactaaattacaaaccacgcagcctgcggtatctcaaaaaatcacatctcttgaaaatgaactctgtacacgacaaatttcacagaacccttatcctatcagggttctgccttcttaa

SEQ ID NO: 54071 - DNA, 576 bp, Acinetobacter baumannii
ttgaaagaacgtgtatcagatgaagataccttgtttattgattttctacctgaatttgaagcgactattcagcgtacaggggtgcaaaaagataacttattctattttgccgactgtttaagacaatgggttaattctattgatccagaggacaataatcgaaagcgcaaaagaaaattcttgtttaaacgtgatccgagggatatttcacagatttggttttatgagccatattctaatacctattttaaagtacctaccgcaaagcgagagataccaccgattagcttatttgaatataagcaggttcagaactatctcaaaagtgaacgtcaggatgttcagaatcaggatgagatttacaaggcgattttgcatctacgtgatcaacttaatcaggctagaagcttgactcgaaagcaacgtcgctcaaaccaaagaaaaaaggaaaatgaaaaagccattactcagctatccgaacagaatcagtctaaaaaggctgtagtttctgaaagccttcagacaagtgatgatttgtggagtactcctttaactgcatttgatgatttaaggtga

SEQ ID NO: 54072 - DNA, 408 bp, Acinetobacter baumannii
atgcttgaagaatccgagcataaagatattgcctatgatgtatatcaattactcaatggtagctacccactacgagcttctggcttcttcttagcattcttcactattttaggtctaatccctgcgactaccttgtttattccggttttaagaaaaccgcaggaaatgttgactagaaaattctggaaagacgcgcgccgtggtgtaggacttatttttggtccaaaagatggtgtattcggtagcaccattggccagattttcgattatttacgtcctgacttccacccaaatgatcatgacaccactgaatatctagagtactacaaagacaaattactcaaagaaggcggcgcgattgcaccttactttgtgaaggaatttaccccacctgtacgcttgtcttaa

SEQ ID NO: 54073 - DNA, 162 bp, Acinetobacter baumannii; identical to SEQ ID NO: 46251

SEQ ID NO: 54074 - DNA, 420 bp, Acinetobacter baumannii; identical to SEQ ID NO: 50235

SEQ ID NO: 54075 - DNA, 162 bp, Acinetobacter baumannii
atgtctgctgaaactgtgcctgtacctggcaatgaagtgttgcctgcagggtcagtcgctgttgcagtaaccgtatcgccatccaccaggttacctgggtttggtactgaccagctaccatctgtgcctgccaccactgttgcagtggtgccatcaggataa

SEQ ID NO: 54076 - DNA, 366 bp, Acinetobacter baumannii
atgcattcgaaaattatgggcttaatagccgttatggggatgatgagttcagtggcatttgcagaacctgcaatccaacctggggacacactagaaagcttatctaaagcacgcattaccacaaatgtaaattctcaggcagcaacacctacacctcaaaaaagtctggcaagcaatactaatgctgaagttaaagtcgaggatatcgacccgatcattgaagaaaaaaccgcagaagtagaaacagtaaaagtagctgtacaaccagtgactcaagctactgtcgaggctgtagtagctccagttgcatcaaacgaacttattgtaagtgttgacgatattgatgtcgctcatcctacagagtaa

SEQ ID NO: 54077 - DNA, 498 bp, Acinetobacter baumannii
atgaaacgtattgcattagttattattggattatgtgttatatactttatttatcaattatatagtgcaaatccttcttgttacttaaagggttctatttgcacgtcggagttcaaatattcaaattctgttgaacgttccttatatataaataataaagaaatctcttctgatcaaaagcaatcatggatagataatcaccatatttatccaaaaggtgaaaatggatattggaattattgtaaggaatattcaaaaagctctatggtttgctcatttcaatatcttgtgaatattagtaaatgtaaagacttaagtgtagataaatacccaattgaaaactggggattaaggttttataagatatcgatgcttgataaggaaaagcttacttatacattggagttgtatgaggggaaaaaagattcttggatgcaaagccaattgatcaatactgatcaagaagtattatgcgattctgaagttaaaccttattaa

SEQ ID NO: 54078 - DNA, 2718 bp, Acinetobacter baumannii
atggctattcagcgtttttcttcccgtacggaaaaattagatacggaattcttagctgaatcattaaaaggagcaatcaagtacttccgaattgctggatattttaggagctctatttttgaactcgtcggtgaagaaatagcaaagatcccagaggttaagatcatctgcaactccgagctcgatctagctgattttcaggtggccacaggtagaaatactgcactgaaagagcgttggaatgaagtagatgtagaagctgaagcacttctaaaaaaggaacgttatcaaattttggatcggcttttacaatcgggtaatgtcgaaattcgtgtggtacctagagaccgtttatttctgcatggtaaggcaggctctattcattacaacaatggctgtcgcaagtcttttattggatcggtgaatgaatctaaaagtgcctttgctcacaattacgagcttgtttggcaggatgacgatgaagaaagtgccgattgggtagaaaaggagttctgggcactttggaacgatggagtaccattacctgaagcgattctagctgaaattacaagagtagctcaccgcaaagaaataaccattgaggtattaaaaccggatgaagtcccagccgcagctatggcagaagcaccaatatatagaggtggtgaacagttacagccatggcaacgatcatttgtcacgatgtttctggagcatagagaaatctatggcaaggctcgcctgctattagctgatgaagttggggtcggtaaaacactatcaatggcgaccagtgcattagttagtgctctgcttgatgatggccctgttctgattttggcaccatctacactcaccatacagtggcaaatcgagatgatggacaaacttggtgtgcctgctgcagtttggtcttcacagaaaaaagtttggctaagtgtagagggacaaatactctcacctcgaggtgatgcctcttccatcaagaaatgtccctatcgaattgcaattgtctctactggtctaattatgcaccaacgtgagaaggctgacttcgttaaggaagctggaatgcttctgaagaatcgtttcggtacagttattctggatgaagcgcataaagctcgtgttcgtggtggcttgggtgatcaggctatagagcctaataatctcatggccttcatgcaacagattggcaggcgcacgcggcatctgatactgggtacagcgacacctattcaaactaatgttcgagaactttgggatttaataggtattttaaatagcggcgcagagtttgtgttaggtgatgccttatcaccatggcatgatcatgaacaagccatacctttgatcactggcaaggctcagataacatctgaggctgaagtctggcattggttaagtaatcctttacctccaggaaaagaacaccacattgtccagcaaatacgtgattacttgtcgattgataataaatcctttggttgttcacatcgttttgaggacctcgactatatgattcaaagtctatggctctcagaatgcatgtcagctgatttctttaaagaaaataatcccatccttcgtcatactgtactacgcaagcgtaaacaactggaagatgacggtcttttagagcgagttggagtatacacacacccaatagcacgcaatctggctcagtatcaagcccgatttgtagggcttggaattccgaccaatacaccattccaggtagcttacgaaaaagcagaagagttcagcaagctgcttcagtctcgtacacgatccgcaggtttcatgaaatctttgatgctgcaacggatctgttctagctttgcgtcgggtttaaaaactgctcagaagatgctaaaacataccgtttctgatgaagacgaagatttgattgcagatgttgaacatgtactctccgaaatgactcccgcagaagtagcctgtttaaaagctatagaaacacaactatcacgccccgaggccgttgattcaaagctaaacacagtgaaatggttcttaacggacttccgcaccgatggaaaaacttggatggaacatggttgtattatctttagccagtattacgacacagcagagtggatagcgaaagaactagccaagtcctttaaaggcgaagtagtagctgtttatgctggtgttggcaaaagtgggttattcaaaggtgagcaatttaataatgtagaacgtgaagttattaaatctgcagtaaagacacgcgaaatccgattagtagttgctacagatgccgcctgtgaaggtttaaacctacaaacccttgggacactcatcaatatcgatctaccttggaatccatcacggttggaacagcggcttgggcgaatcaaacgttttggtcagacacgtaagtttgtagatatgctcaaccttgtatacagtgaaacacaggatgagaaagtctataacgtgctgtcagaacgtttacgcgatacatacgacatttttggcagtctccctgatacaattgatgacgaatggatcgacaatgaggaagagctcaatagtcgcatgaatgaatacatacacgagcgtaaaaaagcacaagatgctttctcagtgaagtaccgcggcacccttgacccagatgcccatctctgggagcgttgtgctacggttctatcacgtagagatattgtgaataaacttagtgaaccatggtaa

SEQ ID NO: 54079 - DNA, 2847 bp, Acinetobacter baumannii
atggcattgcaaccctttgaatggaaagataaaccagccttaattgagcatctttttcctgtgcagaaaatttctgcagaaagttttaaagagcaaagtgctgtacaaagtaaaactttagttgctttgggtagttactggaagggtcgtaagcctttagttcttaataaagcttgtattttaggtgctctgctaccagcgacagaaaatcatttgaaagacctggaaatctttgagcttcttatgggtatgactcccgaagcaatgcaaaagcgaatcgaagaaaatttgcctctttccaaacgtgatgatattggtgattatttaacccttccatttaatgatcaggttcgtgccggcaaacgcgccgaggaaattggagactctcttttttccttaatttggaataaagttaatacccatttaggtacatcagcaaactcgattcctgaattagtagagcaaatgggtattgctcgctttggtcatagaccaaacgtcgcagatgtattttcaggttcagggcaaattccttttgaagcggctcgactaggctgcaatgtatatgcctctgatctgaatcctatggcatgtttattgacatggggaagttttaatattgttggtgcacctgcagagaacatatcaaacttaaccattgctcaaactaaattagtcgaaagagttcagcaagaaattgatgaacttggcattgaaaccgatggtaaaggctggagagcaaaagcgtatctttattgtgtcgaggtcatttgtccagaaagtggttgggccgttcctcttcttccaacactcattgttagtgcaagcaagtttgtagtagtcaatttggttcctattgaatcagaaaaacgttatatgatagaagttaagtactgcaaaaataaaaatgaaatggaaatgcaggataaaccaacagttagtggaggttatttaattcatagcccgtctcctgatcaagagtatagatcaaaaattagtagtatccgaggagatattcgcgtcggaagaaatactacttcagcccttcgaaagtgggaaaaggaagatttcactcccagaaaagatgatatttttcaagaacggctttactgcgtgcaatgggaaaaggtagctaaagaaaaatcacgacttgaaactgaattccgctcagtaactcaagctgatttagaacgagaagctaaagtcattagttatgttgagaatcactttaaggaatggcaggaaaaaggttatatacctgatatggtgattgagaaaggatacaacactgaccagccaattagagaaagaggttggacctattggcaccatttgttcgcaccaagacagctcttaatgttagggatcataaaaaaaacattgttaacagatcccgagttttctgaacagttatatgtatcattcagtaggcttttagattggtctacgaagctgtgtcgctatggaactggtgcagcacgagaatctatcgcacaaacattctacaatcaggcactcaatacattttacaattatggggtgcgccctttttcttttgccactaagtatttattagaaaagacgtataatttccctcttccatcagagacattcgtcaattgccaccctgctcaagacattgaagttgagaatgatatttatgtaaccgaccctccgtatggagatgctgttaaatatgaagagataactgagttctttattgcttggttacgaaaaaatccaccagaaaaattttctcaatggacatgggacagtagacgatctctggcaattaagggagaggatgacggatttcgaacagggatgattgccgtctatcgcaaaatggcccaaaagatgccagacaatggtttgcaaattcttatgtttacccatcaaagcggtgctatatgggcagacatggccaacattatttgggctagcggtctgcaagtaaccgccgcatggtacgttgtaacagaaactgattctgctttacgtggtggttccaatgtgaaaggcaccatcatcctaatcttacgtaagcgccatcagaacctagaaaccttccgtgatgatttgggttgggaaatagaggaagccgtaaaagagcaagtcgaatcattaattggtctggataaaaaagttcgtgcccaaggtactgaaggtctttatactgatgctgatttgcaaatggctggttatgccgcggcattaaaagttctaacagcttactcccgtattgatggtaaagatatggtcactgaagctgaggctccacgcaaaaaaggcaaaaagactttcgttgatgaactgattgattttgcggtacaaactgcggttcaatttttagttcctgtcggctttgaaaaaggagaatggcagaaacttcaagcagttgagcggttttacctcaagatgttagaaatcgaacatcaaggttctaagactctagataattaccaaaactttgccaaggcatttaaggttcaccactttgatcaattgatgagtgatgtctcaaaggcaaactctgcaaggttaaagctctcatccgaattcagaagtgccatgatgtcaggtgatgctgaaatggctggtacaccattacgggctttactctacgctttgtttgaactctcaaaagaagttgaaatagatgatgtattgttacacctaatggagaactgtcctaattacctacctaataagcaactgttagcaaaaatggcagactacttggcagaaaaacgtgaaggtttaaaaggtaccaaaacattcaatcctgagctagaagcaagttgtgctcgaatattagctgaagctattcgaaaccaaaggttataa

SEQ ID NO: 54080 - DNA, 588 bp, Acinetobacter baumannii
atgaataaaaccattgattttggtgcgtctccagagttcggcatgcatcatttttatgtagagattcctgcagcacctcatgatgcagtaacaatttatgaagattatggtttcgatggtgatgaatcacgtcgagaaactattgaatgtcgcttgatattggctagagaactatggaccaaaattcgtgatgatgtgcgtcgtgatttcaatgctcgcctcaaggtgaaaaaccaaagtacaggtacttggtctacgggtaaagtaaagctagatcgttttctagggcgtgaactgtgtgtattaggctgggcagccgaacatgcctcacccgatgaatgcctagttatttgtcaaaaatggctagctctacgtccagaagaaagatggtggctttatagtaaaactgctgccgaggcaggtcgtaacgatcaaacttaccatggatggcgaaaagccctgtattgtgcactttctgatggttcgaatataaaactgggaaccaagataaaacccaaatctaaaaagctacaaactgaagaaaaagtacaagatctatttggatttatagaaaagggagagatttaa

SEQ ID NO: 54081 - DNA, 3069 bp, Acinetobacter baumannii
gtgaaaactgttcaccaagtatgccaattgcagccaaaagcattagaaattaacgttggtgatcaaatcgaacagcttgatcaaattattcatgatactgatggcagcgaatattttaaaaaaacatttattacagatggttttagaaatttactttcaaaaggtatagcacgccttgctggtaaatcaaatgatgctatttttcacttaaaacaagctatgggtggaggtaaaactcatttaatggtcggttttggtttacttgccaaagatgcccaacttcgagatgaaattctaagttcaaccctctaccaatccgattttatatcagcaaaaattgcagcatttaatgggcgaaataaccctcatacatacttttggggcgaaatagctcgccaattaggcaaagaaaaagattttaaagaatattgggaatcgggcgcaaaagctcctgatgaacaagcttggataaatcttttcgaaggtgatgaacccattttaattctattagacgaaatccccccttactttcattactacagcacacaagttttagggcaaggaactatcgcagatgtagtaaccagagctttctcaaacatgcttacggccgcacaaaagaaaaaaaatgtctgtattgttgtctcagacttagaggctgcatatgatacaggtggcaaattgattcaaagagcattagacgatgctacacaagaattaggtcgggctgaggtatcaattacacctgtaaatttagaatcaaacgaaatttatgaaattctacgtaagcgattgttttcatcattacctaataaaaatgaaatttctgaaattgcctcaatttatgcagccagactttctgaagcggctagagcaaaacccgttgaacgtagtgcggaagcccttgcaagtgatatcgaatcaacttatccatttcatccaagctttaaaagtattgttgctctttttaaagagaatgaaaaatttaaacaaactcgtggattaatggaactagtatctcgcttactcaaatcagtatgggaaagtaatgaagatatatatttgattggcgctcaacattttgatctttctatacacgaagtacgcgaaaaattagctgaaatttcagaaatgcgtgatgttattgctagagatctttgggattctaccgatagtgctcacgcacaaattattgatctaaacaatgggaatcaatatgcgaagcaggtaggctctttgttattaactgcaagcctttctacagctataaactcagttaaaggcctaaccgaaagcgaaatgctagagtgcctaattgctccaaaccaccaagctagtgattatcgtaatgcattcgtagagcttacaaaatcagcttggtacttgcaccaaacacaagaaggtcggaactacttcagccatcaggaaaaccttaccaaaaaacttcaaggatatgcagataaagcacctcagaacaaagttgatgaattgattcgtcatcgcttagaggaaatgtaccgtccaataactaaggaagcctacgaaaaagtactgccattgcctgaaatggatgatgctgatgccactctcaagagtagccgtgccttattaatcatcagcccagatggaaaaactccaccaggggtggtagcaaacttctttagaagcttagtgaataaaaacaatatcctagttttaacaggcgacaagtcatctattgccagcattgagaaagctgcacgtcatgtttatgccgtagccaaagctgacaacgagattgctgggtctcatccacagcgtaaagaattagatgaaaagaaagcacagtatgaacaagattttcaaaccacagtactttcagtatttgataaactcctatttcctggcaataatcgtggcgaagatgtgctacgccctaaagcattagataatacctatccctccaacgaggcttataatggcgagcgtcaggtggtcaagactctgacatcagatccgatcaaactctacacccaaattactgaaaactttgatgcactacgagcaagagcagaatcattactgttcggtactctggatgaagtccgaaaaactgatctactcgataaaatgaagcaaaaaacacagatgccatggatacctaatcgaggttttgaccagctagctatagaagcttaccaacgtggtgtctgggaagatttgggaaatggctacattacgaaaaaacccaaacccaaaactactgaagtcataatcagtgaagattcatcaccagatgatgctggtacagttcgtttgagaattgatgtagccaatgcaggcaatagccctcgtatttattatgctgaagatggtgacgtatctcaaagcagtccagtactcagcgataatactttggcaactaaggcgttaaaagtacaattcttagcagtagatccgactggtaaaaatcttactggcgacccgactacttggaagaatcacctaactttacgcaatcgttttgatgagatttcaagaacggttgaattgtttgtagcacccagaggttctataaaatacactcttgatggttccgaagcacgtaatggtgaaacatacactgccccaattcaactatctgatgaagaaactacagtctatgttttcgctgaatgtgagggtttagaagaaaagcgaaactttacctttgctgcatctggttcaaaagaaatccccatcattaaagataaaccagccatactagttagctcctcaccgaaacgtatggatagctcagcaaaaacctatgaaggactaaatatagcaaaagacaaaggtatcaagtttgaacaagttagtttgatggttggttctgctccaaaggtgatacacatgtcactaggggaaatgaaaattagtgcagaattcattgagactgctttagcccacttacaaactctgttaagtccagaagcaccggtagtaatgactttcaaaaaggcatatacccaaactggccatgaccttgaacaatttactagacagttaggtatagagatcggaagtggagaggtagagcagcaatga

SEQ ID NO: 54082 - DNA, 168 bp, Acinetobacter baumannii
atgcaacaatttttagctctttctgtggttgctccaaatggaacctatatagcccaaggtgtaaagacacttgaagtcctttcatgggtgcctacagagttacctcttaaagatctattcattgttgaaaacaagaattttttaatcaatgatggtgatgagggataa

SEQ ID NO: 54083 - DNA, 264 bp, Acinetobacter baumannii
atgttattcaaaaaattcgctgttgctgctgctgttgccgctactttagctttcgttggttgttctaagaaagaagaagctccagctgctgctgctgcttctgaagctgtagctgctgcttctgaagctactgctgctgcttctgaagctgctgttgctgttgacgctgctgcttctgaaactgctactgcttctgacgctgctgctgctgcttctgacgctgctgctgctgctactgacgctgctgcttctgctgcacactaa

SEQ ID NO: 54084 - DNA, 405 bp, Acinetobacter baumannii
atgggtacgaaaaatgtaaaagttcccaccttgaccgaaagagtccgaagaggcgatctttttactggagagaataattgtcagtctcgagaagcatttgctcatgttacaagcctctggggagtgatatgcctgattgctttacgtgatggcacccatcgttatagtgagttacgccgtaaagcaaacggagtcagcgaaaaaatgctgactcagaccctccagcatttagaaagagatggttttatacgcagaacttcttatccagtcgtccctccccacgtcgaatatgatttaaccttattaggtgaggaagtcgctaaacgtgttgctgcacttgccgattggttagaggttaatttaagcgatattaaagcagcctctttagctagtgaggatggatag

SEQ ID NO: 54085 - DNA, 345 bp, Acinetobacter baumannii
atgactgtaaatatagtgactaaagtaaatggtctgaaattgataaaatcagaggtaattcatactcaagcagaactaattgaaattgatattgatggaagaaaggttaaatttaattttatttataatgatgctgaaccatcagattcattcaaagtacaaaatatagagaatggagagataactttttttgttattaatgctcaaaatggtttgggtacaggccattttgaaccatataaagtgaaaaattctattgagggaagtttatacataacatttatagttcagccatttgaaaagattgctcgaaagttgacatttagtatttttgcagattattaa

SEQ ID NO: 54086 - DNA, 1182 bp, Acinetobacter baumannii
atgaatcagtctggagcttcttttgctcgatccatgcttattgttacagtcgccttggttggactcaatttaagaccttttatgacaagcattggtccattagtctccagtatccgagcaggcactgggttgagtctacaaggaatagctttactcactttattgcccatgatgttaatgggagtcattgcatttattggtccaatcgtacaaagcatagttggcgagcgcagagttgttttgagtgctctactgactatttgtattggatgtggccttagatttttatttcctacagctgagggtttaattatcagtgcggtcgtgatcggtttaggcgtcgcgctgatacaagcagcttttccaggcattatcaaaagagagtttagtcaacatattggtccgatgatgggactttattcagctatgcttatggggggcggtgcattaggcgcatggttagcgcctgtggtctcaaatataacgggtttatggcctgtgggattggctttctttgctctaccagctgtattggcattaatctcaacatttatttttttaccctctatcgtaagttcgaatgcacctccagcacctgtcaagacattgcttaagaaacctagaacatggttattaatgttgtgttttgggcttgttaatggtggttattcttcggttgttgcttggttagcaccgtcttttcaagatcatggttggagtagtggacaaagtggaaaattgctcgctttacttgctttaagccaagcagcatcggcactgattttgcctattttagctagacaatataaagatcgccgtccatggctatggtttactctattcatgcaatttgctggtttttctggacttgcatttgtgcccgagtttgcatctattttatgggcaatttgtttagggattggcttgggaggctgttttgctctaacacttattgttgcacttgaccattttgaagaacctagcaatgcaggagctttatctgcacttatgcaagggggtggttttttacttgcagcaataccaccttggttcgtagcggcattacatgattttacgggtgcttataaagcgggatggatttttcatttatgttgtgtggtgctcgtgatggctttggtgataagactggcacctaaaagttatcgcaaaattcacctataa

SEQ ID NO: 54087 - DNA, 600 bp, Acinetobacter baumannii
atggctcaggaaaaaccaacttctattcgagttttgcaatcgaataaaaaaaagtcgagatcaccagtaatctatatcatcattggtattattgccggggtgtttgtaagcatctcactgttcctgttcttgtctcaaccgtattcgtcagatcctaccactgttgagagtaagtcaaatcaagatcaggaacgtgatccagtattgatgacgaattcttctacgcatggacaaattacagttgatcagcaagagcaagctgatccaatgagccatgatggttttgagcaacctaaagaaaatgaactgagtggtatttttaaacctgctcctcataaaaatgcggctccaactcagcaacgtgtttcaccttttgatgcacagttaacaggtgaacgggtagcacctaagcaacaagttgtggctaaacccactcaagcaatacaaccagctcagcaaaaacctatcgctcaacctaaggtagttcaagctaaacctgctgaagctaagaaagttccagttgagccagaggctgaggcggaaacaccgaaagcatcggttgatatcaaagtgactcgcagtccatttgcggtgaattag

SEQ ID NO: 54088 - DNA, 1341 bp, Acinetobacter baumannii
atgtcatatcgatataaaatagcgacagtgtttttacttgggttctttattgattgcatcaacatttttatgtctgcaattgcattgcctaatattgcatcgtcactttcagtgagccaatccatggtcgcatgggtaacaaatgcttatattctcggcctcattttaattatgcccatgagtttatggttagccaccaaacttggggaccaaaaattattgtgttattcgatgctgttattctcgataagcatctgctttatgagttttagtgaatcgatttatagcttaattttttggcgatttattcaaggaatagctggaggtttattaattccagtcgggcaagcactcgtatacgcatttttcccgaaccaagaacgccaacgcatttctactatgatcatggcaattgcactgattgcgccagctttttcacctgccattggaggcgtaattattgattcattgaattggcgatgggtattcttatctaaccttcctttttctttactggcagcagctctggcatggttatgggttaaaacaacaaagaatgtttcgagtgaaagaccagatattaaaggcttggttatctttaatataagtctgttatgtttattactctccttttcattctatagtgattaccataatgccctattcgctataacgagttttctaatttcagtgggaatgcttattttttacattcaacatgcgaaaaaaatttcccatcctgttcttaatcttgagttattaaaaaataaaaatttacgtaatgcatttattgtctattatgccgtaccgggtatttttacaggcgttaatttactcaatatttttaatttacaacttaactttggctttaatgcaaaacaaactggtttatttatgttgctttatgcaactggggcactcgcagccatgattagtggcggcctactctatcaacggttaggaaaaaagtatcttcttattattggaataaccctacatagctttggcatatttcttttgttttctatttcaaacgctagtcccttaagctttttagtgattgcttatttattaatgggtatgggaggcggcttaagtgccaatattgcccaaattagctcattgattgatttttcaggccaagatttattacaaggaagtgtgctctggaatattaatcggcaagtttcatttagtgtcggtactgttgttctcatttcgatatataacttaatgtccagctcaagcgagctacttcgctatcaacatacttttttaattgcagctttactctgcttactttcactcattcccgttttaaaggagaaaacttatgtctaa

SEQ ID NO: 54089 - DNA, 3006 bp, Acinetobacter baumannii
atgtttagtaaagggtcagaatggagaaagtgggatctacatgtacatacgcctgaatctcttgatcataaatatggagataattgtgaagctacttgggaaaaatatctaacagatttagaaaacctacctgattccttcaaagtattaggcattaacgattatttttttattgatggatatgaacgtattctacaagaaaaagctaaagggcgattgcagaatattgatttgattttaccagttgtggagttcagattacaggaatttgctggcgttcaatttggaaagttaaaccgtataaatcttcatgttatttttgcagatgaaaaagttttacctttagatcagataaaatcacagtttttaaatacattacaagctaaatacattttagagaaagagcagtccccttggaattatagtgttacacgagaatcagtagaacttcttgggaaatctattaagaaaaatgtacctgagaatcaattaagtaattatggttcagatttaattgaaggttttaataatctaaatttaagtcttgaatcaattgtttcaagtttagataaaagttgttttaagggtaagtacttaattgctattggaaaaactgaatgggatcagcttaagtggacagatggttctatagcggttaaaaaaagtttaattaataatgcacatattgtttttacctcagcagaatcatatgaaacgttcaataatgctaaacaaaagctaaagcagaatggtgtcaatgatttattattagattgcagcgatgctcataatttttcagataaaacaagtgacaaagatagaatcggaaattgtttcacatggataaaagctgatccgacttttgcgggtttagtacaagccacattagaaccccaaaatagaatttatattggtgaattgccagaaaaagaattagttaaacagggtaaaggcagttacttcattgataaaatcgaaatttcaaaaaaatcttctgcatctagtgatcatacttggcttgatggaacaaaccttaaacttagccatgatcttgtagcaataattggaaaaaaaggtagtggaaagagcgccttggctgacgtgatttcccttctaggtaattctaagtcgagtagtaaattcttttcattcctaaaagatggtcggttcaaaggtaaaggcggatttgcatcagattttgaagcaagcataacatggttgaatggtacaaaagaatgtcaatcattagattcaagtgtcgaccatggaaaagcagaaagagtccgttatattccacaggtatattttgaaaaactttgtaatcctgatcagggggataaagaatttcaaaatgaactcaattcagtaatattttcttacttgtctgaagaggatagaaatgggtgtacatctcttgactcattaattaagttcaaagaaagtgctttaaatgatcaattatcttcactcagacttgttctaagtaagttaaatacagagattgaagacttagaatttcaagcacaagcaggtgttaggaatattttagaaagtaaaagacaattaaagttacaggaattgcaagatcatgaatcaattaagcctattgaagttgaatctccaagtgaagtgcttacaccagaacaacagtctttaaagacaaagatggatgctaataattcacgccagattgaattattggatgaagtgaaaaaactcaacgaattaattgttgagaatcaaagaaagatttttcttgctaaacaaatttttgataaatctaaatttttaaaagaacaggttcaaacatttaaagaccaaattagtgaaagtttaaaagttttatctattgaaaatgatattgttacatttgacatcgatacaacgaaaattgtggaattaattgagagtttaaatgtaaaaaatacagaaaattctctcagaattgttgatttagaaaaagaaattgaaacttgtagtgacgtagttaaaactgttcgaggacaactatctgagccattgcaaaaatataatgaatatttggagaacttaaaaaaatgggataataagaaattggaattaaagggagacaattcgtcccaagactctttacttggaattcaatatcaactagaactaatagaaaaattgcctcagcggttaattcaaaaaaggcttgagagaaaagatatttcaatcaaaatatttgaagttttggaaagtaaaaagcttatacgggaatctctctatggaccagtgcaacaggctatcgagaaaaataagtttattaatgagaaaaataaatttgagtttgtatcaaaactgaacttctcaactgaacattttcaggatgaattaacaaacttaatcatgcaacgtaggttagagtttacacccgataatattaaaaaaactttagaggaattatctaagcatgatgatcttgagacgaaggaaggatgtattaattttattgaaaaacttattggaaagttagaagaagtaaatggtgctactggtataggggatatggtgagaaaaaatacaacacctaaagatgtttatgattttatctatagtttagatttcataaaatctaagtactctttacgctttcagaatgccgaggtagaaaaattatctcctggtcaacgtggggcattattactgatattctatttattagtagatcaagataagacgccaattatcctagaccaaccagaagaaaatttggataatgatactgtagtaaattctttggtcccaattttgaatgaggctaaaaaaaccagacaaataataatggttactcacaatccgaatcttgcaattgtttgtgatgctgaacaaattatttacacagatttttatagagaagataatttttcgattaattatacctctggttcgatagagagttatgatttaaatcaacatgctgtgaatatattggaaggaacattggaagcattcaataatagacgaagtaaatatttcgcctaa

SEQ ID NO: 54090 - DNA, 864 bp, Acinetobacter baumannii
atgatggagttgaatggtgtggggcttggtttgagacgtgactttatagattcgtttctagctgcaaaaacatatccggactttatcgaagttgccccagaaaactggttaggttttggtggtcgacatgcaaaactacttgcacagtgtgctgaaaaagcaccgttaatttgtcacggcttgtcattatctattggagggccgcatccgcttaatctcgaatttataggtaaagtaaaacactttttagaacaatatgatgtaccaatttattctgaacatttaagttatacaaatgatggcggctatttatacgatttgttgcccataccgatgacagaagccgctgttaaatatgtggctgaacgtattttacgtgtgcaggatattttaggaaaaagattagttatagagaatgtttctacttatttaatgccgaatgccgaaatgagtgaagctgaatttatccgtgaagtaatgcaacatgcagactgtgatttgctccttgatgtaaataatatctatgtcaacagtatcaatcatggtagcgatgcatttggttttatccagaaaatgccaaaagaaagaatccgttatttacatattgcggggcatgaaaaagttcagaagaacttattaatcgatacccatggggcagaagtttgtgaccgtgtttgggagctattgagatatacctatcaagtgtgtggagtaaaaccgacattattggaacgcgactttaatattccatcatggcaagaattagaagaggaactcgccaaaattaaactcattcaacaacaggagagtggctatgaagggaaatcaaatatccttccaaaccatgcaacgacagttttgtga

SEQ ID NO: 54091 - DNA, 276 bp, Acinetobacter baumannii
atgaacaaactcaactcaatgacttcagtggcagcattattagcactttcatttgcgggtgctacgcaagtggctgtagcagcaaccaatacaacaaccgaagtacatgcaaccaaagcagccgatggtaaatgtggtgaagcgaaatgcggagccaacaaaatgaaaaaacacgaaaagtctgctgaagcaaaatgtggagcaaataaaaaagcagcggatggcaagtgcggggcagataaaaaagttgctgatggcaagtgtggcgccaagtaa

SEQ ID NO: 54092 - DNA, 603 bp, Acinetobacter baumannii
atgaagaactttatttatggcttatctcgatattatcaaaacctcggtaagtctttacaacatattgacggcattgccgcattggctattcgattgtacctagtccccatattttggatggcgggcacaaataaactgatgcacttcaatgacattgtagaatggttcggcagttcagatggaggattgggccttccttttccctatttaatggccgtgcttgcaacgtcaactgaactagcaggtgccatacttttaacattaggtttatttacccgtttaattagtattcctcttcttattaccatgttagttgcaatatttacggtacatctcccaaatggatggcaagcaattgcagacccgcatgcaccctttgccaacatgcaagtattggcttccgctgaaaagttagataaagctcgagagattttacagaactatggcaactatgactggcttacatcgagcggttcgtttgttattttaaataacggaattgaatttgccgcgacctatatgattatgctacttgcccttcttgtacttggaggcggccgttatttcagtttagattattggattaaaaataaactacgctaa

SEQ ID NO: 54093 - DNA, 798 bp, Acinetobacter baumannii
atgttgctcaagggaaaagtagcagtaatttttggaggcagtggcgcgattggaactgcgattgcgcaggtttttcttcgtgaaggagcacatgtttatttatgcgcaagagatttaaataaactgcaaaacattgcgacacaactgcaaaaatacgaaggcgcggtacataccgttagtgttgatgtgctagatagccaagcaaccagtgaggtagttgctcaaatggctcaagcgacgagtggtttagatatcgtcatcaatgcgaccagttttattcataatcaaggcaaagaaattctagagttaaaccttgaggagtttgtcggggcaataaatccatttctaacggcgcagtttaatatctctaaagctgtggttccttatatgggcggtaagcgcggcggaaccatcatttcaattgtggcgccttcagcacgaatggcgatacccgggcatttaggacatattgtgggctgtgctggaattgaggcctttattaaagctcttgccagtgagctaggccctaagaatatacgggtactcggtgtgcgctcacatgcaattattgatgctgttcaagcgggttcttatacacgtgaattgtttgagtctaaagcacaggcaatgggacttagcataggacaatggcttgaaggtgctgctcagagcaccatactaaaacgactaccgacactttcacaagttgcagaaaccgttgcttttcttgcatcggaacatgcgaactcaatgaccgcaacggttgtaaacatgactgctggcacaataatcgattag

SEQ ID NO: 54094 - DNA, 945 bp, Acinetobacter baumannii
atgaaaaagcttgtaatgactttagctgttttgattctgctctcaagttatagcttagccaatgactcgacgggttacgtcggaacaggtggcattcagtatttaaaaaactcacaagttgccatgcaaagtgaagatttatttattagtaaaaagatgattaaagttgattatctatataaaaatttaagtaataaggatgtcactgaaactattttatttccgctaccacgtgtagataacttttttgaagcagattttgcaaatactgaagcacttttaaagagctttaaaattgtagtggatggccaaaatataaaacctgaaatgcatgtcagaacgtttattcaaaaagatgaaaaatctcctttaatggatgtaactgaagagtttaagcaatgcggttttagtgaaaaagatatgctcaatccatggatgcgcaacaatgataattatgacgattatgtagacaaactaaaacaatgtaataaaccacaaatgcagaaaattgtagcccaatttaaaaaagatgatgtaatcccgtggtcatctcaagtcatttatagctggaagcaaacttttaaagcaaatggtttgactaaaattcatcatgaatataaacctttggtcggcggttctgttgcgctttatccagatgaagatagcaagcaattttgcatggataaacaatttaagcagggccttaaaaaagctcaggcagaacattcgccgtttagtgctttaggttatattttgacgacaggtgctaactgggcaaagcctattgaaaactttaagttaacgattgaacgtgataaagatgaactggtttcattttgttgggatggtaaagtcaataaaattagtccgactcaatttcaaatgactaaaaccaagtttgtaccaaaacaagacttagacgttatttttgttcatctgccataa

SEQ ID NO: 54095 - DNA, 399 bp, Acinetobacter baumannii
atgaaaaaattttatattattggttttttaatattaatgctcttcgatacattggctcaaatcagttttaagttagcttccattcatgcgatgcctttaacttttgatgtagattggctgttccgagtttttggacatccttggatttatggggcttttattggatatataggtgccttttttatctggatgaacttattaaagcatgcgcctatagggccggcttttgcagcttcacatttagaactcatcacggtgatgtttttgtcgatttggctgtttaatgaaccgctaacatttacaaaagttactggcgctattcttatttttgcaggtgtttgcttcttggctaaagacgaagaagagagccatagtcatgaagaagtcgtcacaaaataa

SEQ ID NO: 54096 - DNA, 360 bp, Acinetobacter baumannii
atgaatattgtggtgttcagtgtatggatgctaaccattttgattgatactgttgggcagttggcttttaaggccgctgctcatgaaagtaaaaccaatgaagggcttgagcattggtggttcatggcgaaacgtccatggatatggctcggtattttttgctatatctttgagtttgtcgtttggcttgctttcctctcgctagttccactctctattggggtcatgttaggctgtatcaacattgtcgtgattatgcttgctgggcgcttattctttaatgaaaaactaactcgaaatcgcttaattggtgtagttctgattgcggtcggtgtcactattgttgggattggagcatga

SEQ ID NO: 54097 - DNA, 885 bp, Acinetobacter baumannii
atgataaaagacaactcattttttttatcggggaaccgaactggtattttactcattcatggtttgacgggtacgccaaatgaaatgagaggaattgcacgtgtacttcatcaggctggctatagtgtatatggcgtgcagttggctggacactgtggtgatgtcgaagatttggtaaatagccgatgggaagactggtttaatagtgtagttgcagccgcagaaaagctaagagagcatacagatcagctatttgtggcaggcttatcgatgggatctttattggcattaaagtatgcctcagcttattctgtcgatggcgtaattgcctatagcccaacctttcaatacgatggctggagcattcctttgtggtcaaaagtgcttgcgcctattgttttgccgagtgttcattatttaaatatctgccgtaataatacctttgacgaagctgaaccatacggaatcaaaaatgaggtattacgttcgcgtattgttcaggctatgaatagcggtgaaagtagtgaagcaggtttaccgggaaacccgtggcattcattgttccagttacagcgtctttcgcgtaatgttcgtaaaaacttatcaaatattacggctccatgtctgttattacatgcttatgacgatgatattgctcaccgaagaaatagtgagttaatttatgccaaagtgaagggtcctaagaccttaatctggctttataacagctatcacatgatcacgattgataatgaccgtaaacaagtcattgaagaatccattcgatttattgaacaataccaacatccaaaaaagcagtcagagcatccatcaactcgtcacgaacgtaaaacttcacctgaaaaaattggtgagcttttatga

SEQ ID NO: 54098 - DNA, 720 bp, Acinetobacter baumannii
atgttcatggtcaaccagcattactatacagatcacactgtaccttggcatattttatgtgactttgatgggacaatcagcttaaaagatacgacggactatttgcttgaaacctatgcaaaagctggttgggaagaaattgaggaagagtgggagcgaggcaaaattggttccaaagtctgtatgcaaaaacaaattgagctgttggatgcctctattgatgagttgcagcaatgtcttgaccaaattgaaattgacctcggctttattgaattagtaaagattactgcccagtataaaattccgttgacgattgtaagtgatgggcttgatttcgttattcgtcatattttaaaaaaatataatttggaacatttgcctgtaatagcaaaccatctcgttcagacaggtgagagatcatggcgactcgagtttccaaatcaagaagcgagctgcataagtcaaagtggaacttgcaaatgtaagattgcaaaccagaaacctcaaaatcaaattattttgattggagatgggcgttcagattattgtctggctggaaatgcagattatgtttttgcaaaaaaatctttgatagaccattgtagagaaaaccatattttccatacaaagtttgaaaactttgtagaaatttatcaacccttggctaagctattaagcagtgattttggaatagatactccagtgacggtgattacatga

SEQ ID NO: 54099 - DNA, 240 bp, Acinetobacter baumannii
atgagctcaatacatgaccctagatatattggtctaatacaatgtttaatatctttacgtgaggaaaaaaatataactcaggtagaagtagcttcatttctaaaaaaacatcagtcgtatgttgctaaagtagaaaatttagatcgtagattggatgtaattgaattacatgactggctaaaagcccttgatatacaactttcagaatttattataatttctaaattagaaaaacattaa

SEQ ID NO: 54100 - DNA, 492 bp, Acinetobacter baumannii
atggtagaaatgacgaaaagacaaattctgcaaagattgtttttacgtttccttatgaaaaattcttttcataaattggcgttcacagaaatatggtcgttatttgtaggccataacagctatttaaataacgatgaaaactttgaagtagttcatagcttttttattcatcatttagtaaaggagtactttattgtggattctataaatattcctcaaaaatacacttctaaatatcatgcatatcaaatcaagaagttttgtttacctgtggaattacaagagccttatgaatctatttgtgagaagactaatcaacttaataaagcactacagcaaaatgaactcgaaattgaatgtcttaacgagtgttttaatgagtttcctagtattagatttcagattgaacttttgatacaaaaaaagaaagattatcaattttcacttcaatcaaaagtaaacgtattaaaggagttaatacaaactttctaa

SEQ ID NO: 54101 - DNA, 264 bp, Acinetobacter baumannii
ttgagcactaataattctctacaaacgaaaaccacacaatgtataacgtgtgatatttgtgaccagccaacttcaagcaattatggtgtactgaaatcagactgggatccgaacaccgatgataagaaagataaatatgaagttcgactatgtaaatcctgcttcttagggacactttcttatttaagaaatcagaaaaaattaaatcacttatttgatgaaaattttgactttaaccaattagataatcttggcttaagttaa

SEQ ID NO: 54102 - DNA, 705 bp, Acinetobacter baumannii
atgaaagaaatagatttaggacataatttaattgaacactattctaagcctatacagggccgtctttttgtagtgggtgatcttcatggatgttacaccctactcatgaataaattaaaagaaataaaattcaattttcagcaggatttattagtatctgttggagatttagtcgaccgcggcaatgagaatcttgagtgcctaaaccttattaatgaaccatggtttaaggcaatccggggcaatcatgaacagatgtgtattgaagcgactcttgataatgaaatgaaggatatgcatacccatcatgggggagcctggctatacgatttacctattgagcaacagcaaagcatagttgatcaatgccgtaatttacccataattcttgaaattcatcataacaataaggtttatggttttgttcatgcagatataaatatcaatgactgggaagacttcaagcaaaaaattcttgagaacgattatttcattgcaggcgagcagtcagctatacaaattgctttatggcatcgaggacgagttagatttagtaaatatcaccctgggtatagaactgtaacaggggttgatgaaatctatttcggtcataccgtagttaaagaaccagtccagcatcaaaactgtttttttattgatacaggcgctgtttttgggggagctttaacagttctagaaatctaa

SEQ ID NO: 54103 - DNA, 747 bp, Acinetobacter baumannii
atgaaaaaattattaacaatgagatctaaattctttttttaccatttgttaatttctttcttgttcgcttttttaattcttctgtgggtattttttatttggtatcctcaacctttagctaaagctgttggtgttatacaaatttttttaatgatgatagctatagatgttatattgggccctactttaagttttttagtatataaagaagcaaaaaaaacacttaaatttgatttagcagtaattatccttattcaaattttggccttagggtatggtttatatagcattgctcaaggtcgccctgcttggttagtttataatgtagatcgttttgaacttgtacgtaataatgaaattattgagcccaatattcaaataattcagccacaattccgatatccttcttggtttactccgcaatttgccgctgttgaaataccagaaaataaggaacaacgtactaaaagtatgtttgaagaaatatttagtggtatttcttctgctcaacgaccagaactttatattgatttaattcaagttaagtcacttatgcagcataaagttcaaaatttaaaagaattagagaaatttaactctaaacaagatgtagaaaatattttgaaaaaatacccagaagcgaatgcatgggttcctttaaaagcaaatgctatagatatggttgttttagtggataaaaactcagctcaagtggttaaaattgtagacttacgaccatggaaataa

SEQ ID NO: 54104 - DNA, 1656 bp, Acinetobacter baumannii
atgttagtaagatatgtttttatttttgcagcatttttaatgagtgctgcttggttgattcctaaccattatatgccttggcttgctgcacatagtgattttcttgcatttttagcattattaattttaagtatagtttttgtcaaacaaaatcaaataatattgttacctttgccctttatatatttatctttaagtgcttttattccaattttacagtttatggcaggtaagatattttttttaggagatgctttaatagcggttgtttatatattaggttttgttcttgctttattatttggttttttaatagagagaaaaaataaagaaatttataattggttgttttttcttattttatttaatggtttaatcagtgtttatattgaaattaatcaatggttgttattaagtaatgggagtatatggtttgttgatctatctcaatcatctagaccttatgctaatttcgctcaacctaatacatgtgcaacttttctttcaatggggttgatatcaagtttatatatttatgaaaaaaaatatattaataaaattggctttgttataattggtactgttattttgtttggtattgcattaactcaatcgcgtacatcttggatatttatttcactttttataatttggtggttttggaaaaaaaattacttaaaaacaagattaaataaaaatttattattttattttttaattatttatatcgtttttatattggttttgccgaaattttcaagttcattgggagtaattggcacagctgatatcataactcgtagtacaactggctatttacgtattccaatgtggaaacagatgctaatagcaataaaagagcaacccttatttggttatggatggaatcaggtgagtgtcgcacaattatctgtttttctaaaatatccaacagatgagtgggttgaacatagtcataatattatattagatatatttatatggaatggaataccattaggtatattaattgttggttttattgggtggtggttatatcaattaagtaaactagctatttctatagaagcttttgctgctttatctatggtaggggcagttttagttcatgcaatgttagagtttccattggaatacgccttttttcttttaccggttggatttttattaggcttggtacagggtgaaaataatactgtaaaaactataagcgtgaataataaattattttatatatttatagtttttgctttttctttatatatttggatttttctagaatataaagctattgaaaaagatgttcaattagcacgttttgagtctcttaatattggaaatattcatgctaatcaatctgctcctaaaattttattacttagtcaacttcgagaccagctaaaatttattcgtacacctcctgtagctcatatgtcaaaagatgaattaaattggatgaaatcagtatcatatcgttatgctacacccactgctttatatcgttatgcacaggcccttgctcttaataaccagcttcatgaagcaaaaaagcatttattgattattgaaaaattacatcataagaaatttagtacagaatctttatatcaggttaatgattcattgatatttggttggaaaaacacggggaaatga

SEQ ID NO: 54105 - DNA, 1068 bp, Acinetobacter baumannii
atgaacgcaatcgtatcaacttcacaaagcgctgaagaatatttagaacttggtttacgtgaccaatggcatccggtgttagcaagttgggaagtcgctgctaatccggttgggattacccgtttaggtgaaaacattgtggtttggcgtgatgccgaaggtcaggttcatgcacttgaagatcgctgtccacaccgcggtgctcgtctttcactcggctggaacttgggtgatcgagttgcttgctggtatcacggtgttgaagttcgtgccgatggtgtggttgccgatgtaccagccgttcatgaatgcccaatgactggaaccaagtgtttaaagagctatccggtcattgaacagcatggtgctatcttcatctggtttgggattgatgcaaatgaacaacccgcaccgcttgagttcccagaacaactggcaagcgaagagtggagttcattcctttgccaagcagactggaaagtaaaccatcaatatgccattgataacgtcatggacccaatgcacggtacatatttgcactgtacgtcacactcaatggcagaaggtgaacgtaccgcagagatgaaacaccgcacaactgaaaatggttttgtttttgaaaaagaaggccaaacaggtgtgaactttgactgggttgaatatggttcgactggtgcaaggtggttacgcctttcaattccttaccgtaaacagtttggtccgggtggtgaattctggattgtgggttacgcaacgccaattgatgccaacaatacccgtgtatttttctggcgctgccgtaaggtgagtggttggcaacgtaatgtatggcgcttcttatatcgcaatcatttagaacaattgcattgggatgtattggaacaagaccgaattattttagaaaaccttgcgccaaatgcacgtgcacgagaattcttatatcaacacgatgttgggcttgcacgtttacgccgtttaatgaagaaagaagctgagaagcaattaaagaaaattgctgcactaaatgcatcaaaccgtatcgagatgcaggaagaagctcatggctaa

SEQ ID NO: 54106 - DNA, 375 bp, Acinetobacter baumannii
atggctggtttcacaattaatgtgagatctgaaaataacgaagttgtatttgatgcaatgtggggagatacaattgaaattgacttaaatcttaaggctttaagagataaaaatttatttgcttctgtaattcagcacgagcttacggaaataagtcaattatatatgaaagccagtaagttgaagtcaaatgctgctgcattgaaagtattattgacagacggacgttatgacgagcatgagattgctaagcgtgctagcgatgaactgctggcagaacagttagctgtggagtttgatgatggcacaacattacatcgctatttaaatgatgaaacctctccttatggtgaatctaaatggatgggctcatag

SEQ ID NO: 54107 - DNA, 7845 bp, Acinetobacter baumannii
ttgcagccaaagccaatatcttcatttgtattattttttgtttgttttggaccatttattgggcaacaaatacgtgtaccaataactgtagccgatttagatcaggacacattaaattatatcgtgcagggtttacctgcgggtgcacaacttgttcaaagtgctaaatatggttatgcagaaattgtctggactccaacggcaaatcaagtaggtcaatacgatttaagcgttcaggtatcagatcagggcttaccgccaaaagatttaggttatccagttccagaaggttttgtcgctgtaccaaatgtagttgcacaagatattcgcatagtagtacgggcaactaatcttacgccagaattacttgatatacaggttcaacaaggtggaagtgttgtacaacaagcagatcaaattattcttcaggcacaagaaggacagccgcttacatggactatgacggttaaggacgctgatctagatcaactctactggtcatttagtgctttaccaaaaggtgtcaatatcactactcaagcattaggtaatggacaaagccaacttgtattgaagtggttgccatctatgtttgctgcacaaagcagtttgggaagcagccagttaggtaactacaactttaccgtaactgtaaccgatggtagtgccaaacttaatcgtaatgtccaaatacaggttgcaaatgttaatcaacaacctgtatttacaagcctgccattacaactggtttatgaaggtgaaaccctttcatttaatttattagcacaagatggtgacaatgatgcgctgcgttaccaattagtacatgatgctaatacgccagcagatatttatgttgatgcaacgacaggctacgtcgagtggacgccagcgaataatattgtcgataaccaatttggtgatcagaaggcgtttgacctgacatttatggtgactgatggacaaatatctgttctcaaaactgtacaggttcgtgttcttgatgtgaataaggcaccgaaaattcaaagtagtaaccgtactttagtggtaggccaacagttccaacttgacattgtgaagtcggctcaaaatagcttaaacaataatagaaatatttatgtatctgatattgatggccaagcgcagactcaaggtttgattgtaagctttgaccaattgccacaaggcgcaagctacgatgctgttacaggacgcttatcatggataccaaatgcagggcaaattggtaagtttgtagcctatgttaaagtttcagatggctatgatacggttcgtcaagcaattacctttaatgtagttgcagatcgtaatgcttatgaacctactttacatattgaaactaccccggcaattccagtggttgcaggacaaattgtcacagcgacggtacgagcggatagctttagtgctattgctaatactatggttgaagttcgaggcagtgcgttaggaactgatcaatggcaagtcgcaagcttggattctactgggcgaattaaactgattgggcaacagccaggacttatagaaatccgtgcaactgctatagatattgatggttttagtcagcaacaagttcaaacaattcgtgttaaagatccgcaagataatttggccccagttttaacatggcaaggacaacttaaaggtgcagcaattacgacggcacctattgtggtacaaaacattactgacctgactgcatcaattaaagaacagcagcttatgggctataaattagaaattgcccgtaatacgacaggactattgcaatggcataccttgcaagatgtgtcgttgaaagcaagttatagcaatcaaacgctagatatttttacaattgatccagcattgtttgtaaatggagcatatcaattacgcttaactgcttgggatttggttggtcgagttgaagagctatatgccaatattgagatcaatagcgtcacaaaacaactgaatcaagcaacatatgtagatgctagcttacaaattggttcacaaacaattgatctggttcgctcaattacgacagatagccatggtgatttctccaactggacaactggactatttgatacccaactgactcataaccaacgtttaaataacagtgttggtactgttgctgcttggcaaactggagcaaaagtctggttgcaaatcccacaaggtttaacaggtgtaactgcaatacaaactcaatatttgaactttacgctgaatttgcagacgcaagatgtgactggcgaaaataagggtattcatcagttcacaccacagtttagtaatgtgcaaggttggagtttgactgcacatagctccgccgatcttcatatcgacaacttgattcaacaaggtcagagtttatataacgaaagtacaggtctggcttgggttccgagttatttcaatctgactgcaccagatggtacacgttatttactagaccaagcaggcaaagtgctttccatccactttaatacaggcgagcaatggcttgttagtcaaaataatattgtattggtaggtggaaaaacctctcaaagtattgagtttaaacgtgatagccaaggccgtattagccagattcttgggcaaggtattcaaggtgaacaggtcagcttgttgtataaatacaatagtgccaaccaacttgagttagtacgtaatctaatcactggagaagtagttcaacgctatagttacactgcaacaggagaagtccgtctagaaaaagcgatagcttatttaggtgcaagtgttgattggttgaatcaaaaccattctgcaccacaatggcaaggcgatctaaataatcaaactcaatattttgattttgctattcgtgaatcagaactagcatcaaccattaaagcgatgggtgcaacaggagctgttttagttgcaattgaaactcaaggtaatgttcaaaatattaatgttgccgatgcaactattgtgtcacaacaacgacatggtgaccatacagttaccctagtacgtattacgtcagcaggctttaagcaattagctataagtggagttggtgcagtcgccgttcgactgtctattgttggggatcttaaccatgatggtaatgtcgatggtttagatagtaccttgttgcaacaagctcaagaaggacaaaatcagtttgatctaaatggtgatggtcttattaatcatgctgatctacaaattttgtatgcaaactatggttggaaatcaaataaggcacctgtcaacgttgtaccgcaagggacgcaagcgttaaaaacacatcgtgatttatctgtaactggtcaattagaccagatcgcagttgatcgcgaaggtgatgcagtttattggaatatcttaagcagtactcatggtgttgctcagctctcatataatggtaaaaatttaagttttaaacctgaagtaggtttctcaggttacgcaacggtaactttgcaagctgatgatggatatagcaaaggacagccaattgaactgaaaatatatgtcagcgatgcaaaactagtcttaattcatattgagcggttagctgctgtcgctttgggcaatagtgctggcttgcatgtaagaggtgattttgcagatgaagagggcgttaccttaactgctgattatttacagtttgtgagcgataacccagatgtgcttacggtagatgccaaaggtaatatcacaacgaaaaagtcgggtattgccacagtccatgtgtctgctagaggtattgagggggtgaatgtcatctctgttgatcacagtatttatactccttatgctgaccaagatggttttgaagtagatgtttatccaagagcagtaaatttacctctttctgctacaagacagctcaaagttcatgatgctgatggtaattatatttctcaagcaactacagggattaaatactatattagtgatagtaatattgcagatattacagcagacggtttagtgattcctaaagtacttggcaaagcaaaaatcacgattatttatcaaaatatgcagacagaaattgtacttaatgttcagcaagaactcttgggtacaattaaagtatcgaataaagagggaggaattacatctgattcttcggggaatattcttatggttgcctcaggctccttacctgatggtacagccgtatcaatcgaaaaagttgctttagatagcgttggtattccattgccagccaaagaatatttagctggtttaggtgctttcacaattgatttatctggtgaaactgcaactaaaccattacaactcggaatcaaagttggtgattcttatattgatcctcaaacaggaagtacagaacagctgaatgaaggaacagaggtgttgttttggaggaaaggtatatttactgatgccaatggcgttgaacgtgaaacatggtggttactggataatggatttgttgatgcgaaagggatggcaagaacagcaagtccgccatttggaggcgtgtcagtttcaggaacagtggttattacaacacggataaaaaatgtggataaaaagactggagcaatgacaattgttcagtcatctactgattattccttcatatatagtatggcagctaatgctgtgatgagcgttggtcgtggtggtttggtaggtttagcgatagactctgctttcacactttatgatagtttctctgtcgtgacttatacgcttgcaggtagctatagtaaagaagtgccagtaaataaagatgatggtggaataaccattaataaaattgaagttccaaaaaataataatgtagaggaaccaagtatttctggatattcatttaatgcaaatacaaatgagttaactgttgatgtacaaaatgtatctaatgcatttgatctaaatatatggttggttccacaaggtgatcaacttgaccatccacgcaataaagcagaacatgggctcatatggaagtcttataaagctaattggaaaagtggaaatacgtattcaattgtaatagatgatggtattgctctaggtttacataacatttacctcgagaagaaattatatacttacacagataatggtattcgaatagcgagtgattattctgaatactcagattttgtaagtttaaaagttcaagcaccaaaagtttcaatagcattgagtaataaagaaattattattacagagcaaggtaagcaaacttcagattttggagttaagcgtattgttaatgctgatgaaaaaggcaatggattgttcttatatttgccatcaaataaaactgatccaattacatacaatgaacaaggaaccttagcatttattgcggggagaaacacaatttatgtgttagatatgatttcttataaaatcgtagattctatcactgttaatagttcaggcgaatacatctctgcacttctatacaatgatggttggttgtatgtcagtagttatggaccgtcaccactgattcgtattaatgttgatgagttatcaacagagtttctaaaagtacaacaaagtttagatatttcgactgctgctgtaactggctttggagatatggcaattagtcatggacgttacttggctgtgattgcatcagtttcaaatcgtggtgttctaggtgggataggcggagcagtttattggacaaaagaccctgttggtgatatttatgtaattgatttaaataaaataaattatcaaggtgaatttactgacaataatggggtagatattattaatgccattgacctaggtaatataggtcagcgtccaatgcgtattgccgaagggttatatgcaggtgagtttataatgacgagtttgcgagatgtaaatcaaggggtaagcaccattaaagttggtttggataaccaaggtaatctcacgcaatcttctgtgcataaaaaaattagactaaagccaacctatactcaaagagactataatccaagagctagaacaaatagacaggaaattcaaaactcctctgatgtcgttttagtcaattataacaatatgatgtatgctttggttgctgattataatttttggtttaatgatacttcagtatcagagtatggtatgtggggtgtaaacaaaagaataggtgggaaaatagggattatccaagacccatttgggtattatggtgaaccaatgtttattggttcaacaatacctattattggtgcatctatagagacattgactattactgataatggtttattacaagctagtgtctggatggatgaaatgggaggccctgatgatagctattattcacggatgtttagaagtgtttttgtctggaatgttcaagacttattagattctgctgataggtttattaaagctggtaaggtggatactcaaaagccaattgatgcggctttaccttctcgatttgatgatttaacaggaactaatgttttctataactctgtgaaaactattcaaagttattcacatgagcagagttctatatttgatttagatagttatctacattctgaatcagataaggatgatcaaccagctgcacctacaccttcttcagaaaaacctgattatagtggtcttgacattaaatctatgggttcagtaggaaattctctagttagagaatatgcaaaaaatctatatatttcatctatggttcaagtcgagcttgtaaagaacttgtatggttcagcgactccggaattagaaaaagttgatattgctaagcagctattcttatcaacatttgctgatgctaaaagtgcggaatttgctttaactacagctgataccgagttatttggtgtattcagccagctcattaatatgtcaattcaagagattgaagttacgctcagactttcaattttaggggagcatctattaaataaagatatgaaatggatgttggatcaattaaatattgtttttccaactccaacaatttcaattgaagcattaaacgactcaattaatttagaatctttaaatggtttattaaacggtgaagatgtagaaatccagctcactgataatgcgatgtcattaaaaggagctgggcaggctttggttgtaatcttaagtttaactaaaggtgctccaccaaatactatatatatggcttctaaagcagaaactgtggtggcgaccaatgttgtcagaagttcattccgtactgctgctcaaatcgcaaaagaggttagtcctcaactccttaaacagagtctacaacgatctaaaaatttagctgcaacggctgcatctgtagcaactaaaaatgtttcaagtatcattaaagagcaaaatcagattgtaaaaatacaaaagagtgttgctactgctattagagatgcgattgcaaagaatgcgaagacgattaaacaagttgcagcgactacagcagctattgcatctgtatcttcaataatttctcaatcaagtggtgtgactaaccctggttcaggtacttcaagtggttcggagaaaaaagagcaaaagcgtaaaaatacggattcatattttgttggtggtaattccattctaactgacaagacttacaatatatttaaagatctgatagagaacggcgatggcattaaatatgattctacaacgcaagcaagtttattgaaggagtatttagaagatttaatcgaccgcaaaattttatttgcaggttggagtaatctcgttgaagcgaaagttgtaacattatcaacaactggacagaaaactagtgatagtaaaggttttgctcaagttgccatagaactatatttacctatgagcccatccatttag

SEQ ID NO: 54108 - DNA, 999 bp, Acinetobacter baumannii
atgctcctcacttttatcttattctttgtgtccgccgcagcgatttatctcgcctgtgaatatttcgtcaatggtatcgaatggttcggtaagcgccttaatctaggtgcaactgcagtaggttccgtactcgcagctttcggtacagccttacctgaaagtgcagtcactttcatggcggtcgtatttggcaataccccagagcaaaaagatcttggtgttggagctgcaatgggtggtccattggttctagcgactttaggttatgccgtagtcggtctggtattaattcttcatcgtaaaaagttagctcgaacttcacataaagtacaagttgattacgcccgtttaagccgagaccaagtttcttttcttgctatctttgttttaaaagtagcacttggtttagtcgcatttgccattaagccgtggttaggcgtgctatttttagcagcttatgcagcttatgtttggcgtgagattaaggaagctgacacatctgccgatgaagaagaacttgaacctctcaagtttcgtccaaatacagccgaaccatccctagggtgggctggtctgcaagtactgctggctttagtagtgattagtatcgcttcacatacttttgttgctcagcttgaagcgattggtacagcattaagttggccaccgcatctggttgctttgttgcttagtccggttgcgactgaattacccgaaattatgaatgcgttgatttgggtgcgccaaggtaaagagcgtttggctttagcaaatatttctggtgccatgatgattcaggccaccataccaagtgcattaggtattttctttacgccatggcgctttgatacattgctattagcatctggcattattactgcactagccattgtgttcctgtggaatttattccgccgtggtgcagtcgatgatcgatcattggttgcagtcagtgcactgtacggtgtttttgcaattcttgttgtgatttatctctaa

SEQ ID NO: 54109 - DNA, 762 bp, Acinetobacter baumannii
atgagtcatgaaagtttatctaaaagtttaagtaaagttccagaagttacgttactgttctggatcattaaaattgctgctaccactttaggtgaaactgctggagatgcgctatctatgtcccttaatttgggatatgtaattagtacagttattttcgcagtgatatttgcagtttttgttggcttgcaaattaaagccaaaaaatacaattcatttttttattgggcgaccattattgccacgaccacattaggaacaacaattgccgactttgttgaccgaactttaggtgtgggttatgcaggcggaagtttaatattgcttattttattaggtctctctttgtttgtctggtatttaagctgcggcacaatttcggtaaaaagtattcaatctgctaaaagtgaagccttctattggctaaccattatgttctctcaaacattgggaacagcattaggtgattggactgcggatactcaagggttagggtataccagcgctgctttaatttttggtactttattactggtattagcgatctgctatttctataccaaaatctcaagaacattattattctggttggcctttgttcttactcgaccgctcggagcggttttaggtgatttcctcgataaacctatcgcgcatggtggattagagctaagcagatttagcgcatcttttgttttgttggcttttattgtggtctgtttaatggtctttaaacctaaagcagcagagacatcacattaa

SEQ ID NO: 54110 - DNA, 324 bp, Acinetobacter baumannii
atgaaatttatattcctctttatgagcgcgatcactcttccatgctatgctgcatctgaaactatggaaacgcattattgttatcttgtgaaaaatgctgcaaaaggtgttatggatgcgagacaacatgatgtaccagtgattgaactacaagagattgctagtcatcttgaagaagcagaggcaaaagagctttatcaacaaattatagatacagcgtattcttctaagttatttgaagatcctttaaccaaaacaaaagctgttgaagactttcaaatgatatggcatgaaaaatgtttagcgaagagttctataagctga

SEQ ID NO: 54111 - DNA, 1107 bp, Acinetobacter baumannii
atgaagaatattactgaaaaatcgctttttgatgtcttcacacaacatcaagcctatctttatcgagcatcttccagatcggtaaatgagctttttagattttttaatactgaaacgatagctatgcttgatcgtttggagcatttaataaaagagcttaatgatactgaaagggctgctttagcaggtggagaatacacaactcgtcaccttaaaaatattcaacttgtgatttcagattggtttaattcaatacgtgctgttctaccagaaatgtttgctcattcggcaactagtttggctgtttatgaatcaaattatgtggctaagttatttagtaaagtcgttaaagatttagagggagagcacctctataaattaataaaacgagttccattagcggggggtgccttagttgatgaatccttagctcaaattagtgagaatgccttgcaaagaattgaatatgctattcgcgatggaatgaatacaggtatgacacctcagcaaattattaggcgtattaccggtacgaaacgccttaagtatgaagatggattgctcaacagtaccagaattgatattgaacgtattgtcagaaccctgcggagccatatttcaaatcaggtctatttatataacttcaaaaaatttaattttgaatatgtcaggtttgtgagtgtacttgatgggaggacttctaaagtttgtgcagccattgacggttcaatttggaaattgaatgatccagcgaaaagggtgccacctttgcatcccaattgccggagtattctggttcctgttagtaaggacggaaggcttattggtaatcgatcttttattatggatgaaagaaggatgcgagacattcctaaagatgaacgggctcaattaatgggtcaaatagatgcagatatttcctttaaagagttttttaaactgaccgataattttttccaaaaagaatggttaggccctaaacgctataaattatataaagaagggcaatttgattttgacaaattctttgatcctaaaggccgactttatactttggatgagctgagggagctcgatgagcgaacctttaaaatacttgggctgtaa

SEQ ID NO: 54112 - DNA, 1668 bp, Acinetobacter baumannii
atgagtaataaagtcattgttaaggaatatcaacctagtattgggcattatgctggcaatccattcattgaagcattacctcctattctggatacgcctgatattatcaaagcactgagagggaaagtaaatttcgatattacagaccaatctctaccagcatcacagcgtatacaccttattcctcaattactgaataatttttttcatccaattgaacgacatattgaactttggacaaaattttcaattatgttaagacaagggtatgtcggtcgaaatatatcaaatggagaattgaacaaacatattcagaacggctatgagcgaacaatgaaaggtgatatttcagcttttaggtatgagcctgctcgttcaacagctcaaagtatgagtattatcggatgttctggaatcggtaaaaccacaacgatcaataatattcttagtgtatacccacaagttatttatcacgaaaagtataactttacccaaattgtatatttaaaaattgactgtcctcatgacggttccctaaaaagcttgtgcttacatttctttagagccgttgatattgctcttgataccaactatgaagctaaatacgctttaaagcgtcatggtattgaaacgttactcaatttaatgcgtcagattgcaaattttcatgcaattggcttgcttatcattgatgaaatacagcaccttaatatcaaaaactctggcggtgctgacaaaatgttaaatttctttgtcacactcgttaatgtgattagtttacccgtcattatggtgggtacaccaaaggcaaggtatatttttaatgaccttcgtggtaaccgtagggctgctggatttggatctgtattatgggaacctataaaaaatgaaccaaatcttgagttaaataatcgcatatttaaatctgaatggaatgcttttactgatgctttatggaaatatcagtggttaaacaaagcagatatgcatctctctgatgagattcgtgaatgtctttatgatcttagccaaggcattcttgatattgctgtcaaattgtttgtacttgcacaaattaatgccattacctctggcctagaacgtattaccattaaattattaaaaaagacttaccatgatgaacttaaacccatccacccgatggtcaatgctcttagatctaaagatccagaaaaaattatacagttttctgatctaattattcctgaagttgatcagcaaattcttaaattacaaatgattgtagataagcatactgaatctactgagtatgatgatttgagtgaatacaatggtaataaagaggctatacgcttacatcaccttttacttgggctagactttaaatctgaacttttagtaccaactattaaacgagcctttcagcaacatccccatctttcaatgcaagaacttatgccaattgtcatgatatggctgaatgatataggcaaaaatattcagactaacccaaagcctaaaaataaaagtaaaagggttaaacaagatcaatggcatactttagatactgaggatttacgattccaattctcacaaaaagatgagaaacaaaatttctatcaacatcttaaagaacatactcagcttatttttaatatggaacgctggtttgagcaggtgagttag

SEQ ID NO: 54113 - DNA, 2142 bp, Acinetobacter baumannii
atgctgcgaatcaatgatgtatatcagtatcaggatctttcgattagaatcctcaaaattttatctgaacatattgtttggattgatatcaatgatgtgaaagcacttcctgaaatcatcagcaaaacagaattatttcatgccattgaatcttttgaggtatttcgaattgaagatccatttcaagatattgctttcatacagcccgaaaaagattccatttctcaactaaaaagagatgaaaattacactctaatcaaaaatatagttgatcatgaacagttttatattccaagtatccgatcttcactaattaatgaaattataaatagtaagaaatctactaaacagacaatataccgcttgcttagacaatactggcaaagaggacagacaccaaatgccttaatccctaattaccaaaattctggtgcaaaagggagcaaaaaagttgcacgtcaaaaattaggaagaaagcgcactcacaaagaaggtactggagctattattacacaagagattgaacgcctatttcatctcacgattagcaaatacttattatcaaataagaaacattctttaaaatatgccaatcgagaatttcaaaagctatatcgcacacttcacccagatatccctgaaaatgaatatcctacactacgccaatttcagtatttttatcaccgagaatacaatcaagtaactcgtttacagaagcgatcaaacgacattgagtactctaaagacttacgtcagctccattcaactgttaatacacaagttcttggccctggttcacggtatgaaatagatgccacgattgctgatatctatttagtttctaatcttgatcgaagccgaataattggccgaccaacaatttacttcgtcattgatgtctttagtcgtatggttactggcttatatattggcttagaaaatgcttcttataaaacaagtatacaagcactttattgcgcttttacagataaagtcgctttatgcaaaaagtatggaatagatattacttatgaaaactggccttgtatcggcttgcctgatgcaattttggctgaccgagccgagttatttggtcatcaagttgaaaatttagaaaaaagtttttcgatcaggcttgagaatgcgccaccctatcgtggtgatctaaaaccaattgttgaaagcagattcaaattaatacaagctgaatttaaaccctttgcaaaaggtgtggtacaagatgtgatcacaaagaaacgaggtggaaaggactaccgtctagatgcaacacttaatctagatgaattcaataaaattattcttttatcagttcttaaatataaccaatttcaccaaatcaacaattatgatcgtgatatcgatctaccacatgacctaccagccatcccaatggcattatggaactggggaatacagcatcgtacggggaaactacgaacagcttccgatcaggctgtttatgtcgcattattgcctagagaaaaggcaactttatcaaatcgaggtttgaaaatttttggtgtgacttatacctgcccagaattatatgaaaagggttggctacaccgccaaaatacaataaatcgacccaagtttttatatgctgcatatgatccaagtaatgcagaaaaaatttatgttttctatgaacaaagtagtctgaaatattgggaagcaacaatttccgactattcccgtgaatttaaaggctatagtttttgggaagtttggcaaatcaatagtgttcagaaaaaaacttttgaaaaacaaaatataaagaacaacttagctcaatctgagttagagcaaaaaatcatggatattattcaacaagctagtagtgaaacaccattaccgactcaaagccagaaaagtcgaatctctgagattaggagtaatcgaacccatgaaaaagagcttgaacgttctaaattgaaaggtacgacttccagtgttaaagacactgctacaagggttatgaagcccgaaatcacacaagatgctcagagcaatgtcattcctatgccaaagcggaagaagtcatctgacgaacttgatgaggatttaaagttacgtttccctctataccacgatttactcagtgaagatgatgagccataa

SEQ ID NO: 54114 - DNA, 807 bp, Acinetobacter baumannii
atgctctcagtccaacaacaacagaaatggatcaaagatggccgaggtgatggtgagttatcatcatataaaccgtggttgactgttcgtgatctatcatcacttggtcgttctcatcgagtttatggccataaaacaaagcggacacaccatctactctcagacttagagctcgctattttcttaattttagaatggaatccactgattcaagatatacgggaacaattccctctccgaatagaacaaactgaagaaatcgcccgtttaacttgtattccacaccctgccgttagaggcattaagcagataatgagtacggatttttatgtatttagttccgactctataaatcctcgatttagcatacaagctaaatatcagaaagatcttgaagatacacgtacaattgaaaaactggaaatcgaacgacgttattggcaaagtaaagagattccttggcaaatcatcactgaacaagaaattcctaaagtggtttttgacaatatcaaatggttatatcctgccatcagagatgatgatcacatcaatttgtacgatcaaattgaattctatgtaaagcagttccataaatatccaaatttatccttgattaacttagcaaaaaaaattgattcatcttatgaccttgagataggtacatctctatcagaattacgtgtactttttgctcaacgttattttaaatttgacctaaaattaaattacaaagatttagtcccacccaatattcaattaggcgatctaacaatttgggaggagattcgttatgctgcgaatcaatga

SEQ ID NO: 54115 - DNA, 429 bp, Acinetobacter baumannii
atgaaaattaaatttcaatatgttctaagagaagaatatgaaggtgatgaaggagtatatgtaccaacactcggttgggaggtagccccatataaaaatcaagcggagggatttgatgcatatcttagaggggatgaagactttttggattttatttcaagcatagataatttagaacttatatctgaggctttattaaaaattgagagtatattgagaaatcaaagaaaagaaattattttttctccttacggtgatatggggggaagtgtgaaatttacaaaggaaattacgacatttaaacttcgtactaacaaaactaaaaattatcgtggagaaatctctactgaattatttttaaaagtattgattcaatggaaaaagtatttggaatctaatacaaaagagtgtgaggcagtagttatataa

SEQ ID NO: 54116 - DNA, 405 bp, Acinetobacter baumannii
gtggttgaatgtatttctaattccattggaaaagcattagttgaaaaagggagtagtttaaatagttttttcaagttatcagtaaattatgattatggctataattatgattatgctttaatcgtaggggagaagtattttattttaggtggttttgttaaaaataattgcctatattactatatttatgatgattatgtgcgggtagtgcctactattctttttgatattgaaaagtattgtttaaataatgatatgtctttttatattgataataatcaaggtggttgtttaggtgttgtttttaatcctcttaataaaatagattattggtatgaaaagtatttggatgaagatgtggatgtggtggaaattgttaataatataattaatttagagctgtaa

SEQ ID NO: 54117 - DNA, 375 bp, Acinetobacter baumannii
atgtttattttagatcttaaacttccaaataatttacattctgaaatgatgttggagtgtgaaaatattccgtgtttggtgaggataaatagtatatttaatattgatttttttgagactgttcctcatatatctggacaagttttagaatggtcatggagcgaattaaataaaagagtgcctgctggctctggaggtgaatatatgtactataaacgtagtttaattacattagaaagaattgataaagatcatttcaagattttagatttaagtatgtttttaaatggtataggctggtgtaaagttattgagaactctatatatgcggaaccaaatcctaatttgtgggatacggatcctgatgaatattaa

SEQ ID NO: 54118 - DNA, 375 bp, Acinetobacter baumannii
gtgttacaagttcatgctaaatttgaagatgatcttcatacagaaaatatgcttaaaacatcacaaataccgtgtttatgtaagattgctgaaaaatttgaaatcgactttttagtcgcttatcctcaggttacaggttttgtaacaggttgggagtataaagaaattgatttaagagtatccgcaggtgctggtggggaatatcttcattataaatatggattaattactttatctaagcttgagaaagatttatatattattgaaaacttgtctatgttcgaatcaggaagtggatggcttccagtagttgaaaatagagaatatagccatgtagctgaagttgaagagccagattggttgaaagatttatga

SEQ ID NO: 54119 - DNA, 156 bp, Acinetobacter baumannii
atgcttgatgatcttagtttttttcaaaaagttggtattttcgtacaaccaattattttagtgataatgggaatttatgggccgaaatcattaagaaatgtctcatgggcaatgttgttttttacgttaactacatatctttttaatttattttga

SEQ ID NO: 54120 - DNA, 333 bp, Acinetobacter baumannii
gtgttaggtatatctttaagtgaaaactggaatgatgacactatttatatatacggcatataccatagtaataacgatatattgttttatggaatttctggggaacatggtaatgaactaattgcatttaagcagagagaaatagaaataaaagatcctaaagtacggtatgagatggtctattatggtaatgatggtcgtagtcattttatgatgcttcattgggctttagctgaagatggcttattagataaattattagaacgtgacccagattctttagcacttttttctaagttaaggtggcttgatagtaagcaagattttacttaa

SEQ ID NO: 54121 - DNA, 543 bp, Acinetobacter baumannii
atgaacgaaaaagcaattagccaatatttaagttttattctaagacacaaaccagaagaaattgatctaacattagatcgtgaaggttgggcaaatattgaagacttaatttccaagtcacaaccagtcaacaatacaactttagacgaagaaattattaagagtatcgtgagtaatagtgataaaaagcgcttccaaatttctgacgatggaaaatatattcgcgctgtacagggccactcaaccacaagtgtcgatatcactctaaataagcttgtgccaccaatctctctttatcatggtacagctcaaagatttatagactcaataaaagagcaaggtttgatctcaaaagatcgtcaatatgtgcatctaacagaaaacaaagacaccgctctatctgttggagcacgttatggcaaacctcagattttagctatacatgctttagaaatgcataagaatggattcgaatttttccaagctgaaaatggagtctggttggttaaacatgtaccagtagagtttattgcttttcagtag

SEQ ID NO: 54122 - DNA, 243 bp, Acinetobacter baumannii
atgtcagtttttagatcacgattttatcttttaatatgcgctataaaaatttcccaacttattcttctttattttaaatccgagaagagtggtgaaagtattcaccactctcattttacttatcgtggtgctgaagctgatggagcaggtgcgggtgcagcaggtgaagctgctactgcaggtgcagttttttcctgcatggcgttagctgcttctggtacggctttatctgttttagtctga

SEQ ID NO: 54123 - DNA, 1203 bp, Acinetobacter baumannii
atgagcgtttcatctataaataattctgctcaaatggcagtcggcatacagttcagcgtgggtttatctgcattaggttgtgaacctgatcaaatcaaacaagcattacaaaagccacagcaaactttaactttgcgtgatgatttaatcgttgatcgtaatgtttgggtgggacaatatacgcacctattgtgttcgagtgtgccggatgccttacagtctgtcgattctcgtaatttaagatttgctctgactgctttagcaaaaattgaaaccgaactaaaaagttatacagagaagtttccatcaaaacgtttagcgattgtggttggaacctctacttctggtatttccgatagtgaattattgcttaagcaatattttgaaggacaaactcaacaactcatttctcaccgacgtcaggaaatgagttgtttggcaaaggccttacaacagtatttaaattgggaagggcctgcatatactatctctaccgcttgttcctcaagtgctaaagcattggctgctgggcagcgtttgctacaagccgatttagctgatgcagtactagtaggtggtgtcgatactttgtgccaactcacactcaatggatttaatagcctagagagtttatctagcgatatttgtcagccatgtggggctggacgtgatggtattaatattggtgaagccgcagccttctttttgctcactaaagaacaaacacctgtcatgttaatgggtgcaggagaatcaatggatgcatggcatatttctgctccgcatccggaaggtaaaggtgctgcgatcgctatggagcgcgcattggagatggcaaatatatctgcacaagatattggatatttaaatcttcatggaactgcaactccacaaaacgatgccatggaaataaaagctgtacgacaagtctttggcggttatcaagttgccttaagtagtaccaagcataaaacgggacattgtcttggggcggctggtgctatagaagcgtttatttgtgagcagattttaaaagatcaaagctggctaccattgcatcgaaatattgagattgatccggatttggttgatcaaaactatgtgcaaaataccgaactaaaacagcccatccgttatgtgatgagtaattctttcgcttttgggggaagtaatattagtcttgtttttggagtgaagccctaa

SEQ ID NO: 54124 - DNA, 546 bp, Acinetobacter baumannii
atgcagcgcaaatggatgatgatattacttggtagttacctatgttttacgggctgccaagtgatgccacatgcgaaaggtttacaaagtcccttatggcaaactcaagcttatcaaagacaagatcaggttgaagttcagtggaaaaagcaaagttttagttttttgctttatcagcaacagcaaggaactgtactggatatggtcgctttgagcttgactggtcaacagttgtttaaattacagtttgatgggcaacgagttcatgtagagcagcgtattgaccaaatgcgcttattaccttttgaatttgtagtacgtgatcttttatttgcgacctatccaaaattttcgagcttgggacaacaagctgtagaaatgaagcaacaggctaataatcaggtgatttatattgataaacagcctgtattacacatcaaaaaagatcagggaagtatcgaactacttaatcagcaagttccttatagcatgacgctaagttcgattgaaaataccttgcagcctcaaaaaagcagtacaccatga

SEQ ID NO: 54125 - DNA, 2256 bp, Acinetobacter baumannii
atggctgtggggttgggtataacgtggcttaaaaaagatatccatattcagacggatatttttgcgttattgccgaaaatgcagcaggacccacagcttgcacgtactcagcagtatatgaatgagcaactcaataacaaagtatttgttgtagtggatgctaaagatgagtctgaaatacaacgcgcgacggagcttttaacggtacaagccaaaagcagtgcattatggcaacctttaaaaccacagcttaattttgatcaatttgcaaagcagctctatcaacatcgggtaggtttgttaagcgagcaagaccagcagttactacaaaaacaagattattcggcacttagcgaacaaagcttaatgcaaatgatgagtccgggcctacctgtgacagcagaatcacttaagcaagatccattactcttgtttactcgttatgccatgcaattggccaagccatcgcagcaagatattgaaatagaacaaggctttgcgactattcatcatgatcaggggctttcacggttatttgtattacagttaacccaaagcccatacaatattgattatcaagaacaagtatcgaactggattgatcagaccaaacaaaaattagctgcaatcgggctaaattcccattggacgggaacgatcttatttacgaattttggaactcaatcagctaaagaggaaatttcgaccattggtgttggttcgacattaggtcttatttttctggtgtggtttggttttcgctcattacgtcctatggcgacagaatttattgctgtttcgaccggaagctttgttgcatttgcagcgactcactggatatttggggaaatccatctcatcactttagtatttggcgcgagtctaatcggggtgtgtgtcgatttttctttttactttatggcaatgcaatctcagcatcgcaagctaggtggtttccagattttattacctttattgcctagcttatttatgggcttaatgaccaccttggtggcttatgtctttttgagttttacaccatttcccgggtttaaacagattgcggtattttcaattgtcggattaactgcggcttggattagtagtgtgcttttattaccaagactacctgcacttaatgcccagccagcaatacatgctttgtcatggattggacaaacacgactgtggtttcagcaacgtgcaaaaatacgttatagcttaatcgcgactatcttagttgcggggacagttagtcttttctaccttaaaacaaacgatgatattcgtaatttgcaaggtatggatgcgagcttaaagcagcaagatcaaactgtacgtgaacaatttggacaacaacaaggcagtgattattttgtggtaaaagccacctctgcaaatgaaatgcagcaacaggaacaacaactcattggacagttgcagcagttacaggcaaaaggggaaatttctgcgtttcaagctttgggacagtggattccaccgttggttcaacagcaacataatgtgcagctattacaaagtataccacgctcgactttagaagaatatgcacaaagtatggggctaaatgtggctgatgttttgcaatggcaacagcagctagcgaaacaacccttattggatttcgccgtatttaaagatcatcctttagcttttttacagctccaagcgaatgagcgcttggttatggtgacaggaataaaacatccagaggttttaaaagggctacagtctcaatatgtgcattttcagcaaccgattgcaacaatgtcgcaaatgtttgccgagcatagggtacaggctcagcatcttctgatttatgcgttaattggtttaacactaggcttagccgttatttatggactaagttcaattgtgcctttagttctacctgtaagtttggcgttattgagtacttttgctgttcaggcatggttaggtgtagaaattaatttgtttagtattatggcaactttcctgattattgggattggtgtcgactatgcaattttttatcgacatggacatgatcatccacaagtagttggaatggcattatttttatgtatgatgtcgaccttacttggctttggtttactttcatttagccatacgtatgcaattcactgttttggtttgacggttttatttggggttattttctcattcatctatgcgactttattcaccccagcagatgaaaaacatatcgtgaatttacaagaccattcataa

SEQ ID NO: 54126 - DNA, 927 bp, Acinetobacter baumannii
atgacacagtcagcttctccaaaatggaatgatattaaagagcgtggtggcatgttgccattaatgttaatgctttggttttatcgttttggtggacgctggttatgtaaattggtgctgtactttgtgattatgtggtattggttatttgcagttgcagcaagacaagcttcattactttacttacgaaaattacatcgttttgcgggagccaaatctccatttacacatgagccaactttgggaaatagctacactcactttatgcagttcggcgaatgtattttagataaaattgaaggctggttaggcaatattccagagcaaaaactagaaatctttggacatgagtattttcatcagcactaccaaaagggcgctctaattgttgtctcgcattttggtaatattgagttgcttcgcgcaataaaatcagaccatccacagaaaattaatgtgttggtttatcaaaaacatgcaacgaaatttaatgattttctcaaaaaaataaatgataaagcagatgtttgtcttttatcggtcgatgagctcggtattgaaacggctatgttgctacaagataaaatgcaacaaggtgagtgggtcattgtcgcggcagaccgagtgcctgtgcagtcagaccgagtacaacagctagagtttttaggtgaaactgctgcatttccacaaggcgcatggattttggcaaatttgcttaaaatgccagtcatagccgtattttgttatcgcatgcagcaacaatttcaagtgcatatccatctcatttcagagcaggtagatttaccgcgtgctcatcgtattgaaagtatgcaaagtgtgacccgaacctatgtaaatgtattagagcagcattgcatgcgagctccttatcaatggtttaatttttataatttttggacgaaataa

SEQ ID NO: 54127 - DNA, 1659 bp, Acinetobacter baumannii
atgcagtgtcattttcagaaattcatcgattcggttcagccactttgcttagacagtgctctgcattcaactagctttaatcatttttggcaagatgtggctttacaagctggtgcaattgctcaattagaaaatttaacttgggctttatgggaaacagatagttacgaatttttggttttattatttgctgcattattggctaaaaagcaggtgctgttaccgccaaatcgagtacgtgaattagaacaggactttgcagcacagcatatttattttttaaaacgtcaaagtgttgaaacagttgttcccttatctttaacgttggatgatgactttttagagcagacacaactctatttttatacctctggttcaacagggcagcctaaaaaaatcccaagaaccctaaaacaattactcaatgaggtacaaggcttaagccaaagttttgtttttgaaaataatgctatagctattgcaacggtgagtcaccaacatatttatggattactgtttaagctacttttacctcttgcaacagggcgttgtttttatataccgcaagttgcttatccagaagatgtcgtacaagttcaaaaacaattaaaaacactgggtttaagtaattatttgatttcaagcccagctttattaaaacgctggacaactgatgtggttttagaacaatgccagatggtgtttagttctggtggcaaactagaaagtggcgttcgtcctttagtcaattgcttaattattgaagttttgggaagttcggaaacgggcggcattgcccatcgtgctaaagatgatgacgtatggacgccttttgccaatgtggctattcgtattgaagaccatcagctcatggtcaaaagtaatcatgcttatgaagatgattggattaccacaggtgatcgtgctgaatgggcagatcacatgtgtaagagctttcagcttttaggacgcaccgaccgaattattaagcttgaagaaaagcgtttgagtctagatgcgattgaacaaagtattcaagccttagacgaagtcaaacagtgtcatgtactggtgtttgagcatgagcatcgtcaaatgctgggttgcattgtggttttgacagagcaggctcgtgagcagttgaaaaagcagagtaaagcagtctttgttggccatttaaaacaacaattgaaagatcatttagaaaccttagcaattccacgtcaatggcgttttttaagtcagctaccgcaaaatacacaatctaaactcgataaagtttatttgaaaacgctattcaagccgatgttgcaacctgttgtgctatcacagagccaaagtgcagatgactatatttttagtcttgagtttccacctgagttagcatgttttaaaggccactttccaaaccagcctatttatccaggagtggggcaaataggttttttacaacattttgctaaatcaatttggtccgatttaaattggtgccaagggtatgagcagttaaaattccaaaatctcatttgtccttatgctgttgagcaactcaagctttctcgaaaagagcataaggtgagttttgaattacgtgattcagaacagattctagcttcaggacgactattatttgctttgcaaacggaagtagagggttaa

SEQ ID NO: 54128 - DNA, 555 bp, Acinetobacter baumannii
atgaaaatgttaattaaagggataattacagcacttttcgtgctgtatccctttattgtgggctggagtttatcgcacggacaatttgtctgggtaagtgcattgcttatagggctgggtgttttacgtttatttagtaaaggtaatcaccttttatggcctttaaccagcctcgctattgtttgtggtggcttaagcttactactacaggatcatgcatggttaaagctgtatccggttgggatgagtttaggcgctttaggtatttttgcattcaccttattaaaacctccttctatgattgagcgttttgctcggttggttgaacctgatttaccaccatcaggagttcattggactaggcaggtcactaaggtctggtgtgttttctttttatgtaatgcattaattgcattcattacggttttttttacttcgactcaaatttgggtcatttataatggctttatttcttatgtgctgatgggtatgttattccttggcgaatttattttgcgtaaaaggcatcagcgtttacattcttcaaatcactaa

SEQ ID NO: 54129 - DNA, 615 bp, Acinetobacter baumannii
atggtaacattacatcttgctcagttaacgcttacacatgcccaaccttcttacgcggcacttgagtgtattcccgccatgcaaagaaggcgtctgtcacccttggctaaattagcgctcaatagtgcaattagtactttagatggacagggtgttgattatattgtttgggtatcacgttatggtgatgaagccaaaactttgggaatattacaagatgttctgcaaggccaaacaccatcacctacgcagttctctacctcagttcacaatgctatttctggtttgtattctattttatgtcaggatgacactccatctaccagtctaagttgttcatggactgaaggattaatagaagcttacgctgcattaaaagctttaccacgtattcagcgggttttagtcgtagcctacgatgaacccttaccaaacatttatagcgagactattgattttcctgcctatgcaatggctgctttagtaagtctggatcagcctaatttgcaatttactgaatggtcacctacagatgaattagacggtctgacattttctcgtttttggcaaagtgctgatctttctatgtctgaatatgggtggaaaaaatgctaa

SEQ ID NO: 54130 - DNA, 831 bp, Acinetobacter baumannii
atgagtatgaacgatataaaaacagtgagaatcagtacagctaaagaattatttgatacagtttctttagattataaaaatttaatagttgattatagtgagaatataaacttcataaactattttgatcttaaaccagaagattatttgtattttgcaaaaagtgatcttatgaaaaaagataaaagaggtttaattaatgcattgtctaatgctaaaagagcaatagattgtttaattgaaaatatattaaaaaattttaatataaatataaaaaaattaccaaaggttgcactagatttttgtgaagaagttttagatgacgaaagcaaaaatattaaaccattatcattccgtttgttttgtgctttaggactttctccaattatattagtaaaagaagtaagaagtttaagaaataaagtagaacatgagtttaataatccgcaaaaagaagatgttctaagggcttgtgaagttgcagaattattaataaataatttaaaagctaaagaggtctattcatgtggaatagagatttctgatattcatcgtactagacatacctcacaggggggtattaaaagtataagattcgactatacatttgtgggagatattaataatggacgttttaatatttatttctatgattcgaataaggggatttgccaatactttctaaatccagaagataaaatatactattattttttaaaggcaatgtttattgctgagtttgatacagatgaactagaattatgtattaaaagaattgtaagagaaataaatccaaatttagatttagatgaaataaatataagaatttaa

SEQ ID NO: 54131 - DNA, 285 bp, Acinetobacter baumannii
atgaaaatttataaaccctttttggctttaagtttcatagtcggtagcttaggtgttgcaggttgcagccttcatgctcaacaggagtttgaaaaaatttgcctgtcaggtgggcatagcgaggccagttgtgagtgtatttaccagcaacttgaaaaagcttattccccgaaaatgatgcagcgcctagaacatgtcagtttgcaaagtcctgttctcccacaggactttgcccctaattttttcagcgtcatgcagcgttgtgacaaaagtagtctgggctaa

SEQ ID NO: 54132 - DNA, 444 bp, Acinetobacter baumannii
atgaaatttttatcatgtatatggatatttttattatttggttgtacttctaaaaacataaattctcaatctaccgatattaattttggaaaatttaaatatttccaatctatgtatagtggagaaaaaatataccaaggttttgttacaagctcttcttctttaaaagaaatttctgaaaaaaatgtatttcctatttctaagctaaattgtttggaaaatcagcttatggtaagaggtggggtagacttagattcagaagaaattaataatcaattatataaatatatggtacatgtcgaaatatgtaaaaatgatgattgttcagtcgatattaaaaaagcaaaaattgatactgaatgcagaattgaattaagaaaaaattactcaaatgatgcttatcaatcaaataaagcaaagttgacgaatgctaattttgaataa

SEQ ID NO: 54133 - DNA, 369 bp, Acinetobacter baumannii
ttgtttaaaaatctgaagcttaaattagtaactttgggtgtgccattgtgggttatgacagggtgtggtcacgaatatacaattgagccggaaaggcttccagtagcctatgtaggtaaggcatataatcagcaattgaaaatcacaggtggtaaagtctcggaacaacattttgaattaacttctaatattccagaaaatcagggaattcaaattactccagtagatgatatagatggatacaatcatataaaaatagaaggtattcccaaatataaaggaagatacaaaattttaattaatgcatatttttatggaagaggcgatgacaagttaactaagacctatgaattcgtagttaaagaataa

SEQ ID NO: 54134 - DNA, 330 bp, Acinetobacter baumannii
atgaaaaaactaacaacagcaattgttctttcaatgagtggtttaatcgcatcaacagcgatggctgcaccaaatgatcatgaccatcatgataactaccgaaaccatgacgtcagaccagtcaaagtaattcataaagatgatcgtgccaatatctggcgagaaggccaagtcgtaccacatgaatatcagcacccacgttatgtcatcgactatcgtacgcatgataaattgactaagcctggacgttttcaaaaatggtataaagtgaacggtaactacgtactcgtaaatgagcaaagtcataaaattatcaaagtgattcgttaa

SEQ ID NO: 54135 - DNA, 873 bp, Acinetobacter baumannii
atgaaaaagctgatcagcctttttttaagcatgtcagtagtattattgacagcatgtagcaaacaagaaaatgctcaacaagccgaacaaaacaatgatagttccaaagtacaaaaggtagtaattgcctctacaggttcggatgctgacatttggcgttatatcgcatctttacctgaaacccaagctgctggactgaagttagaagtaaaaaacttctcagactccgtttcaatgaatacagcagttgcaaataaagaagtagatttgaacgcattccaagcttattcttatcttactgtatttaataattcaaacccggataagattgcagcggtttctaccacttatattgagccaatggggatttattcaagtaaatacaaaaaaattgaagaacttcctgaaggtgcaattatttcaatcccggatgatgctgccagcgaatctcgtgcgctactcttgttacaaactgctggcttaatcaagcttaaagctgactataatcctgttcagggcagtccaattgatgttatcgaaaatcccaaaaagatcaacatcaaaccaatcaaaatggaaactgcattacgtcttaaaaatgaatttgatgcagttgtattaaataataccatagcactcgagggaggtttaaacgtactcaaagattctatgttctatgaacctattgatcaaatctcaaaaattagtgtaaacgttctagcaactgctgaatcacgtaaaaatgatcctgtcttgcaaaaagttggtaagctttaccacactgcagctgttaaaaaatacattgaagaacactttggtggaacaaaagttgacgtagacaaaccaatcagctatctctcagaagctaaatag

SEQ ID NO: 54136 - DNA, 423 bp, Acinetobacter baumannii
atgaaaaaatatgaaggttttaccctcatagagctaatgattgtggttgctattattgcaattttggcagcaattgcttacccctcctatacacaatatagaattcggacgaatcgtgcagatgtgcaaaatgaaatgatgcaaacagcgcaacgtctacaaagttactatgtgattaatcataattatactagtgctacactcaataatggtttaactactaaagattatccagcatccaatccaatttatactattgcactagtcacaaactctcaaacatggacgcttactgcaactcctaaaacaaatacgattcaagttggaaatggcactgtacttttgaatagtgacgggcagaaatgttggactaaaggtcagtcttgtacaacttcaaccacttccaattgggatggacgctaa

SEQ ID NO: 54137 - DNA, 564 bp, Acinetobacter baumannii
atgttgaagcaaagggcatttaccttaattgagttgatgatcacacttatagtaaccgcagttttagctgcgattacgtatcccaattatagacgatatatggaaaaaagagatctggctgtggcacaacaggaggcgcaacatcttgcttcagaactagaacggtttaaagccaaaaactttagctataaaggttttgatgcaagttatatttataatgctggaacggtcactccttatgatgcaaccactagtagtctattgttgccactggatgctacatcgacaactgcaaagtatacactgactttattagatgccactcaacatttacctttatctattttaaagggctctgatggtaacgagacagcagattctgcgaaagtgcaaggtttaaactgggttattattgttgaacgggctaagaatagtagtggtgaacctaagcaagctaataactatgatttacttataaacagcgatggttttcgttgtatgacaaaagttaaaaatgtagtcaatggatatactgactgtggtagcaatagtgagacatggtaa

SEQ ID NO: 54138 - DNA, 2628 bp, Acinetobacter baumannii
atgaataaatctattccgctgtcaggtactggattaagtggaggaggaagtgatgctggttgggctgaaataggaaagttttctaaattacttagaggtacaaactataatattaaaactgcggtagtgggtttcgggagcgattttcccaatagttcaacttatgttaaagatttaccagttgatattctagatcaggatggcgatttacctgatggagatattaaaaatacatgtaactggggagcaaaaccacatgctcaattgtcaagtagtgtaggtggatttggtaatggcggattttattctgcacaatcaacacaggatgtgattaatagtatcaaatattttgtggatgatattcgccctcggtttaaacctgttcttactggatcgccaactttacctcaagatgcattaaattcattgcgtattcagccttatgcttattatgcctcttttacaccaaaacctcaggatcctactcagctttgggttggaaatatgaataagtataatgtcaaaagtggtcaattgtacgcaaaagataaatcgacaaaactatttaatacagatgggtcattgaaccaggctgctataggtatgtgggatggtggtgtaactcagcaactaccattaggtacacatttaaatacagataatattcgagttgaagatagaacgctttataccaaccgagaaattaaagggaatgcagcaccttatactgctactgaaagtgattcactcaataaagtaagtttgcagaacttatttgcaatagatccaagtggttctgcatcatttcaaaatgatcctgctaaaaactattggttaaatttactgggatataatattggtgaaaatgaaacggtaactttagatgatgtcataaagaaacctgaacttcgtcaagtcggtgcaataatgcattcaaccccaattctcttgacacaagagggtaaaattacgatatcaggtgggcaattagatactacaaatcgcaaagactatttgctgtttggtagtacccaaggtctcttacatattgttgatgcagaaactggaaaagaaacttttgcttttgtaccaaatgaaattatgcaaaaacaatctaaagcatttttaagtgagacttctagtacaggaggtagtaatcttttattttatggtatagatgctccttggagtgcttatacgcagtatgtggctaaaaccgatggtacattgactgtaaaaaattcaggacgtactgtaacagatagtacgagtggtaaagacattgctttaaaaggattgcaatgggtttacggcggtttgcgtatgggagggcgtagttattacgcgttagatttaacggatataacgagtcctacacttaagtttcatattaatccagctggtgcagataatacggatggaacaataaatacaactaaggcactaagctatatgggacaaagctggtcaaaaccaacattggcttacgtcaaatttggaggtcagaagaaattagtgatgtttgtgggggggggctatgatgaggggtatgaagacccagcctatgaacagactaataagaaaggttctggtgtctatatgtttgatgccaacaatggtaatttgctctggtggtcaagtgcaaatgctacagaaaataaaggcgcagaagcatatactcagaataatgatttaaaatacagcgtagtcagtcaaattaatgcggttgatcgtgatagtgatggtttggttgatcatttgtattttggagatttaggggggcaagtttttcgtgttgattttaataatgaatctactgataaaacagattttgcaaaacatgtggtaagaatatttaatcagcatgatagcgctgggacgggtgctagtccgcgtttctatgaaatgccaagtttttctgtttctagggatggaaatggttccatagtgggtgtagttgccctgagttcaggtaatcgtagttcacccttatcaggtgtgactggtacaaataatccgtctccgtcaaccagtgcgagtgatggcgtatttgttatttttgacaaggatgtggcgaacgcgaatttatatagtttggctgatgccgatttaaaaacaaaggatgttgctcttgcttctttaaatgcatattttactaataaatttactggtgatgcatataaaaatggagtggatatcgcgacaaaaaatggttggaaatatacttattcggatagtgcaggtgtgtataaaggcatgaatgggctttatgccttagatggtatgctctatgtcaatgtgttttatcgtgatggcaacgggataaatggttcttgtggtggcggagtgaaaggtaattcaaagctttatcagttttgcttgccaactggaaaatgtgatttttatggtagtactacaacgcaaccaaataatacagatttaggtgctggtattttgggaacaggactaggagactattcgggtaatactacgggtaataaactaataaaaaatgtagtttcaactgatcttgattgtacaaaagcagccaataaaaacttaccagaatgtcaagtatttagtacggcagtaaaattgcaacatttgcgctggtatgaagctcgttaa

SEQ ID NO: 54139 - DNA, 243 bp, Acinetobacter baumannii
atggtctattttaacttacaaggtgtagattttaagtttgaaaaacaagatccgaatattttgaaacaacctagtgaagtcagtgctataaggtcagcagacttaccagatttactaaaagaagttcctctgactaaaaaagatatttatttaattattaagcatgatgaagaaataaaagattctgtacgttctattctctttaaaacatacaaaattgatccttcagactatgagaaataa

SEQ ID NO: 54140 - DNA, 1200 bp, Acinetobacter baumannii
atgaatactaagagtaatgaaacatctcatcagttaactgatgaattctctactcaattaccaatttggaaactgttggcttttacagttgcaggctttctgaccattatgacagaaaccatgccagcagggcttttgccccaaatcagtcaaggcttacatatttcagaagcgtatgcaggacagcttatagcagtgtatgccttaggttctgttttagcggcaataccgctaattagtcttacccgtagttggaatcggagacccttattactcagtgctattgcagggttacttgtatttaacgcgattactgccttatcaaatgactatatgctgactttgattgctcgttttattgcaggtatggctgcgggtgttatatggggacttttagcgggttatgtaagacgtatggtccctgcgtcctaccaaggacgagctttagcaattgccggggttgggcaacccattgctttatcaattggagttcctttgggtgcatggttgggagcgttatttgagtggcggggtgtcttctggatcatgtctttattggcattaattttatttgtctggattcggtttagcattcctgattttgcagggcagtcagcacagaaaaggttacccattttaaaagttcttttaataccgggcattagagctgttttaacagtcgtcttcctttggatattggcacatagcattctctatacttatatttcatcatttctggcctcgacagggcacacatacaaagttgagaatatcctgtttatattcggcatttcttcaattgtcggcattctcattacaggcatgtttatcgatcgttcattaagaaaaataacgcttttaagtttattgatctttgctatcgcaacagtgctcttgggtgtttatagctcttcaagttttgtcgtactggcgggtgttgtgttatggggagttacttttggtggggctccaacactattacaaacagccttggcaaattctgcgggtcacgaagcagatgtagcgcagtctatgttggtcacggtatttaaccttgctattgcattcggtggaatgattggcggaggactgcttgaaagttttggggcagcttcttttccatggtttatgctagtttttgccttgatcgcattatgtaccgtttaccaagcccgtaaacatggttttatctcttcataa

SEQ ID NO: 54141 - DNA, 549 bp, Acinetobacter baumannii
ttggaacatttattttcgattgaaactcctagactaattttaagtgaattggaggaaggtgataaaacatctgtttttgaattattttcaaattcaacagtacttgaattctatgatttgaaagcttttgtttccttagaagaagcggaagttttgattgaaaaaatgcatctaaaatggaagacgcgtataggttttaggcatgctatccgtcttaaacaaaatagaactatgttgggaacatgtggtgtaaatagcatcaagcaagttgataatgatttcgctgtagtgattggttatgagcttcacccgaaggcatggggtattggctatatgcaagaagcgcttacagggataattcagtatttgaagcaagaacgtttatttgggaacaaaataaaatatatttgggctgaaatatttgaacggaacattaaatctcagcaagttgtaaataaacttggatttgaattaattggtaaaacagttaatcatactaacaatacggtatctgacaacttactcaaatttgagctgaagttgtactaa

SEQ ID NO: 54142 - DNA, 4053 bp, Acinetobacter baumannii
atgaattctgaattttatttgcaaagaaagcttcatgatcatgaacgagactacgatgaactcgaagttataaagaattttagaataatagttatcttagctgaacctggggctggtaaaacctctttactacagagcttttcaaattatttaaatgttaagaaaagaacagcgaatactttttcgtataggaataatctagaaaaaaattcaattttaattattgatgcattagatgagttagtaagaatagatcaatcagcggttaatagtttactaggaaaagccgcagatctagatccatctactttaattatttctagtagatccagcgaatgggatgaatcttatactagaataattaaagatcactttgagattgaaccacgcattcttcgtctgtttccttttaatgagttagaacaaaaacagatctttgaaaattataaattagaagaagattttcataaatttgaatctgaagtaaaaaaatataatttagaacaattgctttccaatcctcagtttttgaagatttttgcagacgcttatattgaaagtaatagagtttttactgatcgaaaatcaatatttagtcaagctgttaaggctttagtaaaagagacaaatattgctttcaatgtaagaaatgatctacctttacttagaaaaatagaatgtactgaggaaatatttgccaaattactgctatcgggatctgagggtgtaagcactaatgtagatgatctagataatctatatccgcgaatagattccttaattaatttggataatacagatcactatacatctttattatccactagacttttcaaactagctgataatgaaagtcaacatcagccgagccacaaaattattgctgaattcgcggctgcacattatttaataagaagaattaatgctaaccgtaatagtatttcactatctcaatgtctttcaattatagctcctaatggagttgtacgtgatgaattgcgaggcttattagggtggatggcagcgttaggtaataaattaacgcaagaaaccctaatccatatcgatccatatgcagttttagcaaacggagatccttcccaactgttatcctcatcaaaaaagtatttattagaggaattaattaatcttgctgatatagatccatattttcgtcgtagtgatatgtggagaaatttttcagtctcaggtttttttgacgatgattctatattaatagttaaatcaatattagttgaatcagaacagggattactaagaggattaattctagagttactagaaaatgcaagaatacttgaatctttagcaccagaattagaaaaaattctattagatgagaatattgataagtatattagaaagttagctggattaagagtaagtgaagtaattaattatgatgttaaacaatctattgtcagacttatagaaattggaacagaatcttcattagatattgctgctaatttgatagaaaaaattgacataatatctgtgcaatatgaaataattttaagctttctaaaaaaatgctcttttttatatccaagtcataatgagcaaggtataaagagaatttttggaaagcattattttatcaaaagtcttatttctttatttaattatgaattagtcattaatttacttgatgatttaagtcatgatcttcaatgtatttgtaggaaagagcattatgaatgctattgtcgaaatggggtaagcaaaattattggaacacttttagacagatattttgaaattgaaaaacagtcatatgaagctaatcagatttggaaatggctaagaaatttaaattttcatcaaggtaagaatgaaaaagatagcattgctgtaaaagttttacaaaacgaagatgatctacgtcagaatattattttattagcatttgaaggactaaaatctctagaggaaatccatcgagtaagctggcaatcattatcatattatactcattccgggctttccttaagattacaagatcattattttattttagattgggcctttgaaaataataatataaatttgtggacatattttgtaagttcgcatcaattttattcaactagtagaaatgagactaactatgagctacgaaaatatgcaaagttgcaggcaagagaaaaatctgattttttaaaagcttgggtaaaaaaaaatttagcttctaaacaagagtataaagagacacaagctttaataaataaacgtcgtgtgaaaaatggtaaattcaaacgacaaaagataagaaatgaaaacataaattatatctataataatcgaagacttatagagaggggagaacattggggacttttaaaggatttcgcaaacttaactttgaatcaacctcaaagaataatagaggaatttggagatgaagaattagtaaagacatcacttagaaactgtctaccatttattgaaactcatgttcctagtttaattgaattatctaaggcacaatgtgattctgtttgctattcttcagaagaaattttaaatgctgcgtgtttggaaatatttagagatagcggaaatcttgaaaatgttaaattagaattattaaaagtcttacgaacaaatatagatagtccttcttatgcggttgatgaaaaagaacatcaagcatttagacaggaagttgatagaatacttttccctgactctaaaagtcgactacaatttctaaaagattatattgaacctcaactgacctataacgactgtaaatacacacaagtaagctggttacgttacagtgatacattcaaagagtttcaagacacgttaccattagaatggttatataaatattcagatatcagtgtagaaaccacaaaaacattattcgatctaagtgctcaattttgtgatagaaataaattaaaaaatctaattataaaacgatgtgatgagttaaatacgttacttaaaaaaagtactattgattttgaaagtttgaattctaaagttatgttttggtttttaagagcatttttctttcttgatgaatcagaagttgtatcttattggagttttttaaaagagcaagaaaaaacgatatttcttttaagtgatagacatgaaggaattcgacatggcgattatccattttggccggcattaacgcctacaaaaattgggtggattttagatacattcatagatcagtggccgaaggttaatctacctgattcttggggaacaggggatcctcctaatgaaatagcatatagatttataagtaatgtaatttggaattttacaaaaaatatttctgaaaatactttgtcaatcgtaagtaatttaatttcagattctagatttgaagctatgctattagacttaaaaagtattcgttcaacaattattcgaaatcttgctctaaaaaattttaatgctccttcaccagaagaaatagttaattttttagatagtgacggagtaattaccgtagaagggttgagatcattaattttagaggaattaaaaatatttcaattagatttggatggtagtgaaacaacttctaagaatattttttataatttgcaatataagacggctaaaacaggcgaatttaaacgattaggtgaagttgaggctactttacgtgttgctgataggttgcggttgagattagagcataaaggaattactgtaacacctgagcatcaacttcaaaatgctaatcgttgtgatataacgttctcaaagattattgataatcaaagaaaactcttggtgttggaatcaaaaggtcaatggcattcagagctctacaatgctgcaacaactcaattatctgaacgatactctatacatccacatgcagaacagcaggggatttattttgtattatggtttggcgcggatgaaaaagttgcaaactcaactaagcatggtgttagttcagcacaggaattaaaagaaattttggataagcagctaccaattgagctaaaagggcttattgatatatttgttttagatgtttcactatga

SEQ ID NO: 54143 - DNA, 432 bp, Acinetobacter baumannii
atgtttattattcgtcaatttacaaatgcagatctggatgatgtggtcaatttatgggaaagctgcgacctaacccgtccatggaataatcctgaaaccgatatatttagaaaagtctcacaacaggatgatttgtttttggttgcaattaaagatgagcaattaattggcacgctcatgggcggctatgacggtcatagaggctggattaactatttggctgttcatccccaccaacaacgtttaggaatcgctacagcgcttgttcagcagcttgaaaagcgccttatcgctcgcggctgcccaaaacttcaattattggtgcgtaaagacaatctaaatgtgctgaacttttacgaacagctcggttatgacgaagtagaagccgtatgtttaggaaaacgactcattaatgatagtcctcacgactaa

SEQ ID NO: 54144 - DNA, 336 bp, Acinetobacter baumannii
  misc_feature (315)..(324): n is a, c, g, or t
atgcagaattataaatggcagagtctagccatattactactaggtttaacagtgcaatcgagttttgcagagcaggctatttcagctcaaccttttataaatgtgaaagtctcctcacaagatatacattcgatttgtcagcagttaagtcataaatgtagcgatgaagctaagctatggaaagtcaaaaacacacaagatcagacttattatttaatagatgaaactccacaaattgctgaagttaaaaagcaaaataatcaatatacggtgttgaatcagtggaattttaaaaattatgaacatagtaataannnnnnnnnngccacattctga

SEQ ID NO: 54145 - DNA, 384 bp, Acinetobacter baumannii
atgaaactacgttttgttttgcctactttatttataatgttgccttttacagtacaagctcaaaacacgagttctgcggctcaagcagaaaacattgtaaaatcaccagtctgcgtacttgagactgtaccttctgctgaccactataagtctcttaaacgcattaaagtcgcaaaaggaatatatggcggctatgaagaaataaaacctaaattagcaaacgcagcacgtaaatatggtgcagatgtagtgattgattatgagcagagacaaagatttggtttctggccatggcgtattgttcgtccagtacttacaggtattgcggtaaaatggaatacaccatttgattgtgctgccttaggcggaaaagaaattcgttaa

SEQ ID NO: 54146 - DNA, 2490 bp, Acinetobacter baumannii
atgagtggaatttttggtagtacaacgataagtaccacggataatcgtattaactcaatgcggattcagcaatccgcatatggtctttgtcaaccattggtatatgggaaaaatagactatcagcaaatatgttctggtatggggatttctcgtcaactgcccacacaacgaccacaaaatcgggtggaaaagggggtaagacaaaaactagtaatactacttatacttataatgcctcattgatgcttggtttatgtgaaaccaaaattaaagatattggaataatctggcgtgacaaagagcaaattgttccgaagactgagaacggcgttcagttgaaaccgattgatcagattggctttgaactcttcaatggtgataaaaatcaagtctggggctatctcgcatcaaaacatcctgatcaggcagtccattatccatatttgggatatgttgcttgtgcaaattacgatttaggcggaaatgctagcctttcaaatcataattttgaagtgattagtgaaatcacattttcagacacaattcatgatgcgaatcctgcagatgtaattgaagatctaatcacccatccgcgctacggtgcagctcctactttgaatatggcagatttatccgagtttcgaagttactgtacagctacaggtctttttataagtcttgcattgacagagcaacgagccgcgcatgaaattatcaatgaaattattgaagcagttaattgtgctgttgtccctagtcctgatggcttaaaaatacgttcttttggtgatactgcagtatctgggaatggagtgacttttattcctaatctggtacctgcttatcacttaacagatgatgactttattggaaaggatcaacctgttcgcgttcgccgtagcagagatactgatgcattcaatcacactcagatcgagtatgttaatcgtttcaatcaatacaataccgagactgttgaagcgaaggaccaagcaaatatagagatgttcggattacgcactcaggatccggttaaatatgattttttctgtgagccgaagattgctcgtcatgctgtacagttgcttctccagcgtaagctttatgtacgaaatgaatatgagttcgatcttggttggaagtactgcagattagaacccatggatatcgtaaccctgacagataaatcgcttggtttagatcgttttcctgtgcgtattatacgtattgaagaagatggagacggattactcacggtcacagctgaagaacttgctgtaggttcgcgttcagcagttgaatatgaccttcagtcatctaacggatatcaaggaggaaatgaagaaccgggtaatgtaaatgcgcctgtaatctttgaaccaccactcgatttgactgatggtaaaaatcaggtttggattgcagcttcaggaggtagaaactggggaggatgtaacgtatgggccagtttggataatactacttatgaaatgattggcacaatttatggctcagctagatatggaactttaacagaatctattgatttagatgatacaactatgcaggttcagttaaatacatctagccaaatatttggcggtacgttagaagatgctcaattaaataccacgctttgcagagttggggatgaatatatttcttatattgatgctactttaaatggagcgggattatatacactcagtggagttttacgtggacgctttgatgatattcaacaccacaatggtggggagtcatttgtacgtatagacaaagctatttttcaacatgagttcaattcaaatcttattgataaaaccatttattttaagttcactagtttcaatggactgcaacaaaaagagcagactcttgatgaggtgactgcctatagccatacaataaatggaggacgcccaccaagcgtaaagggattatcacttcagtcaccatttgttggtacgtcatttaaagttcaatggcaaggcgctgctggtgcacttgcttatatagttcagatactttctggaggtacattaataagaactgtcgaaacaactggcacagattacacatattcactgagtgaagcgaaagtagatggagtgcaccgtgcttatacgatacgcgttgctagcaaaactgaaaatggcgcaagtgcatttacggatttgaatattagtaatccagtacctccagcactagctgatgtttatacctcctctacatctacatcaattacagtgacatggataccgagtgaagttcctgacttgaaagattatcaagtttggatcagtaagaattcaaactttgatcctgaaactttagccgcaagttggactggtaccgagaatgcatgcacgatcgaaaacttagactctactaccacatattatgttcgtgttgctgcaagagatgtatggaagtcaactgcatggaactattcagccaaaatatctcaatccacacttgaagcctaa

SEQ ID NO: 54147 - DNA, 201 bp, Acinetobacter baumannii
atggaagttaaaacgtacacaatggctgatggtcaatattttaaagtaattaacaaaagtacgggttcagttatcatatatggtgaattaaccgaatcaaatcaattggtcactattcacaatgttgaatttatctctgaagagcaatatgaaactgaaaggcctaaacccgatctttaccctataacaaaccaaaattaa

SEQ ID NO: 54148 - DNA, 1353 bp, Acinetobacter baumannii
atgtcatgcacagtgtttaaatcgacaaatacagtcgaccaatcgatcaacgttttcccgccagtcggatatattagcaacgtccgcatcgtacgaaattatgatgttgagaatggcgatatttttaagtttcgtaccgactctgctaaagagtttaaagtcgtaggtggtactttaacttgtgcttcgctcggaatcatagagccgatcacagaaggggttttaaacacagcaactgacgtagtattaaaactagatgctggacgtgattatgcttacttgtcttggaaaaacaaggatccaatacttggttacgataatccagatgggagtccattttacggcgcatatatcgactattcactcggtttacatactgacgcaccgactagtgtcctcggtatattgtcatcggttggtagttttaatcagcgcgttaattcatgggatatgtctgaagtacaagatatatcgtatgtattcgcaaattgcattaacttcaatcgatctgtgaattggattgcaccaaagctactatatatatcagcaacatttaagcagtgctcaaaatttaataaagatgtagccatcaaaggatgtaaaccgctctctctttcgagtactttcattaacgcatcggcgttcaattctaaaatagatattgacacttcagagtgtggtaatttctctgatatgtttgcaggtgctaaaaaattcaatcagccattaacgaattttaatttcggaaaggccgtaattttgaataactttttattgggcgcagcttcattcaatcaaacagtcgaatttggcaatatgccgaatttagtagaagcctactacttatttgcagagtcagcatttaataaacctattaaatttaatgcgccaaatttaagagatgcctctggctggttttcttataataaggctttcaataacacaatcactggaagctttagatcagtagtatcaatggcgtattttttctggtacgccacatctttcaatcaacctatcaatgattgggacattagaaacgtattgaactttcaaggcttcgtacagggtgcaacatcgttcaatcaagatttgtcggcatggcccgcaaaatttaacgtgaatgcaaatatggcggatgtatcatcagcgccaaattggtctaccgaaaactatgataaatatttgaatgcgctttggcttgatgtaggtacaacgcgacaaaacgaatgggcaaacggcacaagtccgaaaactgtgtatgcgcaagtaaaacgatcggcaaccagtcaagcagcagtgagcggattaatcggtgcgggttggacaattattgatggaggtttagcgtga

SEQ ID NO: 54149 - DNA, 2025 bp, Acinetobacter baumannii
atgactgtaccaagtgattacgactttatcggaaacacgattacagaagcacatttcaagaattcattaacgactttgttaagccatattcggcaaatgacaattgatcttattgaggcacaaggcggtaactatagttacgcaagcatggttttgtttgaggaagataaggccaatatctccgcaaattcaacagtgaggattgcacagggtgatgatgccggattatatgtgtgggatggtacaaatctgattctggctaaagaaagtatattctttgaaggctcaaactcagaaaatttatttgaatggaaagacaacgctggcaatgttgtacttgctttaaataaaaagggtcaacttgtttcttatgatgaagatactaaacgttcaatcttgctcacaaatcaggaagatataaaagaattaaagaaatttgcagatgagctgaacttaaacaacgtcaattcattaataaaattgttagatgcaaacgattctagtgatttatatagattcattgatagtgacggatcagttgtactgcgtttaacaaaatctggttttttacgctcaggtcaaattgatagtttgcaatatggcattgatgctcttgattacttgaaacctattgttaaacaatcagacgattctaagttaatcaaatttgaagacgctgaaaaaaacactcttggttatgtagataagtttggtaattgggtcctcaataatgtcgatgtattaaacgaaattattgagctaaaaaagttcaaaaacaaagcacaaactgtgaccgcattaaagcaagttgcagtaaaagctccagaatcactcattcagatttatctgacagatgtgcctgcgctccctgatgccaaaggcactgtaatttcaggtaagggcgaatttcattttgatggtcagtcgtttaactgttttgtaaaaatggaagtacaaggtgcgtcaagtgcatcgtatgcgaaaaagaactggaacatctcattcttttcagatcaagctttaacaaaagcaatgaacgtcaaaatcggtgatctgctaccgcacgatgagcttgttttcaagtcgaactggattgatcacaccaacattcgtaatgcaatgtgttatcgattgtgggaacaatttacagcatcaagaacaggttatccgcgtttagagactgagaaaccttacattggtaaaacgggccaagacgcattgcaaaacggagcaaacggtgtaccacggttgtattcagctatgttgtatatcaacgatgagttctacggcattgggtcatttggtactgccaagaaacgtgctaactacaatattgcgaaaaataagccaaaagagatattaattggcatggacggatggaatgacatcacaaatcttgaagtcacaaatccaacgctttatgaactgaaagcaccgagcaatccaactgcagatacttgggccgcaatttctaactggaatgcatttacacagcttagtgatgcgaactttacagcacaagcagtcaattatcttgataagcaaaacgcgattgatttcatgatctttgccgagtttgtgaaatgtagagatgttgtaagccaaaactcagcgaagaattttcagttcataagctacgacggcaaaaaattcatgtttatgccctatgacatggatacggttttcggtctcgaatggactggcgctgctgtatacgacgacacaacaggttcacaattggtgtggaatagttcaggctcattctggcgtaaagtcaaactcacatacaacgcagacattgaagcacgatacaagcaattgcgtgatctgaaaatcatctcagttgagaacatctataacttatcgactgacctttttttgaagtattcaagagatgtttacgatcttgaacttgcacgttggcccgtgcgtccgtctttaaacatcactagcttggaacaaattttgacgtggacaaaaaagcgtatcgcatttttagacacatatttcaattacacagcttaa

SEQ ID NO: 54150 - DNA, 858 bp, Acinetobacter baumannii
atgagagcagcttcagataaacttattgcgttattagatgcaaatcaattcattatggcagatctttatacaatcactaccgttcagggagatgttataagagcgactagttatgacttcgatttgattgttgaaggctttacttatttttcaagtggcgaaatcatccagagagaaggaattagtctttcgattggtattgaggttgataacttgtcaattacaatcaatgcattggatgaaaatactattggtggaattccaattgttcaagcttttcataatgggcaaatggatggagcgcgttttaaacttgaacgtatttttatggatgccaacacaccaacagataccagtgcaggtacgattaaattgtttgaagggagaatcattgaaccagagtttgatcgtaatatcatcaaagctagtgttgcctctgatcttgatgaattgaatgtaaagatgcctcgtaatttatatcagccaagttgcagtaacactctttttgatcatgcctgtggtttgagccgtgagaaccatgtgtttgaatctacgattatatcaggtagtacagccacgcgaattttatgtgatatcaatcagcctcaggggtggtttacgcaaggtgtaattgagtttttagacggcggaaacaaagggcttaagcgaacgattcgtctacatgaacaagatgtattgttgctcactttgcctttgcttgagctaccaaagacaggccaaagaatcaatatttatccgggttgcgataaacgtctagaaacctgtcaaaaccgattcaataactttgccagatttcgtggtgcaccgtttattccaataccggaaacctctgtataa

SEQ ID NO: 54151 - DNA, 639 bp, Acinetobacter baumannii
atgtcagatgtattatttcctgaattgccgggtctagaatgggatctaactaaaacccccatgtttaataccaagatcatgcaatcagtaaatggtcgagaactaagggctagttatcaggcagtacctaaatatcagatcagcatgtcctttgcattccttcgggagagcaaggggcgtaatgaattacagcaacttgaaggtttctttctagagcgccgtggatcatttgactcttttctttttaagatgccagaagataatcaatttgaatgcacgattgtaggaaatggaacacaaacacaattccagctatacaaacagatatacacgagcagaattccaattcaacatactttagctacagaaagtgaagatccattgatgtggtcaaatcccaacaatgagatgtggtcaattccaagtgctcagatgtggaatcttcaatttacgattacaagcaatggtctgttgcagctatcgattccattgttagaaggtgaatctattactgtaactggcaccttttactatcgttgtcgttttgctgatgatgaacagcaatataccaattttatgtctaagctctggaaagctggaaaagtcgacatgattgggtcactaggaaataaggtatga

SEQ ID NO: 54152 - DNA, 501 bp, Acinetobacter baumannii
atggctttaacaaattgtaaagagtgtggggcacaagttagtactcaagctaaaaattgtccaagttgtggagcaaaagttaaaaaacgctccttattaaaatggatctttctaggatttgttattctatttattattggcattattgctggtggtggagagggatcttcttcatcaagtagcactagagaattgtcacctaaagaagatgcattaaaaaatactgtacttgattatgattggtcaaaaggtggttttgatagtgtcatgttggttgattttaaaatcaaaaataatagtaaatatgacattaaagatatcactgtagagtgtgagcactattctaatagtaaaacaaagatcgacagcaatagccgagtaatttatgagattgttaaagctggtgaaactaaaacagtcaaacaatttaatatgggatttatacattctcaagctgcatcgtcaggttgtggaataactgacttagttgtaattcaataa

SEQ ID NO: 54153 - DNA, 228 bp, Acinetobacter baumannii
atgggtaaagattacgactatgtacgtaatgaaatggatctacctagattaagagcattaagtgcgtatcagcaaagtaaccctcccgcacatgttgggatacaacggctttgccgtattttagaagcattcatgggaattgatgaaactccgccagctattaccgtttcagaggatgacgaagacgatatgctggaagttttgtcgaattttccacagggtggttga

SEQ ID NO: 54154 - DNA, 288 bp, Acinetobacter baumannii
atgcattgtaaagattcaaaatcttgcggcaaatgtctttcatttagtcgctacaaaagtacaaatggcattggctatcaaccttgtcataatcctagccccaaaaattcaccaccaactgttcaaacccctccaataaaatgggacgaagcaagtaacgtaacacctgagcaaatggaccagatccgagagctaactttgagaaaggttttcttgtcagtacttttaatttcaattcctattctgatttggaaattagattcgatcattatggcttttaaagcctaa

SEQ ID NO: 54155 - DNA, 225 bp, Acinetobacter baumannii
atgtacactgtggatcaattacgtgcaattgctggtagtggaggcggttttgaattagacgcctatggttataccgtagatcaattaagggcaattgctggtagtgcttcttcaagtggagcaagaataaccatagatctcgccagaaaaaaacttacagttgatcagctaagagcgatagcatcaagcggtagtggatgtgtaatctttaaaaatctgatctaa

SEQ ID NO: 54156 - DNA, 1296 bp, Acinetobacter baumannii
atgaaacacgaaaacaaagtctttttcttgatagacgtcaacaacatgtacgtctcatgtgagagagtctttgacccaagtttgaacaataagcctgtgattgtgctcagcaataatgatgggtgcgccgtggcgcgtagcaatgagtcaaaagccttaaatataaaaatgggtgtgccgctttttcaaattaaagacattgttcagcaacataacgtaatcgtactttcaagcaactatgcaatgtacgcagaaatgtcacggcgctttcacaagattcttggctcatacgttactgaagaagaagttgaaccctattctattgatgagtgctttgttgatttcacagcttatgagaagaactttgatttagaaaaagttggtcagcaaatgcgtcaacaaatatggaagtggttaggcttacctgtctgtgtcggaatcggcagaagtaaaacagaagcaaagattgcaaatcatattgcaaagaaaaatcccggctttaacagcgtttgtgatctggtatcaatggatccgtgcaataaagaatattacttctcacttatcgatgtttcagaggtttggggcgttggccgcaagcactctaaaaagctgcaaggtatgggaatcaatacagtccttgacctagcttgtgccgagccccgagaaatgcaaaagaaattttctatcgtcatggccagaaccatttacgaattgcaaggtatctcatgcattgagatcgaacacactcccccatcaaaaaaacaaattgttgcctctaggtctttcggtggtcgcgtaactgagctaactgacttaaaagaagctatctcaatgtatgctcaagatgcatgtaaacgcttgcgtgatgaagggctgctatgtggatgtatgattgcttttgtacagtcaaatcctttcgatccgaatgtgcccttttacaataaatctattacaggctctttttcagaaccgactgactgtgcagtagattttgtcaaagcagctacgagaatgttgaatgaaatctatagcgaagggattaaatataagaaatgcggcgtggtgctgacctgtctagagcccaagtctggccatacttatgacctcttaaccgactttgaaatgatagaaaagaaagaacaattaatgaaggcgctagataacgtgcatacaaaatttggaaagaaaaaactcggggtcggtccatgttatgtgcctagtcgtaactggtcgatgtcccgcgataaattaagcaagaatccctttctttgggatcagctaccaatcgttaagtga

SEQ ID NO: 54157 - DNA, 1374 bp, Acinetobacter baumannii
  misc_feature (1316)..(1325): n is a, c, g, or t
atgctcaaacggagcattgcttttgcattattggctgctgctgggcacgcttattctgctgatattcaagtgacaagtttagctgatgaagataaagatgatacggtatgtacgcttagggaagctgtacagttcctaaattatcgtggctcatctaatgcagctgacgttgaaaaatatgcaaatgggtatcatggttgtggaaataaagatgcttcatcaaatattattttacagcgcgatcaagaatatagcttaaatagcagaataacgattacagctccccttacaattagtacagtaaaaaatgattctacattagttgatactgatcagcctggttctcataatgcaactatcaaaatggtcggtacagatcaattatttaaaattgatgatggtagcgttgaaaaagcttcttttgctgtgaccttaagtgatcttaacttacaaggtgcaggcgcaaactctaatgttttaacaggtggtttaattttaaaccatgaaaaattgactattcaaaactctcgattgattggtggatatgccaatcagggtggggcgatttacaatcaaggattgttatcgaaaacaggtcaaacagctggctttgtaactatcataaatagtttgattcaaaataataaagcaacccaaggcggcgtcatttacagcgaacagcctttatatttagtgacccaatctgtagtccgagataatgaagtttcttctgcagatggtgccttattttatggcgcaacaaaatttgatgatgaaagtactggtggatacttaaatgtacgtgccataggctttagtaatagtacctttttccataataaagttggttttattgcaaacattaaagatggaatgtttgttaataatattacaatgattaaaaatgcagcaggtttatttttagatgctcctcaaggaaatgcttctgtttctaacagtattttagtcggtaatggggttaactgtactccaaatacaaatgatcaaactgttgtccaaagtaacttagtgaccactgactgtaatcggaatgcttctgcaaagctgcctaatatacttttgcctacgagtgaaaagttaattgcgggtgatagtgatgaaggcatatgtgatgtaaccgctaaagacggcttgttatgtccatttaatacaccaaaagatagtttccttggcttttttaaaccacgattacttgagagctataacactttagctgactccttaattattaataaaggacgtttatatagtgatggctcatcaattggtttagcgagttgtgagaaacttgatcnnnnnnnnnngatcaacgtggaaaaaatcgtagtggttatgatgagttatgtgatttag

SEQ ID NO: 54158 - DNA, 552 bp, Acinetobacter baumannii
atgaagaaaagattattagatacagcaactgtattactagataagtttgttaatcgttatcatgattgtgagggtttttgggcaatcggtgttttgtatacacattgtttttcactaggtgagttttccttaacatttgatctattaaatcgtaactctttcataaatgatgaatttttgaagcaagtaaataataaattctcgagctatctagatgattatttagcaattcataagaaaaaaagagaggatttgattgaggccgtcataaaaattgcatttgataaagatcataaaatatcagcaggtactttatatggtgattatttccaggttagagtaattcttgttgattcatatacaagaactttttcaagatacaatgatggatattgtgtggctcatactcattggataaagcaaagaaattatatagattcattaccaatagaagatcatccactcatagggaattataatttctcattaaatctatctccaaaatctttagagattacagatgtgttatttaatattcctaaagttctataa

SEQ ID NO: 54159 - DNA, 138 bp, Acinetobacter baumannii
atgatttcttttgagcaaaatataattattgctccatatgatggtggcattgatcttatcatctttaatgacgccaaaaggaatgagttaataaataagtatcaagattggctttcaccacgagctgatggattatag

SEQ ID NO: 54160 - DNA, 1866 bp, Acinetobacter baumannii
atggataatttaaataaagcaaaaaaagataatttttcacggaaaactatattagtaacaggtgcagctggttttattggaagcagattaattgttgaacttttacgtgaaggtcatcaagtaatcgctgcactgcgtaatgctccaaccaagaaagaaaaactattagatttcattgcaacagaagggctgattgatccctctatttcttttgttgaatatgatttaagccgtgattttaagctggactctctattagcggatactcaaacgaagatccatgttatttatcatctggctgcatcatttaattggggaattagtaaagctgatgctcaacttaccaatgtaaaatcaggccttgccttgattgagtgggcggcaacattaaaacagcttgagcgattcatctggattggtggatatcgcatggtttctccaccgaaaggttcacctgatgatttatatcgtaaatacggcggttatgaggcttcgaaacttttaggtcatcaagctttcattgaggcttgtaagcgtttaaatgtgccatggactgcaatacatcctgctacagttattgatggtttttatcgttatggcgatatgcaatatattggtattgccgaaatgattggtaagttatatcagggacgactgatggcactgcctggtggccgtgacacattcttaccactttgtaatatgcaatatattgtaagcttcctaatccgcaccatgttttatcctgaaaccattgctcaggagtatatgctgctcgatcctgcgacgccgaaatttcatcacctgatccatctggctgccgagtatttaggagtgagtacaccacatttgcaactccctaaaattctactcgagaaattacctgaagtattgcttgatagctccaaagagcaacttgctttcatttctaatgaaaactatcaagtcgctgaaacagagatgatggcaacgaagatggggattgctgatctaatcaatactactccttatttctctcactggattgatcgtctggtactcacacgttttggtcatatgcaagtagctacaccgagtcgtttcagctatcagagtcgatattggacagaaacctatattaaacagtcgcttggttcagaaaaagcttctgcattatttttacatggaatcccatttgatagcgcatgctggtctccaatcatcaatagaattacatatgatcaggtcgctatgatggatctaccgggacttgggcgttcgggtagttatgagataatggaagataacaaccatcaatttattgatgttgcttcaaagcttttagcaccaaatagtgttgtgattgctcactcgttagggtgtctttttgcattgaatcttgcaaagaaatatccagataaagttgctcgccttatcctgatatcaccttattttgtacaggcgcgggctgctaaaatattccaaatacaggccatctctaatttaattttccgttttgtgccgaaagatatcattgctaaagatctgcatccagatggacaaaaaaatccgtcagtgggctatgcgatggattcattatgccgtgtaccagtatctaagcatattagcgagtatatgcatctcgttaatttgccacagcaacgagccgctcaaactactctgctcaatgagcttcgatctaaagtcgagattattattggagagaaaaatccaattgttaccccaataagtcctgatattcctgtacatatcattgctggcgcaggtcataatccacacattacccatgtagaagcggtttatgattacctcacaccagttctgacaaagtatatcagtactacagcacaacttagtgatgtctga

SEQ ID NO: 54161 - DNA, 606 bp, Acinetobacter baumannii
atgtcagtcacagtaccaagaggattaccgccagtagcgccaccagtaacaccgccgatagcgcccgttacaccaccaataatgtcagttacagtaccaagcgggttgccaccagtagcgccaccagttacaccgccaatagcaccagttacaccaccgatgatgtcagtcacagtaccaagaggattaccgccagtagcgccaccagtaacaccgccgatagcgcccgttacaccaccaataatgtcagttacagtaccaagcgggttgccaccagtagcgccaccagttacaccgccaatagcaccagttacaccaccgatgatgtcagtcacagtaccaagaggattaccgccagtagcgccaccagtaacaccgccaatagcacctgtcacaccaccgatgatgtcagtcacagtaccaagcgggttgccgccagtagcgccaccagtaacaccgccgatagcaccagttaccccaccgataatgtcagtcacagtaccaagcgggttgccaccagtagtaccaccagttacaccaccgatagcgccagttacaccaccaagaatgtcagttaaaataccagttgcagttgaaccattatga

SEQ ID NO: 54162 - DNA, 339 bp, Acinetobacter baumannii
atgcttcaatataacaaaaaaacgattattcatgcacttgcgcttgcacccctaccattgctgagtttatctgccttaggggtcatgacattaaatgctgagtttaacctttattcgattggagttattttactagcccatttcttattttatttacttttttatggccttctaattattcctttcgcatatatcatttcctattttctggcccgtaaaagtcgtttaaatctgatgagtattttcatcagcggaactgcgatctggattttgattagccctattgcacgtttgtttttttgtcgggtcattcccgtctccttggtggaatatttataa

SEQ ID NO: 54163 - DNA, 1623 bp, Acinetobacter baumannii
atgagtacagttacaacagtagaaagtattgcagaactaacggctattcaaagtccagaagaaggacagaccgtatatgtgaagtcttattatcaaggattaaacaaaggtggtggtaagtttatttatgcatctggaaaaaaagccataaatgattatggattaacaattaatggctgggtacgggagtttgattgtgtacctaatgtctttatgtttggggcaattggagataacactaataatgatacagatgcattccaaaaagctgtagatgcagttactgatctatatgtacctagaggtgtgttcctatgcaatgtgaatcttaaaaaatcattcaatatcactggttctgggaaagagtctatattaaaaccttacgacattaataagcctattttaactaacatcaatatatcttctttaagttggtctaacgattctgtatctaatctagctttaaaatcatcgaatttcacaggagttggtttcagttatggtgtgctacctgcagttaatgattattatggtgttggccgagtggttatgaataacgtgtggtttagtggttttatgcacggtattcgaaaagtaaatggaaacatcggtaataaatactacaattgtaattttgaaaactgcaaatacggtgtttatgcatcaagtaaccaagtagctatccctaactcacttgcaatcatgcattcgggttgtgatatgtactatagctgtaattttagtgagaatgctattgcgggtgcagcttattatgataaaacccatggaacgggacagtggttatttaatcactgtacatttcaattcaataaaggctttgggttatttatggactttgatatcccaagtactttattttctccgattattataatgaattcttggtttgaagaaaacggaggaaaccaagtagttattgatcgtgttaatggtacatcgcaatctatgaattctgaagctagatatatttcaggaacgattgatgtagtggtagtaggtagcgaagattctaaaactcgtcttggtataggagtggataaacctaaaagtactctacatattcatgataagagtctgccgatgttacaactcacatctgattctactggttcagaagatagaaataatggtggattgatctatgtcactgaatcagacctaatgatacaaaacaaagaaaatggacggttatatcttgttaattcagctggtatggtggaactagacttatcaggtaattttctttcaagaaaaggtaagattggttatggtggaggagcaggatcttatattctgcagtatagtttcaaagacaggtcggtaacttgtaactttccatccggttgcgttcgcatggccgcaagtgcgttgggagctaattcttctgttgcattcgtgttggaaaacaatttcatttatcaggatgatgtggtgattgtaaatgtgagaagtatgccgagtggtaattctgatttatattcagttagagcttcaaatataaaaacgggctcatgtcatattattctaaaaaatgaatcaaatactattctctctgaatatgtagaagtaaatttttgtatagtctcatgtggtaatagctag

SEQ ID NO: 54164 - DNA, 378 bp, Acinetobacter baumannii
atggttgatattcaacaaatcatccctttaccggaagcaaaggattatcagattaaggcacagaaaaaatcagaagaaagacgagaagccaagcttacgaatgcaagggattactcaagcttcatcttcaatggtaaaactctgaataaacgttacctggctctggaaattattaaatgccggtttgatgaaatcgataataagaatatcgaagatcttagagcagagtttaatgaatatccgaatctggatagattgctggttaaaattaaccaactggatgaacaaagatatgaccgctattttattgagaaggaacatcatttacagatgagtaatggagatatatattgtttccaaccaatggggaaaaggtaa

SEQ ID NO: 54165 - DNA, 696 bp, Acinetobacter baumannii
atgattaattcatcaattattagaaagaaatcttcaatttttattattattaaaggtttctttatttttggattaatttggttgttatctttagttttgtatggacttattaactttgaaagctattactcttcaataatttacctaattaatttttatattacttattttattgggtattttgtatttaagaatgtgataggaagctctgattgtaatgatgtcgatcgagtgaaatatttaagtcttattctattttttatttattatataatagtatttcccagatattatttattagagggtaagcatgacttgtatggttttagacttatatttggttttatatatccaatttggatactgacaccaatttttatcactaatccgaagagtaaattttatgtttacttatgtattttgctatgtactctagaagtgattttttggatattgttttttaagatgagtgggtctgaattttataaaaggccttcctttgttagtgtattaataagttcttttatattcgcattaacttttccttggtatttatcatggttgagaaaaatagatattaaaaaatggactttcccattcttttttaaagaaaatagttttatatctaagctaatatcatgggtggcaataggattcggtagtttttttatgtttttgttcttttttttcttctaa

SEQ ID NO: 54166 - DNA, 2166 bp, Acinetobacter baumannii
atgagaattatttacattatttttactattatgaccatcccacctcgaccatttaaactttctgtaatcgcctgcgcgatttgttatgcaaatctcacgtatgctcaagatgcagatatacaagctttgcagacgattcaagttaaagctacaagtacagagcagtcttctgaacaaaccaaaacctataatgttaagaactctagcagtgcaactaagcttaacattgaggctaaagaaacacctcaaactattaatgtcgttactcgtcaacaaattgaagattttgggcttactagcacccgagatgttctaaacaatacacccggagtcacagtaaccaatcaggaaactgagcgaactacttatatggctcgtggttttgaaatttcaaatattttaactgacggcgtaggttttcccctctcaggttataactataacaatactaatcctgatacttatttttatgatcgtgtagaagtcgttaaaggtgctgattctttaacgaatgcatttggtgacccaagtgcaaccatcaataatattcgaaaacgcccaacccaagaatttcaagcaagcggaggtataagttacgggtcttgggatactcagcgttatgaggctgacgtatctggctcaattctaccaagtggaaaagtccgtggtcgtgttatgggctatgagcaaactggtgactcataccttgaccgatattcttcagaaaaaaatggtttcgctggtattgttgaagctgatttaacagatacaacattacttaccgtaggttatagccaagaaaaaaataaaccgaatgcaaacaactggggtgctctacccttgcttgatgccaacggcaaacaaatttcttatgatcgctcctataacccaaaccctgactgggcgcattgggataatgaaacacagaatgcttttgttgaattaaaacagaaaattaatgatcaatggtcagctaagctgacttataactatcttgataacaagcataacagtcgcctcctttactattatggttatccaaaagctgatggttcaggagtgtctttgacaccatggggtggccaagagcatcaagaacaacatgctgtagattttaaccttgagggaacttataagctctttaaccaagagcatgaagcaacgttaggttataactatgtacgtagtcgtcaacacgataaacaatctacgggaacaattaacgatagtaatgttatcaattcgaccactacaaactgggcaagttggacacctcaatctataacgtggtcagatttctctgaagcagcgaactatacgcaaaatatagattcaatttatgcagctacacgtttacatctcaatgaagatttaaaactcttgcttggcgcaaactatgtgaaagccgagagtaaaggcgaaagctatggttcgcctatggaatatagtgaaagtaaagtttcaccgtatgcgggcttaacttataacttcacacctgaatatacaggttatatgagctatacctcaattttccgtccacaaactggtattgatcaagataccaatcaagctttaaaaccaattgaaggtaaaagctatgaaatgggtgtaaaaagctcatggctagatgaccgtttaactgggacgctttcagtattcaaaaccgaacaaaacaattacccactacgtaactcggacggaaatccacttaatcgaaaagtgccaaccagtgatttagaatcacaaggtgtcgaagtcgggttatctggtcaaatcactgataacgtcaatcttgcttttggctatgctcaatttagtattaaagatataaaaaatggtggcgaagcgagaacgtataatccgaaccaaacccttaatttgctgactacctatacaccatcagttttacctaaactgaaagttggcgcagggctacaatggcaggatggcgtgaagctatacgactcaacagcaaacagcaccatcaagcaagatgcttatgccttagtaaatttaatggcgagctatgaagtgaatgatcacattacgctccaagccaatggaaataatattttcgataagaaatatttgtatagtttccctaatggtcaaggcttttatggaccctcagccaactatacggttgctgtaaagtttaaatattaa

SEQ ID NO: 54167 - DNA, 423 bp, Acinetobacter baumannii
atgcaaacaagtgtacattggctagagaatgttgcttttgaagcgaaatcagagagtggtcatagtgtagtgatggatggctcacctgagtatggtggcgaaaaccgtggaccacgtcctatggaattgatattaatgggacttggtgggtgtgcttcgtttgatattgtgactattttaaaaaaatctcgtcaagatgtgacgaatgtcgtatgtcagcttaaagctgagcgagcagatgcaattccagctgttttcaccaagatccatttacactttgtagtgacaggtaaagccgtaaaagaaaaacaggttgcaaaagcagtagagctatcagctgaaaaatattgttcagcaagtaaaatgctttctgatggtggcgtagaaattacccacgattttgagattattgaagctgcataa

SEQ ID NO: 54168 - DNA, 1041 bp, Acinetobacter baumannii
atgaaaacttatggctatgcggctgtagagcaaggtacgtcccttgtaccttttacatttgaacgtcgcaactcaaatggcgatgacgtgacaatcgagattttatattcaggcgtctgccactcagatttacatatggcaaaaaacgactggggacgcgcggtctacccgttggttcccggtcatgaaattgttggcaaagtaattgccattggtcgagatgtgaccaagttcaaaattggtgatcatgtcgccgtgggaacttttattgatagttgtatggcgtgcgatcaatgtcaaaaaggtgaagagcacatgtgccgtgaaatcctgaccgaaacctataatggtcaggatcgtgtcacaggtgaaaatacctatggtggatacgccaaacatattgtcgtgaaggagcattttgttttaagcattccggaccgtttagatatttcgcgtgcagcacctttactatgtgcaggcattactacctattctcctctacgtacttggaatgttggccccggtactcgtgtaggtattatcgggcttggtggtttgggtcatatggcagtaaaacttgctgtaggcctaggtgcagatgtcacggtacttagccgttcaaaaaataaagaagcggatgctttgcaattgggtgcccatcatttgttagatacttcagatgaggctgccatgcaacaagcattgaatggctttgatgtgattttggatacagtgccggtaaaacatgatattaacccttatattccattattagatattgatggaacttttgtagtggttgggcaattagggttacttgaagagccgtttaccgttccaatgattatgggccgccgtcgaattgcaggctctatgattggcggtatcgctgaaactcaggaaatgttgaatttctgcgcccgtcaaaatattttacctgactgtgaaatgattcgtatggatcaaattaatgaggcatttgagcgcctagaacgttctgacgtgcggtatcgttttgtcattgatatgagcactttataa

SEQ ID NO: 54169 - DNA, 759 bp, Acinetobacter baumannii
atgaaaactgttcttatcactggtgccagctcgggtatcggtaaagcgctgagctataaatttgcggctgaaggttttaatttaattattgttgcccgccgcgttgaggtacttgagcaaatcaaacaagacattgaatcaaaatatcctgccattaaagtttatgttgaaactgccgacttaagtaaagacggtagcgccaaacaactttatgaaaagctaaattctttccagattgatgttcttattaataatgcaggctttggcgattatggtttcccatgggatgttaaccttgagaaagccaacgatatgattaacctgaatattaaggctttgacggatttatctttgctgtatgtaaaagattatgcagacaaagattcaaccttaatcaataccgcttccattggtggatacgcccaatttgatattgcagtcacctattgcgccaccaagttttatgttgcctcgtttaccgaaggtctagctttagctatgcaatctcaaggcaaaaaaatgcgagttaaagtcttggcaccgggtgcaacggcaaccgaatttgtaggccaagcttctgttaatggaggcatagatggcgaccacctgtttagtccagaagcatttattagcgccgaacaattagcggattatgcctatcaactgtatcaaagcgacaaagtggttggcattgtcaatgagcaaaatggcttcgatctcaaagatcttatttaccctcgagtagttcttggctcataa

SEQ ID NO: 54170 - DNA, 1080 bp, Acinetobacter baumannii
atggctgaacaagcacaaacactgggttcttcagctcagtttagttccaaattaattaaaccgaagaaatcgacccttattattatggcaattgtactattggtcggagtactgtttattttcagggcttggcacttaccgccatttgctctaaacagtgaacaaaccgataacagctatattaaaggtcaaaccacgattttatcttcacaaatcaatggttatgtaaaacgtgttttagtgaaagattttgatcatgtcaaaaaaggtcaaccgctcctgattattgatgcccaaacctatgatcaaaaagtagttcaggcacaatcaatggttgaacaagcaaaaaataatttggccaatcaacaacagactattgcacagcgtcaggccgatattgcctcagcacaagcaaaagtagatcagattcaagctgaatatgatctttctgtagctgagtcaaaacgttattcgcaattaggaagctctggtgctgcttcacaatccgaacaagataaagcttttgccaatgaaagaaataatttggcacttcttaaacaagctttagcaaatttgtcggttgcaaaagaggctttaaaaacggcgcaagtggctaaagtcggtttacaggccgaggttaataatgcccaagctcaactggatcaggcaaaaacaactaaaaattatagtgtgatttatgcacctatggatggacagttgggtgaagtcaatccacgtgttggacaatatgtatcagtgggttctcaattgctttttttaattccccaaaagacttgggtgattgccaattttaaagaaacccaaatgaaaaatatgcgtattggtcaaaaagctacttttacggtcgatgcgttaggccatcaaaaattcacaggtcatgtagaagaaatttcacctgctgccggctctgaatttagtgtcattaaaccggataatgcgacaggaaactttaccaaggtggtacagcgtattgcggtgcgaattgcgattgatccaaatcaaaaagatttaaatcgcttaagtccgggaatgtccgtgattaccacagtagtgaattaa

SEQ ID NO: 54171 - DNA, 1635 bp, Acinetobacter baumannii
atgcaaagaacgccaaaatatttagagcctatgcctaactggacggaaacagaacgtccggcattgattggctcacctgcctcaattgagcatccgaatcacctgagagtggcttacttatttattggtgtatttatcgcactctcggcaagtctaggaaatggtttaattatttccaatgctttgctcttccaaggtgaatttagtcttaccccaagtgaagcagcttggcttcccgcagctttcgttattggaaatactgctgcaaatttatatgtcattaaaattaggcaacagttcggacttcgtttgtttgctgaaatcagtttggttctatgctgtatctgtattggtttacatttacttgtaaatagctatgaaatggctttagcggttcgatttttcgcaggtattgtcgcagctcctctgacttcgatgagcgcacattatgttatccagtcctttaaaaaaccgtcagcactgaaaggtatttatgtcattttaggtttacaacagtttggtttacctttggcatggatgatttcacccggtattactcatggtgaaggatggacagatttagcctattttgaacttggtctttatctatgctgtttagcaatggtggttagcctcaaattaccgcgtagtatccgagctgccgtattagaaaaagccgatatttttccacttctttttatctttcctgccatagccttattcagtgcagtacttgttcaaggccctattgtttggtggtttaacaacacttggattgcttatgcccttgctttgggctttgtcctcttaatcattggtcttgtgattgaacatcatcgccaacatccgctcatcgtgacccaatggcttgtcatgaaatcgacgcttacgtttatgatcggagccttttcaattcgcattctcatgtcagaacaaaactatgcggtcggacattttttacaagcgatgggcttattacccgaacaattagtaggactctacggcatgattgggctgggtgttctcgttggaagcgttgcaagtatcttaacgtttaaacaacacttattaatgcagcaattactggttgcagaactgcttattctgatcggttgcggtttagatcttggtcttacgcatgatattcgacctcataatctctacctttcgcagtttttgattggctgtgcaggcggcatttttatgggaccactcgtattgattggctacttccgtgtactacaacacagccaatggagtgtggtgacttttgcggtgttattgggagttactcaaaacttaggtgggttaatcggtacgtctttcttttcaacctatcaacaacatcaaactcgtctacatcaaaatgcgatctacacaaatctagatacaaccaatgctacggtagagtctcgacttcagctatatagcagtcaggctcgacaaaacagtaccgatcccaattttcagcagaattatgcacaaaaatctttaaatcaagttgttacccgtgaagctcaagttctcgcatttaatgacgtgatcaaaatcaatgcgctactggcaaccctcgtatttatctttggcgtgacttcattgttatggacgcgttatagcgcacgcaaacaagcatga

SEQ ID NO: 54172 - DNA, 645 bp, Acinetobacter baumannii
atgactgagcctcagcttgtaaaacgtaaacgcagccctagcctcgaaaaaacacaagccaccaaagaagctattcttcaagctgcccgtatccattttgcagaggtaggttttgctaaagccaaagttagcgatattgcgaagaaagcaaacattgccaatggtacgatttattcttatttcaaaaccaaagaagaactatttgaaggtgtgattgaagacatcctacaacaagatcttcgtttaattcgggctacagatttacaggaaaatcaaactgtttattcttttttgctagaacatctagataaaattgtgggtactgttgaaaaatctggccgagatggcatttcacgattggtcttaaaagaaggtgaaaattttccaaatattaaggaaatttactttcgacgcatcctttccccatatttggttgaatttgaaaaattaatccaaattgctatagatcgtaaagaaattgcacctgtaaatacaaaagagttttcactattactcattgcacccacatggatgggtgtcttatataacggcatgctacaaaatattgagacaatcaatatcaataatcttttccgtacaaatttatatgcgctatttcatacaaattttcataagctcgaataa

SEQ ID NO: 54173 - DNA, 519 bp, Acinetobacter baumannii
atgagtctagtctatttacgtaaacccaagaaaaatgaccttgcagaaattaaagaagcttatgcacgtagtgttgaattacatcaaccatgggcatatccaccagctgactttcaaacatatttagaacaagagcatcgctattttgtctgcttaatcactagtcattcgattgccggaacatttaatatttcaaatattatacgcggtcactttcattcagcctatttgggttatgaagcatttcatccctatcaagatcatggctatatgacgcaaggcctcaaattattactcaatgaagcatttaaaaatttaaatttacataggttagaagcgaatatacaacctgacaatattgcctcaattcaattagtagcccacgctggtttcataaaagaaggcttttctcgccaatatcttcgtattggtggaaaaacttggaaagatcatgagagatgggcaattttaaacgaacaatgggttgatccgttacaactaatacttgaagaagattag

SEQ ID NO: 54174 - DNA, 360 bp, Acinetobacter baumannii
atgacagagctagggtatacacaaactaatattcgtgaatatgctcatgaatttaaattaaaaaatgatcaatatatttatgttaagcggtttaaagataatcaaaaaagagtatctgagccatcaagattaatgatccaccctaaatatatgaatcataaagatgagctgagaaaattggaaaacgtagaattcaattttgagcaaaaaggtaatatgaattctgcctttgctgagtttcccaaatgtgatctatcgaagtgtgagggaaatcctacagaatatggaataggagctaactttaaagataaattagcgttaaccaatttcctaaaatttattgaaagtagtaagtgctaa

SEQ ID NO: 54175 - DNA, 528 bp, Acinetobacter baumannii
atgaatacgatctcagcaactcttttacgtgaacatctgattgaaggatgtataaaagatgctaatggtaattttaaaccattccctattcttgcaattgataatattccattaaatatatgggtgcaccagaatacccaaattattgatcgtgcagaaactttagttccagctcaaggttggttatatgattatgatagtgagttagcattaagtaatgcatggaaacttcttaagcctgaagtttataaaaatggagctgtttcaacagtggttccaatattaatttgctctgatgatttagatctagcatgcagcgtaattatggttgaacaagttgtttccgcagatcaagtcatatgggctcgttttggtcttgcatttaaccatattcacgatgttgtgacatccgtagtttgggaaacctcgacttctgttcctcaattaagttttccattgagcgaatttgaaaaagcatataatgatttaaaagaattagacaaaaaatggagtgaaggttttatctag

SEQ ID NO: 54176 - DNA, 2235 bp, Acinetobacter baumannii
atggcaaataagaaaagtaataaactttttacaagaaagtctgaagttaaaaatatcattccacttctttcacttggaggagccattattctttcaaattcagcatttgccgcttcacctgctgaaaccacagaaacagaaaaaaagcctgaagcccttcctactattaccattaccgcttcacgtgcagatgaactctctacctctgccaaacaagtcaccaagttagatgaaaaacaaattgaacttttgaaaaatggatcatctggaaacattgcgactgttttagcgaaagccgtaccgggcctatcggactcaagccgaaccattaccgattatggtcaaactttacgtggccgtaatgcgcttattttggtggatggcgttccaatgaacctcactcgtgatacagcgagaggactttcagccattgaccctgaaagtattgccaacattgaagtgattcgtggcagtaacgcaatttatggtggcggtgctgcgggcggtattatttcaattaccacgaaagctgcgggcggtgaacctacggctaaaacggttgttggacttcaaacaccacttacaaatctgcgttctaatgctttaagtggtgacattcaccagtactttacgggcagttttaacgctttcgactatgcactcgactttggttatcaacgtattggtagcccctacgatgcaagtggcgaccgtgttgcacccgaaccaagccaaggcgacctttacgactcaaatggttatagcattggcggtaagctgggttatcacattgatgacaaccaatacctacagtttgctgcaaactactataatgctgagcaagactcagattatgcatctgacccaagtgtgaaaaaagctcctgctggaactgtgccagctaaagcaattaaaggtttaaagctcaaagaccaaaataaaaacgaaaaccagatctacaatttaacctataaccataaagacttttttggtaataaggttgatgctcaaatttattaccgcgacttctttacccgtttttcaccgtttgatgcccgtgcaaatgccaaccgtggtaaacaagtcgaccagatttatcaagaaaataatgtactcggtagccgcctaacggttaccactccccttgagtttttaggtgacacatctttagtttggggtggtgactttagccgcgaaaaaagcgaaatgcctttagatatttttgatcaaaaaatttatgatcaatcaggcggcttagagtttgtaaaaatcggcaaactgatttatttacctgaactcaccacgcaaagtgtcggtggttttgtacagttaaaacaccgctttaatgaccaatggtcagcagaagctggcacacgctatgaagacagctatgcgcaaattgacagctttgttccattatcacaattaggcaaaaccaacccttacacggttccgggtggaaaagtaaaagctgatgcatggttatacaatgccaatgtaactttctcaccaaacgaccagcactcaatttatgcatcgtttaaccaaggttttcagttgcctgatgttggcttgattattcgtaatgctggtgaaggttttaaccttggctcatcattcttagagcctgtaaaagttgataactacgaactcggctggaaaggtaactttaataacttctcttcaagcttagctgtattccactctacttctgacttgggtgctgttcaatcattcaataatggtttagtgctggctcgaactaaagagaaagtcacaggtgttgaagcaacttttgactaccttgacgatgcaaatgtttggggaactggtggtagcgtaacgtggatgaaaggccgtgagaaacctcaaaatggtgctgaacaggacatgacgggcttccgtattccaccattaaaactaacaggttatatttcttatagcccaactgaaacttggacaaaccgtctacaagctacttacttcggttcagaagattaccgtttgaatggtgtaaatagttttggtcgttacgatgtaaaatcttatactacggcagatttaatcagtagttttgcgctgaacaagaaagacaccatgaccattggtttagaaaacatgtttaaccgcaagtactacccgctttatagccaattattaagaacgaacgataacaccagccacttacttgcaaatggtataacgcttaaagtgacttatagccataagtggtaa

SEQ ID NO: 54177 - DNA, 3528 bp, Acinetobacter baumannii
atgaactcaattattacaacagatgcatggtcttataaacttttcgaacagtacctgaatactttctttcgtgaactcaaagtgaatcttgaaaagcacattatcccagctcaagactctcctttattcaccctatatgcagagcaaccagacacgctatgttttgcttatacatttcatgcatctaacacggttgcttatggcgcagttcagcacttatcaactacgggctatcacagatatcaacgtggttttgttctgcaaaacttaagcaacaatacatttgactcgctcaccgaccctaaacagttagtgaagctgattacagatgaactgaatagcttatttaaagacaaaaaccaaaataagaatttgtactccgatattgccaatagtatcgagaacacaaaattctttttagaaaataagccatctcaaacaacagctaaagcattgagtggttttcaggctactgaacaaggcatgttatatgggcacccttttcatgtgacctctaaagccaatttaggtttttctaaagaggacatgaaaaagtatagccctgagttaggcgcaagtttccaactccactactttgcaattcattcttctttaatccaaaaactggtcagcgagaacgaaccttctcaccatattgaagatgaagttttagaagctgcaaaagaccatttacaagagaatttcaccaattatgagcttatgccaacacatccgtggcaagccaatttcttacttcaacatccatctttaaagaaatatttagacagccaagacgtgatctatctaggcgcattaggtcaaaccgtatggccgacctcatctgttcgtacagtatggttacctcaatcgaacctattcttaaaactctctattgatgttcgaattaccagtttcattcgtaataacccaatggatgaaatggaacgtgccattgatgcgagcaaaattattattaatcacaagattaatgagcaatatcccgaccttgtgattctgccggaattagaggcgaaaacagtcagaatcccagagcttgaaagttcatttggcattatttatagagctgggctgactcctgctgtactagaaaatacccgaatgctcggtggcttggttgaagaaaacgaaaaccatgaaatcccgcttttaagctttattcagcaagcggcaccgaatcaaaacttacaatcgaacgatgccaaagacttcattactttctggtggaaacagtaccttaaagtttcgcttattccattagttgagttgtttgcaaacaaaggcattagcgtagaagcgcatatgcaaaacagcttaatggaatttaaaaacggttatccgcatcgccttattcttcgagatatggaaggcattagcattgttccagaaatgatagaagacgactcatctatttctgaagatagtactgtttggttctcccaaaaagatgcatggacgtttttaaaatattacctcgtgatcaatcacattgctcatctcatcagcgcaatttcgcgagttacggctattgaagaatttgaactttggcaagccacccatcttaccctcacacaagaaaactttactgccaaaggcaagcagtaccgcgacttattaattcattcactcacattaccaattaaggcaaatatgttaaatacgctctaccacagtggtggcaatcctatctggattgaagttgaaaaccctatttataaatatcgcggtgcagaagcgctttgccctcttcaaccaacacaacaaaccaattataaaacccttgcggaaaatcgcgtgatgggtcaattactagaagcgctcatttttgaaaatacttttaaatacgagttttctaaaggtcaaatcaagttctatatttccgataccgttttctatacctgcgcggccaaacgacattttagttttaaacgaattaagctagatccttcaagcttaacccgttctgatattactttaggcactgaaactcgccctaacttaaaaacgctacttgttgacctaaaaaatattattgaagctgacccagttaaatggcaaaactttaatgatgaactcaacttaacttacgttaaacatgcgcagactttgagccaagtgcctgctcaacctttaagaactttgccgtacctagaacaagaggcacgcatcaccaacgcccatttatatcacccaagctttaagtcacgtatcggcttcgatttaaaagaaaaccaaaaatatgcacccgagctttctgaaggttttacggttcaatgggtggcaactcataatagtttatgcaaactggttttaagtgaaaccattaacttagagcagctttataaacagcatttttcagaaaaagatctacaaactattaatgagcaattgaaagagcaaaatgtagattttaaagattatatcctcaccccaattcatccgtggcagtgggataaaattattgaattgtattatcaagatgcgattagcaaccaactgatcattccgttagatattgaaggtccaacttatttaccacagcagtcgattcgaactttatcaaatattagtgatatctcggcgctttctcttaagttggcaatgaatttggtcaatacctcgacctctcgcgtattggcaccacataccgttcaaaatgcggcaaaaatgagtgactggctgtataacattgttgagcaagaccatattttagaaaaacagcgcaagcctgttattttaagagagattggcggtctttcagtgaaccagcagattgcccttcctgttcaatacggcgcactcgcctgcatttggcgcgaaagtatttacagctacttaaaagaaggtgaatcggcaacgccagtaacaggtttaatgcaactcgatattgaccaaaaacctctcattgatgattggattcaagagtacggtatcgagttctggttagaaaaattactcagcaatgcttatctaccaatcatgcatattttatggtgccacggcctcgctttagagtcacatgcacaaaacatggtactgattcataaaaatggcttacctgttaaagcagccttgaaagatttccacgatggaattcgttttagccgtcatcttttacgtgagccgaatcttttacctaacttgcaagatgcaccaaaagaacatgccaagattaacccgaactcgttcttggaaacccactctccaaatgagctcagagactttacccaagatgcgctttggtttgtaaatctggccgagttagcaattttcttaaatgaacattatgacttcgatgaaatcaaattctggactatgttaagaactatcatcaatcaacacaaagaagctcacccagagtttgccgagcgatatgaattgtttaactttacagatgacaccatcgatattgaacagctcgcaagccgccgttttcttccggaaattcgtttaagagtacaaaccacgccaaacccgctcagcctcattaaggaaattgaatatgaataa

SEQ ID NO: 54178 - DNA, 1236 bp, Acinetobacter baumannii
atgtttaaaccaatctcactgtatatagggttgagatatactcgcgcacgacgcagtaatcattttatttcttttattgcattggtttcgatggtcggtttgacacttggtgtcgctgtactgatcacggtactttctgtaatgaacggttttgaccgcgaattgaaaaatcgtgttttgggaatggtaccgcaagcgacagtttcttcaacgcaaattcttacggattggcctgagctgattaaacgagttgaaaatcatccccatgtgactggagttgcaccttttactcaattacaaggtatgttaactgctcaagggcaagtggctggtatcatggtgacgggtattgatccgaaatatgaaaagaatgtgtctatcattcaaaatcatattgttgccggtagcctcgactcacttaaaaagggtgagttcggtattgtgcttggtaaagacatggccgattcacttggtttacgtctaaatgacagtgtgacattagtattaccagaagcaacgccatctccagcaggtgttgtgcctcgttttaagcgctttaaagtggtgggtattttcagcgtaggtgctgaagtggactcaatggtcggatacattgctttatatgatgcatcgactttattgcgtttacctgatggtgctcaaggcgtccgtttaaaaatggatgatatttttgcagcacctcaagttgccgatgatattgtgaaaaacttgccaagcaatttctacgcaacgaactggacctatacacacggtaatttgtttaatgccattcaaatggaaaaaacattagttggtttattacttgtactgattattgtggttgctgcatttaacattgtttcgtctttggtcatggtggtaactgacaaaaaatcggacattgcaattttacgtactttaggtgcgtcaccatccatgattactaaaatctttatggtgcaaggtacagtgattggtgtgattggtacagttgcgggcacggttttaggtgtaattttggcacttacgatcagtgatattatttcttggtttaataatgttcttggacttaatttgttcgatgcctattttgtacattacttaccttcgtacttaagatggcaagacgtgacaattatcgtgattgtttctttactcttaagtttcttggcaactatttatccggcgcttcgtgcagccaaagttcaacctgccgaggcattgcgttatgagtaa

SEQ ID NO: 54179 - DNA, 1275 bp, Acinetobacter baumannii
atgagtacgtcggaattatttttatctgaaaatgaaattaaaagttttttatctggatttggtcagaatagtgattatatgtatggttatgaaggggaagagtttggtatttgcccatttataacattctatattttaaatagtgatgatgaggtgcttttaattgcagataaaattttatctatttgtaatgtttttgaagaagaaataatcgataaaccactaaacttattctatcgaaatgaagatagccattggaagaaaattgttaaaaagaaaccaaataagaaagatatcatcactgacgtgactaaagctttagagtcagatttattttattttatgggggcatcaagtgctgactcaaatttacaaagtgcacaatgggcatactcggcgatgttatcccaagctagcgcctactcttatttaaagattacatttagcagtaaatggtataaaaataataaaaataagtgggaagaatttgttgaaagatgcttgaaagaatttaatccaattcaatcatatagtggatatgaaattggaaatagcacacaactatcatcaatttctccagagtttgagacagcagaaagaatatttaccgattacttttatggattagatattgatcatccagctgcgatggcatttcattctcattatgatgaagatggttttgagtatttacctgttcttggagctggattacgtactcctacatggtgttttttactttccccttattggatagaaaagttagggttaagcgaggagcaaatccgcctaaaactcaatgatccacgaattacgattactaaattaccagatccaataaatcctgaaaaattcagtctatggattcgacttggagaattatcactttatccagttgaagagggtgtcccagatttattggtgatggcaaatgagcttattaagccaattcgttgtaacgatttaaaattaacgactttagatgcatgggatgatgatccaaacccaagatttgatatagagaactctccacaatggattgctcgttttgataaagatagccattggccggagggtaaacgagtcaataaaattcatgcagtacagttagagcaaaataccattaaggtactgggtggtgaaatttgcccgaaaacaggtgagtggtatagtccagcgaatgacatgcaaaagcgtcattttaatcagggcgaaattatgccagaaattaaagataactcttggggtgaaaccatttggtatttggttgaataa

SEQ ID NO: 54180 - DNA, 2856 bp, Acinetobacter baumannii
atgaccccaatttataaaaatgtaatgtttaataatatttcccaaatcttagagagcgtaggttttctctcacaacatcgttcggtgtatctccaattttcagatgcatcgttgaatagtcaggtttttttacaacgtatagatgggcaacattatcttaatcagggtacaacagccgagctgatttgtttatcaaccaatgcgcatatttcactcaagacatttattggggtgcaggttgctgttgatcaggtaacagatcgaggcagtcttttccgtactacaggtattattactggagcatcgcagggacaaagtgatggtgctctaaccttatataaactcaccataagtgatccaacttatctctggcataaacgcagaaacagtcgtgtgtttatgaacaagagtgtgaaagaaattagtgaaattctgtttcaagaatggcaggggaaaagtccattatttgcatctagtctgactttagatttgagtgggttgaaacagacctatgatgtccgtccttttgtgatgcagctcaatgaaagtgactatgattttttaacccgcttatggcgtagtgaaggcattaactggctcattgatgaagctgagcttactgtaccgagcaatacggaccatattcagccacaaaaattacgtcttattgacgataataaccaatatcaagccttaacaagaagaacgattcgctaccatcgaagtcatgcaactgaacaatttgatagcatgaccagcttaaaggctgaccgtagtttgcagccgacttctgtttttgtgcagcgttggcaatcagatgtattagaacaaacagatggggctggtagtgtacaaagtaaacatcagcatagctctaactatgacaatcaaagtttaagtcttgaagatgcatggcactttagtcccgcatggatgcaagatttaaaaggtgaagatggtgcaacttcagcaagtaatcaacaacttgaaaagttcaatcagaacctaagtgcttattatgatgctcagtctaaacagtttattgctaaaaccacagtaagagatacacaagtcggctattggtttgaacttaatgaacaccctgaaattgatcttcatgacggtgcggataaagagtttctgatcattggtaagcattattacaaccaaaataacttacccaaagatttaaaccagcaaattcaagccttagttcaacaaagccattggcaagcgagtcaaacagatgagcgccaaggtaatgaactgattttacaacgccgtaatattaaagttgttcctgcgtatcaacctttgcaacatcggcctaaagtctctgtacaacgtgcacgtgtagttgggccagaaggcgagcaaatttatgttgaccagtggggacgcattaaagtccgtttcttgtttacccgagctgatgaccaccgccatgatggtggagcaggaagtaatgacaatgacacagactcggcttgggttgatgttttaaccccatgggcgggaaaaggttatggggcacgcttcttgccacgtatcggtgaaattgttgtgattgatttctttgacggtaatgttgaccgaccatttgtggctggacgtattcacgaagctgaacgctacccgacccagtttgaccagaaaggacatctacctgacactaaaaagctgagtggtattcggtcagaagaagtaggtggcaaaggttttaaccagttacgtcttgatgatacgactggacaaattagtgctcagctacaaagtagccatgcggctagtcagttaaacttaggtaacttaagccatccaaaagacaaagcggaaagtgatggtcgtggtgaaggttttgaattgagaactgaccagtggggtgctgttagagcaggtaaaggcttactcattaccactcataaacaggaccaagctcaaggcacacatttagacgcagccgatgccaaacaacaaatagaaggtggtcttaataatgctaaggcacttagcgaagtggctaaaaaccagcaaactgacccattggaagtattagataatctaaaaactttcttagaacagattgaacagcaagataaagacaaagcggctgctttcaagcaagccttgatggtattaactgcacccaacagtattgcggtagcgagtaatgaagacatacacctaagcgcagatggccagttaagccaaagtgccggcgacagcattaatataagcactcaaaagaacctgattgcacatgctcaaaataagattagcctttttgcagcgcaacagggagcacggctgtatgcgggcaaaggaaaggttgaaatacaagctcaaggtgatggggcagatttaattgcccgtaaaggcatccaaattatttccacagaagacaaagttgaaattagtgcttctaaagaaattgttattacagccggtagttctcaaatcaagattaatggctcaggcattttccctgtcactggcggtaagtttgaagtgaaggctggacagcatgtgtttatggggggagggagtgcttctgctactttacctgctttgcctaagttggaatttgctcaatctccttattctgctcaatatcaattatttaaagcggatgggagaaatttccaaggttataaatattctatttatgactcaaaaaataacttaataaagcaaggggttactgataatcaaggtttgactgaacaagtagtgactgagagtagagaaaggatcataggttataaatctgtaatgagagaaagtgagcgtattactgagaattgggaagctaagctagaacagatggctaataaaatgagtgggggagaaaaataa

SEQ ID NO: 54181 - DNA, 660 bp, Acinetobacter baumannii
atgtgccaagcacagtctttacggctttgctgtgcctttttttctcccaaaaaagtatctcgtttagaaacaacaagaatttataacggtaaaactatgtcaaatgatttagaaatctcttccaaaaaattacacattattcgaacggctattggtctatttacaacttatggctttcacaccgcaggtgtagacctgattgccaaacagtgcgaagtacccaaggcgacgttgtataactattttcgttcaaaagaagggctgattgaaatgtgtatcgcctttcaaaaaagtttactcaaagaagaagtactcgccattatttattcaagccattaccgcacacctattgataagctcaaagaaatcgtggtcttacatgttaactctaacagcctgtaccacttattacttaaagctttttttgaaattaaagtgacttacccgcaggcttaccgtatggcagttgagtatagaaaatggctgacccgtgaaatttttgaactgatttttagcttagaaatgagtgtattaaaacccgatgccgacatggttttaaacttaatagatggcttaatgtttgagtttttaagtacagacagtgtagagaacagggatgcagcggtggagtgtttctttaagcctatctgtttaagataa

SEQ ID NO: 54182 - DNA, 678 bp, Acinetobacter baumannii
atgaaaaaagtacttttgtttgacctagaccaaaccattcttaatcgcaatgaatcgcttataaaatttctaaattggcaagtaaacttcttcaaattagtaccacaagaattaaaagagtcttttattaaaagcttcatcaagttagataacaatggaagtgtttggaaagatattgtttatgatcaattaattaaagactttaatatcaaaggatatgatacaaatgaattgctacagtcttatattaataattttaataaattctctacagcttttgaaaatgctcaaaaaaccattcaaaaccttcatgctcaaggatatacattgggcttagtatcaaacggaaaaacaccgtttcaagaacataatttttatgctttaggaataacagattatttttcaactatcgtgatttctgaagccataggtttaagaaaacctgacccagcaatttatctatatacttgcactcaattgggctgtaacccatccgattgcatttttattggagacaatcccaaagcagatatacaaggcgccaaaaaagtgggtatgcaaacaatatttttccacccaactctcactcttgaacaccctctttctgatgcaagtattcatcattacgatgaacttgaagaaacaattaagagattagttactaatcccctttattaa

SEQ ID NO: 54183 - DNA, 1140 bp, Acinetobacter baumannii
atgtttagaaaagcacttttatgcttaagtttaattggcttggtcggttgcaatgacgatgataaaaccgaaacaactccaactacaccagaatatcaacttcctaaaattttagtgattggacaccgcggcgctagcgctttacgtcctgaacatactttggcttcatatcaaaaagcgattgatgatggtgctgactttattgaacctgatctggtttcaacaaaagacggtgtattggttactcgtcatgaaaacgaaattggtggtactaccaatatcagtactcttgcccaatttgcagaccgtaaaaccacaaaaaatattgatggtgtcaatttaacgggttggtttacggaagacctcactttaaatgaattacaacaagttaaagcacgtgaacgtattcctgagttccgaccagcaaatacggcttataacgatctgtattcaattccaacacttgaacaagtcattgaacttgccgaagcaaattataaaaaaaccggaaagattattggcttatatattgaaaccaaacatccaacttattttaaaaacaagaatttggccatggaagacacacttcttaaaactcttgccaaatatcaatatacacgtgatattgcccctatctatttgcaatcgttcgaagtcagcaatttaaagtatttaaaagatcaacttgatctacataaaacacttaaacatgcacaaatcattcagttatatgatgcaaaaacctctcgaccagcagactttgttgaatctggtgtttctaaaacatatggtgatttagctacagcgcaaagcttaaaagatgttgctaaatatgcaaatggtgtaggcccaagcaaaaactatattctcaatttcaataatgatggttcagtacaaactacttcatttattagcgatgcacatgccgctggcttaaaagtacacccatatactttccgtccagaaaataactttttacctcagcctttaaaatgtagcgacaaacctgccgagcgttgcccgacaggtgctctaaaagagtttgaagcatatttcaaagcaggtgtagatggtatctttacagatgacccagcactcggccgtgaagcagtcaataattttgagaaagcaactaaatag

SEQ ID NO: 54184 - DNA, 648 bp, Acinetobacter baumannii
gtgcttgaacaaattgtggctcttgccaagaaatacgatttgattttatttgctgacgaaatttacgacaaaattgtttatgacggaattgagcacgtttcggttgcctctttagctggcgatcagttatgtatttcgttcaatggtttatcaaaagcttatcgtattgctggtttccgctcaggttggatggcaatcacaggcgatagaagtcgtgcggcagactatattgaaggcttagatatgttagcttctatgcgtttatgcgcaaacgtacaagctcaatatgcaattcaaactgcgcttggcggctatcaatccattaatgacttaatccgcccgggtggtcgtctatatgaacagcgcaatatcgcatgggaaatgttaaatgaaattcctggggtaagctgtgtaaaaccagaaggtgcaatgtattgtttcccacgacttgatcctaacatttacccaatcgaagacgacgaaaagctaatgttagatttacttcgtgccgaaaaagtacttttggtacaaggaacgggatttaactggccaacaccagatcatttccgggttgttttcttacctgcagaaaatgaattacgcgaagcaattggtcgcttaggtcgtttcttagcaaatcgccgttaa

SEQ ID NO: 54185 - DNA, 585 bp, Acinetobacter baumannii
gtgagagaaaatgcacataagtttttttcctctaaacaaacacctgataaggcaattgaggaactaaatataaggtttaaagaagctggtgttggatatcaatttgagcaagatgagctaattagggttgattcacaatttttacattctgaggttgtaaagcctgttcttcaacttcttggaaaagaccgagattaccaaggagcatttgccgaatttttatctgcacatgaacattatcggcatcagagatataaagaatgcttaaatgaatgtcttaaagcttttgaaagcttaatgaaatctatccataaaaaacattcttggccatttaatccaaatgataccgccaaaaaattaattaatagttgtttgaataatgggttagttcctatatatcttcagaatcaattttcttcattgaatattttgttagaaagtggtgtacctacaatacggaataaagaaggtggtcatggacaaggacatgaaataaaagaagttcctgaatatttaacaagttatgcgctacatttaactgctactaatctattatttttaattaaatgcgaagaaagtatataa

SEQ ID NO: 54186 - DNA, 138 bp, Acinetobacter baumannii
atgacgctatatggatatcacttttcaacaattgaaaataactgggaagacttaaccccattaaatgagtttttacaaacatttgctgatgatgatggtgatgtctcccaaagagacaaagaaagaaattattgctaa

SEQ ID NO: 54187 - DNA, 651 bp, Acinetobacter baumannii
atggcacagttcgcggtcatcggcttgggaagttttggagcaacagttgctcaagaactcacaaaattaaatcatgatgttattggcattgatacagtcaaaaagaatgttgaaaatcttgccgatgttttaactcatgctgtcattgctgatgctactgatgaatatgtactggatgaattaaacattcaaaattgtgatgcggttgttgttgcaattggtgaagatattgaggctagtattttatgtgtgctgaatttaaaaaatcttggtattgataaaatttgggtaaaagcaaagacaaaggctcatcacacaattttgtctcacctcaatatcaataaaatcattcatcctgaagaagacatgggtgtacgtgttgcgcaagcacttaattatccaatggtaagtcgttacatgtctttagatgatgatcactatattgtgaaaatcgatattcccgagaaattaaatggcattaatttgtatgggattatgcaacaagcaccgcaagttaaaactctacttgtaaaacgacagcagcaaattttatttgaaactgaagagacttttaccctacaaacgcatgatattcttattttagaaggtcatttacagcaacttaaaaagctctctaattgtttcctataa

SEQ ID NO: 54188 - DNA, 384 bp, Acinetobacter baumannii
  misc_feature (131)..(140): n is a, c, g, or t
atgttgaaatttatgaaaattgcagtatttgttggaacagtagccgcgttaagtgcgtgtactaaaaacgaagcatctgagcaaaagaaagcggaagcacctatggaacagatgaataaagagtcatctannnnnnnnnngtcatctaaagcggtaacagcccaagccgttggggtgattactgctattgataaaaaaggaaatattttaacactcgaacatgaagcaattcctgcgattaagtggccagcaatgactatgggctttaaagttgctgatcctgcacttctagaaggtctaaccataggacaacatgtagagtttgagctaaaagctgaaggtgaaaactatattattgttgcagttaaaccaaaaacggcataa

SEQ ID NO: 54189 - DNA, 1500 bp, Acinetobacter baumannii
atgttaaggaataaattgacagttgctattatgggagtcgccgcaattagtctggttgcaggtggcggtgctggatactggtttgcccataaaaaagaagaatctcaaccgtgggtggaaagccaaaaacaggataaaaaagttctttattggtacgatccaatgaagccggaacagcattttgataaacccggtaagtctccatttatggatatggaactggtacctaaatatgcagatgaaaatacagggataaaagatgatagtcattctacagtcaagattgatccatctattcaacaaaatttagccattcgttatgtcacagttgaacaagcagtcattggaaacgccctgttaactaatggcatattacaggccaatgaaaggcaagtcgcgattttacaaaccagagcaaatggttttgttcaacgggtttatggacatgcccctggtgatatggtgaaccaaggcagcccgattgcagatatttccatacccgaatggacaggagaacaaaccgagtttttagctgtactccgaactggagaccgttctctgattcaggcaagccgacaacgtttgcagcttttaggaattccgcaaactgtgattcgtcaggtcgaacttactcatcgagtgcaatctagtatgactttgtctgcgcctgtgagtggttttattgactcattggaagttcgtaatggaatgactttagcgatgggacaaaccctagccacgattaaagggattaacccaatctggttagaagcatctgtctcagaaacacaaattgccggtataaaacgagggatgagagtcgaagcaactctagctgcataccctcaagcagtgcttggtaaagtaacagatattttacccactttagatcctaccagtagaaccataaaggttcgtattgaattacctaacagtgatggccacctcaagccaggaatgtatgcctctgtcagattatcgaatcatccccaaagcagcttagttgtgccagaacaagctgttatacgcacaggtactcgaaatgttgtcattgtgggacatgatcaaggacgctttgaacctgttgttgtacagctagggcaaagcgatggtaataagattgccattctacaaggtttgaaagctggccagaaagtggtgatttcaggacaattcctcattgattctgaagcaaatttacaaggtgtaatggataagctaaatactggacaatcaattacgtcatctcaaaaagttaagaacgctatatatcaaagtaccggtaaagtggaaaaaatcaccactcaagagattactatttcacatcaggctattcctgagctgggatggggagctatgacaatgggctttaaacagcctgtacgaccatttagccaggttcagcaaggtgatcaggtcagctttagctttatacatgctggaaatgcttacactatttctgagatttccaaaatatctcaggcccctatgaagaactaa

SEQ ID NO: 54190 - DNA, 1305 bp, Acinetobacter baumannii
atgaatatttataaagaaaagcgatctcttagtaagagatggccaatagctacgatctgtttctgtctgatctatggtcaggcttatgctgaaccattgactttggatacagctttaaagcttgctgagcaatatgcacctaacctaagagcaagtagtgcacggattgaaggggctgaaaatatggtttcagcttcaggtattttacctaaccctaaattatttgtgggtttagataattaccctgtatcgggtgatgcagcatggtcagtcacacgcgaaggtatgaccatgcagaaaattggggttatgcaggattttccaaaccgggctaaaaggcaagcagaggtcgagttagcaaaagctgaattaggttctgccaatgcccaaactgagattctacggattgaactacgtcaaaaagtcgcatctgcttggtttaagcgcttttatcttgaacgtaaattggccctatacgatgaattatttgctgagaatcgattactttctgaaattacgcaaactcaagtcacgtctggccggacaatgattgccgatgcacttgagccaagacagcagactatcgtattgcttgaccaaaaggatgatttactccgtgatttaaataaggcaaaacttgaattgcatcggttgatcagtgcagaccctactgaaaatctctcccagattgaagccttgccttcccaaccacctgttattcatctcgacacttcaaagttgtatggtcatttgcatcaacatcctgaattaaaagcttttcaggcagaaaagcaaactgccgaagcaaaattaaagcaagctcaagctttacagaaaccagattggggtattgaacttgcttatcagcatcgggctccagaatttggcgatatgattggagtacaactaaccactgagcttcccgtattttcaaaaagacgaagtacaccactcatccaggccgctttagcggaacaaaacagaattaccgctgatcaagaagcccagtaccgtgaacaccttaccaaattagatgatgggctatctgatcttgaagcgcttaaccagcaaattaagcgtgcaattcaaacgggtattccattagccaaacaaaaagtgaaattacagttggcaagctatcaagcggggaaaactaatttatccaatgtgattgctgtccgacaaactcttttggagcaacagctacgactcattgatcttcaacaacaacaagcgattacaacagcacagcttttctttacctttgaagagccgaccttaaaccatattggggagcagccataa

SEQ ID NO: 54191 - DNA, 441 bp, Acinetobacter baumannii
atggaatctgcaaaactaataaagcttaaaatttggtctatatctatgcagtggttaaaaacatgtctatcgctgtttttatcgtttgctatcctgttagtaggatcggccgctgttgcttcgtctgtacataaacgatgtttaatgccatctgaacaaatgccacccatgttaatgggagcatctcaaaatcagcagatgatgcatacggattgtatgaaagtagaagtaaagaccaaaaaaactctacacgacccatcttgtatgtcagaacaagattgcattatgtcctttagcaagcttgtatatggtcatgatgttcagagtattttgtactcaactgtttcctttcctatagagcgctcagctttttactctccagatcaaaatctcccttctccatacccttcgggtttatggaagcccccacgctctaactaa

SEQ ID NO: 54192 - DNA, 258 bp, Acinetobacter baumannii
atgaatttatttcaagtaaagcaagctcaaactgtaaaaattattgaacttaaaaagggtaatcattatccagataataatgatcctgttctagaacgtttgaaattacttggctttagagtaggtgaatctttacaagtacttgccaaaggactttttggtggagagcctattctagttcaaattgagacttcccgttttgctttaagaaaaaatgaagctgaaagaattattgtagagattgccaatgaacactaa

SEQ ID NO: 54193 - DNA, 1296 bp, Acinetobacter baumannii
atgagtggttgcggttgtaataaagaaagcgcttttgaagaaacggagcaaaaattaaagacttctcaacaggatgcttgtaaagcatcaggttcggcgcctgaaaaaaataatagttcttgttgcggaagtgatacagagcaagagctgggtggtaaagagaagctgtcttgtggcagtactaagccctgttcaagtgggacgaattcacaatgtggttcagattcaaaaacaaatgcagtaatggcggctgagaacgtaagtaaagtgacttttattagtgaatatcatatcccgaaaatggattgttccgcagaagaacaaatggttcggatgacactatcatcactcgcgaatattgataagctgatttttgatttaccaaatagaagccttaaagttcgccacagcggtgaagttaatgaaattactgccaaactagagaatctcggatttggagccaaattaaataaatcagagattctggaaagtcaaccgagtgcgaaagaagtaagtacctattcaattccaaaaatggattgttctgctgaagagcaaatggtaagaatgactctttcgcctttacaacagattaagggcttaacctttgatttatcacaaagaaatttaaaggtttatcatacaaacggtattaatgaaattaccgaaaagcttgagtctttaggattcggtgcagtacttattgaaactgtaagaactaccgaggatttaccagaaacacctgatccagctcaacagacaaaagtcttaaaattattgttggcaattaatggtgtccttttctttattgaatttataagtggaattatcgctgcttcaacaggtcttattgctgattcccttgatatgtttgcagatgcggctgtatatggcattgcattgtatgcagtaggaaaagcagcgaggtatcaagtaaaagcggcacacttggctggttggatacaacttatattggcctcaatcgttattgtagatgtagttagacgttttatgtttggtagcgaacctgaatccaatatcatgattattattgctttatgtgcactcattgcaaatgctgcctgtctctatttactgacaggccataaaaatggaggcgcccatatgaaagcaagttggatattcactgcaaatgatgtcatcgtgaatatgggagtaattttggcaggaatattagtcgcttggactggttcagcttatccagatttgattattggtatccttgtttcattgtttgtgctgaatggagcacgaaaaattttggcattgaaataa

SEQ ID NO: 54194 - DNA, 1020 bp, Acinetobacter baumannii
atgactatttcaaacacaacaaacttgccttctcccttaatgccatctcagcagcacaatggcaaatttagaaatacgcgtccgaaccaacacaagccttcttttggtaaaacacttcaacttatgtggaagtttctttttaacaaaccaaaagacacagtacccaacaaagaaattcctgttttaagtttgtcaaaagaacagcttttaagtgcacctgaccgctctctatttcgtttgggccactcaaccattttgttaaaactgcaaaatgagttttggttaaccgaccctgttttttctgaacgtgcttcaccttttcaatggattggtccaaaacgttttcaccagccaccgattagcattgcagacttaccacccattaaaggtgtgattctgtcgcataaccactacgaccacctcgactaccatgcggttatgcagcttaacgataaagttgaacatttcttaacgccgcttggtgtaggcgatacactcattaaatggggaattccagcagaaaaagttcaacaactcgactggtgggacaccacgcatgtagatggacttgaactggtcgctacccctgcccatcatttttcaggccgtggtatgggcgatagcaatgcaacgctttgggcttcgtgggtgattattgataatgacttacgtgtgttttttagcggtgacacgggatattttgacgggtttaaagagattggacatcgttatggtccgtttgatttgaccatgttagaaactggtgcttatgaccctgaatggcccgatgttcatatgcaaccagagcaaactttacaagcacatttagacttaaaaggacgtcatttgttgcctgtacataatggtacttttgacttggcgcttcatgcttgggacgacccgtttgaacgtatcgtggctttggctcatgaaaataatttagccattagcacaccgcaaatgggacaaattttgaacttaaacgagccgaatgttgaaaattattggtggcgttcatag

SEQ ID NO: 54195 - DNA, 231 bp, Acinetobacter baumannii
atgtatttagcatatctaattacgaatttactggtttacttaccagagccctattggctcatctctctctgcgatattatattcttaataccagcatttaaagcactgaactatgcacaaaaacaaatagaaacgacaattgagcaagagaaattcaatacatctcaaatcactttaattactataggttctattatgtggctactgattcttatcagttttattatatga

SEQ ID NO: 54196 - DNA, 1242 bp, Acinetobacter baumannii
atgcctcaatgtgatgaatgtggccgaagcgttaaaaaaattcataaaaactataaatcaaataaattctgtcatacatgttatgtacgggtatttaaaaaacgggaatgttcatcctgcggaagtctggctagattatataaatatgatcatttggcaatttgccagaaatgtgaaaacaataggccatgtattcgttgtcaaagagttgattattccataggaaaaattacagagaatggtccagtttgtaaaagttgttccgtttattttagagagtttcaagcttgtgagcgttgtggatgtctttcacagaaacttttccgaattagccgttttgcagataatttaagagtctgtcctaagtgtgcaactcgtgattgtagaacttgcccgtgttgtcgccggtatcgcctacttgaagtagacatttcaacaggtcagatgtactgcaaaaaatgtttaactggccaacctcatccttgcttgtcttgtaaacaggaaatcccggctggacgtgggagttattgtgaaatatgttcttggcaccaggctctggagcgaaaagttgcgaagctggtaaataatctaaaagacgtaaaccttagacaacattttaaaaattattctaaatggcttgaacaacgagttgggccacataaagcagtattatttagtgttaaacatataaagttttttgaagtaacaaatgatctttggaaggagcaaattccagcttatcgtgacttccttgcacgattaagatcaagtggcttacgtaagttcgtactacctatgcaatggttaactcaagtacatcatcttgaagtagatatacaagcaaaagaattttgttctgagctggaccaattgaataagttgaaagatatttgcccggaaacttcatcctcagctcaaattcttcaagagtactatgaagtattaatgaatagagtatataacggcaaaacaagtattcgttctgcccgattagcaatgaaacctgcagcagccttaatgatacagatcagtaaatcaaggtttaaactgccacggctatggcatatcaagcactatctttctgagcatcctggtcaggctgccgctcttacaggatttctaatttttttaaatcagaattacggtacccatttaggccaaattattcccgttaaacttaatggatcacaaccgcatccaagggcaacccgtattaaccaagaggataaagcttcatcctga

SEQ ID NO: 54197 - DNA, 675 bp, Acinetobacter baumannii
gtgggttgtactaagcatcagttacgcttagtagaccagtgcccccactgtcataaggctattcaaccaaggttattggaagccccggatcgaactctatcttgctgtgctatatgtaaaaagaaacttcctgatgtgaaagccaataccattgatcaaaatgctttgagattacaggaagattttgacctttttctaaggcaaggatatgcgatttatacaaatactttaatttctatatcagaatggttgaacgtcattcaggtctttaatcaattcattcgaaaagttcttagaggtcccttaaatagtaagggttgggcatttttaaaggctttaggaattaaaataccccacatacaacttttatcgacaggtttagttcttagccaactttcagtaatggaaagagagcgaatcttttcctatatttatcaacttttaaatatccctcaaataagacttatcgaaatagctcattctttaaagatgaatagaacctctttctgggataagagatgtagaatacctgaaatattacagcctctagaaagacaactagacaaagtttctcggaagtatctcttaataaaaaaggtttcagaaattcctaaacctacgagtaaaaaaactatattgcgaaagatgaggagattaaagcaaaagatctcctaa

SEQ ID NO: 54198 - DNA, 1056 bp, Acinetobacter baumannii
gtgagttttcctaaaatgaagttaggtgaatgtgctgaaattcattcaggctcaacgccacggacgaataatcatgatttttgggatggtgatattacttgggtgacacctaaagaccttagcaaattaaagtctaaatttatttctaaaacagaaagtaagattactcaattaggttttgatagttgttcaactaaattacttcctgaaaattctgttttatttagttctcgtgctcctatcgggcatgttgcaattaatacaattcctatgtgtactaaccaagggttcaaaagttttgtacccaaagctgatttattagattcgcaatatttatattattggttaaaagcgcacaaagaatatcttcaagatttaggtgttggcgcaacatttaaggaaatttctaaaacagttattgctaatgttgaaatcccactcccaccactcgcagagcaacgccgaattgcgtctattttagatcaagcggatgagttacgccaaaaacgtcagcaagcgattgaaaaattagatcagcttttacaagcgacttttatagagatgtttggcgatcctattgataacttaaaaggattagaaacagttgccttattggatttatgcaaaaaaattactgatggcacacatcaaagtcctaaatggacaacagaaggcattccatttttatttatcagcaatatagttgatggagaaattgattattcttctcaaaagtttattgatcaagtcacgtatgattcattaacaaaaagtaccaaaattgagttgaatgacattctttatacaactgttggtagttatggtaatgtagctagggttaaaagtgatcaattattttgttttcaaaggcatattgcacatatcaaacctagtttcgataaggtaaatcctaagtttttggaaaagatgttatcaagttatggtgtcagacgacaggcagatcgtttagtgcgtggagttgcccaaaaaacgctaaatcttaaggatttaaaagaaattatagtattcaatatctccttagacgaacgaaattag

SEQ ID NO: 54199 - DNA, 3444 bp, Acinetobacter baumannii
atgagcaattttcagtttttagaacctgaatttaaaagcttggcagcgactgcgaaagaagctgaaaaactcgtgtatatttcccctcaatttgcccttgctgcggctcgtacatcacttgaaaaccttgtgttgtggctgtatcaatacgacaaaaaacttactcagccttatgatgcttcactacataacttactcaacgaccccaaatttaaagacctgattccaccctatatttgggacaaaatggacaacatccgcatggtcggcaacagtgccgtacatgggaaaaagttcaagcagctcacaacagaagaaaccgttaaacacattagccatttatttctgatgtatgtttggtttgaacggaactatggctcaccctcaaaagaccgttcacagtcgattttatttaacccaaaactaataccaaatgctgacaatacgcagcaaatcaccgccaacaaagaacaactgcaaaaagaaacagaagctaaagaaaaacagtttgctgaacaacataaagctttacgggaacgtgaacaaaaactatttgaactgtccgcaagtttagaagagcgtgaaaaactattagccaatatagatgctgaacttgcccaaaaacgcgctgatgttgaacaagccaagattgccaacagcaaaatcgaagaccataccgactataaagaagacgaaactcgaaaacttaaaattgacctcatgcttgaagaagctggctgggacattggcacatcggttcgagaagaagttgctgtaacaggtatgccgagtccatcgggtaaaggtgcagtggattatgtgctgtatgatgccaatggcttgcctttggctgtagttgaagctaaacgtacatcaaccgacccagatattggacaacaacaagccaagctctatgcagactgcttagaacaacaaacaggacaacgccctgtcattttctataccaatggctacaaaacccgaatttggaatgatgttcaaggtggtccaccacgtttagttcacggcttttatacgcaagcagaactcaaacgcttgatcgaaagacgtaaaaacaaccctgatttaagtagcttcccgatcaatgcggagattgtcgagcgttactaccaaactcgtgccatcaaagccatgcttgcagcctatcaacgtaaagaacgtgctggcttactcatcatggcaacaggtacaggtaaaacccgtaccgccattgctttggtcgatgtactgatgaaagccaatgtggtgcaaaaagccttattccttgcagaccgtacttcattggtcaatcaagcgcacaatgcctttaaagccaatttaaaagatgcctcattcgtcaatttacttgaggataaaaaccaagtgggtcgtgtgtatttctcgacctatcaaactatgatgggcttgattgacgaaaaaaatgccgatggtacacgacaattcggtacaggcatgtttgacctgattattattgatgaagcccaccgaagcgtttatcaaaaatttggcgagatttttaaatacttcgatagtttgcttgtcggtttaaccgcaacgccacgagatgaagtagatcgtgatacatacgcactgtttggcttagaaagtggtattccgactgattactatgatcttgatcaagccattgccgatggatatctcgtaccaccaaaagcctattctgttccgctaaaattcatgcgtgaaggtgtgaaatatgacgaactctcagaagaggaaaaacaacactgggatagtctaaattggggagatgaagaagcacctgaagaagtatcagcatccaaaatcaataaagagctgtttaatacagacacgattgatttaatgctcaagcacttgatggaaaatggtattaagaccgaaggcggtgatcgtcttggtaaaaccattatctttgccgtcaatcaaaaacatgcccagtttattgctgatcgcttcaatgaaaactatccgcaatatgatggcaagtttgcccgtgtcattacccatgccaccaagtatccacaaagcttaattgatgactttagtaagaaagatttgcctgaaccacaaatttccatttcagtagatatgctggatacagggattgatgttcccgaagtcgttaatctggtgttttttaaagcagtgcgttctaaagtgaaatttatgcagatgattgggcgtggtactcgactctgcaaagaactatttagcccagaagatgataaaaaagaattctttatcttcgactattgttcaaactttgaatacttcaatgaaaaccctgatggtgctcccgtatcgactactgaaccattgggacaacggctgttcaaagctcgattaaatattctgagtttattgaattccaaagattatgaaactgaagatttaaaagccgtacagcaagatatgcgtcaaagccttcagacagaagtgaaatcaatgaataacgataacttcatcgtaaagtctgagcttgagtatgttgaacaatttaaaaatgatgaagcatgggacaacttggatgaccttgcgatagggacattgcgagaacacatctctaaacttccaaatcaacttgagccagaaatattagaagccaagctatttgatatgttgtgttataaccttgagcttgctgtattagaaaaaaataataaatcaatacaaggctatgccaataaagtgatagaaatcgcttcaaagctggaatcaaaagagaacattcccgttgtcgctgaacagattgctcttattcaggaagtgcaaacggttgactattggaaaggcattaccttacctatgcttgaatcaatgcgtaaacgcatccgtggcttagtgaaattgattgaaaaatctacctcaaccattgtgtattcgatgctagacgatgacattggtgaagctatagaagttgatattcctgtagtttccagtggtgtaaaccttgcacagtaccgtaagcgtgtagaaagctttattaaagccaacgagaaccacataactattgccaaactcaaacgtggtttagcattgactccgaccgacctaagtgaacttgagcgcttcgtatttgaggctcaggaagtcgaaagcaaagaaaaatttgaagaatgttttggtacagaaaaatctttaccacttttcattcgctctttggttggattagatcgtcaggctgttcaagaagctttctccaaatatctacaaggtacgacttataacgataaacagattcgctttgtagaaatgattattgagcatttaacaatacgaggcaccttagaagcctcacagctttatgagccaccatttaatcagattcacttcgaaggcattgatggtgtgtttgctgatagtgatgctgacaacatatttggggttgttgaggtgtttaatgagagtgcggtggcgtaa

SEQ ID NO: 54200 - DNA, 1356 bp, Acinetobacter baumannii
atgcttaatattgttaaagttagggatgatcattcacctataaaatttcaacaggattctattgattctgctaaattttcattatgtgacgatattgagtgcgcttggctcaatcctgatgaatcattttcttataaagaacttcgatcaagaattgaaccatggttaacggctctatttcaatcagagcatctttctttgcttgcgggttctggtttaacccacgctgttcattatttagcagcagaaaaagctgctacgggtatggatgctttaacacttactaatttcaatgatgaaattaatcaagcagcaataaaatcatctaaaatgactggtcgtaaagcaggtaatttagaagatcaattgcgtgtagcaaatgaattacttcgtgggctagaaattttgaatgatgataaagctgttgcccttaaagaagaattagaaatagcaatgcaaagttttgctaattcaatattagtaagtgaaaatggtattgccacagcgaattttgaaaaaagagaaaatgctttcaatatcttagttacttttctaatgagctttgctagtcgtactggtgtacgagatagattaaatatttttaccacgaactatgatcgagttatcgaggctggttcagaattagcaggcattcacttacttgatagatttttaggcaatttgatgcctatttttaggtcatctcgtttagatttagacatgcactacaatcccccaggtatccgaggagaaccgcgttaccttgaaggggttgttcgatatacaaaacttcatggatctgtagattggttacaagttaacaatgatattcgacgtattggtttgccatttggagcaaaatcaattgccccatttattgaagtggcaggttatgaagatattaccccacatgaattaatgatttatcctaactcagcaaaagatcaagaaacagcaaactatccttatgttgaattatttcgtgatctagctgctgctatttgtcgtcctaatagcactctagttacatatgggtatagtttcggtgatgatcatatcaatcgtgttattcgtgatatgttaactatcccatcaacccatttggtcattatttcttatgatgacaatatgggcagaataatgaaattatatgatgagctggggcgtaactctcaaattagtttgcttataggtccagcactagctgatctatcaaacctaacacaattttatttacctaaagctgcaattgataagactacttctcgtatgagtgagcttttgaagcaaagattaccctcaaatcaagaacccattattacagaaaatttgaatagaactgatggggatggttaa

SEQ ID NO: 54201 - DNA, 2073 bp, Acinetobacter baumannii
atgaatatttcgccattagcttatgctgattcattaagaatagggactgttgattttgtttcacctagtgaaattaaagtactacttgatatagaagctcctgaagggacagcactaaacacaggtataccaagagcattccccaaagttaatggatatgtacttatagctactgatactggttatttagttggtcaaattgaatggataactatagaacgctcacaatatcctaaaagaaaggggatgcaagactttggtttagtcgatttaccctatcccctgagaaaaatgagtttaaacccacttggttgtttaacttacgataaagaagaaattggtcgtattcattataaatttcatcgaggcgtggaaagttatcctaccgttggggcaccagttcttttacccactcaagatcaactaaaagatattgtcgaatctggagataatagaagagtttgtattggtacaagcccgttggcaaacggtgcaaaagtaatggttgacccagatcgcctttttggaaggcatttagcagttttgggtaatacaggaagtggaaaatcttgttctgtagcaggcttaattcgctggtctttagatgctgctgaaaaagtgagaggtagtcaaccaaatgcccgatttatcattttagatccaaatggagaatattcagagacatttaaagataaagaaaatattcgaatattctctgtagagccaaaagatgatgctattaagcaacttcaagttcctttgtggctttggaatagctctgagtgggtttcttttacacaagctagtcccaaaacccaacgtcctactttaattcaagcattacgctcagttagggaaggaatatttaatacagaacaatcctctcatcaagaaatgaaacgatatttacaaacactcgtaagtatcactcaaattgaaattcgttctggttcaccatggggaagatttcctaatccaaagaacttttttgaacgtttaaaagtatggcgtgatggaatagaaaacagcactatatttaacactagtcaaaataattccttacaagcaattagagataaagtgagtgaatttgaacaaactcgaactggatcatacccacggtatgaatttaatagagcagagatagatagtttcttacaattattgaaagttgctcataccgcctttggtggaagtgagatggaaaccttaccgattgatgcagatattccacgaccattttctggtgaaaacttattaaaaagcattgaaggcaatgctgaattgctaggtgtctcagaatatattgataccatgcaaatgagaattaaaactcttctttcagacactcgaatgaaaattttaacaagtcagactgaaggtgtagcaataactttggagggttggctctctgattatattggggataataatgcttcgaatggaacaattacagttattgatctgtccttagttcccgcagaaattgcacatattattgcagctactatagctcgaatgacattggaatccttacaaagatatcgccgaatgaatcaagggcaagtacttcctacggtattagttatggaagaagctcatacttttgtgaaaagatataaagatgataccgaataccaaaattcatcagcaatatgttgtcaagtttttgaaaaaattgctcgtgaaggacgaaaatttggattgggtatgatgctttcatctcaaaggcctagtgagctttcaccaactgttctttctcaatgtaatagctttttgcttcatcgaattagtaatgaacgagatcaagaactgatacacaagttggtgcctgataatctccgaggattattaagagatttgccatctttaccttccagaaatgcaatactacttggctgggcttcggaattacctgtattggttcaaatgaatcatctttccactgaacatagaccaaaatcagatgatcctgactattggaatgtatggactgctcaagatcaggatggaaggcttgttactcgagaagtagattggaaagggatagctaatgattggcagcagacttaa

SEQ ID NO: 54202 - DNA, 2094 bp, Acinetobacter baumannii
atgaaacgttctattttatttatttcatcagttggggttataacaggccatgtatatgccgcagagacagactcacaggctgtaaccaaccttccaacgatttcagtaaaagctgagaaggaaaacagtttaaaacaagaggtaggacaagcatcaagtgccactaaaggacttatgcaattaaaagatgttcctcaaattgtaaatgttgtaccgaaacaaattctaagagagcagacagtgacttctatgcaaggtgctttgcaaaacgttgctggtttgagctttagtgtgggggatgggcaacgtgatcaggtcatgattcgcggtttctctgcaatcacagataattatgtagatggtattcgcgatgatgctttgtattttcgtgatatgtcgaatgttgaacgagttgaggtactaaaaggacctgcttctgtattatatggacgcggttcggcgggtggtttagttaacaagattaataaaaaaccaatggatcaatccttgcgtgaggtgagcctgattggcagtactacagggcaacgtcgtgcagaagtcgatgtaaatgaaaaagtagccgagaatgttaaagttcgtttaactggtgcagttgaagactcagatggttatcgcgatcaggcatttttaaaacgacaggcggtggctccatctgtacagtgggatattactgataaaaccaaacttttacttcaggccgactacttgcacgatgatcgtctagctgatcaaggtttcccgacagatccaattacaggtaaaccagttaagacaaatcctaaaactttttatggtgcattaaacggtaaagaagttggggatgtcgatactgaaatctcaagccagactatcagcttagatcatgagtttaatgatcaactcaaatatcatggtgcagttcgccactataactactcattagatcgtcaatatagtgttgatacacatcctgctgataagacaaaaattactttgactcaaaataaacgcctgcgtaatgaagatggtatatatgttcagcaagaattaagtggtttatttaatacaggtttcttaaagcacaataccttaattggtgctgaatatagcaaacagcataaagatgagatactttggcaaggtgctaagacaaccactgatttatataatcctaaattagactactgggcacctattaataccggaacaacagttgcacgcaataacaatagtaatacctttgaaaactatggtgtgtatctgcaagatttaatgacagtaacagatcagcttaaagttttagttggtttacgttatgacaatctatctcaagatcgtgatgataaaacgagtacgaatttagacttaaaccgtactgacaatacttattctccacgaattggggtggtctatcagccagtaaataatctttcactttatacttcttataatcgttctttccagcctttggctgattcatttgttttttatcaaaacagtgatgatttaaaaccaacaaaaactgaaaattatgaggtgggtgcaaagtgggatgtgaatgatcaattgaatgtgacattggctttatttgaaatgagccaaaccaatattcaaaaccaagatccagctaatccaaatcaagcactattggcaggcgagcaaaaaacaaaaggtattgaactttcattaacaggtcagttgactgatcagttgtcagtgctagctggctattcttatatggatggtaagattgaaaagtcgactgttggatttacgggtaatcactcagcgcttacgccaaacaacacagctaacctgtggttaaaatatcaaattaatgatcattggtatgcagctgtaggtggtcgtggtgaatcatcacgctttagtgcgccagataacaaaaacgttttaccagggtatgcggttgtaaatgcagctttaggttatcaaagtgaacgttatgatgtgaacttaaatctaaataacttgtttgatcgcgattattttgtttcaggccatagtggagcaaatgattcaaatatgatgggcgatcctttaaatgctcaagttgcacttcgctatcgtttttaa

SEQ ID NO: 54203 - DNA, 480 bp, Acinetobacter baumannii
atgaaacgagcagcaatatactttaatgacaaatatattgaaattatttcatggaattatggtggaatgtctgtatttaatttagactttattcctttagttttgaaattcgatattgataattcgactttaggaaagtcaattaaaatagcattagatgcagggaaaaagattccaccagaaagtgtcaaagattttttgttttctcctgaattagatatatttatgaaagaaaggactaagaaattaatagctgaatttggatataaatcaaaaaaaacattgtttaaaaatatgagaaaagtaggtgtagagttcaatgaaaattatactatttctccctctcatcaagatggattagattatagtttttcaggtttaagtaaagctgatgaaattattcttccatgtaatgcaacggatgaagaactaggacaagcggtacgcttagcctatgagaagtgtacaagtatttattaa

SEQ ID NO: 54204 - DNA, 1110 bp, Acinetobacter baumannii
atggcaaaattatttgaaacggttaattttgattcgctacaactggtcaatagaattgtaattgccccaatgtgtcagtattcagcaactgatgaaggcgaaattacctattggcatgagcagcaatgggcaaattacgcgttgtctggagctgggttatgcattgtggaggctacggctgtacaagcggaaggtcgaattagttacgcagatcttggactttggaatgatcagcaacgtgaccaaatcaaaactttattaggaaaagttaaaacactttctcctatgccatttggaattcagttagctcatgctggacgtaaggcatcaactgaaaagccttggttggggaaaggtcaaattgcaaaagatcagccacatggttggcaaacagttgctccaagtacaagtactttttcagttcacgatgctgcgccacatgcattaacaatcgatgaaattaaacaagttcaacaagacttcgccgctgcggcaaaacgtgcagttgaagctggctttgagctaattgaagtacatgcagcacatggctacttgttgcatcaatttttatcgccaattgccaatcaacgtactgacgaatatggcggttctttagaaaatcgtatgcgtatgacgcttgaagtacttcaggcaattaaacttgctgttcctgcaggttatcctgtagggatacgtttatctgcaactgactggatggatggtaatgagcagtgggatattgaatctacggttggtttatcaaaagccttagagcagttaggtgcggcctatattcatgtctctagtggtggtttacatgaacaccaaaatattaccatcggggcaggttatcaagttcctttcgcggaacaggttaaaaaacatgtgtctattcctgtgattgcggtaggtcttattactgatccacagcatgctgaacaaattttagaaaaccagcaggctgatgtcattggtcttgcacgtgcaatgttatatgacccacgttggccatggcatgctgcagctacattgggggcaaaagtcaaaattgctcctcaatatttgcgttgtcaaccacatgggttaaaacagctttttgattctttttag

SEQ ID NO: 54205 - DNA, 1365 bp, Acinetobacter baumannii
atgatgaacaaattggcttctttatttttacgaaacacatttgctggggcattctctcttttagcaataaattctgctcaagcagatgatttatatacattatttaataaagcaaagttatattctccacatctaccattggcctatacacaaagtgaaattgctaaacaaaaaacaaaccaagcacttgcaagtaaagatccaaaaatcaattttacagctcaagagaaaaagggatttaataaacaaccagcccacgaagaaactgattatcgttcaagaaattatgcagttcagttttcaattcccgtttataacaaatctcaagatgaagcaattaaaacaaataaaattggagagaaaattgctttagagcaactacaagcaaactacaatgaactcttacaaaatattgtggagcagtattttaaaattttaaatctcaactctaaacttaatcttattcaacaacagcaaattttagttcttgaacaaaagaaaatggcaactgcaaattttaatcagggaatggtatctattactgatttaagagaagcagaagcaaagctatctaccctgcaaagtcaagaaaatagtatgcgttttgaaattgcgaaagaaaaaagtatattagccgagtttataggaactgataccatcagttttgttgaaaataaaacatctttagaaaaactccctcctctatcatataccgatcaggcacactacaatcagttactactagagaagaataatcaaattaaattgtcagaactcaatctagatgtagctaaaggtgagattaaacaatctgaagcagaaagatatcctgttttaaatttttctgcgaaattaactagaaatctggattcacaagattctgcgtttaccagtaaacaaaatggcctagattacttatatggctttgaattaaatattccaatgtacaacaccgaaacgtcttataaaattaaggagaaaagagcaagtttagaaaaaagtagatatgagctacaactctcaactcaaaaacaaaaagcacagatgctcgatgccttttacagcactttatctgcaattaataaagcaaatggtatgaaagatgccgaagattcatctcaaaaagcatggattgccaataagcgtgcctatgaagtaggaatgcgagtaaatgctgaggtcttggaagcacaagcaaaatattttgaaaacaaacaagaacgtttaagtgcgtggtatgaggcttggcaaaactatatcaaactgaaaattacgacaggtattttaactgaacagcaaatcattgatatagaccatattttttattcaacctcttcccaattaagttctcgttatgacagataa

SEQ ID NO: 54206 - DNA, 1695 bp, Acinetobacter baumannii
atgacagataataatttacaaaatttaccagatgctattcagcactggttacttaaccttaaacgtctgaatattaatgtattggctgtttgttatgaaaatttaacagattttggtagccatgcttttgaagactctcagattaatgaattatggaatgtaatcaaacaacagttaacactagataaacctgttgctattcaaaaaagtgaacaaggttatcttattggctatttactgataaattctagctcatcctcgtatcttgggttatccatcacaccacctattcatgaaacgacactggaacttatacgaaccagcatggggtggttgttttacgagcaacaaagtcaaaagcttcaacatgcgattcaagcagaacaacttcttgaaatttttgcacatgtcattaatcaaacacagttccaaattgcggcacaagaatgggtcaatcaaaccacaactcaaattcgtaaacagtttgcgcaatatcaggatattcaattaaattatttcttagttaaagatactcataaagtgaaatgggttgtctcctctgaactgtcatggacagaaaaaggagcagcagaaatgcaaaaactcaatgaaatcgcattacaagcattatttttacagcatgacctcaaagaatatcagtggttcgcctatcctatttttcatcatggaaaaattcaggctattttagtggcgaaagaccgtgattttgagcaatatgaagtacataatgcgttaagcttatacttaaaaagcaatatcgatttaattcatccgcttttacaacattggtatcaatccgaacaaaatctacttcaacatagcttcaagtctggaaaaaatatattaaaaaaatacagtgctgaaggtcactatgcttggaaaattattacgggccttattgttgtattcctactgtgtattactttaataccggttgataagttagtcactgctaacctaaatgttgaagggaaaactcgctggattatttcagcaccaactcaaggttttatacaaacagtctttgtccgacctggagataaggttaaaaaagatcaagccttaatccaactcgataatactgatctaaaaatacaaattgctgaacagcaaagtttacttgatcaggcacaacatcagttccgtgtggctatggcagatcagaacctgacagatagcggtttagcggccaatcagattaggcaacaagaggcaaaaatccagactattcaaagaaagattaatcaaactaaagtgactgcgccaattactggaaccattattgacggtgactgggctcaacaaattggaacacctgttgaagatggtaaagaattattccaaatcgcatcacaggatgcctataaagtcattttacatgttgcagataaagacattcacttcattcaaaaaaaccagaacggcgttttaaagctaacaggcttaccagatcaaacttttccaattcgtatcacccgtattactccggttgcttcggttcaaaacaatgtaaatggctttaaagttgaggctgcatggataggttctccgcctgccctaacccctggtatgcaaggtgttgggaaaattacagtgggtaaaaccaatctactctttcgctggtcacgagatttcattaactggatgaaattaaagatctggtcaaattggtaa

SEQ ID NO: 54207 - DNA, 2169 bp, Acinetobacter baumannii
atgcaaagtttgttttcagaacattggcatcttgtacgtcatttaaaacctcaattgcgacagaatgttgaggttttaccacgtattttacgaggccgtgcttggtttttattatttgaaccgatgtcacaacgctttgttagagttaaccccgaaacatggtatgtgattactcttttagacggcaaaactaatgttgaacaaatatgggataaagcggctgaatatattgaaaaacaaaatgtcaatttcgaccaacactaccgagcaattagtcaaaatgagttagtacaattactcactcagctttataacaatgacttattacaaactgaggtgtcttttgactctgaagaactatttaagcgctataaaaaacaaaaatttaataaattaaagcaatcatttttaaatccaattagtttaaaaatacccctgctttatcctgatgctttttttggtcaattaagtaaattagctcgttccatttttagtatatggggatttatactctggtttttagtcgtaactcctgcacttttattgctgagcgagcactggcaaagtttaacgagtaatttatcggaccgagtgctatcaaccagtaatctttttattctttggctgacatatccgcttgttaaattaatacatgaatttgctcatggtttagcaataaaagcatggaatggaaatgtcagagaaatgggacttatgttcattatgttcattcccattccctacgtcgatgctacctcttcttatcactttgtttctaaatggcaaaggattgtggtatcggctgccggaatcctcactgagcttttactgggcgcaatcgcaatttatatatggctatcgactgaacaaggcttgattcacgcatttgcttataacgtcatttttattgccactatttctacagtattagtaaatggtaacccactcatgcgctatgacggttactacattttgtcagatttgcttgagattcccaatttggcaggtcgagcgactaaatattggatttatttatcggaccattatttgtttggtgcaaaaacagtacagccaccttatgcaactgaaaatgaaagattttggttattcatttatggtttgctgtctcctatttaccgcatcaccatcatgttcagtttagtctggtttatagcacaaaagtactttttctttggtgtgatgctggctgctatctctggttttatgactattgttttacctctatacaaaggaataaaacatatttatcaaggagcgaccttgtcaaaatatcgtgaacaagccattcaacgtttatggattattattgcggcaattgttcttatattttttattatcccgtttccatattacagtactcaacaagctattgtatggatgccagaagaatcgattattcgcgcgaatgagtcagggcatatccaaagcattaattttaagaacaaccagattcaacgaaaccaaattctttttcaactttctaaccccgatttacttgaaaaatatgagttacaaaaacttcaagttgaagagttagattacaagcttagacaagcttctctggatgatctggctcaacgtcgcaaattagaatatcaaaagcaaggtgctgttcagcagcttcaacagtaccaatataaaattgaacagcttcaagtaacgagcacagtttccggaaaatggtttgctaaagatgctattgagattaagcaaagatactataaacgtggtgatattattggttatgttattaaccaaccagcacaaattgttcgtagtgcggttttacagcaagattatgatttaattcagaaccgcttaaaaaatattgaaatccgctttaaaaatcattttgatgtgatttatacagggaaaatcattagaagtaccccgcaaacacaaaagaaacttttatcttcagccttaggtagtcaagcgggtggaaatattacagttgatcctaatgatcaggaaggcaaaacagctttacagaattattttgatttagatattcaactgtcacaaccattagactcttctgttttcggtgatgttgcatatgttcgttatcatttaggctactcgcctcttgcatggcagtggactagaaaattgcgtcaattatttttggagcaattctatgtctaa

SEQ ID NO: 54208 - DNA, 2001 bp, Acinetobacter baumannii
atgtctaatctacgtgccatcaaaaatatgtcactgcaccctttttatttatcgaatgtggcgcgagtagaacaaaaagatatagagctacataagcttgaaatattttttgcaaacttattaggttggattcccgcaaagaaaatttccagaaggcatattcataaatttgcacaagcaatagcaggtcataaagatgctttaaaagagctggaccaatcacagcttgtacagaaatttcagcatactgttcaattattatcacgcgagaccaatcataatcagtctatcgctttaatatttgcatgtgttggagaagcgatttctcgtgtttttaatatctatccgcatcctgttcaatttatgggggcatatatattactaacaggcagacttgctgaaatgcctacaggtgaaggaaaaacgcttgtagcaagtatggccgcaaccattatggctgcaactggtaatttcgttcatgttttgactacaaatgcttatttggctcagcgcgatgaagaagaattacgtcccctatttgagtttttccaactcagcagcggcgcaattcatagtgaaatggaactaccagaaaggaaagaaaattatcaaaagcaaatttgttatgtcagtgcaaatgaaatcgtctttgattacttaaaagatcacatttctggaaaaggtactcaacctagacaaattgaaaacttacgttcattggcaactggaaaagtcgctgatgatacgatgattgtaccagctctacacttttgtattgtagatgaagctgacagcgtatttattgatgaagcccaaacaccaatggtgatttcgcaagaaaccgaaggacttattgaagcgccagttattcattgggcaattgcccaagcaagagaacttattcgagatgtcgattttacgatacttgaggctgagcaccatgttgaaatagaaaatatttcttcagaaaaacaggttcccttacctcaagatgtcagaccaatctggtataaccatgcatggaaaatgctactggttaaacaagcactcactgctttatatctttatcataaagaccagcattatattattcaggataataaaattcagattgtggatgagtctacaggccgaattatggctgatcgctcatgggaacaaggattacatcagctcatcgaagctaaagagaatattgagctcaccaaaggccgcgacactctagccagaatgacctttcaacgtttctttagaagatatttacttttatcaggcttaacaggaactgggctagaagttgcacgggaactgtggatgatctaccgattaaaagtatgtcagattcctcctaatattccgtccaagcgtaaacaatttagacaccgatattttaaaaataatgaacagaaatatcaggcaattgcaaaacatgctaaagcaattgccgatacaaaacgctcagttttagttggtacacgtagtattgaagcctccgaagctatttcggaagcactttcccgccttaacattgaacatattgtattaaatgcccgccaagatgcacacgaagcttcaattattgctgaagcaggacacagtggaaaaattacaatagccaccaatatggctggccgtggtacagatattaaattgcgtcctgaaaccaaacaagccggtggcctacatgtcattttgacggagtttcacgaatcagctcgaattgaccgacaactttatggccgagctggtcgtcaaggagatcaagggtcatgtgttgcctatatttctggtgaagatcagttaatgcaacaaaatatcccatggcttataaagtttataaacttcattcccttcatttatttgcaatatatttttttaatttttgcggtaaaacgtatgcaaaaaaaatgtcagaaacgtgcttaccgaaaccgtatatccatgtttaaacatgacaaaaaattaaattctcaaattggctttgcaggaaaaatgtattaa

SEQ ID NO: 54209 - DNA, 807 bp, Acinetobacter baumannii
atgaaatattctcttattgttcctattacacttcttttatcgggtacgacttatgcggaagctatcaatttcgcatgcatgatacaacctgcaaaaattgttgaagtacgaagtccaattacgggggtcttacagaatattcctgtaaaagcaggaagtccgattaaaaaaggacaagttctcgctcaaatcgaatcgagtgttgaaaaatctgcaactcaatctgcttactataaaacccaacttaaaggttcagccaacatagcaagatctaaaattgagcatgctgaaagtaaagtacaacgtatgaaacaactattggcagaaaatttcgtttcccgtcaggcctatgaagatgcttatagtgagctacaacaagctcgctcagagctacaatcagctcaagaaaatatcaagcaagcagaatatgaatacaaacaaagccaagctgatttaaaccgtagaaaaatttatagtccttttaatggtgtagttatacaacagtacatccatgcaggtagcttagtcagtccaactgagggtaaaaacccaattttaaaaattgctcaaactgaccaatttaaagtaaatgcaattgtgcctttaaagtactttaatcaaattaaaaagggtcaaaaagtaaaaattgtccctgaaagcccatttgaaaagtttgctactaacattcaacttgaccatgttgatcaagtcattgatgcaagctcaggtacttttagtacaggcgcaactatcaaaagtaatagcgtaaaatttccaagtggtattcgctgtaagatgtatttataa

SEQ ID NO: 54210 - DNA, 273 bp, Acinetobacter baumannii
gtgcatgattttctaatctatgatgcaaagaaacataaagatatagaaacattaaatcaatggctgaaccatggtgatgaaaaagaatatattacggggttggggacaatctctcgtttagtgttggcaaaatatgtgaatgatcctttatatgaccaattggttagtgaagctatgacttatgtaaatagacataggtattttaaagatatgacagtagagcagtttcatgaaagactggaacaagaaattcaaaatattttagaaagttaa

SEQ ID NO: 54211 - DNA, 1122 bp, Acinetobacter baumannii
atggcgttaccgattattactgctgaccaaactttattggttcaagcaattattgtgtacctatacgctgatccgggtttaggtaaatcatcgatgggctttactgcggaaaaagcaatttcttttgactttgaccgtggtgctcaccgtactggtgaattacgtcgtggtgcagttgtacaggttcatcaatggagtgatgttgcaaaccttactccgcaggacttagcaccatataaaaccgtagtcattgataccgtgggtgcaatgcttgaatgcattaaaacccacctgttacttacggcaaataaccgtcaaaaagatggttctttaaagttaaaggctcaaggtttagcgaaccaaacgttcaagcaatacatcaatactttgatcagtttaggtaaagatgttgttttcattgcacacgcatcagaagatcaaaacggtgatcaaattatttaccgcccagatctaggtggtaaaaaccgtaacgagctttaccgtatcgcagatgtcatgggttacctaacaactgttactactggtgaaggtaaaaatgcccgcgttattaatttcaaaccttcgcctacacatcatgcgaaaaactcaggtgctttaggcggtgaaaccggtgaagtatgggtacctgatcttaaagcacaccctactttcttggctgacctgattactcaagctaaagatcacattaacaccttaacgcctgcacaacttgcagcagctaaagcccaagaagagctagaaaactggaaacaaagctgtgaagaagctgagcatgcaggtgaccttaatcaattaactgagtcgcttgataaagaacacatgtattaccagaacatgcgacaagcaatgttaatgagagctaaagcattgaattgcacgtttgataagcaacgtggcacttggattagtccacctgaatttaacggtatctcagatcaacaaagagatgaacttcaaaacttcatagctgaacgcggcctagacgtgaaaacagtttgtgaacacttcggcatagatgcccttatccaaattgaagcagcaaatctgccagcagttaaacaagacattgaaacattagctaaaacggggatgacagcatga

SEQ ID NO: 54212 - DNA, 183 bp, Acinetobacter baumannii
atgtgtttaaatgaagtaaaagaatctttatatcaattaagatcatgctttgaagatcttaggaataaatccattattcttgagagatcggataattatgaaaaattaaccaggataaatgttgatgccaaaattgaattaattgagatgattttgaaattcttggacgaatctaattcttaa

SEQ ID NO: 54213 - DNA, 249 bp, Acinetobacter baumannii
atgaaatttaaagataatttacctgacaaatacaaatccaagatcgttactgtaggctatcttgaaactcatgatgatcacaaagcacgactagaattagaatttgaaaatgggatgaagttgactatatatgatgttcctaaacaagagtatctaaaattaaactcttgcaaatatggttgggaatattattttgctgataccatttatccaaactacaaagaccagattgaaatgattaagaattag

SEQ ID NO: 54214 - DNA, 558 bp, Acinetobacter baumannii
  misc_feature (529)..(546): n is a, c, g, or t
atgagctttggattttggaatcgattgacagcgttagtaaggaaagaaactaagcagctcattcgtgacaaaagcagcctcgggattggtctggttttgcctgttattttaattttattgtttggttatggactttcctttgacttaaatcaggcacgagttggtgtcgtagttgatcagtcctcaccacagatcaatcagattttagcgggtttaaagggttcgcgatatttagcaagtcaagagtttcctagtttacctaaagcagaacaggccattcgagatggagaaattgatgccattttgcactttccttcagattttacgagtcagacacaacaaggtaatgcaaaggctcaactactattaaatggtacatccaccaccatagcaacagctttggagggctatattacaggggctttggctacagcggcgtctatacaagttgatcgtggtcaaatattagcaacgtcaagtgccattaatgttgaacaacgaatatggtttaacgaatctgctaatagtnnnnnnnnnnnnnnnnnnttcctggcttaa

SEQ ID NO: 54215 - DNA, 3744 bp, Acinetobacter baumannii
atgaacacaatggatacttttcatcaaatggataaatctcaccaaggctatatcaccgaattcaacgataaaagtgagtttgaacaacgcattaatacagcttggcgtcgtgccgaacctgaagctgtagaagagctattacaagctgctgcggtatctgatgatttagatcataaaatttatgaccttgcatttaaccttgcccataatttacgtgaacgtaagacctcttcgggtaaagcgggtattgttcaagggttattacaagaattctctctgtcttcacaagaaggcgtggctttgatgtgtcttgctgaagctttgcttcgtataccagacacagcaacacgtgatttgctcattcgcgataaaatcaatcaaggtaactggaaagaacacgttggccaaagtagcttaatgtttgtaaatgctgcagcatggggcctcatgttaaccggtaagcttatggagacaccaaagcaaaccagtctttcaagtgtacttactggcctgttagcccgtagtggtcgtggcattattcgtaaagcagttgatgtagcaatgcgcatgatgggtgaacagtttgtaactggtgaaaccatcgaagaagctgtcgaccacgcaaaagtacttgaagataaaggtttccgctattcttatgacatgttaggtgaagctgccttaaccgaacatgatgctgaacgctactttaacgattacacacaagccattcatgcaattggtaaagcgtctaatggtaaaggcgtttatgatggccctggtatctcaattaagctttctgctttacatccacgttaccaacgtgcgcaaattgaacgtgttcacaaagaactctacggcaaagtatttgagctcgctcgtttagctaaacagtacaacattggtttaaatatcgatgcagaagaatctgaacgtttagaaatttctcttgagttacttgagcgtctttgttttgagccagaacttgagaactggaaaggtattggattcgttattcaagcttaccaaaaacgctgtttcttcgtagttgattatattattgatcgcagccaaaagcgtctcatgattcgccttgtaaaaggtgcatattgggatagcgaaatcaagaaagcacaaatcgaaggtatggatgactaccctgtcttcacacgtaaagtgcatacagatctgtcttatattgcttgtgctaaaaaattacttgcagcgcctgagttcatctatccacaatttgcgactcacaatgctcaaacactagcaacaatttatcatttagctgatccaagcaagtattatgctggtcaatatgaattccaatgcttacatggcatgggtgaaccactttatgaacaagttgttggtccacgtgagcaaaataaattaggcgtgccatgccgtatttatgctccggttggtaaccatgaaactttgttagcttatctggttcgtcgtttactcgaaaatggtgcgaatacttcatttgttaaccgtattgccgataaaacacttaaagttgaagatcttatccagtctccaatttatgatattcgtaatgcagctaagcttgaaggttcagttggtttaaaacacccatcaattcctcttcctttagatatgtatggaacacttcgtaaaaattctaaaggatatgatttagcaaacgacgctccgcttgcagctttagataacacagctcaacagttacgtaaccgtatttggcagagtcatccattattaggaaatagcgatttatcgaaacaaggtcattctattgcaattacaaacccagcacaaaatgatgaaattgttggttatgtacaagaagctgatcttaatgatgtagaaattgcacttaatgcagctgaacaaatacaaattgagtgggcaaatacacctaaagatcaacgcgctcaatatttaaaacgtgcagctgaccttatggaaagccgtatccaagagttaatggtattactttgccgcgaaagtggtaaaacttatgcgaatgccattgcagaagttcgtgaggctgtagatttcttacgttactatgcaactcaggttgaaaatcttcctaataatacaaccattcagccacttggtactgtactttgtattagcccttggaacttccctcttgcgattttctctggtcaaattgctgcagcactagttagtggtaactgcgttattgcaaaacctgccgagcaaacacctttaatcgcagctcaagcagtgcaaattttatgggaagcgggtattccacatagtgctgtacagttattaccaggtcgtggtgaaacagtaggtgctcagcttagccaagatcgacgtattgatggcatcatgtttaccggttcaactgaagttgcaaaaattttgcagaagacagttgcaaaacgtttagctgctaatggtcaatctattcctctcattgcagaaactggtggccaaaatgcaatgattgtggactcatctgcattaactgaacaagttgtacttgatgttgtaagttctgcatttgatagcgcaggtcaacgttgctctgctttgcgtattttatgtgtacaagaagatagtgctgcaaccgttattaaaatgcttaaaggtgcaatgcaacagttaattgtaggcaaccctgctattttaaaaactgacattggtccagttattgatgacgaagcaaaacagacgattgaccagcacatccaaaaaatgaagtctaagggctatccagtacatcaattgatgtttggagcgacaagccaaactgaattagataaaggaacttttgttgtaccaacagcaattgagttacctaacctcgatgacttacagcgtgaagtttttggtccggttttacatatcattacctataagtatggtgagcttgaacaactcatctcacgcattaatgctaaaggttatggcttaacaatgggtctacatactcgtattgatgaaaccatccaaaccgtaattcaacatgctgaagttggtaacctttatatcaaccgtaatattgttggggccgttgttggcgttcaaccattcggtggtgaaggtttatctggtacaggtcctaaagcgggtggccctctttacatgtatcgcttaatgcaggattgttcaaacaaagtattagcaactccatttgcggtaaaaaatgagcaaaccatttttgaaggctttaaccgtgaagtttatcaaagcttacaaaactgggcgaaacaacatttaccacaagcaagtcgtgaaattgaaccatttggtgtaggcaagttttatgagttacaaggccctactggggaaagtaaccaatatattattttgccgcgtcaccgtgtactttcaattgccgacactgaacaaaatcaattacatcaattgctcgcaatttttgcagtgggtagtcaagctgctgtaatgccaaatagtccattgttggcaaaacataaacaaacgttgccaaaagatgtacttgatgcaattacgactatcaaaaacatcactacagatgattttgatgctgttttgcaccatggtagccgtgaagaggttctctcattacagcaagaaattgcaagccgctctggtgcaattgtaggcattacacatgttgaatcaaacgagtcaattccacttgaacgtttagtaattgagcgtgcaattagtgtgaatacagctgcggctggtggcaatgcaagcttaatgactatgtcggattaa

SEQ ID NO: 54216 - DNA, 417 bp, Acinetobacter baumannii
atgaataataagcaagggtatatgctgggagttttgagcggtgtgtttgtattattatcaaatgcctgggcagcacaaccaatgacagaaagtgcgctagccactcaaacaggtgcggtaaccacatctttacccgtcattattgctaaggctcaagatgatgcacaaaaacctgaaatagagcagcaccaagctcgcaaagaattaggagataattatttacaagaagttcgctggaactcattaagatcgagtgtgttatcaccttatcaagaacaaaaacaaaatcaggtgatagatattaaagaaaagaaaaaattagaaatggtggcgctaccagaccgagcggaccgttttacacgttatgagtttgaaccgaaaaatgtacatggcgaagttatcattaccgtaaagtaa

SEQ ID NO: 54217 - DNA, 1068 bp, Acinetobacter baumannii
atgtcaataacagtcaatgatcaggaaatagattggcaaagatggcaagaattggagatacaggatacgcatttatatcgagatactttgttgcctgaagatatatatcatgaaaggtttgacatatttcttaatggattgtattcggttacagatggtttttgtaattataaaaacgaaaaaaagtttggtggctatattgcagcaggtagaagaagaatcattgatgctctagatttaatgtctttacactattcagcaggtggagatatcagcttcatcaaggagctttatccttacgtacttcattggactgaagaatatgctgaaaccagtcatttatataatttaagccctgaagccgatggtcgttatgtctggcatattagtttaggtacagaagactattggtatgttgctttacgtttagtctgttttggtttgttgacaggttacgcagaccaaatggcacgtattatgccgattattgactatgttgaagccacaccagaagggcaagagaaagatggtttaatcgagcgtctggttgctccctttgtagcagaccgcggcacaccaccagatgaagccagaagacatttaccttatcgaaagttaattaaggtgtttaatgctgcacctgagcaacgccccgctttaatgctgcaatatttagaaggttggtatgaggcgagccgtagagagccttatcatgatcaacattcacaaacggatataaatgacggtttcacatattacggctattggtcatgggaagccgcagcggtgacatggctgttggggatagatgataccttatatcgtgagcatgagttctatccaaaagacttagtagattttgcacgtacacaatcaaatgtggttccaaataaggaagagccagaacgcataaaagtaaaaggtggtgaagcttgtattaaaacaggtcattggattactccagctaaaccagatacacgactgtattttacgcaaggtgccatattgccaatactttcagaaatgcactggggtgaagtgcattggtgctgggatggtgagaattaa

SEQ ID NO: 54218 - DNA, 891 bp, Acinetobacter baumannii
atgagttcagtaaataatagaacacctgtcgttttaaattttgatgattctgctggtgatcctgataatgctgtacgcgttgatctcacctcatggcaagaagtcattcgctttggttgtaaattaaaagagttcgacgagttacgtacttacctaaaccagcatttaccttcaaaaatgggttgtgtcctgttaggtagcggtgattatcaccatgttactcagcttttactggaaagattgccatctgctgaaccaattcatcttattgtctgtgataaccaccctgacaatatgcgttacccttttggtattcactgtggttcatgggtgtattgggcaagtaagcttccacaagttgccagaatagatgtacttggaattagctcaagtgatattggatggctacatgctgtagaaaaccattggtcacctctatataaaggaaagctgcattactggagcatccagcaaaatgcatcatgggtgcgttttacaggcaaaaagaaagcatggcaaaacttcgatcatccagatgagttactaactgcatttctcacagaaataaaagcatcgaacttacctgtttatttatcgattgataaggacgtgctgtcgagcgaagtcgtcatgacgaactgggaccaaggtaagtttctagagaagcacttacagagcttgattgaagcgtgtaagggtcgattagtagctgcggatattactggggatgtttcagcctatcattataaaaattactttaaacggtttttagcagcttcggatggacaacaagaaccaactgccgaagaactctcaaattggcaattagaacagaaagcactgaacctacggttaattcatgccatagattcagcttggtcagatcaataa

SEQ ID NO: 54219 - DNA, 1068 bp, Acinetobacter baumannii
atgactataaacctgaatcagttagaacctcaggcggtggtggatgcttttttaaagcatccacctttaagttttcaggttcattcgcctagcgattttttaccttatttttatacagagtttgatttattaacgactctagatacagaccttcttaaaaaaattaaagcattaccaggctatcaaatctggggaaaactccttcattttaaaacgtgttttatcgggacaacggtcacagaatacagcttattacctaatggacttcctctggactcaatagcagattttttaaaaaataatgaccagaaaattaagttaggtattattaaagatcttcctttagactcacctttgctcagcgatcttgaaaataattacagtcaaacttttattcaagaagcagaaaaaaaaggttttctatctgtagaaggacaagctttagcttatgttcctatcgatttttcaagccgtgaagaatatctttctcgactctctaaaccacgccgtaaaaactttaatcgtaaactcaaaagtttaaatgaattaaacattgaacagttatctacgggcgatgagcgctttaatgatcatgagtttagaacatatttatatgaactctatctggccgtttatcaccaaagcgaaatacattttgacctactcagccctgagtttttttcagaaattcttcaagatgtgcacagtggcggtaaagtctttttatattgggcagatacaaccctagtcggctataacatttgttatgaatacaaagataatctggttgataaatatattggtctcaattacccgctcgcaaaagactacaatttatattttattagctggttcgtaaatttagactatgccctaacccataacctcaaattttatattgcgggttggacagaccctgaagtcaaagctcaactgggtgctaaatttacatttacccgtcatctggtatggatacattcacctgctttacgtttcattttaaagaaattacgtcctttatttgaagcagatcatcagtggcatgttaaacaggaaacacgatcatga

SEQ ID NO: 54220 - DNA, 1440 bp, Acinetobacter baumannii
atgaacaacaatcatacattcaagcaagaaagcgcttctgcaactagttctaataatcgcgttccacttaatgaagcgcaaattctagcagatgaggcaaagtattgttcacacggcgatacagtacactatgtaaacccacctaaaatttttacggattgtcagggcagctatatttttgatgaccagaatatcccctatctagacttacaaatgtggtattcagcggttaactttggttataaaaacccacgtttagatcaagcgctcatcgaccaaattcataaacttcctcaaattgccagccaatatttgcacccaactaaaattgaactcagcaaagtcattgctgaagacatgtttaaaaaaacaggtgtacaaggtcgtgttcactataacgtaggtggttctcaagcaattgaagattcactaaagcttgtacgtaacttctgcaaaggcaaaagccgtatgtttgccttcgaaggtggttaccatggccgtactttaggtgcatcttcaattacttcaagctaccgctaccgccgccgctatggtcattttggtgagcgtgctcagttcattccattcccatatccgttccgtcgtcctaaaggcatgacaccagaagaatatgcagataagttagttgccgaattcgcgcgtctttttgaaaatgaataccacggcgtttgggaccctaaagttcgtgaaagtgaatttgcggctttttatattgaaacaattcagggtactggcggttacgttattccaccgaaaaacttctataaaggcctgaaaaaagttctagatgaccacggtattttattggttgtcgatgaaatccaaatgggcttctaccgtaccggtaaactttggtctttcgaacatttcgatattacgccagacgttgttgcatttggtaaagcgttgaccaatggattaaacccacttgccggtatttgggcaaaagaagaaatgattaatcctgaaacgttcccagtgggttcaactcactcaacgtttgcgtctaacccgcttggtacggcagttggtcttgaagtcatgaacatgttggctgaaaaagattacgaaaaacaaatcatggaaagtggtgcttatttcctagaaggtctaaaagacttgcaatcacgtcatccagaaattggtgatgttgatggattaggactagcattacgtgcagaaatttgtcaggctgatggctttactccaaacaaagaattgttggataaaatggtcgatatcggtctttcaggtacccttgaataccaaggtcaacaatgtggtttggtgttagatgtaggcggttattacaagaacgtaattacattcgcaccttcactagagatctcaagagccgaaatcgatcaagcgatggtattacttgaccaattattagttcgagctaaacgggaaatataa

SEQ ID NO: 54221 - DNA, 756 bp, Acinetobacter baumannii
atgattaaaccattgaaaaaaatctccatagcagtagcaataaccagtagttgtttttactgccctgcttatgcacaagaaagctcctcaccagatttaacaatgggttttaactattctgtaaattttcaagcttataaaggtcataaaacctatcaaacaattttacctgtttttttctatgacaatgacaaattctatattgaaggcgacgatgccggttattacctcttcaaagatgacaaaaatcaattacgcctcgatggacactatgatggcaactcatatgatccaagtggtgaactttacttattagataagcgcaaatggtctgttctagcgggtgcaagttatatgcgtattacaccgtatggcggatttaaagcacggcttaataccgatgtcctgtcgcgtagtaaaggtactatcttaagggcttcttatcttgctgagctagacaaaggcaatttgaccgtctatccggaagctggtttccaatggaacaacgcaaaatataaccagtattactacggcgtcagtgatgctgaaagtaaacggagtggtatcgcagcatatgaaccgggccagagtatatcgccttttgtgagcatgacagccaactacaaactttccaaacacgtgaacgcttttagttctgttgaatttaactatctatcaaacgaacagtttaaaagtccaatggtaaaaaaacgcacagatattacacctgctgtggggcttacctttactttttaa

SEQ ID NO: 54222 - DNA, 189 bp, Acinetobacter baumannii
atgggacctgctattcttcgcttaaaaccgggaaaatatgtgcccttaaagggtggtaaacgagaaaaatcgttgcagattatgcaaggaaaaatgcaggtgccttatttagttgatccaaatacaggcgttaaaatgtttgaatctgcccaaattgtaaaatacttaaaacaacaatatggtggctaa

SEQ ID NO: 54223 - DNA, 447 bp, Acinetobacter baumannii
gtgggcagcgaagatcgcgaattcattgggggaagttatgcatttattcaaaaatatacccatgatatggaaaaatggcgtgctttaagtgatgaagaacaagaaaaagtaattggtcgtaagaagtttaatgatattgaactcggtgatgatgaaaagcctttaacagctcataatgttgtaagtaaagcgcatgatgcggaaggtaatgagctaaaaattatgcgtgccaatatgcctttttctaacccttcaaaaaatgaatatgggactttctttattggatactcgcgtaaatttagtacaacccgtcaaatgcttgaaaatatgttcttaggaaatgagcaaggtcatcttgaccgcttacttgactttagtactgcccaaacaggtactttatttttcgtaccgacagtagattttctagatgacttgggtgacgagtag

SEQ ID NO: 54224 - DNA, 1023 bp, Acinetobacter baumannii
atgtcagtaaatagtattaataaggctcaaagagagagctataaaaaattttcattgtttttaaaatattttataggtatttgcttattttatatcgtttatgcattctttagtccgtcacatgctgcttgtacggtagctggaacgaccaataatacgtttacctacacggcagcaaatattaatagtgatgcaacggtaaacttttcaggaacaattacttgtacgaatggagggataatacctcagatctctccgtttatgtgtatgaagaccgtatttacaggagcaaccactgcgaataataacgtgaccttaccctatacggttactgcaactgtaggtggagcaggttcttctaccaccaaccaaacctccaatgtttggtatggtccagtggtaactatcgcttcaaacaatgttcttagctattcggtaaatgtgaaggtacccgcacgtacaggatcactaattgcttatcctcaaggaacatatacagctacagttcaactattttgggatatggatcttctatcagtgctatgtttaggtgatttactcagctgggactctggaagtgtaattttaacagcaaattttgtagtgccgacactttgccaattaaactcaacctcgaatgtagattttggcaatattaacgatattggcacggctagtcgtgattacacaacacaaggtgctgtaaatacgacatgtaactatggaacgccttatacgatttatttgggggatggcaataaccgtataagcggaggattcaggcgtatggccaatagtaataatgagtttattccctatcagttatacaaagatgctgcttatagttcggtgtgggatgctacaggtggggtagctagtattggtggagcaggtggagtatctggcacaggatcaggtaatgctcaaacgactacagtttatggaaaaattccgcaaggtactacgattgcaagtaggccaggtgcttactccgataatgttgtggttacagtgacttattaa

SEQ ID NO: 54225 - DNA, 1803 bp, Acinetobacter baumannii
atgccacaatacaaagcgcccttacgtgatatgcaatttgttttgcatgaattattaaatgctgaagaacactatgcaaaattacctgactttcaaggtaacgtaagccgtgaattggttgatcaatatttagaagctgcggcagacttctgtgaaaatgaactttctccgttaaaccaagttggcgaccgtgaaggttgtacttggaatgatggtgttgttactacaccaacaggctttaaagaagcttatcaaaaatacatcgaacttggcttcccgtctttatcagcagaagaacaatacggcggtcaaggtttacctaactctttaggtatcgcaatttcagaaatggtaggtagctctaactgggcatggggtatgtaccctggcttgtctcacggagcagtacgtacattagaacatcatggttctgatgaacaaaaaaatacttacttaccaaaccttgtttcaggtgtttggacaggtacgatgtgtttaactgaatctcatgcaggttcagacttaggtattatccgtactaaagcagaaccaaatgcagatggtagctatgcaatctctggcgagaaaatctttatctctgctggtgaacatgatatggctgaaaacattatccatatcgttcttgctcgccttccaggtgcaccaaaagggactaaaggtatttcgttatttatcgttcctaagttcaatgtcaatgcagacggaacgattggcgagcgtaatgcagtacgttgtggttctattgaacacaaaatgggtatccatggtaacgcaacttgtgtcattaactttgaccaagctaaaggttacttgatcggacctgaaaaccgtggtttgaactgtatgttcaccttcatgaacacagcacgtattggtactgcggttcaaggtttatctgcatctgagtcatctttccaaggtgctttagcttacgcgaaagaacgtttagcaatgcgttcactttctggtcctaaagctccggaaaaagaagcagatcctattattgttcaccctgctgttcgcaacatgcttttaactcaaaaagcatttgctgaaggcggtcgtgcacttgtttacttacttgctcaatatgcagatatcgttgaaaaaggcgaaactgaagaagagcgtaagtttgctgacaacatcttgtctttattgactccaattgcaaaagcattcttaactgaaacaggttctgagtctgctaagcacggtgttcaagtcttcggtggtcatggctttatttctgagcatggcatggaacaaatcgtacgtgatacacgtattgcctgcttgtatgaaggtacaactgaaattcaagcactagacttattaggccgtaaagttttacaaactcaaggtgcaatgcttcgtgatttcactaagattgttcacaagtttgtagaagcaaataaagacaatgctgccatgaaagaatttgttgagccacttgctgcgcttaacaaagaatggggcgacctcactatgcaaatcggtatgcgtgcaatgcaaaatccggatgaagtgggcgctgctgctgtagattacctctacttcgctggttacgtgactttagcttatctatgggctcgtatggcgcttgtagcacaagagaaattagcagaaggtacaactgacgttgatttctataacgcgaaagttacgactgctcgcttctacttcaagaaaatcttgccacgcgtacgttctcacgtagacgttattgctggtggtttagacccattgatgtcattagatgctgaacatttcgctttctaa

SEQ ID NO: 54226 - DNA, 1782 bp, Acinetobacter baumannii
atgccaatttacaatgctcctttagctgatatgaaattcatcttaaatgatgtatttaaagcagaacaattttggcagtctaatgagaaactcgctcatgtagatgctgcaacagctgaagcaattttagaagaaatggctaaatttgctcagaacgtgactcatccattaaaccgtactggtgatgaagaaggcgctcgctatgaaaacggcgaagtctttacgcctactggctttaaagatgcatttcgtcaatatgcagaaggtggttggattggcttaggcgcagatgaagaatggggtggtcaaggcatgccaaaaatgctgaccgttcttgccgatgaaatgttatttgcgacaaacccatctttcatgctctacccgcttctttcagtaggtgctggtatggctttaagtagctatgcttctcaagagcaaaaagaaacttatttacctaagatttattccggtgaatggtcaggtaccatgtgtttgactgaaccacatgcaggtactgacttaggtattattaaaactaaagcagaacgtaatgaagacggtacttataacattacaggtactaaaatcttcatcactggcggtgacaacgatttagcagaaaacatcattcacttggtacttgctaaaactccagatgctcctgctggttcacgtggtatctcgctatttatcgtaccgaaataccttgtaaaagaagatggttctttaggtgaccgcaaccatgttggcccaggttctattgaacataaaatggggatcaaagcatctgctacttgtgtaatgaactttgatggcgcaaaaggttacctcgttggtaaagaaaacgaaggtctcgctgcgatgttcgttatgatgaactacgaacgtttatcaatgggtattcaaggtttaggtgcttctgaatttgcttatcaaaatgctgctcaatatgcgactgaccgtttacaaggccgtagtgcagctggtgtgcaatcaccaagcaagcctgctgatagcattttagtacatggtgatgtacgtcgtatgttgttaaatgtacgtgcaaacaacgaagcttctcgtgcatttgcagtctatgtaggtcaacagctagatatcactaagttctcaactgatgcagaagctgtgaaaaaagcgaatgatcgcgttgcgcttttaacaccaatcgcaaaagcttaccttacagataccgcattccaagcaactttagatgctcagatggtatttggtggtcacggatatattcgtgaatggggtatggaacaatgtattcgtgatcttcgtattgcgcaaatctacgaaggtaccaacggcgttcaatctcaagatttaattggtcgtaaaactattaaatgtggcggtgcattcattgctgaatacattacagaaatccgtgactttgcaaatgatttagacaccgatttgaacttcattaaagatgcaactttagatgctgcaactgaaattgaagcaatcactcagtttattattgaacaagctgctgaaaatgtagatttcccaaatgctgctgctgttgattacttacatgcagttggcttactcagcttctcttatatgtttgcaaaaattgcagctgctgctaaagataaatctggtgatttctaccaaaacaaacttgctttagctcaatactttgttgaacgtatcttgccagatattgatgcacgtattgctaaaatcaaagctggttcagacttaattatgggctttagtgaagactactttacaaaccaagcataa

SEQ ID NO: 54227 - DNA, 1902 bp, Acinetobacter baumannii
atgattgttcaattctttagatatgggaatggtttaagtaaaggtccactggattatttacttggtaaagaccgtgatcgagattatgcaaaagtcctacagggcgatgtttccgaagtatcaggattaattgatacgtcaccttatgcaaaaaaatatacatccggctgcctaagtttttatgagcatgatttatctgaccaggataaacaaaaaatcatgcaggattttgagcaagccttattccctggcatggatcagagccagtaccgtgtcttgtggattgagcatcaagacaaattaaacgaagaaacaggggagcgaagattagagcttaacttcctaatccctaatgttgaaatccttacagggcaacgtttacagccttattatgataaagctgatcgtcctcgtattgatctgtttaagaagattacaaactatgaatatcaactgcatgatgcagatgaccccctctatcgccaagccgttacaacggcaaaaaacttgcctaaaactgttaatgaaatcaaggaaacgcttgatattgaagcaacgagagccgttgaaggtggactaattacagatcggcagagcatgaaaaaatggctattggatcttggtcttgaagtcaccagagaaaccaagaaaagcctatccattaagaatccgaatgatgacgaaaaagcccgcccgataaggcttacaggtgcaatctatgagcaagattttagacttacagaaacgagccaacaacttactatcgcagcatcagaacgatatagacgagaagctgaacagcgaaatcagtcagatattcaaagatatgcggaatactgtgcaaagcgaagcacagagcttgagcagcagtatcgacagcaccaaaacggatatacagcagaaacagagcgaagcaacgaacgagatattgcagcagatcgaccagactacagctcaaatcaagaagcagcagcaacaaggcatgatagccctattgcaagaacaacaacagcagatcaaacagctacaagtgaacttgcagcagttgaacggcttgagccaagaaacagcccaagcagccaaattaaagaaaacccttattacatcgaatatagccttgatttcactggcatgtataacgcttatcagcagtatttgtctgggatacgtcagcaagagcaagtacagcgacatcacagagatggagaacaaagtccagtggctaaaaagccaaggggcgagcctgaatattcagaagtgtgggacagagaaaaaatgggactggtgcgtccagatcgacccgaaagcgcagcagtacagcaacaatatgcgaatagtgcaggaaaccaattaaatgaatctcgaagcacagttattgcagattatcgagcagcaacagcagcagctcaaagagcaacagaagcagcaagagcaagccttgcagctcattcaggcacagaacagaaccatagacgaattagagaactacaacagcaaactggtgaagcactgcaacaagttgaacgagaaagaaagcgagctgatcaatatcatcaagaaactacagaatccgaagttatcagaggatttattacaaaacttggagagcagcttaaaacagcgattacagagccatttagagcaattagtgactgggttaaatctaaagaacgagatcaaggaactattgccaacgatgatctatacagaaatcgagaagcggacagcaccattgaccgaacagcttcaaaggaaactcgactcagtgcaacagtatcacgaaagattcgagggtttgatcaaacaaatatcttcaaggctttagatgagctggacagacgtagagagttgcaactggagcaacaacgtaaaaatgacaggagttattcacctagattttga

SEQ ID NO: 54228 - DNA, 345 bp, Acinetobacter baumannii
atgacagcgatcaaacgtaataaggtttacaaagtccgattttctgatgcagaggtacagaaaatcaaagatgccaatatcctaaatattgccaaatatctaagggatacttcgcttgcccaaattgatgcaacccaaggcaacgccaaaaaaaagaatcaggaaaaccactacacaaaattagaccgtgactttttgcttgagctatcccgaattgggggcaacatcaatcagattgcaaaggcaataaatactgatattgcaagcagtcgtccccttgatgctgcaaggcttttgcacctgttaatagggattgatcagaccttaaaggaattgaaaaaatga

SEQ ID NO: 54229 - DNA, 864 bp, Acinetobacter baumannii
atgtcgttacaagatttaaaagtcacaaaaaatatatctaaagatacaatgctttggaggtatatgaccctagataaattaataaatcttttgagtacagaagctctttactttgcatcattatatcaatatgaaagtactgatccatttgaaggagttttacctaaagttgcaatgaaagctatgagagatatgtacttatcgcaataccaagctttattaagtcaggcaaatcagcttagagatatgtttcttaaagtaaatacaggaaaaccagaacagttagctgcaattgacggtattgataaattaattaaagacactgaagataattttttatcttcgcttgatatggtttctttcagaatatttaaatcaactttagttaattgttggcatcaaaatgagtttgaatctgaagcaatgtggagattgtattctgaaaataataaaggtatagctattcaaactacattccagaatttggtagatagtattgatgatcaaagaatatttctatcagaagttaaatatatgaactttcatgatgaaaatttagaacctaaagattgtgttgtaaatggttatttaggccctcttttgaaaaggaaatcctttgagcacgaaaaagaagtaagacttttctttcagcctgaaaatgatttagaaatgctttctgcaaaggagtttagttataaagggcaatcttttaaggtagatatatctaaattaatatcaaaaatatatatatcaccttatgcagacgatctgttcgctaacagcgttaaggaggtcttagtaaggtttggaatcaataatagtcaaatcattcattccgatttattaaaaaaacctacttactaa

SEQ ID NO: 54230 - DNA, 672 bp, Acinetobacter baumannii
atgcttttagctccagtgtgtaccacgcatcgagcaaagcagaatgtcatacagtaccttgccaagatcgagcaggcgtatagcttggcgttaggtgcagatcgtggctatacgggcttaatcactaaaaatccatgtcatggaacatgggaaaatcatacctttggcgttcaaccatacgaactcaattatttagccgattttgtagagcttcaggaactaaaaaccgacttaaaagaggttttagggcttgggcgtaactgcatgatgttcgatacagtcagatattgggcgtataaggcgattagagcgtatcgaggcagtacatttgatatttggctagggaaagtcctagaacagtgtcagaacgcaaatggtgcgtttatagagccattgccatatagcgaagtcaaagctactgcaaaatctattgctcgatattgttggaagaaagacggctatcactatcaagagtttatagatcgtcaaagccgaaaaggccgattaggtggaatgaaaagtaattcttccaatggtgggttagccagagcaaagaaatttgatgagcaaaagaaaaaagctcaagaattaaaaaaaagagggctaaaaaatactgaaatttcaaaacagttaggtgttacgactagaacattaagaaattggtttagttga

SEQ ID NO: 54231 - DNA, 429 bp, Acinetobacter baumannii
atgagtcaacacataataaacccagaagacattcccctagcatttcaagccacttggaataatcatgatatgaaggcctttgcagcgctttttcatcaagatgcgacttttgttaatcgtttcggtcattacgttaaaggcattaatgaaattattgctcttcaccagcctattcatgaaaccatttatagcgattcaacactagagaatgagctcatagacgtcacctctttaactaatgatatctgtatttcacatttttggagtcgtctaaccgcaggcttagctcatcctcagggtccccatcaaattgatacccttcttctcaccgtccttgttaagcaaaataactcttggtgtattcaggcgctagaaaatgtgactttaactaacccacgcacaggagagatcatacttagaaatttatga

SEQ ID NO: 54232 - DNA, 585 bp, Acinetobacter baumannii
atgcctttaaatataacgctttcaagccatcatatacgactgcgcctattcactattgaagattcaagagacttagttactgctgcttcagatggagaactatggaacctccctttcactgtagtcccttcagcagaaacaatagatgactatattcagcatgcgctagaaggttaccaagcgggtacggttctaccttttgtagtcgaagatattgctacaggaaaagttattgggtctaccagactttggaaaatagatagaaaaaatttaaaattagaaattggaagtacttggtactcaaaatcgtggcagcgaacatacgcaaatacagaggcaaaatatttgctgcttcaatatgcctttgaagagctaaattgcgttagagttcagttcacaacagatgtacttaatgaaaaatcccagaatgcgattttaagactcggtgcccagaaagaaggtgtggtaagaaatgagcgaatcatgcctgacggcaggaaaaggaattcagtcagattcagtattatcgatgaagagtggccgatcataaaagataatctaattaaaaagttaaattattattaa

SEQ ID NO: 54233 - DNA, 234 bp, Acinetobacter baumannii
gtggtgaatgccgtttcaccaaaaccagtaaatgttttaattggttgggatagtgatttaacggcagcagaacttgcagacttgggtgtaagacgtattagtcttggtggtgcattagcacgttcagcttgggatggttttattaaaacagcaagtgcgattgccgagtcagccaatttccattcgctcaagacttcggtttcaagtggcgatcttaatagtcgatttaaataa

SEQ ID NO: 54234 - DNA, 555 bp, Acinetobacter baumannii
atgttttcagaactcctaagcctaagatatgaaaatgtattaaatactttcgatctcatcattatcgcaatcggttcacctacacaagaacgtatttttcatgattactgtattaagaattcaattgaaactgctgtcataaatacctgggtggaaggttacggaattgggggccatgctgtactagatattcctgattcaaaaggttgtttaagatgtgcatatgttgatccaattgatttttcacgaggtctaggttccaaccttaattttttgaaacctaatcaaaaccttacgaaaaatcttgcgggttgcggaaatgcattcttaccttatagcaacttaagtgcattacaaaccgctcttattacttctaatttagcgatcaagtttttaatgggccaattacacagctcttcaaaagtgagctggaaaggcagtgattttgatgtcgtccaagctggtttccaggtaactgatcgatatacacagttttcaaaatcattagaaattctccctcttctaaatagcgggtgtgatctttgcaatgattga

SEQ ID NO: 54235 - DNA, 1602 bp, Acinetobacter baumannii
atgactgaagttacttttactgaaacacttgtacaaacggtaaatcctccatttgattcattaaagactgcacaagagtttacaactacaattcaagatttcattacatgggatacagtcggtctacttattgatgaaagtggtcaaaatttagttattttattattagaaaacgatactgtaatcagttccctaagggctaacctgtatgagactgatctacttcaattcatattagaactatctaataaacaaaccaaaaaaattattctgcatgcttggcaaggtcatacaataaattgttctcatttgagcgatttaaaaaaacttgagcatatttggcataataaaagcgcttatcaagctacagaatttattaaagtaaatgacattaaaaaattcatcaaaagctattttaagccagtaaaaaaaattggacgaggtaatccgtttactgctgagacaaagcgactcgtcatgcaagatagtcatggccgctgcatgttcactggatgcggtgatcgtctagatatcgaacaacttacaggcatgaagggtaatataggatatctggctcataatgtagcctcttcagaaagaggtgaaagaggaattccgtacctttccgacttgctttctgatgacccggcaaatgtactccttttgtgtgataaacatcaccggttaattgataaaattgcagcaagtgattactcagcacaacaactgagcgaaatgagaaaatcatattgtgatttagcaaacactttacttgacgccctagcattcagcccaattcctgtatattcaattttatggtctgtaaatagtaatgctgttggtcatccagagcctaaagagattgcttcatgtttatcaccattacaacatcggatggatggttaccttcaaaggttatgtgatagtaatacgatatatatgaaaaatcctgaccagttttcacaacaactcgtcatgattattcagaatgaagctgacaaaattatccagcaaacaagtttaaatggacatcgtgctgccatctttgcattcggacctatgccggcacttattggcttaggtgctttattaggtaataaaggaaagtttctcccaatgttaagggatagagaagcaaatcgatggggatggccaaatacttcagctgctgatcaatcatatgaaacgatcggaattgaaactcttcgaaaggctcccgatgttgttttatgtataaatttcacagctcttattgataaaatcaaaaataaggctcttgagctaaaagctgaattgggtgctgatattattgaaattaatgcgcttgaagcatatttaggaagtaaggcggttcctcatccccataatatttcaaagttcaccgctgagcttcagaaactttttcatctattaaaagataaacatggtgtaaagagagtccatcttttaattgccgcaccaaatgcagcctgtatagctttaggacaagctattgatctacatcatcctgatattattatctatgactttgcgcaagatactatgcttcctaaactcattattagaaatgattcacgcggaaatcacttagaacttccctaa

SEQ ID NO: 54236 - DNA, 159 bp, Acinetobacter baumannii
atgacaggctttttacctgtgtctggtgtattcgaattatcatttgcagagtcgttacaaccactcagtaagagtgcaccgatgagtaagaaatatgaatatttaaaggaagttattcctgtacattgccttttcatgacgatatatagtccattttaa

SEQ ID NO: 54237 - DNA, 243 bp, Acinetobacter baumannii
atgcaagcagcaaatgatttaaaggttcatttgggctggtctgtacaaatttataatgcagccgaagctttaccaaacttaatcaatccattttttatgcttccaatgttaggcattttaaaactaaaagcaaaagatgtgattggttttacagtgactcagctcgttgtgcattttcctttagttttattcttgctgtggttctttggtagaacgctcagctatacccctccaactttttaa

SEQ ID NO: 54238 - DNA, 216 bp, Acinetobacter baumannii
atggaacactgtgcaaaagacggtacaccaaaaatcgtgaaaagctgtagtttgcctttaacaggtaaaggtgttgttcatcgcgtgattacagacttaggtgtaatggatattacgccacaaggtgtagagctcattgaactagctaaagatgttacgctcgaacaaattcaagctgctacaggtgttgagttttataaaaccttagttgcgtaa

SEQ ID NO: 54239 - DNA, 1437 bp, Acinetobacter baumannii
atggcaaccccgtatataactataggctgcccaacatctgggggtggcaaagtcatttctgggaacagcaagtttctaattgatggtattcccgttgcctgcgttggtgataaagctacatgtcccacacataaagttcttgcaaccattgtgtctggtgacccatacatgcaaatttttgggaaatctgcagcacgagtgaacgactcactttcatgtggctgcaaattacttccgcaacaaaatctagttgttcaagataatggtggtagcactggtagtaatagtagttataaaaatactcaacaatctactcaagaaaattttattgaaaagaaagattttgagattgaactagttgacttaaaagttacaccttttattccccttggagttcctacctctgaaggtaaaccatcaaataaagaacattcatttttcataaaaataaaaaaaggaatatgtgatgctataagtctagaagttgagcaggacggaacctttgtagaagtaaagaaaatacaaaaagctttttcctctggtcagcaaatttcactcaattgggatggctttattaaagatttctataatagtaaatttatgacgaaaccatcaggagtcaaatttaaagttaaaggctattcaagtggctcagttcaatgttcagatgagaaaatatttaaattcaagtattttaataaagactggatggatattgtcattaaccgaaagacaaaacatgtcttaattgatttacgtgtaaattttgtcgatggaggagcggtaggtctttttaatggtaactcagtccctcctatgcaaatttcctttaagaaaattaagccatatagtactcaaaccaaaactttcgatcagcttcgccaattagcattagatggtatcaattattattggggtagaaatcatacgcatccgaccggaaaaaatataaaaattaatggagatgaatatgaagtttttgtaaaggctaaaccttccgaagttcaagctatgcccgaaatgaaacttacatttgtaactaatgtaaacccgaatgatctaatgttccgtagttctaactgggcactttccagaaaaactgcctacatgacaggatacttaaaattcgataatggttggtctttttatgagtattctttatctgataaaaagtttaaagagacaatagctcatgagactggccatgcaattgttgaaacatatgcaggtttcaatgaatcagttacacatcatggatcatcaggctatgatcagaatcctaaagctggaaccatatatccaaaaactggtgaaatcgatctaatgaaatatgcaaagggtaatctacttaccatatctggttgggatacacgcatggtagcgaacgaaaaagatacgatgggattgttatttatttcagggatttctaaaaaatga

SEQ ID NO: 54240 - DNA, 342 bp, Acinetobacter baumannii
atgaaagcaactaaattaattagagataaagggctgaaatacgcgaaggaaatcgtagattcagcacccgataacgcaactgaatggaacgagggttatgagttccaatgtggtcaaagtgtagagattagcaaggctgaccgagaaaaatattttgtagacctttctgaactcaagcgtctggtgaagtcagttgaaattattaatcaggctggtggttatgaggttgtaaaaactgccattactaactatcgagcttctggtgacatagtcacattctcaagtttagaaaagcgtttgaaagaccacgaatcaatatatggggaccgtgaaaatgcataa

SEQ ID NO: 54241 - DNA, 402 bp, Acinetobacter baumannii
atgtcatcagtcagcattgctgaataccgcaagttatttccgataaagaaaaataaaaagcggcgttcagcaaagcaagttgccagacaaccaagtgtgggtgaaatggttctggcaacgcatttaagagcatgcaagatcggttttgaacaggaatataagttccatcctgatcgtaaatggagagcagattttttaataacgggtacaaagattttgattgaggtagaaggcgggatctggagcggaggccgtcacacaagaggcaagggctatttaggggatatggagaaatacaactccgcagcaatgatgggttttacagttttacggttcagcacagcgcaagttaagtccggtatggcattaaagcaaattgaattattaattaagggtaaatag

SEQ ID NO: 54242 - DNA, 3462 bp, Acinetobacter baumannii
atgtttcaacaagaaatctctcaattgaatttgcaacagctcaaggccggtgaaaagcgttgggtggggtcattattaggttcatcagcaactttattgcttaaagaaattgcgaatcagcattcttctttattagttttagtcgctcgaaataaccaacatgttgctcaattagaaagtgaacttgagttttatggaataaagccgacaatttttcccgattgggaaattttgccttatgatcggttatctccgcatcaggatattgtctcggaacgtcttgcgattttatcgaatatgccgcagcaaggcgtattactcatttcagcaagtactttggctcaacgggttgcgccttactcatgggttctgggtaagcactttgacataagagtggggcaaaaatttgatttagaacagcaaaaactaagattggttcaggctggctaccatttggtagatacagtttatgatcatggagaatttgctgtacgcggtagtattatggatatttttgcatctgggcaagaagctcctatccgaatagatctatttgatgacgaaattgattcgttaaaattctttgaccctgaaacccagagaacaaccacaacgttaaaaagttttactgttctaccagctaaagagtttccattaaaagaagcacggtcagtttttagagatcgttattctgagtttttcccgacagcaaaccctaagaaaaatccaatttatcaagatgttttagatggtatagcatctcccggaattgaattttatttaccattattttttgataaagaacaaatgcaatcgcaaagtatgtttacaacgtacttgccaaagaattgcattgtaattacaactagtgatgttgataccgatttaactaacttctggaaagaagttatgcgtcgttatgaagatcgacgtcataatattgatcaacctattcttgctcctgaagagttatttatttctccaaataatttgctgagtgctttaaatcagtttccgcgcatgcttgtaagtgcagaaactattgaagaaaaagctggtgcacttaaccttaaaactgagcaaccccctaaattaccggtcgatccaaaaaaagagaaaccatttgcagctgtaaaaaaatatattgatgaagcaaaccatcctgttctattggttgcagaaagtgcaggacgccgagaaagtttaaaagatgcattgcgttcaagtttgggtgaaattccgaatgtagagaattttgagcaattcaaaaccagtcaatttgcaattgcgattaccaatgcacctttagaccgtggtttacttataactgatcaattaacagttatttcagaaaatcagctttatgaacaccgagttgtacagcgtcgtcgtaagcgtcaacaggaagtttctgaagagtttctaattcgaagcttaactgagctaagtattggtgctcctgtcgtacatattgatcatggtgtgggacgttatgctggcttaattacacttgctatcgaaggtcaagactatgagttcttacagctagattatgctgaagatgccaaagtttatgtcccagtaaccaacttacatctaattagccgttatagtggcggcgacccagatttagcaccgttacataaaattggtactgatgcttggagtaaagcaaaacgtaaagcattagagcaaattcatgatgttgcagccgagcttttgcatattcaggcacgtcgtcagtcaaaacctggttttgcttttgaattggatcagtcgctttatatgcaatttgcaagtggctttgcgtatgaagaaacacttgatcaggccaatgcaattgaagctacgttgtatgatatgcagcaagcaaaaccaatggatagattggtatgtggtgatgtgggttttggtaaaaccgaagtggccatgcgagcagcatttgttgcagtacaaaatggtaaacaagttgcagttttagttcctaccacgttacttgcccaacagcattatgagtcttttaaagatcgttttgctgattggcctgttcgtattgaagtgttatcacgatttggttcgaacaaaactcatttaaaaaatattgaagacttggcggatggtaaagtcgatattgtggtaggcacacacaagttattacaagagaatgttcagtttaaagatctaggcttaatggtcgtggatgaggaacatcgctttggcgtacgtgacaaagagcgaattaaggctttgcgtgctgatgttgatatgttgacccttaccgcaactccaattcctcgtacgcttaatatggctttttcgggaatgcgtgatttatcgatcattgccactccaccagcacgtcgtttagcagtaaaaacgtttgttcaagaacatacagatgcttcaatcaaagaggcgattttgcgtgagttattacgtggtggacaagtttacttcttacataatgaagtagataccattgagcgagcggctgaaaatattcgtatgcttgtgccagaagcacgcgtggcggtagcacatggacaaatgcgcgaacgtgaacttgagcaagttatgcagcagttctaccacaaagaatataatgtgctggtgtgttcaaccattattgaaacgggtattgatgttccaaatgccaatacaattttaattgaacgtgcagataagcttggtttagcacaattgcaccagttgcgtggacgtgtaggtcgttcacatcaccaagcttatgcttacttattggtgccttcaatcaagcacttgaaaggtgatgctgaaaaacgtcttgatgcaattcaacgagcttctacattaggcgcaggctttatgctcgctacggaagatttagaaattcgtggtgctggtgaattgttgggtgagcaacaaagcggttcaatgcaggcgatcggatatagcttgtatatggaaatgcttgagaaagcgactaaagcaattcaacagggtaaaacaccgaatttcgatgcaccattgtcgttaactgcagaaattaacttacatattcccgcacttattccggatgattacttaggtgatgttcatcaacgtttattattctataaacgtattagtaatacagatactcaagaaaaactggataatattcgcatggagcttattgaccgttttggtgttccaccgcaatcagttaaacacttgtttagcgtgcatcagatccgcttaaaagcggagcatttgggtattacaaaaattgatattaatactcaaggcggcaacattgaattttcaccagatactccagttcaggcgattagtattattcaactcatgcaaaagaacccgacctattatcgtatggaaggtggacagcgcttgaaagtgatggtgcagcttgaagactatgaaaaacgaattcaatttatcaatgatttactacaaaaattgatgagtgaattacatgcctga

SEQ ID NO: 54243 - DNA, 405 bp, Acinetobacter baumannii
atgaaccttacttgcttccagattattgcaaatgatttggctgtaactttagctgctgaagctggtcaattacagttaaatgcaatggaaccacttattgcattcaaactatttgaatcgatggacttacttggtaaagcaatggcaatgttccaaagtaaatgtattgatacgattacggccaaccctgagcactgtaaagctttagttgaaaactcaattggtattgtgactgcacttaacccatacctaggttatgaaactacaactcgtattgctaaaacagcaaatgaaactgggcaaagtgtattggctctagttcagaatgaaggtttattatcagcacaagtgcttgatgatatcttgtcgattaataatatggttaaaccaaaaatgtcggcttaa

SEQ ID NO: 54244 - DNA, 1764 bp, Acinetobacter baumannii
atgaataaagtttataaggtcatttggaatgcttcaattggagcatgggttgcaacatctgaaattgcaaaaggtaaaacaaagactaaatcaaaaactttaaatgtatcagcggtagttttaacaagtgtaattagttttgctccaaatgctttcgcagggacaaataccgaagggggagtaggtcaagggacctctatttcaggtacaacttcatgtcgtgaggggaatgcgagtacagccaatgaaaaagatgttgctattggttgtggagctcaaacacaagacagaatgggctctaacatagcaaaccgtaataatccttataataattctactggtgcttatgctggtgcaatgaaacagggcggtgcgatcagtgtgggtactggcgctgtagttgagaaaggtttaggtaccgcaattggttcttatgcgacaactcaaggtatttcaggcgtagcaattgggacgggagctttgtcttctggaaatactgctctcgcacttggacgtcaatctgccgcgactgccgatttttctcaagccattggtaatgttgcagctgctaccggtaaaggctctttagcaattggtcactcggcaactgcagaaggttaccgttcaattgcaattggttcgccagatattgaaaatgctgacccagttgcggggcaagcaggtgctgcttaccaacctaaaatggcaacaaaagcaacgggtaaagactcgattgcttttggtggtggtgcagtagcaacggaagaaaatgctttagcgattggtgcattttcagagtctaaaggtaaaaaatctgttgcaattggtacaggcgcaaaagcacaaaaagataatgcggttgtaattggagaccaagctgaggctacttttgatggtggtgtagcaattggtaaaggtgcccgttcagaagcagaaaatagtattgcattaggtaaagattcaaaagcagtccaagctactggtgaaagtttcttaactaaacaatccgctccaactggcgttttatcaattggcgatgtgggaagtgagcgccgtattcaaaatgtagcagatggtgcagcagattctgatgctgccactatacgtcagttaaaagcagctcgtactcactatgtcagtatcaatgataatggccagcaaggtggtaattttgaaaatgatggagcaactggacgtaatgcaattgctgttggggtgaatacttcggctactgctcgtgaggcaatggcgattggtgcatatgcacaagcagcaggttctggcgcaatttcaatgggaagtagcagtcaaacaattggtcgtggtgacgttgctattggacgtaatgcatcgactaaaggggcagaaggaacgccatctggctatagcaatcagtcaattgcgattggtgatcaaactaaagcaattggagatcagtcgattgcgattggtgcagatgttattgcaaaaggaaactcttctgtcgcaattggtggagatgatgttgataaaattgcccaagatgctgagctgagtaaaacctatacagaaattactggtggtgtgcttaaagcaggcagctatccaacaactgaagcaaatcacggctcaacggctgttggtgttcaagcagtaggtacaggcgctttttcttcggcttttggtatgacatctaaagcaactggtgatgcttcatctgcttttggcgtcatgtctaatgcttcaggtaaaggtgctgctgcattcggtgggttctcagcttaa

SEQ ID NO: 54245 - DNA, 498 bp, Acinetobacter baumannii
gtgctgctgcattcggtgggttctcagcttaatactacgaatcaggcacttgtaaactacttaggtggtggagcaggttatgacaatattacccaaagcttctcaaatccgacatataacgtaggtgataaatcttacaacaatgttggtgatgcgataggtgcattgaatcaagctgaccaaacattaaataccaaaattgataatgtaagtaacaagcttgagcaagcattctattcgacaaaccaacgtatcgacaaattagaagaaaaaatgtctgcgggtattgctgcaaatgcggcacttgaaaatgcgccatttattccaggaaaagtaacgatggcggttggtgctgcttattacaatgagcaaaatgctgtaggtgtgaccttacgtaaaactgctgataatggacgttggtcacttacaacaggtgcatcgcttggaagtcaaggtagcccattagttcgtgttggcgtaagtacagtaattgactga

SEQ ID NO: 54246 - DNA, 786 bp, Acinetobacter baumannii
atgaagcaaaatattcaaattttggtaatgggcatcttggtaagtttaagtactactggatttacggatactgaagtagcaattcaaagaaatgaagtaaaattcccagcaattgaaaagagttatcttaaacaaataaaacgttatgagtatgatgacgttgcacgtttggataaaggattagataaagatcaaattcgagctttactaggcaatccacaatttagtgaaggactatttggagtaaaagtctggaactatgtattagatatacgtataccaaatagtaatcaatatcaacgctgtcagttacgcattgattttaataaaaaatatttggcagaaaatttattttggaaaggtgaggcatgcgaaggtttggctacttggggaggttataatcagtcgccagagcatactaatttaatttttgagcgggcagcaagtgtgttattcacctttgatagatttgataataatgctattgaacaaggtgttcatagtgtgcaggaaattgctgaacagatcaaaaaaagccagacaacaacaccagttattgtttcaggttttaccgatcgattgggtaaatttagctataatcaagaattgtcttcacagcgtgctaatacagttgccaagttattggttcaacaaggtattgatcctacacgtatacagatacaggcgaatagccaaactgatctatacaagcaatgttcaggaaaaaataattcacagcttattgaatgtttagcgccaaatagacgtgtcaatataagctggtaa

SEQ ID NO: 54247 - DNA, 774 bp, Acinetobacter baumannii
atgggtaagttatctttattatgttctcttttacctaaaatcaaaaaattggttacattagagcatgtctcttttgttagtcggcctaaaaaagttcaaatcttaagtaaattcttttacaagtgggttgatcaggttgttaccttaacccaaaaggataaagaacaatttgataaatttcattctaaagttattgttattcccaatttttcacccttccctattgtctcagaatctccgctgagtagtaaacaaattgtaaccataggtcgtttaaccgatcagaaaaattatcttcatttattgaaagcttggaaaaaaatatatcaaatgataccagagtggcaccttaatatttatggtgaaggtgaacacaaaaaaatgctacaagattatattgaggagaactctctacagcgcgtgattttgaaaggaagtacatcaaatgtgcaagaggtatatagacaatcagacttttttgtaatgtcgtctaagtatgaaggtttacctatggttttagtagaggcgcagagtttcgggttaccgattgtttcttatgattgtccttttggaccaagtgatgttattcaaaatcataaaaatggcttgttggttgagaaccaaaatattgaggcattggcagatgcgattttacaaattgcttcttctccagatatgttggcgcaattctcacaaaattcattgatcaatgctaaaaaatatcagcctgaacagatcttaaaagtttggattgaaaaggttttggaaggttaa

SEQ ID NO: 54248 - DNA, 690 bp, Acinetobacter baumannii
atgataagaaagcagcacggcgcaacactcattgttgttcttattattttaattatggtgactttattaggtactcttgcgattaaatcaggcatcttaggcttaaaaattgcgactaatagtcaagtaaatgctttgttgctcgaaaactctgacgcagcattatttaatattgagaatccagcaaaggttgaacagcaattggctttaaatggcatgtttgcctattttaactcggcagataatgcacaagatgagctggtattttgttataaagcatcagaagatacattttttagtttacaaaaagcaagtgcgattacttctgatggtggtacaacgaaaattggggtggacggtttttgtaagtccaattggtttgcaacaggtcgttcagctgttttatctcaaatttatttaacccgtgcagcaactacagtaactccttttggaaatgtgcctttaggtacgagccaagggcaaagtagtattcctagtatttcgaataatattggagctactgtgatttcagtgttgccaagtttttctggagcgagtagctcacaaatagaaaattgctttaaacaacgcgcttctttggtaggtgcttgttttgatgggttgaatataccttataacatgcagcatgcagattataccgttggtggttcaccacagttggcatcgtaa

SEQ ID NO: 54249 - DNA, 918 bp, Acinetobacter baumannii
atgattaaacctcaacaagcttttactttgattgaacttatgatcgctttggcgcttggtttactaattgtggctgcagggcttgccatttttttaagtagtcagcgctcaatgggactacaaagtagtttaggaggcttacatcaaaatgccaattttggactttcatctttaacacatgatttacgacatgccaatttgaataccccttcaagtcaatatgtaaataataaagtgattggttcaggtatcatttttgcgaaagaaaatcttcctagcaatttacaaaatattcccaatttagaaactaaatttgtttctttacagagtaatgatactgacaatacgtctggggaaagtgatcagttaactattcaatatgtacctgctgcaaatgaaatcatagattgtgaagggaatacaattactagtgcgcagtctaaaactatagtccagcgttacttcctaaaagagattaataaacctacaggtgagccggtttcttattcattggcctgtgatgcaggatggtacgctattgacgataccgcaattactggtctagataataacgcacaacaaattatgcaatatattgatgcttttaaagtgcgattaggtgttaaagatttagtaaataataagttgcgttatatgacgttgaatgaatataaagcagctatggggaatagtgtgactgatcccaaaaattatttacaagtggtttctgttgaaattggggtgttagcgcgttcaactggaaaaattggttctgattcaaatttaaatacccaaaaaacatttaacttggcaggacagactgtgacattaaatggaacagatgcagtcaatcaaaaatatttacgacaggctgtaagtcaagtggtggcattaagaaacacattgggggcctcatga

SEQ ID NO: 54250 - DNA, 498 bp, Acinetobacter baumannii
atgataacttctcaaaaaggtgctggtttaatggaagtgcttgttgcactacttttattgagtgttgctgtacttggttttattgctttacaaatacgagcagttgctgcaagtactgaagcaggtcagaacattcaagcaaccaatattgcccgagatttagcagagcgtatacgtgtgaatcgaacaggtttaagtagttatgtggatattggtggcactgacacattaacagactgttctaccacattttgtgatgctgctcagatggcgaaatacgattatgtgcaggtcaaacaacatgctacagatttaggtatgagtcttgcaatattgaattgtaaaggtttttcattaaatcgaactcgtcaatgcatatatgtagcatgggggggtacaacagctacagatggtaatggcagtccgaattgtactaatggtacagcctatgtacctgacgcaaaatgtaccattatggaggtttataattatgattaa

SEQ ID NO: 54251 - DNA, 447 bp, Acinetobacter baumannii
atggggatgaggggaattactccgcaagaagggttcaccttaattgagctcatggtaaccatcgcagtaatggcaattattgcaatgatgacggcaccgtcttttactaaaacaattcgtaaaaatgaattgatagttgataccagtaattttgttaacttactgtctgagactcgttcagaagctgtatttaaacaaagtaatcgagtgttggctttagatagtagcgtgaccaccttttataaaaaatggataccttctagccgcgttgagaaatacagtggtgttacaagtgttacttataaccgccaagggcaatccacggcaacagggaatttatgttttatattccggcatactttagataacactttaatatcttatgtttatgtacaaaaagatggcatcattttttacgataaatcggcaaccagctgtccgaattaa

SEQ ID NO: 54252 - DNA, 1353 bp, Acinetobacter baumannii
atgcctaacacccctagcttttggcgcagtcttttccgtctcgtacatatttacgctggtatttttattgccccatttatatttattgcggcatttacaggtcttctatatgcagttactcctcagatagaacaatctatctataaagatgcactatatgttcagcctttaaataaagatatgcacccactaagccaacaggttgaagcagcaaaaaaagcgatgcccgaatctgcacaaattacagaagttaggccggcaccaagttccatacaaacaacacgagtcattttttctgataaagctcatcatttatataacgaagctatttttgtagatccttataccctttctatcaaaggtcagcttgctgtatatggaaccagtggagtattaccatttcgcacattcttagatcaattgcatagtaatttattacttggaaaatggggacgtttttatagtgaacttgcagcaagttggctcggcattttaactctgaccggattatacagttggtggaaacgtcgtcaaaacttcaaaattagacaaacgcggaaaaactatttattaaagtggcatagttctattggcttgaccttattaccacttttattgttcattgcgattacaggccttacatggtcccaatgggccggtgataatattcgtattgctcgtcaatggctaaattggcaaacgccaaccttagccacaactttaaataatgcgccattatcaaaaacacctcatgatgaacataaagaacatcatggtatggtcatggagacttcgaatttagaaatcatgccaaccgaattcgattctgtattagcaattgctagagcaaatggaattcattcagcacaaatacaaatcaaacctcctgttgatgcaaaccaagcttggactgttactgaactacagcgcaaatggccaacacaggcagatagtgtggctattgatatacatcaacacaaagtcatcgataaactagcttttaaagattattcattatttgcaaaacttacacgttggggagtcgatgctcatattggcgtattatttggatgggtcaatcaactagtactcgctttatatgcactcgggctatgttttatgattatttatgcatataaagcttggtttaaaacctctaatttaaaaattacgactagccattttgtaagccaaactttattggtctggaagcgcgcaaccaatcaacaaaaaataatcacggcccttacacttattattttagcaattattttgcccattttcggatttagcttattaatcacactagtgatattactaatacgaaaacaaagctctttaaacactaactaa

SEQ ID NO: 54253 - DNA, 1029 bp, Acinetobacter baumannii
atgtcaataagtatcgtaagtcatagttcctacatgctagccaaaaaaaattcatctgctttaaagtatgttttagctagtttactgttatttgtgctttatgcttttttaagttcggcacatgctgcttgtacagtaactggaactacaaatagtacttatacatatacagcagcaaatattaatagtgatgcaactattaatttttcgggaaccattagctgtcttggtgggaagactactccagaaatatccccctatatgtgtatgaagaccgtatttacaggggctactaccgcgaatagtagtgtgacattaccctatacagttacggcaactgtaggtggagcaggttcttcgactaccactcaaacctccaatgtttggtatggaccggtcaaaacagtcgcgacaaataatattgttagttattccgtaaatataaaagtgccagcccgatcgggaacgctagttgcttatcctaaaggaacgtatataggtacagttcagctctattgggatatgcaggcaagttcaagtaccgtatgtgaaggtgatagtggtggtggttgggactcaggtaatacgactattacggctaactatgttgtaccgagtttttgccaattagactctacctcaaatgttgattttggcaatattagtgatattggtacaactagccgtgactacacggctcaaggtgcgattaatgcaacttgcaacaatggaacaccttatagcatttacttgggggacggcaataatcgtataagcggtggatttagacgtatgaccaatggaagcagtcaatacattccttatcagtcatataaagatactgcgtatagtacagtgtgggatactacagggggtataactgctgtgggtggttctggaggagtgtcaaagacaggatctggcactagtcaaatttcaaatgtatatggaaaaattccacaaggaacagctatttcaagtacacctggtaactattcagatagtatagttgttacggtgacttattag

SEQ ID NO: 54254 - DNA, 1182 bp, Acinetobacter baumannii
gtgaatcaattcagtacagatgtcattaatttaggacgaacacccgagcgctttgatggtctagtcaacacacctgtttttcgtggttctactattgttgtaaatagctttagtgagtgggaagaatttaagcgaaatggtggggtatatcgacattatggccgtttcggcgccgcaacagctaaatcttttgaaagtgcaatcagtgcgcttgaaggcggtgcgggtagtatagtatttccatctgggttgtcggcatgtacacatgcacttatggcttgtgtagaggcaaatagtcatgtcttgattgccgataatatctatggtccaacacgaaatttcgctgacaatatattggttcgaatgggggtaagtgttgaatattttgactctaccaatcttgaagcattaaccgaaaaaattaatgatcgtaccactgcggtgtttattgagtcacccggttcaatgacatttgaattgagtgatgttgcagcgatttctacaattagtcatcaatacggcgcaaaagtattagtcgataactcttgggcaacgccattactttttcaaccattaaagcacggtgctgatatttctattcagtccgtaaccaaatacattggtggccattctgacatactcatgggtgtggctactgcaaatgccgaaacataccaacaactcactaaaacaggtcatttgtttggtgagaccacaagcccagacgacatttatttggcatcacgtggcttgcgaagtttggcggtaaggttaaagcagcatcaagatagtgctttaactattgcccgatttctagcaacacatccggctattaaagaagtgcttcatcctgctttagaaacaagtccttatcatgatttgtggttgagagattttgatggttcatctggagtatttgctttttacttaaaagaatctgaaccttcatatgtgcaaaaattctttgattcgttgcaattatttcatattggtttgtcttggggagggtttgaaagtttgattttacctgttgggcaagcttatcgaacacataccaatttacctaaagatggctatttagtgcgcttaaatattgggctggaatcggtggtcgatttacaaaaagatttgcaatatgccctacagtgtgcagaacaaatgcgtgttgaaagtgttatatag

SEQ ID NO: 54255 - DNA, 651 bp, Acinetobacter baumannii
atgcgcctacattttattgttcatgaagattttgaagcaccgggtgcatatgaaatttgggggcaaactaataactttgaaatgacatattcaagagtgtatttaaacgaacaattaccctctacagttgaacatattgattttcttattgtgatgggtggtccacaaagtcctgatacgacagttgaaatgtgccctcattttaattcgctcgcagaacaagctgtcataaagaaagctatagaggcgaataaagttgtgttaggtatatgtttgggttcacaactcattggtgaagctttgggtggacaatttgaacatagccctgaaagagagattggtaagtttcctatcatgctgactgagtatggtgttaaagattctctattttcacacttaggaaaaatgacagaagttggccactggcacaatgacatgcctgggttaacaagcaatgccaaaattattgcttttagtgcaggttgtccgcgacaaatcgtggagtattcgaaattagtctatggcttacagtgtcatatggagctaacgcctcatgactatcaagaaatgaatcaaaacttgtttattttcctagataaattaaaagatgagtatttaaaacttaactcaatcacagcaaagcccttttaa

SEQ ID NO: 54256 - DNA, 225 bp, Acinetobacter baumannii
atgcaaagtaccaatattggcaatggtgacagttcactattgcctaaaacaggctatatctgcctaaacgatatgcttccacatctacctattaaacgttcaactgtttggaagtgggttaaagatggtcgctttcctgttcccgtgaagattcatacgctaactcgttggcgctgtgaggtcattcacagttggttgaaccagtatggaggcacggaagtatga

SEQ ID NO: 54257 - DNA, 1500 bp, Acinetobacter baumannii
atgacgatggaggaattcaataatgaaaaaggctatcaagagatagcccattcaactgatgaacagaactgcaattctgtccattcagaaactgatcaaattgagagtcaatcagtactacattttagcattgtgaataagggaggtgagaaagaagattgtaaaacagatgatctagttattgagggtgggggaaatcaagttgttatccctgcttgtattagcggaccaactggaattgttaaaaatactgtagaagatatccctcaatcagagattatccaaaatgaattgcgaggactccaccatttatttaaggtgcgaggggaagaattcttgtttctgacagaacaaactttttcagtgctcttttgctggtctgtcttaactcggtttttatccctttacgatgaaataaatgctaaagatttgtattttgctcctatcttgatgattaacgcttcaggatctggatatggcaagagtacacttcaaatgtttctagcttgggtgaatggcattaatgctaatgaacgtgtagctaatgctacacctgctggattagtgcggatgactgattcatcaagaggtcgtcctgtatttgctgatgaagtagatgtactgaaaaatgtcaaagactttacagaatactttaatagcggttttgagcgagatggtccagttactgctcgtgctaaagcatctaaaagtgtttttggttttaagtgtgtttcaggaatcaatattgctgaaaagctagaagtagcaacagtctcacgttgtattgttgttgaaatgcagaaagtacctaatggggtaaatctcaagaagtacaaatatgtcgagacggcggatttaatcagcctttcacatgcaatagatgaagttataaaggattattacgatgaaattttagagttcattcaaacattgaatgtaccgttaattgaatatattgataatcgcttaggtgatgtgtgggaggacttactaaaaatttctatcttactaggtgaagatatttacaacgatgtcactaactttatgtttcagtctggcttggtgaaagataaaattttggaagttgcaaatattgatttcactaaggttaagtatcctatcccacgtgaaaaacatgtttctcaaaagcttgtaatatttgatgtgacagataaaactacatgggggaacgtacctacgaaagtgtttgtaaaagcctgtggagattatctagtagcatctgatgatctacgaaagggtattcgctccatcgaattggaacggtttcaggaaaagcttcagcttgctggggtgccaattacatctcgactgattacgcgggcatttaatgctgaaactggtgtgcaagtggttgataaaaatgttgatggtagtagtggttatctattcacaacattgaatacgattaatctaacatcaactgagcaacaaatttatgatggaataatccttttactcaaagaaaagcagcctttatag

SEQ ID NO: 54258 - DNA, 345 bp, Acinetobacter baumannii
atgatcaataaccaagaagctgctgcatttgttactggttggaagcacttaattttaaatctccgtgaaggagataaagtttacttataccaaagtggtgtaggttttgttgcttcaggaaatgctactggtgatttgattataagtgattataaagggcaacccgatgagaaatatgctaaaaaacttgctaatttcaaaacgggatttaaagcaatttcagcaaaagagtttaaaaaagcgacaggtaaaggaacaaatttcagagcaactttatctgaaatgactctacatcaaggccttaagcttaatgagttaattcaaaaccgactacaaaaactatag

SEQ ID NO: 54259 - DNA, 672 bp, Acinetobacter baumannii
atgagtttaaagtatttaataatttatagcctcctaagttttactattctaggtactataggctgctcaaaaccactttcatcacaaaatactaatcaaagtgaaacaaaccaattatatgaacaaggtggtaaatatttcttaggcaaaggtgttcctaaagactatcaaaaagccttttcttacttccaaatggcagccgaaaaaggatcacctatcgctcaaaatgatttagccgggatgtactttaaaggtattggaattcaaaagaatgaagaaaaagcttactattggtatgagaaagctgctaaaaacaactttccagaagctcaatataatttgggtttgatgtacgataatggctattatgtaaataaagatagatcaaaagctttagaattttataaattatcttctgatcaaggatatgctaaagctcaatataatttagcaaatatttattctgatggtactcttgttaaacaagataatgaaaaagctttagagctatatataaaagtagcagaaaaaggtgtacctgaggcccagaataacctcgcctatatgtacgctaatgtctactcagattatgaaaaagctaaattttggttccaaaaagctgccgacaatggatatgaaccagcaaaagaagctttacaacaatttcattaa

SEQ ID NO: 54260 - DNA, 435 bp, Acinetobacter baumannii
ttggttaatgtcgttgtcactgcaactgttggggcaactgcatctactacacctgtgccaggtaatgacgggttacccgctgggtcagttgcaacaactgtaactttgtctccatctttaagatcacctgggtttggtactgtccacttaccatccgggcctgcaactacagtcgctgtcgtaccatccgggaaagtgaccttaactgttgaaccagcttctgctgtacctgttacaggattagttgcattgattggatcaattactggtgcatttggcgcagtggtatcaacagttaccacagcattagttgtacctacattacctgccgggtcggttgctgtcacagtcacggtatgcggaccgtctgtcaacactggaagtgtattgtctgcaagggtccaggtgccatcaccattattggttgccgagtag

SEQ ID NO: 54261 - DNA, 300 bp, Acinetobacter baumannii
ttggttaatgtggttgttacagcaactgttggggcaactgcatctactacacctgtgccaggtaatgacgggttacccgctgggtcagttgcaacaactgtaactttgtctccatctttaagatcacctgggtttggtactgtccacttaccatccgggcctgcaactacagtcgctgtcgtaccatccgggaaagtgaccttaactgttgaaccagcttctgctgtacctgttacaggattagttgcattgattggatcaattaccggtgcacttggcgcagtggtatctactgtataa

SEQ ID NO: 54262 - DNA, 237 bp, Acinetobacter baumannii
atgacttttgaaaatgacggaaattcatttgcagttgagtatctaatagaactcgaaaagaactttgagaataaaaagagcgaaacttataagcaggtattggatgcacttggagaagccggtggatcgtttgcagttgagcatctaattaaacttgaaaagaactttgagaataaaaagagcgaaacttataagcacttaattaatgccattggtcgagcagggcgtatttgttga

SEQ ID NO: 54263 - DNA, 1695 bp, Acinetobacter baumannii
atgatcgtggtgtccttgaaatttagtatgttaattatgcgtgctgataatcatggtgagggcggcattttagctttattagctcttaacatgcacaataagcaaattgggcctaaagtgcgctttgggttaattacaattggtttatttggtgcttcattattttttggtgatggcattattaccccagctatttctgtattgtcagcagtagagggattgtccgtagcaacccctatttttacaccgtatgtgataccaattacgattgtgattctaattggattatttatgatccagaagaagggaactggatccgtaggccgtttttttggacctatcatgctactctggtttttctcaataggttttattggcctatctcacattatcaagaacccttatatcttgaatatgcttaatccgtattgggctcttcctttcattgaaaataaccccgtgactgcatttgtagtcatgggagcagttgtattgacgattacaggtggagaggcgctatatgcggatatgggccattttggtcgtaaaccaattcaattggcttggtttttggttgcgctaccgtgcttggtattaaactatgcaggacaaggtgcgttgattctgcaaaacccgcaggccatcgagaatacttttttcatgatggtacctaaaatagcattatatcctatgattgctttagcaactgctgcgacagtgattgcctctcaggcagttatttcaggtgtgttttctatggcacgtcaagctatccaattaggttatttaccacgttttgcgattgatcatacctctgaatctgaaattggtcagatttatataccagcattaaactggatgttgcttggtatgattatgagtttagtgcttatgtttcaatctagcgctaatctaggttcggcttatggtattgcagtaactttgactatgttttgcgatacgattttagttgctttcatcatgtatcacttatggaaatggccttcgtgggtcatgttattagttgcgatacctttgctaattccagatctcctctttattgcttcaacttcactaaaaattgtagatggcggctggttcccattaatgatgggtgcaatcacttttataattatgacaacatggcgccgtggacgtgaattactactgaacaagttgcaaagtgacactatgccattagatttatttattaagagcttggagtctagtgcttatatggtgagtggaacggctgtatttatgacaagtagtccaaaagttgttcctcatgctttattacataatttaaaacataataaaatactgcatgaacgtaatattttgatcaccataaatactcgtgacattccatatgtagatgaatcagaacgtattgatgtcgaagtattagataagcactttttacgtgtcagtgcttattatggatttaaagagcagccaaatggacctcaagcattagaacaagctttaactaagttgaatcaaccatataacattatggacacaagcttttttgtatcacgtgaacgtgtaattcataacgtaggtgacggtattgtttcatggcgtgaaaaactgttcatttctatgcaacttaatacgagtcctgctagtgatttcttccagataccagctaaccgagtggtagaaatggggagccaagtagagatttag

SEQ ID NO: 54264 - DNA, 918 bp, Acinetobacter baumannii
atggatccacgatatcaatttgcacaagttgatatttgtgatagtgcgcgtttaacagaaatttttaaaattttccaaccggatgctgtgatgcatctagcagccgagtcacatgttgatcgctctattgatggtcccgctgagtttattacaacaaatattgtgggcacttatacattattagaggttacacgtaagtactggctacaattaaatgaagaaaagaaagcctcttttaaatttcatcatatttcaacagatgaggtttatggtgatttagaaggtacaacagatctattcactgaaacgacatcttatgcgccaagttcgccgtattcagcaagtaaagcaagttctgatcatttagttcgtgcttggcatagaacatatggtttaccaacggtagtaacgaattgttcaaacaattacggtccataccactttccagaaaagctcattccattggtgatcttaaatgcgctggatggtaaggctttaccgatttatggtaaaggtgatcagatccgtgattggttgtatgtcgaagatcatgccaaagctttatataaagttgtgactgaaggtaaagttggagaaacctataatatcggtggtcataatgaaaaacaaaatatagaagttgtgaaaacaatttgtaaaattttagatgaattaaaaccacaaaataatcatcaaccttatgagacattaatcactttcgtaaaagatcgtccaggacatgatttacgttatgcaattgatgcctcaaaaattgcaaaagatttaggctggaagcctgaggaaacatttgaaacaggtattagaaagactgttgagtggtatttaaagaatttagagtggtgccgccgagtacaagatggcagttaccaaagagaaagattaggtgtaagtgcataa

SEQ ID NO: 54265 - DNA, 873 bp, Acinetobacter baumannii
atgagtacaaaaggtataattttagcaggtggttctgggacacgtttgtatccgatcacaaaaggcgtttcaaaacaactgttaccaatttacgataagccaatggtttattatccattgtctgttttgatgttggctggtattcgtgaagttcttattatcagtacgccagacgatatagatggctttaagcgattattgggtgatggttcacaattcggtgttgaattaagttatgccgttcaaccaagtccggatggtttagctcaagcatttattattggcgaagagtttattggcgaaagtaatgtctgtttggtacttggcgacaacattttctatggtcaaggttttacgccaatgctacgccaagctgtggcccgtcaaaagggtgcaaccgtatttggttatcaagtcaaagatcctgaacgttttggtgttgttgagtttgatgaggaaaaacgagcagtttcattagaagaaaaaccaaaacatccaaaatcgaattttgcggttacggggctttatttttacgataatgatgtagtgcaaattgcaaaacaagtaaaaccatcagatcgtggtgaacttgaaattacgacagtgaaccagatgtatctagaccgtggcgatctcaatgttgagttgcttggacgtggttttgcttggttagatacaggaacacatgcaagcttacttgaagcagcacagtttgttgaaactattgaaaaacgtcaaggttataaagtggcttgtcttgaagaaattgcacttcataatggttggttgacgaaagctcaagtgttagaaatcggccaaagcatgagtaagaatgattatggtcaatatttgatttctttattggatgagtaa

SEQ ID NO: 54266 - DNA, 399 bp, Acinetobacter baumannii
atgagtttaattgaatgggttgagttaccaaatttaggtgatcaccgtggttcattggttgtactggaatcaaataaaaatattccatttgaattcaagcgaatttactacatttttgatgtgaaaactgatactcctcgtggttttcatgcccataaaaacctacaccaaatagcattttgtataaaaggtaaatttaaaatgttaatggataatggtttagaaaagcaggaagttattgtttcgcaacctaataaagggctactaattcctcctatggtatggcatgaaatgcatgatttttctaatgattgtattctgctagtaatagcgaatgattactatgatgaaagtgattacatacgtgattatgaaaattttttagagggagtagtctaa

SEQ ID NO: 54267 - DNA, 258 bp, Acinetobacter baumannii
atgatttcatggatgaaaaaaatctttattgctgttatgtctgttgtaatgcttacttcggtatgggctaaaccagcttcacctaaaactatgcatgctcttgatgacagtgaattaagtaaaattacagatcatgatcactcagataaaacctcgctttcccataaccaagcagaaaagaaagaggtccctcaaaatttaactaaagaaaataatcttcaaaatttaaaacttgtacaaagccctcagccccagtga

SEQ ID NO: 54268 - DNA, 1824 bp, Acinetobacter baumannii
atgccagcatataaagctcccctacacgatatccgcttcttaatgaatgaagtattagattatcctgctcactataaaactttatcaaatggtgaaagtgcagatccagatactgtagatatgattcttgaaggtgcggcagattattgtgaaaacgtactttctccccttaaccaatctggcgatgaagaaggttgccattttgacaatggcgaagtgaaaacaccaaaaggttttaaagaagcttatgaccagtttgtaatgggtggctggcaaggactttcttatcctgaagaatttggtggccaaggccttccaatgtctttaaacctgattaaatcagagatgatgggtacagcgaactggtcatttaccatgtatccgggtttaagctcaggttgtatgaatacgattttgcaattcggtacagatgagcaaaaacaaacctatatgcctaaacttgttgaaggtacatggagcggcacaatgtgcttaaccgaacctcaatgtggtacagacttaggtcaggtaaaaactaaagctgagcctcaagctgatggtacttataaaatttctggtacaaaaatcttcatttctgctggtgaacacgatttaactgagaacattattcacatcgtgcttgcacgtcttccagatgcaccagcaggtacacgcggtatttctttatttatcgttcctaagtttattccaaccgctgatggtggcgtaggtgaacgtaacactgttagctgtggttcaatcgaacacaaaatgggtattcgtgcttctgcaacggctgtattgaactttgacaacgctacaggctacctcattggtgaagtaaacaaaggcttacatgcgatgtttacttttatgaacactgcgcgtattggtactgcggttcaaggtattgcacatgctgagttatctttccaaggtgctctaccttatgccaaagaacgtatgtctatgcgtgccctttctggtaaaaaagatccagataaagtggctgatgcgattattcaccatgctgatgtacgtcgtatgttattaactcaaaaagcgatcgctgaaggcggtcgttcaatgatctactacgcagcacagcttgctgacaaaatgacagacgctttgacgcgcggtgaccaagctgcatttgaagattatgatgacaaacttggtttctatacaccaattttaaaaggtttcttgactgagcttggcctagaagctgctaaccacggtatgcaagtgtatggtggtcatggctacatcaaagaatggggtatggagcaaatcgtacgtgatgctcgtatttctactttatacgaaggaacaactggtgttcaggcactcgacttgattggtcgtaaagtgttgttaagctcaaaaggtaaagtagtgcgtgaatacactgctgaaatcttaaaattctgtgcaacacatgcacgtaataaatacttacgtcgtttcgcttgggatttaacaaagctttgtgctcaatggaacactttaactgttcgtatcatgcttgctgcacgtaaagaccgtgacatcgtatcttctgcttctgtagatttcttgatgttctcaggctatgtcatgatggcttatttctgggctcaacaagccgtagttgcttctgaaaaattagaagcaggtgacggtaaagaaactcctgaattctataaagcaaaaattaaagttgctgatttctacttcgaccgtttattaccacgtgcacaaggtcatgcagaatcaatggtaacgacttctcgtacacttacttcattaccagttgaacactttagcttcgactactaa

SEQ ID NO: 54269 - DNA, 711 bp, Acinetobacter baumannii
atgagaaaaaatatctttgttgctacaagtttattattattatttttgcctagtatgttaaatgctgcctcaatacgtctttctcctgtaaatgttgaaatattgagtgatcagactgcatcttcaattagcttgtataaccagtcaaatgaaagtgctgatttacaggtacgtatatttgaatggactcaaaatgctgggcaagatcaattaattcctacagatgatattgcaattagcccaccttttttaaaattaaaacctaatgattcttataatttacgagtagttagaattaagccggaaccaatttctggtgagaaaacctaccgtattattattgatgaattacccaagcctattgatagccgaaaagcttctcaaggtgtaaatgtattgcttcgctcatcattgcctgtgtttgtagtcaataaagatgcgatgactaagctgacttggtcaatacaacaagaacaaaatagtgcttatctttccattaataatattggcaatcgccatgcactgttaaataatttaacgcttgtagatactacttcaaacaaaagttatccgattaaagtaaataccgtaaatggttatattctttccggaaaatcaagaaactttaatattagttctgattttaaatttcaagctgatcataaatataatatttcattgaatattaacggtaagccagcatctctttaa

SEQ ID NO: 54270 - DNA, 531 bp, Acinetobacter baumannii
atgaaaaaatctctcatcggtttaacagcaattgctatggggttaatgtctatcaatgtcgcaaatgctgcaacggctacaggtacattaactgttaaagcaacaattacaaatagttgtgtattgaatacatcagctacgggtacaactgctaatgcagttttagattttggtactttaagctctcttgctagcaatgtagatgcagatacgactactacgggcggtacagctattaaagtgttatgtaacaatactgtgccatggactttagcttttgatgcaggcaaaaatgctcaaacaactcaacgccgtatgattggcggtgcaacaagtaacgaatatatcccttataaccttttctctgacactaaccgtgcaacagcaatcggtatttcaacaacagcctatagtggtacaggtactggcgcagtacaaacagtaaacgtatatggccgtattcctgctggctcaactttgccaagtgcaggtagttatgttgatactgtgactgttactgttacttattaa

SEQ ID NO: 54271 - DNA, 891 bp, Acinetobacter baumannii
atgctaaatcgcctcatccaaaaaaaatggtacaagtaccaacaagcaaaaaaagcgaaaacttttgactcccattggtatatgcgttttggctggttagaacaaccttttacaacacttgagcaattagattccctctttgaaatccactcccctagaaagtttacctttgcagatagtttttatgcttatgaaaatgatcgtcactttatcttctttgaagaagttgatgatgagcatcctgtaggctttctttctgttttagaagtctttaaagatggtacatacacatcgcctgaacctattttaaagctcgactatcacctatcttatccttgtgtatttaaaatagataatacttggtacatggtaccagagacttttagcaacaaaacaatcgaactttggaaatgtactgattttccactaaaatggaaaaagcattctaatcttttagagaatattgaagcagttgacaccacacccttttatcatgaaggtttatggtatctttttacttctacacgtcgtgactgtaagaaatttggtgatcgtttagatttattctttaccgaggatattttaaatcctaactggcaagaacacccaatgaacccagtgtgtaaaggaaaaattcaatttaggatggctggaaaaccttttttctatcagaataaactggttcgcccaagtcaagactctctaaaacgttatggtggacatattgaacttaaggaaatcataaaattaagtccaaaggaatatgaagaaaaactgtacgaaacaatatatcctgaatggagcaaagatgatgatggatgtcacactattgatgtacattcaaacttcattgttatggatgcgatccgtttgacagaaaaagataattag

SEQ ID NO: 54272 - DNA, 720 bp, Acinetobacter baumannii
atgagtggttatatcggaaaccgctttgattatggcacgtccgtttcatacctagatcaaggacaaagcagtgtaaatattaatggtacctaccgtagtaattacacaactataggtgcgtcatttagccaatccgatgcatatcagcaggaaatgatcaatttaaatggaagtgtggttgctcattctcaagggcttttatttggaccagatcaagtgcaaaccatggtattggtctatgcccccgaagccacaggtgcccgagtcggcaatacatctggactaaacattaataaacatggttatgctgtaatcccttatgttacgccctatcgcttaaatgacattagccttgaccctcaagggatgccatcaaatgttgaactttcagaaacaagtcaccgtattgcaccttatgcaggatcaataaccagagtcaatttctccacaaaaacgggctatgcactttttattagtactcaaactcctaatggtggtcacctaccatttgctgcacaagtgtttaaccagaataacgaagtagttggaatggtagcccaaggtagtcgtatttatttacgtacgcccctgtctcatgatcatctttatgtgaagtggggagaaagtaataccgaagaatgtcaacttgaatatgacattcaatcaaaaatctcacaggaaaaacaatcaattattatgacagaggcaatctgcaaatga

SEQ ID NO: 54273 - DNA, 1443 bp, Acinetobacter baumannii
atgtttttaagaaaaacactttcaattgcattattagctactgcctcatcagctgtttttgcccaaggtttggtgcttaataatgatgatttacgtacagatttaaattggttaaatcagcaaggtgtcattaacatcagtacttctacttggcctttaagtggtgatgaaattcagcgtgcactctctcaggctaaagtaacacatccagctcaacaaaaagttattaactcagttctcaatgcattaaaggcagataacgatacagttaaagtgggtgcttttgctggaacagatatcaaagatattcctcaagcatttgggaataatcataaatcacagtatcaaggctctgtagagtttaatgctggtggtgaaaactgggatgcaaaaatccgtgtaaacgcagaaaaagatccgcaaattgataatggtcatgatgccaatgtggaaggttcgtatgtcgctggtaaaatctggaaccaatgggttgttgccggtcaaattccaacatggtggggacctgggcatgatggtagtttaatccgtggtgatgcaagtcgtcctgtttatggggtgacagctcaaagagctatacaaaatgcatttgataccaaatggttatcttggattgggccttggcaataccaactatttgcaggtcagttagatgattataaagctattccacatgctaagttattaggtttgcgtgttactgcaagtccattaccttacttggaactaggtgcttcacgaactttacaatggggtggtgaagggcgttctgaaagttggaactcattatggaatgcaattaaaggtaatgataatgtttatgatgcagctgaagacagatctaatcaaattgctggatttgatgctcgtttaaatcttcaatcacttttaaatgcccctgttggtatttatggtcaatatgtaggtgaagatgaagcggggcacttaccatcgaagaaaatgtatttagctggtgctgattattcttctagctataaaaatatgccttatcaactttatgctgaatgggcagatacacgtactaatggcgatgtaaaaggaatttcttataaccattatatttatacagatggttattaccagcatggtttccctctagggcatgcaatgggtggtgatggtcaaatgtattctgttggtggcgatattcgatttgacacgatgaatcgcttaagtggtcgtgcaatggttgttaaagtgaatgaatctaacttggcaatcaataaagctttccctaaagaagataaaattaaagcgcttgatttaacttggacgcattacatcaaaccagatcttccattaaaaattaatggttggattagtgactctgatttagagggtaatgattcaggtgcatctattggtattgaaattccgttagaacgtaaaatgtttggtttctaa

SEQ ID NO: 54274 - DNA, 822 bp, Acinetobacter baumannii
ttgctgacttctctatctgcctcagctacaccattaaagttacctgatgactggacgcaaaatactcagccattccaaattactgaaaatatatactatgtaggtactcacggtcttggaacctatttattgacctctgatcatcaagctttattgatagatacaggtcttccggaaaatacagagcaaatagagcagaatattaaaaaattgggttttaagttatcagatgtaaaaattatggttacaagccatgctcattgggaccatgtaggtgcacttgcccgcattaaacaagacactggcgccaaattaattgctatgcagcaggatgttaaggctttagaaataggaaaaccaataggtgaaaacaccttccaaagtattccttttactccagttaaagttgataaagtcattcacgatggagaagtagttaaactagggaaattaaaactaaaagctactcttaccccaggccatactccgggttgtacaacttggtcaactgaagttaaatctaatggtaagaatctaaatgttgttttcccttgcagtctctctgttgctggcaatgttttacaaaataatcatcaatatccaaatattgtagaagattatcgtcagagttttaagcgtttaaaaaatatgaaggcagacattgtgcttactagccatccagaagttgcagatgttatgggaaataaagcgcgcaaagatgcaggtcaagttaatgcatttattcaaccagaaaaactttctgctattgtaaaagatgcagaaatggcatttgaaaaatcattagttagtagtaagccgtaa

SEQ ID NO: 54275 - DNA, 351 bp, Acinetobacter baumannii
atgcttccaactttagctttaatttctgctatttttgaggatgagtcctcttttaaaataattcaggaaatacaaaaggaaaagctttctcattgtaatttccaattttggtttccaagagaaaattcagaaaatattatgctaagatcacctgatcgacagcatggagcttgttggtcaagtgtaccaattcaaaaaaatatgcctgaatttctcaaagaggttcaaaccatgctatctcaaaatgaacatttgaaaaacttttcacttttgaaaaataatttagatcctatatttttagttgtctgtagacattatcgccaacctattcctttgaattttaaaatttaa

SEQ ID NO: 54276 - DNA, 918 bp, Acinetobacter baumannii
  misc_feature (14)..(44): n is a, c, g, or t
atggaaagagttgnnnnnnnnnnnnnnnnnnnnnnnnnnnnnnnagtaatcgtcccatcaaatacatacattgcaagtattttggcaatcactgcaaataacctgactccagttttagttgaaccggatattaatacttataatattgatccaagcaggattgaagctgcaattactccaaaaacgaaagtaattttacctgttcatttatatgggcaattagcagatatgcctgtaatcatggcaattgcaaataaatataatttacttgttttagaagattcagctcaatcacatagtgcagaaattaatggaataaaagctggaaactggggagatgcgtctggtttcagtttctatcctggtaaaaatttaggtgcattaggggatgctggtgctataaccactaataatgaagagcttgcacaaatgttacgtgctcttcgtaattatggttctcatgaaaaatataaaaatttagtacctggtgtaaatagtcgtcttgatgaaattcaagctgctatgctagatattaaattaaaatatttagatcaagaaacagcctatcgccgtaaaattgcgcaattatatttacagaatatagtaaatcctttaatcaaattacctttagctcataaaaatacggaagactatcagcaacacgtttggcatttatttgtgattcgtactgaacatcgtgaagctttacaaaagtacttggcagaacaaggcatacaaactttaattcattatcctattccacctcacaagcaacaggcttataaagaatggaatgatttaagttatccagtatctgagcagatccatgcagaagtaatgagtttacccataggaccaactttaagcttggaagaggctgagaaagtaattcagatctgtaataattttaaagtttaa

SEQ ID NO: 54277 - DNA, 135 bp, Acinetobacter baumannii
atgagcactactaataatcaagcaaatcaacgtaataatcagcagcaacagcaaaatgataaccgcggccaacaacaaggatctaaccaaaaagattctggccaacaaaactcaaataacaaccaacaacgctaa

SEQ ID NO: 54278 - DNA, 396 bp, Acinetobacter baumannii
atgcaatatatgattgagtggttgagaacgaatcgaaatgaaatcttaaaaaaatatcccgaagcagaccctgaattatcttttttcatggactattttgttacatctactggaaggtatacatttattagcatccttaaagatgctatacgaggtgagggttctagcctccaagaaacgtcaagttatttacttatgaatgatgtaacagatgagggacatgttattgatgcagcggaattttatttttacgatgaacttgatggcaaagtgccatttaaagtttttgcttcggttttagaattaatagtattagcatatgctgagcataattcagaggaaaaggaacgaattattcatttaataccgcgccttaaaaaagtttgtgatatttga

SEQ ID NO: 54279 - DNA, 939 bp, Acinetobacter baumannii
atgatagatcgcaaattaattgaggaaattcgtagatcttcacgaattatggttcgggaacttggatttatgaatgccactcttgctgctacagactattcaccttcagcagttcatacattgttagagattgaaaattatggtgctataactgctatccagttagcacaaatcttaggattggaaaaatctagtgtaagtcgaatgctcagtaaattaatagaagctgatgaaattaaagaagttcaagcaataaatgatggtagatctaaatcacttcaattgactgataaagggcgtaatacggttaaaaaaataaatgcatatggtgaaatgagggtaattcgcgctatagaaaattcagaaccatttgaacagaaacaaattgctcaaggtcttacatcatatgcaaaagctttagttgcttgtagaactaacccaattgttgaggtaagtaaaaatattgagatagtgtctggatatcgtgctggaatgattggccgcatcgcagaaatgcatggaagatattatgcaaaaaactatggctttggacatttttttgaaggtaaagttgcattaggtcttgctgagttttcggaacgactgcatgacgaaaataataacatttggcttgctatacataatgatcagattattggatctgtagctatagatggccaagatttaggaaataatgaagctcatttacgttggtttattcttgaggatggatatcaaggtagtggtattggaaaaagattattagcagaagctataactttttgcgatcaaaaagaattctctgctgtgcaattatggacatttagtggtcttgacgcagctcgtaaactttatgagtcgttcggttttaaattgacaaaagaatgggaaggaaatcaatgggggaaaaccatgcttgagcagcaatttacccgatag

SEQ ID NO: 54280 - DNA, 1056 bp, Acinetobacter baumannii
atgatgaaaaagtcattattttgtatgacagctgccttttttgctctgcctacagtcactttcgctgcttcaccatattttagttttaaagatggtgatggtttcaagcgtttttcggtttctgctggctggttacatgccatgccacaaggaagcgcaaatccagttaatattaatactagtgttgcagaaggaactacttctaaagtaggttccgtatcaaaacaatctgttttaaatgcggctgaccgaagttccaatcccctcttatacgatgcaatcaaaattttacccacagatacactgccttcaatactcaccggaacagccactgtaaatggattatcaaattggcaaagtcaaggtacgggtttagaagcaaaagatgtcgacacgttagggatcatggcgaattataattttacagataatctatctctagaaattaaagcaggtgtccctcctaaagttgatattcaaggtaaaggtaatatttatgcaccattatcaggttcagcaaataccactcttggcacgataggtttaaaagaagatattcatatcaccgatctcactcaaggtggtaaagctgctaccgcacgtgcttggttacctgctgtagaactacactatcaatttggtaaatctggggtaaataaattccgtccatatgtaggtgccggggtcatgtatgcctattttaatgaattaaaaatgaattcagggattgagtcagatttaattaaagcaggccatatgattcaaaatattcatgatggtcaagctggagcagctttagatggcaaaacatcttcagctaaccctattgtgaagttagaggcaactgatactttcgcacctattgttactgttggtgcgacttatgatttcaatccaaactggtttgctgtaggttccgtttcttattcgaaaatgaataatgaagcaaaaatttatgttactgaccaaaacactggtaaagaacttatcaaagcaaacaccaaaattgatatcgatccactaattacatatgttggtgtaggttatcgtttctaa

SEQ ID NO: 54281 - DNA, 390 bp, Acinetobacter baumannii
atggaaaattttttaacattaaatggactagcttctatttttaagctgtatggtacggtcatgatgatcgctttagcagtaagcttagtcgtagcggtagttttaatcatgcgtttcccacgttcgcctcaagaatgggtagtaggtttgatttgtactattgtctcaagcttgactggtggttcattcattatcatgaaatggaacttacatgaatgggtgaccgatatatggggcatgatcactttaggtggattcttctttatttgtggcttgcctggttgggcaattgtgaggtggatatttaacttcattaataaacaagaaggaaaaactattgttgaagtaatgaaagacttaaaaaaagcaaaagatgatattcaaagttaa

SEQ ID NO: 54282 - DNA, 438 bp, Acinetobacter baumannii
gtgacacaaccatcatgtaagactagatgccctaactcatgtgctaaattaaatcgttggcggcacgtactgctatcttcattattaacgaaaattggacgttttgatgcaatagaaagcgcatctacttcattagaaacgctaggaaatgtagtaacaaaaattccaagcatttcacagagtttagtcatgtcactgataggacctaaacccaagttaaaatgtttcctaaattgcagagcagcattttcaatatcttggaagttttgtacaggatcaactgaaggaatagaatatctaggtagccttaaattagcttctataaactctactaacctttttaagtactcaccttgtgcaatgaccgactgctttgtaaatacttttgctgttttattacttcggaagtttatttgttcttcttgcaaaataggatga

SEQ ID NO: 54283 - DNA, 867 bp, Acinetobacter baumannii
gtgcgtgccgagttccatgtacttaaaaatattccaactcaacttgcaaaaggtatatttgttcctgataagagctatcaagcctggattcgattttcgaatgcatctaacgatgcatctcaagcagacattgaaaaagatgctcgcggcatagccataaaagtcttaggcgtaccgggtcagaaaattttagaaagtgaaaaagaagcgacaactcaagattttattatgatcaatcatcctgtctttttcgtaaatgatgggcaaagatatctttcttttatgcaggatgttaacagcaaaagtactctcagaaagcttcatattccgtttgctttagggcttaaaggaacaatcaatgctttaggagcgcataattctaaaatttctaatccattatatgtacgttactggtctatggtgccctatcaattaggattagataatgaccgtcaagctgttaagtactccgtaagaaattgttctaaggtgtctacatctctacctgaccatccaaaccataattttttaagagctgcactacaagatacgctgcaaaaacaagacgcttgtatggagtttcttatacagccaagaacttcaacccaaatgcaagttgaagatgcaatgacagaatggaaagaagcagaagcacctttttatcaggttgcaactattcgtattccaaagcaaagctttgatacaccggaacagaatcaattttgtgaaaatctctcctttacgccgtggcatgctttacctgagcacaaacctttaggtgcaataaacagattacgtaaaattatttatgaaaatataagtaaagtgagacacgatatgaactcggcccctcgacaagagccttaa

SEQ ID NO: 54284 - DNA, 834 bp, Acinetobacter baumannii
atggtgatttgtatgaacaattctgcatttattaaaaatggcattttaaaatcttttttatttgcaagtacattatcacttgttacacctgtgatggcacaagcaacttttctaatttggccaatttatccaaaaatagaagccaatgaaaaagcaaccgcggtttggctccaaaataccggcaagaccgatgcgatggtgcaaattcgggtgtttaaatggagccaaaatggtttaaaagatgactatagcgagcaatcagaaattataccaagcccacctgtagctaaaattaaagcaggcgagaagcatatgcttcgtttaaccaaaagttccaatttgccagatggtaaagagcagtcatatcgtttgattgtagatgagttaccgattcgcctttctgatggaaatgaacaagatgcttctaaagtaagtttccaaatgcgttattcaattccgttgtttgcctatggaaaaggtataggcagtggcttaactgaagagagccaaaaagcgaatgcaaaaaatcctttagccaaacctgttttacagtggtcagtccgcaacaatgacaaaggccagtctgagctatatttaaaaaataatggacagaaatttgctcgtctttctgcgcttaaaacatcaaaaactggtcatgatatttctttaggaaaagctgctttcggctatgtgttatcgaatagtactgtgaagtttgccattgataagtcgactgcaaatgagttgtcaaaaacctctaaaatttacggtgttgatagctctggcataaaacaagagttgattgaaatcagcaaaatggaggatccaacatga

SEQ ID NO: 54285 - DNA, 180 bp, Acinetobacter baumannii
atgttatatggtgaaactcatatccacattgcgaatactggaaataatgaggttactcttcaagaagatgcactcagttctttttcttacagtatgactttacctctacgatatttcaccgatccaatattgttagaatatcaaagacgaatttttatgaatcagggtatggaaaaatga

SEQ ID NO: 54286 - DNA, 207 bp, Acinetobacter baumannii
atgaaaaaatttctatggtggggaatgagcttttacttaagtatgagcttacacacagttgctttagctcaaagccctttatcaactatttcttttaatcaacctctaaaatacaagattgattatatagatccacgctttcatattaccaaggaacagtttgttcaaattggtaaagaagctgctgaaatttggcagaaagaatga

SEQ ID NO: 54287 - DNA, 372 bp, Acinetobacter baumannii
atgaaacctaataaactaattttaggcgttattgcctgtacattaggcacgtctatgtatgctcatcaattgcatgcagagaatagcttacaagtacctaataatggcaacagcaaagatagccaaaccttgagaacactgtttttcagaacattgattaatcatatctaccttttcaagggagctatcgactactattgttcctataacaaatcacttagtacatctgaaaggttttgcattttgttccgttcaattaatctggctgacatgcctaaagaaatggggacttccacatctaaaataggattatcacctatgaataaagcctcatacatttggcaatctaatttcgttcgtaatgtttcataa

SEQ ID NO: 54288 - DNA, 606 bp, Acinetobacter baumannii
atgaatcaaacacctaaagtaataattttcgatgcatttggaacacttgtaaaaattggtgaaagccgacatccgtatcgtaaacttatgaattggttgaaagacaatggaagaaaacccactacaaatgacgccaatatcatcatgtcgaataatgtggatattgaggaactggcggtgctctttgaaaaagctattcctatagaattattaaaagaaataaatcatgaccttcaatttgaattgaatacgattatgttgtttgaagatgttattccaactcttcaaaaacttaaggatcttggttttaagattgccttatgctcgaacttagcaaaaccgtatggtgatcagctcaaaactattcttccacagaatttatttgatgtacttgttttaagctacgaggttgatgcaataaaaccagaaataagtatttatgaaacattacgaacgaaattagattgccaaatgtatgaggctttattcataggtgataatcctattttagatgtggaagtccccatttctttaggcatgtcagccagattaattgaacggaacaaaatgcaaaacctttcagatgtactaagtgatttgttatag

SEQ ID NO: 54289 - DNA, 264 bp, Acinetobacter baumannii
atgaatgcgcttaaagaagaattgtggaaacaatacggatattggtgtcaagaaaaagatatgcagccttatattagtaaagaagactttaaagtaagtgaaaatttctatattaatcaatcaggcgggattacatttgattttcagctttacgaattggctccatatgccgcaggtcctgtgagtttagaactctatgatacagatcaactgataaaatcagattttttaccgccaatgcctactttaaaaactgaactgtag

SEQ ID NO: 54290 - DNA, 537 bp, Acinetobacter baumannii
atgaataaaactattcttggcttaatggtagtaccacttgtattgagtggatgtataaaaaaagcagaggaaaaaccaacagaaaaaatggaaaaaacctctactataaaagcaactgaacagccaccaaaagaagaaaatataattcctgctatgctagtacgtaattttcttgtgaagtttcaacaacccaaaatttgtgctccaaatccagatgttgatggaattgtatgtacctctaaagaagcgattgcacttaaaagtaatattgaatggattgatcaagtaatcgataaggaaatccgtaaagattatgcagatgctcttatacctccttcagaaaagcaaaagcaactaaatcaaacccaagctgaagggtttaataactggtcacagaatgtggtttatcgctttaatggacagtttggtcaatatgtgcaaatttcgaaagtaagttcagaatattctggcggggctcatggtatagcaacttttgaagattatatttttgacttaaaaagtcaaaaaacgcattga

SEQ ID NO: 54291 - DNA, 681 bp, Acinetobacter baumannii
atgcaggcagactggtcaatttatccattttcgataccagccgttaatgatattgaacaattaaccttccatccagacgttactttttttgttggcgaaaatggttctggtaagtcgactattatggaagccatcgctttggcacttggcttttccgaagaaggcggcactctaaacgtgcggcttaattcagccagtagttcatcaaatttatttcagcatttaagaatgattaaaagctttaaaaagccgaaagactattattttttaagagctgagagttattacaatattggcacatatatgaatgaattgaactatgtaaaaagttatggtggcaatatccatgcttgttcacatggtgaaagttttttaaagttgctcactcataaattacaaggtgaggggctttatttattagatgaacctgaagctgctctttcacctaccatgcaatttgtagctttgtcggctattcatgaattatgcaaaaaccagtcacaactcattattgcaacacattccccaattttactagcttaccctaacgctaaaatctatcaattttctgacacagggattcgtgaaatccagtatgaacaaacggaacatttccgtgtgacacatgattttttaaataattaccaaaagcgtatccagcaaatcatagatgaaggatag

SEQ ID NO: 54292 - DNA, 618 bp, Acinetobacter baumannii
atgtcaaaaacgttattgcatatcgatattcttataagagttttgcacatcattattatggtttcgttcgttggtgcttattttacaggggataacgaggagttacatcaggtgcatatgatgtttggttatattctcctgattggcattattacacgggttatttggtactttttaagtccacgtgtttcaagtactgcgccatttggcttaaagaagcggagcactatggcatttaatgcaattaaaaagtcctttagccatacaaattcagtcagtcttttttcgaaaaatacaattcaattgttcagtattgggctatttcaagcttcgatagtatttattttcatactcattcctattgttgtagcacttggatacggaacagaacactttacttatgctttgagagacttacattcatttttcgcaaacttatttttagccttggttatattgcatctttcaacgcttattttaaatagcattcttgctaaacgctttcagggttggacgatgcttaaaatgacatgggcagataaaaaaataactaaatttatgacattattcatcttatttcttataggaggttttagctttatttatttaagaatgtaa

SEQ ID NO: 54293 - DNA, 267 bp, Acinetobacter baumannii
atgaggtgtgcaaagccaaatagtccttcagaaatcttatacgtaggttcctcgataaacgatctaataaatcgtttaagagaacatacaacaaaagtgagtagtttaaaaacttatgctttgagattaaataactggtttaaaggagaatatcaaattcatattaaagaatatgatgtcagtagagatattcttcaattgattgaagataatctagcttatgagctaaaaccagcttttggaaaaagaggaccaaatggtaaatag

SEQ ID NO: 54294 - DNA, 672 bp, Acinetobacter baumannii
atggctcttaaagaccgtttaaaagattcaaggattaaagctaagaaaactcaggcagaagttgctgaagcagtaaaaatgtctcagcctgcctatcaagctttagaatcgggaaagaatttaaaatctgcttttcttccactcattgcacagtttttaggtgtagacgcttattggcttactactggtaacacagaagactcttttagagaaagtgatgtatttagtcccaccgttgtcagcagtgatgtagtagatcaatatgtctggattgaagtagttgaagcaagtttttcttgtggtacaggtgaatcaatcgaatttcattttgatgcaattaatggaaaaattcctttccctgcttctttctttaaagaaaagcgcgttcctcaggaatgtatgcgcattattaaagctaagggcgatagcatgactgattacatcaaagatggagatttagtcggcattgatatttctcagacagaagtgattgatggagaaatctatgctgtttatttcgctggcgagggaatgattaaacaaatttttaaagaagctgatggctctttaattttgcatagtttaaatgaaaaatttagagaccgccgtgtaactgaagagaacgggaaaaactttaaagtaatgggccgtcagttctggcgagcaggttaa

SEQ ID NO: 54295 - DNA, 522 bp, Acinetobacter baumannii
ttggttgcggcggcaggacgtatatttgcggccaatgaaataggggaaggttatgctgttgtcaccaatgccggaccgcaaagccagattataaatggtggagtaaatttaggagaaactgataagtcgggaagattcttaattgctaatttaagaccgtatcaatctcataatatttatctagatccatcttatttaccattggaatgggatgtgacgactaccaatcagaccgcacttgtgggctatcgtcaaggaaccttggttgactttggtgcacatcgggttatttcaggcttggtgagaatagttgataaaaacaatacaccattattaccaggctatagcgttcgaattaatggacagcaagatgctgtagtgggctacgatggtgaagtattcgttccaaacttattaagacaaaacaaacttgaagtagatcttctcgatcatggtacttgtcaaattaatttcacttatgaaagtaagcaatacagtgctaaaaaattagggagcctgtaa

SEQ ID NO: 54296 - DNA, 366 bp, Acinetobacter baumannii
atggtttatgatagtgcaacgacacaatatattgatattcaggaatgtagaaaatattttgataaaaaaattaaagaaagtaatctcggacttgtcgtaatgaattcttgcgatcttaatgaatatgcaggtgagaatgaaaaacgaggaggttattacacttcatctttaattaaatccgcacgtgattgggccgataaaaaactagtaactatcaacctacaaaaaaactacgcaacttattcaactaaaaaatcccatgattcagcttcaactatagtaaaaagattaagtgctgaccgacaaaatccagtatatgaagggccccggtcagatagctcattcccattcacaattgtcgcttaa

SEQ ID NO: 54297 - DNA, 447 bp, Acinetobacter baumannii
gtgcacttggcgcagtggtatctacagttaccacggcattgcctgtacccacattacctgccgggtcagtcgctgtcacagtcacggtatgcggaccgtcagtcaacactggaagtgtattgtctgcaagcgtccaggtgccatcaccattgttcaccgctggataagccacaccatctacagtcaccacaactttcgctgtcggatcgttcactgtaccggttaatgcaggtgtactgtcattggttaacacgtcactcaaggcaacggtcggtgccaatgcatctacagtacctgtacctggtaatgatgggttacctgctgggtctgttgctattgcagttactgtttgaccatcagtcaggtcacctgggtttggtactgtccacttaccatccgggcctgcaactacagttgctgttgtgccatccgggaagctcacggtaa

SEQ ID NO: 54298 - DNA, 351 bp, Acinetobacter baumannii
atgcctttaataggttatttgtatgatgaggggaattctagattactatttgtttctgttaaacaatttacagtttttcatgataaaaagacaatatttgttgataaaaaattttcttcacgtattcctgcagaaaatatagagacagaaggccaacaagataaagattattttaaattaaaaaatacaaatattttacttttgggattaggaaaaaatgcatgggtagagtttttaatagaggataaggataaggataaggataaggataataaacgagtagaaataccaaatgatgcaatttatattggtagttttgaagatattaaaaagaatacagctcctaattga

SEQ ID NO: 54299 - DNA, 357 bp, Acinetobacter baumannii
atgagtagtaaacttacagcaattagtcttgttgcagtagatccatttagtggtgttgatttttattacatctctcctgttgtaaaagattattttgttgaagcgcgtgcgaatgctgaaaaaacgcttgccaaggtaaaagccttatgtgctgaagaaggcgttgatattgatacacaaattattcaaggtgaaatctcatctgatggcattttaaaagctgtagaagacttaaaatcagatctgatcgttattggttctcatggtcgcaaaggtttccaaaaacttattttaggtagttttgcacaagatgttctaaacagcactaaaatccaagttttggtggtaaaagaataa

SEQ ID NO: 54300 - DNA, 357 bp, Acinetobacter baumannii; identical to SEQ ID NO: 54299

SEQ ID NO: 54301 - DNA, 339 bp, Acinetobacter baumannii
atgaatattaaaacgcttgattggatgaagaatttttttaaatataaaactaatatggatgaattggaaaaattatatatttatatggaagactatcttatgtctggggaaggagatataaaaaatgaattatgggctgtaatggaatctcgattgccaaaattttacttaaatcttgataggaatttatttttccatacagattggcaacgtgagtttgaaaatcaattgccagacaattggaaaggaaaggcatccagtcaattttggtcattaattccagattcatatcaatattggattattaatggaatgaatttttggaaattatatggttag

SEQ ID NO: 54302 - DNA, 423 bp, Acinetobacter baumannii
atgatgacgacgatgatgatcgcggaggccgctcaggcggacgaggtcgtggccgcagccgtgatgacgatgatgatgacgatcgcggaggccgctcaggtggacgaggccgaggtcgcagccgtgatgacgatgatgatgacgatcgcggtggtcgctcaggcggacgaggtcgtggtcgcagccgtgatgacgacgatgatgatgatcgcggtggccgctcaggtggtaatcaaaaacgtgatgcctacggacgttttacgtcttaagcagaatgttttaaaaacaaaggaggcttttgcctcctttgtttttagcttgcttactgtatttactgagggagaggttgtaggccttttacaatatcaaggtattcagaaccgtttaaccaaaaagattttttcaaaaaaagtgtcgtcataa

SEQ ID NO: 54303 - DNA, 234 bp, Acinetobacter baumannii
atggatatttgtattggcggtattttaaacggtaaagtaagaaaaattaatgaagatagtttctgtgttggaaaccctcattcagatgatataaatgagtaccataagcaatactttcatttaggtggaaagcttttgtcattttgggtatacagcgaaataaattatcaggaagcatcacgaatagcggaaagtttcttaaaaaaagaacaaagatctttaagcggatgttaa

SEQ ID NO: 54304 - DNA, 264 bp, Acinetobacter baumannii
atgattaataaaggaaaagagcttttacatgcagatatgtatgttgcatgtacgggtctactcaaaaaagggggttccgaaacacaagaaaaaccagtaggaacgttcttttattcaatatattatcaaaataatttttataattttaggcgtgtattaaaaggaccagcttttttaaagcttagaaagttgacttactacattactcaagatataaaatttattatattagataaaaaacaccttaacctatataaaagataa

SEQ ID NO: 54305 - DNA, 180 bp, Acinetobacter baumannii
atgagtgattacaacatagatttgagtgtaatgggctttgctagttttactataactacagcttgtagtgaagagcatgcaaaagaattagctattcaatatttacaacaagactatccagacttaacagccgttgttgttaatgctgaagaagttaaagcggaaagtaaggaggggtga

SEQ ID NO: 54306 - DNA, 609 bp, Acinetobacter baumannii
atgaacattctccagcgtagtgaagattggcattcagaacgctgtggcaaagtcacagcaagccgtgtaaaggatttaaatgcaaagcctaataaaggtaaagctttaaatgcactgggtttaacaattctagctgagcgcctcactggcgttcagaaggaaatcccaactaattcagtaatgcaatggggtatcgataacgagcctcatgcaatagcggcttatgaaaatgaaacgggcaactttgtagtaggtacaggtttaattgaccacccttacattgaaatgttcggggcttcaccagatggacttgtaggtgacaaagggcaaatagaagttaagtgcccagacactacaactcatttgaataccctgctgaccaagcaagtgcctgatgaacacatccctcaaatcactagtcagttggcttgtactcgtcgtgaatggtgtgactttgtgagttatgacccacgtctaccagaaggattacaaatcattattattcgcgtctttgctaatgacttggctatcgaagcattggagcaagatgttcgtaaattcaacaaagctatagatgacgcaattaaaactttgaaggtggcagcatga

SEQ ID NO: 54307 - DNA, 1059 bp, Acinetobacter baumannii
atgaatgcgccagtaaatacacaagttaatgaattacaagtattagaacaaaacgtaattgtagcggctttcgctaaacgtggtggtacagatgaattgtatgaacgcattgctcaagaagttcgttctcatgtgcctgatgtgagcactaaaaaaggccgtgatgcaattggttcacttgctttgaaaattagtaagtcaaaaacacttattgagaaatgtggcaaagaattagtagctgaacaaaaagctcaaatcaaattgattgatgatgaccgcattgcaatcgttaaaaagttcgaccaattgcgcaatgaggttttggcgccacgtgatgcttgggaacaagctgagaaagatcgtgttgaaaaacaccaacaggtaattactgggcttaagaataatggtctagtttctagtgaagcaactgtaagcgatattaaagaagtaatctctattgttgagaacacaattgttgattcatcactagaagagtatgaacaagaagcaaaaatagcgaagcttgaaacattagagaagttacgcactaccctttctacacgtgaacaatatgaagctgagcaagcagaattagagcggctacgcaaagctgaacaagaacgtttacagcgagaacatgaagaacgtattgcatatgaagcagctgaaagagcccgtctagaagctgagcgtaaagctaaagaagaagccgaacgtgtagaacgtgaaaagcaagaagctattgctaaagcagagcgtgaaaaacgcgaagctgctgaacgtgaagcccgtttagttgctgaaaaagaagctgctgaattacgtgcacaacatgcagcagaagcagaacgtaaacgtattgaagctgagcaagccgcaaagctagaggccgaacgccaagcagaagaagcgtgccaagctaaccaagcacaccgtaaaaaaatctgtaatgaagcacttaaaggtttattggctttgggtattgatgaagcaaaaagcaaagagattttgcaggcaatcaataaaggcctagttccacacgtatctattaagttttga

SEQ ID NO: 54308 - DNA, 381 bp, Acinetobacter baumannii
atgaatatgttagcccttaaaccagagttgctatgcccttctttcccttacttagatatgtctactgacattcaagttgaaggtgaaacggtttatttcgatctaacttacggctgcaatgttcttaactgccagattaaagcagaaacgacttatgacactcgtgaagtaactgatcagttcagtggttgtgcccgtgaccaagaatatgaagtgcttgtggtagacacaaaaactcatgctgtagtgactgataaagacggcattgagtcaccaattggcttacgtttcaagctaacagacgcacaagtgaacagcttaaacgagcagcttaaatactacgccgaagaattggcagatgaagaagcgggagtggtgtga

SEQ ID NO: 54309 - DNA, 465 bp, Acinetobacter baumannii
atggaaatctattcaattgaacatggctgttgtgaagacgatgtttgtgggcgcaatggctgtgatggaacgattgttaaagatactgatgctgagagctgtagctgtcatatcaacccaccttgcagctattgccactgcgaagttcagtgcaacaaatgtgattggtcttcacgaaaagaaaacgtacaagaacaaagcaaaactgcaccaccaagtgattggtatatacaaatgaagaagcgtgaaaaggaatttcgtgatcagttgaacgacgcttcctttgagtttgacaaggtttcattcagaacggaaagccactctaacagttctatgaaaaagataggtgctttccctcgtggaatgtctagagagcagcttaaaaaagaagttgatggaacatttggcgggcgctttgagtgggttactgaaaatcgtttctctttcatagcttatacagactaa

SEQ ID NO: 54310 - DNA, 201 bp, Acinetobacter baumannii
atgacagaaaaagcattaatagcaaagctgatcaagaatcagaaccgcaagcagacgattagacattctaactctggcttggtaatggcaagcgtatttgtccttttggctttcagcgcctttgccttcttcaaagcagatgcagaccaaacccaaaagcatcaagagcatgttttagttcaggttgagggggtgaagtga

SEQ ID NO: 54311 - DNA, 228 bp, Acinetobacter baumannii
atgacagataaagtagttttaaatggaccattggaattaaaaaataactctgaagctcgtgttgcttatgaattgatggtattaatcgccaataaggaagttggttttactatggctcaaaataaaaatgtagccgacgaacagaagtctagagattactggttaaaactttattcacaatgccatagcgttgctagaggaaatgagcacgttcctcaggaaaactag

SEQ ID NO: 54312 - DNA, 294 bp, Acinetobacter baumannii
atgagcaaaaaatacaagccaccggaactacacgaatatagaggcttaacaagctctgagcagacggcaatacaccaaatgctcatctcctatgttcgtgaggaaaattgtcgctttaacataatcatgtctggcaaagcagaaccctataatctggtaaaactaactagtattaattttgagaatgaagcatcagcaatttgggttaattttgaaaccatcacaggagagcaaatagctttacccattggctttctttcaagaattgagttttcagggcagcaagaaatttaa

SEQ ID NO: 54313 - DNA, 699 bp, Acinetobacter baumannii
atggatactgttgcaagaagacgcagaaatctgcgaaaagctattgatgctttaatcgaatctgggaaatttaagagtgatgcagctttttgcgaacattacgacttaagtacgagccatatttcacaaatgattaatggtcacggtagttttggcgagagagctgctaggaacttagagaaaaaagtaggctggcctaatggttatttagatcttgaaaaccaagaagatcaaagccctattgtgtctgaaagtaatgttggaccaaccaagaataaccttcgaacaattcccctattagattatgtccaagcaggtctattccatgatgttggctatgatggaataaaccctattggagaaagctacacaacatatcaaggatataagccagagtgcgttttctctcttaaagttgaaggaaatagcatgtcaccagaatttaaggctggcgatgaaattgttgttgatgcatctcttgaacctaaacctggatcgcttgtaattgctcaagaagtccaacatggaatagcaagaacaactttcaaaaagtacagagtgattggtattaatgaatttggagttgatgttgttgaactagtaccactaaaccctgattacccaacctacaactcaacacaaattgaaatatcaattattggggttgtggtgagacacaatagggaaataactcattaa

SEQ ID NO: 54314 - DNA, 249 bp, Acinetobacter baumannii
atgtcttcttcaaacacagaacagcttaaagcttacttatcgaagatgactgttgaagaacgaaaagcctttgcaaaagcatgcctaacgactttagggaatcttcaacaaattatttatgtcaacaaaaaatgtggtgctgcattagctattcgaattgataaagaaagtgaaggaaaagttccttgtgatgaactttgtcctgatgtcgatttcgattatgtccgcagccaagcattaaccgcttag

SEQ ID NO: 54315 - DNA, 375 bp, Acinetobacter baumannii
atgagcaaagtatcaaccgaattgagtgcaagggctagaaatgaagtttctagagttttgcaagcccttgcatcaagcaatcaaagtcaggttgctgaacagttggggattgatccaagcacattatcacgaatgaaaaatgatagaaaatccaatggcttgactgagcttgagaactgtttagtgctgttggacattcttggatttaagactgtcctcaagaaatatcgaatgattagcgaagaaaagctgaatgcgctttttgtgatgtcaaaagcgtggatggaaagcaagcaaaccattgacgatctttttcaagatgacattgaagatttcggaatgtgttttgagcttggttacaaagaaaaagcctga

SEQ ID NO: 54316 - DNA, 798 bp, Acinetobacter baumannii
gtgaaacatcctctagataatcaaacagtcgattggtgtgaagaattaaaaaataaaggtggcttaaatgagttggctcttttcgcaggcgctggtggcggaatactcggatcgcatctcttgggatggaacacaatctgcgcagttgaacgtgatgcctacgcaagccaagttttggcgcaacgacaaaatgatggatttctcaaacctttcccgatttggtctgacattacaacttttgacggaaaaccatggaaaggaattattgacgttatatctggcggatttccatgccaggacatcagcatcgcaggaaagggtgcaggacttgacggagaacgttcaggactctggaaagaatttaagcgggtcatttgcgaaatacaacccgagttcgcattcattgaaaacagtccaatgctcattactcgtggactcgacagaatcctctgtgatcttgcccaaatggggtttgatgctcaatggggaattatttcatgcgccgatattggtggagttcataaacgagaacgcacctggattgtcgctaccaactcttggagcaaacgagggaaagggttcatccaaaaacaggtatcgagggtcaaaggatttccgtggggccaagatgtgcgaagcattgaggatttgcgaaacagatccgacttacctcaacccttactttgcagaattaaccatgaagtggcctttggggtggacagacttaaagccattggcaacggacagtttccagaagtggctagaagcgcattcagaatcttagggggtgcagcatga

SEQ ID NO: 54317 - DNA, 252 bp, Acinetobacter baumannii
atgaaagcaataaaacgagttaaagcattccaaaacatttttgacattttgttattcgctacacatgcaacacaacctttcacgatgaaggatttgcatgaccatgtgttagatgcacctaacaacactatccagtgctatgtgcaggaattaattaaaagcggctacttggaaaaggactcatacgcaacttacaaagcaactcaatacgcaaaagacatcctgaatgttaaaggggagctgaaagcatga

SEQ ID NO: 54318 - DNA, 627 bp, Acinetobacter baumannii
atgaaaccagaacagtttattcgtgagtcttcaaagcttgtgtatggcgtaggtgtaaatgattgggttgggactacctatgctgctgaaacaggtgggcacattccagaatatcgcttgtggcacagaatgcttgagagaactcactgcaaaaaatatcaggaacgtaacccaagttatagagattcaactgttgatcccaattggttgagtttcacctcatttattaacgatgtttctagtcttaaaggttattcggaagccattactgaaggatggaactttgataaagacattatctgcaaaggcaacaaacactactcattggaacgatgctgctttgtaccaaaagctatcaacgtattaattacgaacagcaaggctaaaagagggatatacccaattggggtgtgctttcataaaagagataacaagtttcaggttagtgtgaaggaaggaaacaggaacaaacacatcggaagcttcaataatcctacagatgcattctatgcatataaagcagcaaaagaagcacacattaaggccgttgcaaatgaatggaaagagcgaatagacccacgggtttatgaagctctcatgtcttacacaattgatattacggattga

SEQ ID NO: 54319 - DNA, 276 bp, Acinetobacter baumannii
atgagtgagtttaaagagtttgaaatcaacgattgggttaaggcaaatgatggtcagtttggatttaacgagctcttcaaaattgttgatttcttcgctgatcgaaacggcactttgttagcagtattagatgatggggattgctatccattatcttgccttgagcatgcctcagaagctgagattaaggcaggccaccgcattgacaacgacatgggcgacgactcccacatagaaaaccacatttcgccgaattgcaaactaattggagaatag

SEQ ID NO: 54320 - DNA, 465 bp, Acinetobacter baumannii
atgacaactatgtttgttgatacaaatggagatatgagctttgtagataacgagcgtcttaaattcatcatgcattacttaaaacaaggtgccaatgattctctagttgaaatgaaggatgggcgatttgttcgtgaagacagtgagctttctttcactgaaatatggcttccatcagcagaacatcaacaaagaaagattgatgaacagcaatcgaaagtggaggagctgcaaaagcaattcgatcagcatgacaagttgctacttcaaagaaataaagatgttcaggagctttacgacatcaatgttaaacatgcagcagaaaaggaagagctgcaaaagcgggtggatcaacagggactaatcattgcaaaggctatgtctattgcatcagaccttcaaaagagctggtcaatgtttgagattggcaagaagttagagcaagcgctcaagggggaaggatga

SEQ ID NO: 54321 - DNA, 285 bp, Acinetobacter baumannii
atgtgcgacatagaaacattaggttggaccgaggacgaaaagtttttcgttgttagagtgaatcatgaggttgttatttgggaggatgacattcgtggtgtttgcggtatctataactgcgataagtttgcaggcaaatattgtggatgtcgctttgtagagaagtttgcacttgttaatgggaatgatgtgtatgtaagtgctcctgttattgatcaagagtattgcattgatgacccgtttataaaaattacattagcagaatttaaagaattgaaaggttag

SEQ ID NO: 54322 - DNA, 441 bp, Acinetobacter baumannii
atgaatgcggcagtagtaacaccagtaatggattggaataaatacacaattgatggatggttggagcaatttggcgcgtggtgcgaaacggttcgtatgaagggaggggatttgccagatgatcttcatatcaatcaaatttactggttaatgcgtgaagcagacagagagcttccaaaaggtaaatcttacattcgatgtgagattaatgactttgaggcggatcaagtacaggctttgttgcgaagtgtcctaagatcagaaaaagtggattatcaggctaaatatgcagtgatgtgcttagttcgacataaggtggaaaacagatcattaagtgctgtgggtatcatcacgaagcaatctaaggcacaagtaaatatcatggttggatgtgcaagattctttcttcatgcacatgacaaaagattaagaatatcataa

SEQ ID NO: 54323 - DNA, 792 bp, Acinetobacter baumannii
atgactggaagcaattctattgtcatagcggaagctatgcaaacaaaaagttcaagaacaaaattaacacaggagcaatatattgaaaattgcatacaaatccatggcgacaagtatgattattcaataactaacttccagagactatttgggaaggtatctataatttgtaaagttcatggtgtttttgagcaaagggctgatcgacatatgcgtggaatggtttgctcaaaatgttcaaccagggcgaagttaacaaaagaagactttgttagaaaaagcagggagaagcatggtgatagatatgattacactgaaactgtatatgtgaagtctactttaaaagtaaaaattaagtgctacaaacatggtttctttgaacaaagagctagcgcgcatcttttaggtcagggatgtccaaattgcttcttaagccctttaagcaagacacagtatcaaaaattgtgtagtgaaaaatatcatggcaattccagtatttatcttgttcgttgttttagagaaaaagaatcgtttataaagatcggtatttgtgcaacaactgttgagcagcgctttttaactatttccaagatgccgtacaagtatgagcttataaagcaaattgaaggaagggcttccagaatctgggatatggaaaagaagattcacaagttcttatcaaaatttaaatattctccaaaaattggttttgctggaatgggtgaatgctatagagatgatgatttagttcatgaaaagtttgaagaagtgttgactcgtttaaacgcgtag

SEQ ID NO: 54324 - DNA, 159 bp, Acinetobacter baumannii
atgaaacagtggctaaaaggcttcacgcacaattgcattgttcacccacttatgatgtttattccgaaaaagtgggcaaacgagttgcatgaccgtaatgctaattgggcattcggtttagatagatatgatgagcttaaattagaaaataaaaagtga

SEQ ID NO: 54325 - DNA, 486 bp, Acinetobacter baumannii
atgaaaacagcagtgttcacaatcaaagatcactcggacattggtaaaacgattaactatctgcataacaactacactcaagctaattttgagaataagccgcttgttgttgagattaagccatttgagaaagatcgatctaaggctcagaatcggctttattggaagttcttaactcaatgggcaaagcatcaaggcacagataaagatgcagagcaccttttctttaagaaaaagtttcttgctgtgatcttctaccgtgatgatgttggtcagtatagaaatacattcgatgcggtaaaggttctaaagaaacagaatcacccgatgtatcagcaagtggcagatgggttgaatgaattaatcacaacgactgacgcaagtgtcgagcaatttaccgagtacctaaatgacattcatgcattctgtttgaagcatgggaaatatttaagtacaccagatgatttgatgtttgcaatggagtaa

SEQ ID NO: 54326 - DNA, 516 bp, Acinetobacter baumannii
atggcgaacctaacgcctaaacagcaaaggtttgtcgaagaatatctgatagacctgaatgcaacccaagcagcaattcgagcgggttatagcgaaaagactgctaatgagattggtgctgaaaacctagcaaaacctagtatcgcaaaagctatccaagacgcactaaaagagcgttctgagcgcgtccagattgatgctgattatgtcttaaagcgcctagtcgaaattgaccagatggatgtattagacatcatggacgatgatggcaatgttaagccgttgcgcgattggcctaagatttggcgtcaatacatatcaaacatcgaaacaatcagtatggatgatggcgaaggttggcttaaaaagatcaagtggcctgataaggttaagaatcttgagttattgggtaagcacatctctgtaggtgcatttaaagacaaggtggagcattcgggcaaattggaaattgagtcactttcaagcttgatggatgaattaagcaaagaggattaa

SEQ ID NO: 54327 - DNA, 1404 bp, Acinetobacter baumannii
atgacagttagtactgttcatccggattatgcaaaggcaatgccggattgggaatttatggattatgccttgggtggggaacgttgtgtaaaagagcagggtgaaaagcttttaccaaagtcccaaggcatgataatggctgaagaagtagatccaaaaaataaatgcatctatgaagcgttcaaacaacgcgcagaatatcctgaatgggtgcgtgattctaaaagagcaatgattggtttggtatcaaaattagagccagatattaatattgttgattcacggttaaaaccattgattgagcaggcaacaacagatgggtttggcttaaagcaattattccttcgagtagtagaggctcagttgtcttatgcacgttgcgctttgatgcttgatttcgacgattcaggtaagccatatattgctttgtattgggcaaaagacggcattaactggaaagaaaagactgttgcagggcgaacagacttgacgctttcagtatttaaagaagctcacgataattctgaagatgaatttgctcacaataaagagtgcttttaccgagcccttgatattattgacggcaaatacagatcaagattatttactgatgataatacagtcagtgaagaaacatatccgggcttaggtaataagacactttcgtttatccctgttgtttatgtcggcagcacgaataatactccttcaattgacgaaatgcctttaatgacaatggctaaggcggctattaagtattaccagttaagtgctgaatatttccaagagttgcatttaactagtcatcctcaaccttgggtttcaggtgttgatgaagacaagcctttgcgtgtgacgggcccaatggctgcatggcaattaccacaaggtgggcaatgcggatatctcgaaattcaaggtgtaggaatagaagctaaacgcactgcaatgcgtgaccaaaagaatgcagctttagaagctggtgctcgtgtaatggacattggtggtactgaatcaggcgaagcacgcaaagctcgtcaagatgaccagtattcgacattgtatggaatggttattactgctgctgaagcaattgagcaggtcattaagtatggcgcattgtggttagggcttagtgataaagattaccgttttaatgttaagcctgactttggctcattaggttttgatgtaaatcttgctaaacagctctatgaggctgtattggggaataaaatctcaatggaaacttattgggattatattcgtactggaaaaatccctgatattgaatattcccaagaactagagcgtattgaaactgaaatgaccaacagtcctatgactggatatgttgcaggggtggctaatggcaacgcagatgtcacaacaggcactacttga

SEQ ID NO: 54328 - DNA, 1086 bp, Acinetobacter baumannii
atggcaacgcagatgtcacaacaggcactacttgatgctctagtatcacatcaagcttacctttaccggctctcatctactgaaattaacaatctcttaattcagtttgattcactctcaaatgagatgatctcaaagttaagagatttattagatgacttgagtgacgctgaaaaaacggcattaatggcaggacaatacacaacgcctgctttgaaagaagttagaacattagttcagacttggcaggcaaatgttgcagcaggattgcttgagagcttcacagtaagcgcaacagcgttggcagtatacgaagctacatatcaggctaaaaccctcgctaatcgcaaaatagagccaaacagcaagacactattcaacaaggcaaagaaaacgcctttaagtggtggtgtactgcttgattctatttttgcgcgaattgctgatgatgctcgtgtgagagttgagcaaactattcgggatggcctatcgcagggtcagacaaaccagcagattgttcagcggattaagggtaagaaagcacttaattaccaagatggcttgcttgatcagagtagaaaccagatttctacaatggttcgaacggctcgaagtcatgtttctaatgttgccttgaatgaaacgtatcaatccataggtgttgaatatgtaaagttcattgcaacactggatagtcgtacttctaaaatctgcatgggttattcagacaaggtttacaagaaagatgaacctcatccggtgccgccacttcacccgaattgtagatcgattctaattcctgtatctgatgagtcaggcaaaacgattgggatgcggccattcaacaataaagtgaatggtgaaggcgaaataggtgttgtggattcaaatacaactttcaaaggttggtttgataaacaggatgcagctttccaaaagtcttggcttgggcctacaagatacaaactattcaaagagggtaaatactctctggataagtttgtagaccccttaacgggtcaaccattcacgcttgctgaactcaaaaagcttgatgaagaaatgtttaagaggttgggattatga

SEQ ID NO: 54329 - DNA, 213 bp, Acinetobacter baumannii
atgaaagtaattagtcgaggtgtgctgcccgagttgcagacctatagagactcatgtggcaagtgttattcagttatcgaatttcaaaagaatgagttgcgagtcatgagcgatagaaacgaaactatctatgtattgaattgccctgtatgtcgtaacgatatttggattgcatctcaagcattaaagccagttatttatagaaatatgtaa

SEQ ID NO: 54330 - DNA, 807 bp, Acinetobacter baumannii
atgtctgaatttttaaaacgccaattaatgtctttacaaaatcaagctggtgcagatgggggtgaaggtggttctggtgggcaaggctcaacaaccattaattttgaagatcccgcaatcaaagcacagttagaccaatacgttgaacaacatgtttctggacttaaagctaaaaacaatgagcttcttggtaagaataaatccttatctgatgagctgaccaattttaaaggtcaatttgaaggtctggacattgatgcagttaaagggttgcttcaaaaagctggacaagacgaagaaacgaaattgcttgctgagggcaagattgacgaagtattcggaaaacgtaccgagcgtttgaaagctgaacatcagaagttgtttgatgctgaaaaggcgagagctgacaaagcggaagcatatgcaaataaatttaagcaatctgtagtcaaaggtcaaattgcacaagcatttagtgctgcacaaggactaccagaagcgacagacgacattacagcactcgctttatctaagttttccttggatgaaaacggcaatgctgtagcgatcgatgcaaatggtgacgtaattattggtaaagatggcaaaaccccacttactcctaaagagtggattgaagatattcgtgaatcaaaaccttacttcttcccaaaacctaatggtgctggtggtcaaggcgggaacaattcaggcagcaaaaacacaattaaacgtagtgagttcgatgcaatgaaccctacagaaaaagctaactatatccgcaaaggcggcaatgtaattgattaa

SEQ ID NO: 54331 - DNA, 1155 bp, Acinetobacter baumannii
atggctaacactttaactggcctaacggtcactatttttaatgcgcttgatgttgtttctcgtgaattaactggctttattccagcagtttcatcagacatgacttataaccgcgcagcaaaaggtcaaacagtaacttcacctgtagcgcctgctgcaactgcatcagatatcactcctggtgttactcctccaaatgatggcgatcaagtaattggcaaggtcgatatgaccattactaaagctcgtcgtgttcctgtacgttggaatggtgaagaaaagcttgcacttgataataacggggcatcttacaacacaattcttcgcgatcaattcgctcaagctatgcgtacattggcaaatgaagttgaagcggatgttgcaggtttagcaattggcgcttctcgagcagtcggtacagcaggcactacgccttttgcaaccaacttgaaggacagtgctctagcactcaaagcgcttcaagacaatggcgctcctaaaggtgacttgcagttggtaattgatactacagcaggcgcaaacatgcgtactcttggtcaattaaacaaagcaaatgaagctaatgatgattccttgctacgtcgtggtgtgttgttggatgtgcacggttttgctattcgtgaatctgcccaagtgattactccagtatccggaacaggtgcaggtgcaactactgatgcggcaggttatgcagttggcgcaacttcgatcacacttgcaagtgctggtactgggacaatcgttgcaggtgatgtgattaccttcgctggtgacaccaaccagtatgtggttgttgccggcgatactgatgtttctaatggcggcactatcacacttgcaaagccgggcttgcgtaaagcaattccagcagctgcaactgcaattactgtagcgcccacttcaactcgcaacttggcgtttgctcgatctgcgattgcattggcgacacgtattcctgcacttccagaaggtggtgactcagctgatgaccgtatgatcgtaactgatcctgttagcggtttatcttttgaaatcgccatttaccgtcaataccgccaagtgcaatacgaagtatcgcttgcttggggttgtgcaatggttaaaccagagcattcaatcatcttgcttggttaa

SEQ ID NO: 54332 - DNA, 414 bp, Acinetobacter baumannii
atgtctaagacagtaaaaattaaaccaagccatgaatcacaaggcgagttcgtaattatctctgtagatcaattcaatccatcggaacatgagttgattgaaggtgaatcactaccaattgatgagagtgaagttactaatgatgcgcttgtccctgtagagcaatttgatgaattggctaacaaactggttatctcagaagaacagcttttgactgcaaaagaagaattaatggctttcaaaaatgatgtgccagctatgaaagcacgaattgcagaactccaaggcgatgacaccctggttggcgcaacaaatgaaaatcagaatccatcaacagaaaatactggcgatgcacaggcaagcggtccaaaagcgcctgctaaaaacaacaagcaatcaaaagatcaggaataa

SEQ ID NO: 54333 - DNA, 393 bp, Acinetobacter baumannii
atgattgaatacattaccgtggcagatatcgatgcaaaacttggtaacgattgggcaggcagcgatagtgcaaaagcacgcgcggtaatgattaccaatgtttggctaactaatcttaaattaccagacactacaaacaatcagcctttaaaagatgcaattctattggcagcagttgagctgatacctgatgcagtaaatggaagtctctatacggaagttgaaactggtgtattgagcgagacagtatcagcacaatcgggaacaagcgtttcaaacacctattcagctactcataaaacatatacagctaatgaaaacctagccttagcgattcttaaaccatggttagataagggatttggtaatgtagttctattagtgaagatctaa

SEQ ID NO: 54334 - DNA, 381 bp, Acinetobacter baumannii
atgagaacaaaaatacaatctaaattaggtaaggcttttagcactaagcttgcagacgctgtagatactttcacttgtacccgcaaacaattagtcagctccaatcctgctactggtgaggatacttacaccgaatatgtatatagcggcagaggcgtcctatttggaagctgggcaaaagatttggtcaagcctatagattaccgagcaacagactctaaagcggttctactgcaaaatgaagtgaaggattcagcaggaactttagttaagccagatgttaatgatatttgggtgattgaaggtggcaattatcgagttgtgagttatggtcaggatccatcgtcaagtgtgtggacctgtcagttaaggaaagtctaa

SEQ ID NO: 54335 - DNA, 168 bp, Acinetobacter baumannii
atgtggaaggttgttaaatatcatgattcagttcatgtaatgccaattgatgatcttattgagcatcaacaggaagattgcgaatgctttcctgtatatgaggatggcgtgtatgttcataattcaaaagatggtagggaattaacagagcaattgccgaggtgttag

SEQ ID NO: 54336 - DNA, 399 bp, Acinetobacter baumannii
atggcaatgactttagatcaagcacgacaagccattatcactagagcaatggcatttacaggaattgagcaagaacgtattcaataccctaatggcccattgattagtattcctgtagatggactttggtgtgacttaaatattctatggggcagttctatcattgctggtgtaggtgatactccttgcaccagaagaacaggggttatttcaattaattgccttgcaagacctcaaactaatgaggctgatataacaaagctcgctgatgcttggttagctcattttgaatactttacgagcggacagttagaagtcttacaaggtcaagtgcaaaacctcggcaataatggtgacttcattcagtacaacatttcaataaattatcgcgtcaattaa

SEQ ID NO: 54337 - DNA, 336 bp, Acinetobacter baumannii
atgtctgaagatgttcagtttaatcttaggatacctgctgagctaaaacagcaaattgttgaggcagcaaaaaagaatagtagatcaattaatgcagaagctcagttaaggcttgagaaaacatttgagcttgataacttgccagaaccaacaagtccaaaaaatataaatgaccccgaaaaattggaaaaatgggcgcaatcaattcttaaagaattattaaaacttaatgatctttctgaccgtattatagaattggaagaacaaatagaatattttgagagatatcaaaatgaacaagacaaaagaatcgatggattagaaggtcattattaa

SEQ ID NO: 54338 - DNA, 162 bp, Acinetobacter baumannii
atggcaagatcagaccctcaagtaaactttcgtttacctgaacatacattggagcgatttaaggaggaaactcaaaaggatcgtagaactctaacagctcaacttactatgataattgaagagtggttagttaagagagcatcaaaagaagctgaatcatga

SEQ ID NO: 54339 - DNA, 930 bp, Acinetobacter baumannii
atgacaagtttagcacaaaactttttaaacccaaacaataagcctctagttattggtgactttacgattcgccaagatgaagaaggtcgttttatgttgggtgatcttcataaagcaagtgggcacaaccaaaagcaccagccagctttctttttgagaaaccaacaaactaaagatttaattgcagaaattgaggcatctgcaaatttgcagaccacttcagagaaccactctgcaaatttgcatagtgccgtaaaagtaatcaatggtggtgacaacagaggaacatatgttgttaaggaactagtttatgcatatgcaatgtggattagccctaaattccacttaatggtaattcgtgcttacgattcacttgttatggaatggctattaaatggtaagcaaacaatttcaccagagcaggcaggagttctctacaacattgttcatacacgagcgaatggtaataagaacttaattgttcaaatgtggagtcgtttaaagaatcattttaaatactcagcaagttaccgtgaattacgtgctattcactttgaagatgctaagcactatctagaagtcatggatttaaatgctaagcctgaaaagcatgattctcatgatgttgtagctcagttagatgaatatctaaaaaaccttaatagtcgctatcctgctctaaaatgtccatatgcatatgaagccgctatgaagattgcagatgatatgagttatcgcgatactaaaaaaccgcaaagttattatgtaagtttccagaatgggaagataattacccgatggttggaagagcgcttttatccagtagatatgattgagttatcagaaatcttcgaaaaattttataaattttcacgaagtaatgatcttctagatattggcagaaacttaaaagcaaatatcagtagttaa

SEQ ID NO: 54340 - DNA, 411 bp, Acinetobacter baumannii
atgggattgaattttagaaaaagtataaaaattgctcctggaatccgtgtcaatattagtaaaaaagggctatcaagtgtttctgtgggtgggaaaggtgcacgtgtaaatgtaagtaagaagggtactcgcacaacagtaggtattccaggtactggtctttcttatacaacaaataccagctacaagaagtcaaaagggactttaaatgatcctattcacttaatacaacaagaagatttaggtaaagaaaaaagaaacattttagtttccattcttttatggatagggattctatgggcgccttatatttttgcatggttcactttgcaaagaaaatactccaatactgagagatttattgcttttggttggctgataattgttgtaatagcaatgttgattaaataa

SEQ ID NO: 54341 - DNA, 1353 bp, Acinetobacter baumannii
atgtcatgcacagtgtttaaatcgacaaatacagtcgatcaatcgattaatgtttttccaccgaaaggctatgttagcaatgtccgcattgttcgaaatcaagacgtggaaaatggcgacattttcaaatttcgtaatgacaatcctaaagaatttaaagtagtcgggggtactcttacttgtgcgtcactcggaatcattgatccagttacagaggggattttcaatcctgccatggaagtaacattaaaacttgatgcggggcgcgactacgcatatctgagttggaaagataaagaccgaatcctaggattcgatccacctgatggttcaaccttcttcggtgcttatcctgattattctttaggtgttcacactgatggcgcaacaacgatcaacggcatttgtatgaggatagggagcttcaatcagcgagtaaattcatgggatgtgagtcaagttgaagatgctggatattgttttgcgaatgcgaccaattttgatcgtgaggtaaattgggacgctccgaaactattaagcattaataatttattgatgggtactgcaaagttcaataaagacatcacgataaggagcgcaaaaccgacaaacatatcgtttatgcttaacggagctgcgtcgttcaactcgaaattaaatattgatacttcagagtgtgataatttttctaacatgttggcaggtgctaaaaaattcaatcagccattaacgaattttaatttcggaaaggccgtatttttgaataactttttattgggcgcagcttcattcaatcaaacagtcgaatttggcaatacgccgaatttagtagaagcctactacttatttgcagagtcagcatttaataaacctattaaatttaatgcgccgaatttaagagatgcctctggctggttttcttataataaggtcttcaataacacaatcactggaagctttagatcagtagtatcaatggcatattttttctggtatgccacatctttcaatcaacctatcaatgattgggacattagaaacgtatcgaactttgagggcttcatgcggggtgcaacatcgttcaatcaagatttgtcggcatggcccgcaaaatttaacgtgaatgcaaatatggcggatgtatcatcagcgccaaattggtctaccgaaaactatgataaatatttgaatgcgctttggcttgatgtaggtacaacgcgacaaaacgaatgggcaaacggcacaagtccgaaaactgtgtatgcgcaagtaaaacgatcggcaaccagtcaagcagcagtgagcggattaatcggtgcaggttggacaattattgatggaggtttagcgtga

SEQ ID NO: 54342 - DNA, 651 bp, Acinetobacter baumannii
atgaaaatcaatcgtttatttgtggttggagatttgcacggtagttacgataatctatgtcggcatcttgtcgacatagatttcgactttaaacatgatcttttagtttcggttggtgatttagttgatcgaggtaaaaagagtctggaatgtttaaacctactcaataagccttggtttaaagctgttcgtggtaatcatgaacagatgtgtatagacggtatgcttaatcataagatccggaatatacacaaagatgatcgtaacggtggagagtggttttataagttaccaaagactgagcaggcaagaattgttgagttattaaaagatataccactatatctagagattgaacacaaaggagagcttattggatttgtacatgcaaatgttgaacaaaacgattggcttgagtttaaagattcattcaataaaacagatatagatgatgcccttttagcaatgaacctcgcattgtggtctagaaatcgttttaatgaccaaagtggagcttatcaaaaagtgcaaaatattgaccgtatttatcttggacacactattgttgattatcctgtcattaagcataactgtcatttcattgatacaggagcatataaaactggaaatctaaccatagtggaaatataa

SEQ ID NO: 54343 - DNA, 492 bp, Acinetobacter baumannii
atgagtactcaaactattattgataatcaaatttcaggtcagattgaaaacagaattgatatagaaattcaatacacacagcacaagaatatggaagattatgttaggctatatgaaaataaagggctttattctctaggccttcgtgctgttgagaaatttattagcaaagctgaatatcaagagatattgagaatgatagaacaggatcattttgggaaaaactttataaagattacagagcactatgatactttttggaataagtattttaatttcagggataatgaaaaactagaaaagattgggattgccctttttgggaaatcgtggaagaaagctttagcagaagcattgaaggttgatgaacgaagaatcacgcattggcttcaatgttctagacctatccccaaaaatgtttttaaagatttaaaagtgattaaagataagcgtcttaaagaaattcagagtattgagaaactgttagattaa

SEQ ID NO: 54344 - DNA, 240 bp, Acinetobacter baumannii
atgtttgtgggttatggtgattataacgatgcttatcaagctttagttcaaggactgagtgaagcaaatccgtatgtatgtggtgaacaatttaccgctgcagatgtaagtgttggagccatgctattatggcaattaaaaatgaaaacgattgaatcgcacccagttattacacgttatgttgaaacgatcaaacagcgcgaaggcttaaaacaaagcagtatgggccaactgttgtaa

SEQ ID NO: 54345 - DNA, 324 bp, Acinetobacter baumannii
atgcgcgaaataacgcttaacgaaatgaccttggtttctggtgctggaggtcaagatgtagtagcaggttccacagctattggatctgcaattggtgcaagcacaggagcaggtgttggaacagctgaagctatagctattacagggggaagagctgctttaggtggtgtagctggtgctggagttggtactgctgccgttgctggatgggaaattggtcaatggcttaatgagaatactccaattcaagaatggattgctgatggtattgataagttaacgtctgatggtaatgactactgtgaagacggtggtaattactaa

SEQ ID NO: 54346 - DNA, 399 bp, Acinetobacter baumannii
atggctatccaaacaatcaaatttgatgataggcaggtatttgtagggacgccaagcgatataatgatggctgaaattgcttctccatttgctgtacttttgacagcatctgattcgcaagaacaaaaagaagcgttaggtatttcgaaaaaactactaagtcttggttgtaaggaattttgttgcatagggcaaaatgctgagcttttacatgatcatttggatttattattagaagaggatggccagattgatgtagtgacaacatggcatgaaaatatcattgatggatgtgaatatttcttatttggagcaggtggtcaaagcttgactctttatgccttgatttctcatcacttagagctcttagatgctttgactttaacagcacaagaatag

SEQ ID NO: 54347 - DNA, 4383 bp, Acinetobacter baumannii
atgaaaaaatcattattatttgtgtgggcaatagcatatttgtcagtcacctatgctgctgatctaactccaacagtacaggatgcccaatatcagatttctaaagcaattattaccgatagttgtgaatctggttttgacctactttcaggaagtagatcattctctcaacaagagattagtggccctttgccgtatattcgctcttattcaaacccactattaccagataaagaagggacgatagattactataataagttagggggctatggaggatggagtgataactatacaaattatttaatatataggggaacgagtacaagtgggaaaaagatgttttcacttagactgcctgacgaatcaaaaagaacgttcttctttgaatatttagaaggtggggtatataaatatcaacgtatagcatcaactgcaacaagaattgataatgttccgatgcctgatagtgtcacattaatgagcaatttaggaccatatagcttcaaaaaagtgaatggactaatggttgtgaataaaaatggtgtggactatacctttaatagcgcaggacgcgtgagtaaaattgataatcagccatctgggcaaatcattacatatacctatgtgaataatcaaatttcaagaatcaatgataacaggaataatgaacttgtatttacctatgacccagcaaatggtgcgtatcttaaaatcgtacaatatcaaaatggggtagaaggacagtccgtcatatatgatggctttatggagtcaacagaaagctatttgggaggaagttatactcatcctgttattagtaaaattacctctacattaacaggtatcacggagtttgaatatcaatcaggatttcatccgctagtccgtaaagctatttttgatgaactggggactatacctgaagctgagaagcaaaaaatttatacagcaacatttctttcctttatgcaaaccgtaaaaagaaatggtaactctgtgatttttgtaaattctcaaaattttggtgatgagtttgaaattaatgcaattaccagtattaataataaaatgaaggttcggtattcaagcaaaaatgaccaaggtttaatcaatgtaacacacgatttagaaggggctcagcaaacatattcatttactactagtgggaaagatcagttttcaaccacaactgctagtggtagttttccatgtatgactgtgaataacttacccattagtcaaattgtaacggataactggaatggtttaactttatcttcaactgataaaaaaggagttctgacaagttacagctatgatctacgtaatcgggtcacaaaaatagaagaagctgttggtactccagcttacagggctacaagctatacgtatggtagtttatccgatggctcagccaatttatttacaattcctactaaagttgtatcacccaatttggaagtaaataatattgttcacccattaggcgtgattaccaaacaaacaataagttccccattatcaggaagtattagccaaactactaactatacatataacactgatgctagcttagccaattataaaacgttaaaaagtattgatggaccacgcacagatgtcgcagatttgatttggtatgaatatgattcaaatgctcaattaactaaacagactcagcgggttcaaaagttaaatccaagctctacaaaagattatgtaaagacgtactcagattacactcctgcggggtttcctcgacaagagaaagattttaatggtttagataccgtcactgattatgatgcttcaggtgttcgtattttatcaaaaacagttgggagtaagaactcatcaggtattataacgaatggtcgtatgacttcctatacttatgattcacttggccaattgttgacggccaaagatccttcaagtgcaatcactactttctattatgatagtgcagggagaaagacaaaagagagtttgcctgatggttccagtaaactttatttctatgcaacaaatgatgagcttaaaacaacagaatattataactctgcaggagtcttagattatcaggagtcagcggttttagatcagaacgggcgtatcaaaacccgttatcgtggtactaatcacgctatatcgatgacctatgaatatgatgcaaatggaaatgtcataaaaaaaacagatcagggcaatcgtatagagtcttttgtttatgatgagttaaatcgtttaaaaagtcacacaaataaacttggatatgttgatactcaaaattttgatgcatcagacaatttaataagtaaaaaagctccaaataattcaggatcaacctctagttttgtaaatacaaataagatctcaaatgaaagtaatactgattatttagttaagagttttacttatgatagtgcaaacaatatcatcaaaacagtcaactctaatcgtatatgtgactttactaattacgactctctaaatcgtatatccaagcaaagttgttatttaagcgacaacacaactgaagaatatctgaaagctgcttatagctatgtttacgatcaagatgtttttggcaatctcaatcaagttatatatccctacagtgattggacaactaagccactgggggtagattctttttatagctataacgcttatggcgaaattgtcgataaatcacaaacagtgcataaggcggcagctacaggtagtactaacgcgatcacaaaggttcgttatgaatatgatcaatctggacgagtgattaaactcactacgccaaagggtaatattgtagagtacatttataatggggtaacgagttccctaactgatgtaaaatttaatggacaaaccttaattacctcaattgtgcacaatgcccaaggggagattattggttggaaatggagtaatggggcaacatattcaatatcgaatgatacagcagggcgcgtaagtgctataagcgtgaatggttttaaccctaatgttaatttggtttatacctatcaatctgctaaagctgatttagtaaataccatcacagacacagtttcaggtattaaacagacatttacatacgataatgaagatcaactgaccgattatgtggttagtggtggttctagaaatggtctaaaaacgagctatagctatgatagtaatggaaaccggatcagtagcacaaataaccttgcaggaacttataattatggtttcaccttaacgacgaatagtaataagttaaatagttgggtaaaaaacaatacaagtgtaccgtttactctgcatgccacgggagaggttaatactctttctgatatgttgactggtaattttaagtacgatggagaaggtaataagcgcagagaaatgggagttccttgtactcatccaaccactggcgcaaccacatgtaatatgtggtttgattataatcacaaaaatgaaagagtattttcttatgccgataatatttctgagggacggcagttcgtttatgatgaaaatagtcatttaatcggtgaatatcgaaatagcgatcaagcacaaattgttgaatatatatggctaggtgatatccctattgcagcagagatggctaatgatcgtttaatttatattttgacagatcatagagggtctccaatacgagggtatgatgctacaactaaagccaacgtttggtcattagatgccgggccttttggagaaagtgcagcaactgtaagcgtatcgggagttgaaattaatttacgctttccaggaatgtactatgataagcaaacaggtttgtattataaccatcaccgatattacaaccctaaatggggtcgttatatggaacctgaccctattggactcgaaggtggattaaatccttttgtctatagtaataatgatccgatcaataaggtagacccaagtggattgggttggaaaaaacttaaacttataggtagcctttttgatgatattttagcacctttaggtcgagaggctgttaaaaggctttctcaaaactcttcgaaggaagcagcgaagcagactacaagtaatcaggccaaaaatgcagctacaagtaatcaagcaaaaagtacagctgcgaaggaaggtgatgcaaatatagttcacgtgcaaaataaatcgattgagaaagggattcggtcacttgaaaaacgaattgtagagcatgagaataaacttaatgactttaagtcaaatccgactgtaagaccaggtatggaaggacagccagtttcagtaattaaagctgcgcaagaagctagaattcgtcatttggaaaaggaaatccagacattcaaagaaaatattaaaaaacttcaggagagtaaataa

SEQ ID NO: 54348 - DNA, 864 bp, Acinetobacter baumannii
atgtggaaattatcgcttttaactactgtaatttcattggtggtagcctcttgtgcatctgatccttactcaaagccttctgctttacggtttcaaaataataagcaaggttataatcaggagatcaatgtcaacagagatgctaaattatgcgcaggggatacaagagatgaacagagttgcccaattcatttctatattgacagtattgaatcaggtaaattctatatcaataatacggcaaagtattatttaaaaccagaagtttataatttcaaagttaaaaattgtagcggcgaaaaaaattgtcagagttgcgatgtcgacttgcggccagatcaattaaaagatcgtaactttattctttctgtagatgctgctggtgtaccttttatttcaaataatggtcatcctttggcttgtagacaacagccagcagctcaaaagcctgtcgttgctcctgttgagcatactgaaacaattgatttggcagccgatacattatttaaatttgatggttcatctttaaatgatttattgcctaaaggccgtcaggaagttcaggacgtagcatcaaaaatttcaacaggttttgtttctgtcagtaagatcatattggtcggtcatacggatcgtctaggaagcgaaacttataaccaaaaacttggtcagaatcgtgctgaaactgtacgtagtctgcttgttcaaaatggcgtatccgcaaatattatctcggtggcaagtgcagggaagaatcaaccagtcacggacggctgtcctacggttaaatctcgtgaagcactaaaagcatgtttacagcccgatcgtcgcgtgacggtacaaattacgggcattaccaagtaa

SEQ ID NO: 54349 - DNA, 12405 bp, Acinetobacter baumannii
atgacaaattttattgtagtagaaaaagattctttaaataaagtatctatcaacacgcaacatatcactttaacagaagcatcaattgtccataccaaaatgcatcgtaatgatgtagcagagtttttacgtgatggcaataacctgattttaaagttaaataatggtgaaactgtccttatcgaaaacttctttgtcgtatatgacaaagttgattctgatctggtttttgaagaagatggttgtatcttatactggtttgatggtgtttctggttttaagggaatacctgggcttgaggtcttattacctgctagtgcggcaggtgggtctttactgccatggattattggtggtggtgctgttattggtggcatcattgcagccgcaggaagtggcggtggaggggataaaaacgcatggccaatcgccgttaaggatgaaattacaggtgttgaagataccccagttaatggcaatgttttaactaatgatcgtgatcctgatggaaacgcaatcacagttactcaatttgttgtggagggtaaaagctataatgcaggccaaaccgttacaattgataaaattggcgagctaacgctcaatgccgatggaacttatcactttgtccctgcgactaactggaatggcaccgttccaacagttacttatacaattagtgatggccagggtggaaccgcttcagcggaattggtaatcaccattacacctgatgcaaatccttcgattagcataaaagatgaaaatggcggcagtgaaaatccgaataatactactgatacattaattgaacaggggcatgttactgtatatgaacagggtttaactgatacatcgggttcaaataaagaaacgggtagtattacgattggggctggtgatggcgtaaagtctgttacggttggtgataccaatattttgctaacagatctggaaaatgcctcaactacaccgattattatcaacacgcctcatggcaagatcatcattactgactatacgccaaatggtcaggaatttaatggcgtatctacgggtggcaccattacttatgaatatgaactagatcaacctgttaccaacgatgcatcacacaccgataactttctggaagaagtcggtatatctgtgacagatcaaagtaatattgtgagcagtggcagtctagtcattagcattattgatgatgcaccacttgccaaaaacgacatcgataatgtggctgctaatcaatttacccctgaaactggaaatgtactgacgggtgttggtacgagtagtggggctacaggtgcagacaaaattagtgccgatggagtgagcatctccacagtggttagtgataatgtatctgctaacgtggtaacagatgatggcacaacgctgacgatcgaagggcagtatggtactctaatactcaataagaccacaggtgaatatagttacgagcgtcatgaaggtacgccgggcggtgtaaatgaggtatttacttatacattggttgacggtgatggggatagctcaacagctagcttgacattagtcattggcaatagtgcgcctcttgttacgcttccttcgagcgatggagagagtaccaaagtctatgaatcaggtttgaataatggtggctctaaagcatctactgataaggaaacaacaagcggtacaattgcttttacctctccagatggtttggcttctcaagatgcagtgaagttaggtggacataccctaacgacagcagatcaaacattctcggatggtttaactgcacgctatgaatacaattcggcaactggtacaggtactatccactatagctacacacttcctgcgaatacgtcaggtgataataccaatgcaacatttgcagtggaagtgacagatatcgatggcgataaaacagcttcgggtgatctggttattaatattatagatgacgcacctgttgcgaagcctgacacgaatagcattacagaagacagcgtacctaatccagtcagtggcaacgtactgacaggaggcgtatctagtggagatacagctgatacccaaggcgcagacaaagctaacgtcagtggagtacaggctggaacggttgcgtcaggtgaacacgtagcaaatggcgcattgaatacagcagtgaatggagaatacggaacattaattctccgtgctgacggtagttacacctaccaattaaataataacaatacggatgtaaatgcccttaaagataaccaaagcctccaagacgtatttagctacaccattaccgatggagatggagataaatcgacagcgaccattaccatcaccattaatggacataccgatggcgcacctaacgtggttatcactgatcataatggatcagcgcttggtgcgaacagcattgccgaaaatgcaacgaccccagtacaaggcgagtttaccgtcaacgcagcagatggactgaaatctatcacgattggtggcacgaccattctgaccagcgaactcttggatctatccccgaccacaccaaaaacaatcgcaggtacagagggaacactgacccttaccgactatgatccagtaacaggcaaagtcagttatagctaccaacaaagtgacagcagcaaagaccacagcggtggtgatactagcgtaagcgatactttcccaattgtagtgacagacaatgccaatgaaagctcagcagcgacgaatctggttattctcatcacagataccgccccagaagccaaagctgacacaggcacagtgacagaagacggtgcagcacttgaaggaaacgtgatcacaggtggcagtagcaacagcacagatgttgctgaccgtttaggtgcagatgcaacacaagtgacaggagtcagcaaaggaagctcaacaacagaacaaacaggtaatgttggtggaacaggacttgcaggtgactacggcacactgatactcaatagcgatggtagttacagctataccgttgacccaaataacgcaaccgtgaatgcattaaaagatggaggcaagctcacagaaacatttagctacaccattaaagatgcagatggggactggagtaccacaacattaaccatcaccattaacggacatactgatggcgtaccaagcattacaccgaacgatgagaacggaaacaatgttggtggtcagattacagtgtatgaaagtggtctaagtacaggtagcaatgcaagtgcagcgagcgaatctgccagtggaacgattcagatcaatgcaggagatggcttaagcagtattaacataggcggacagacctttagcctttcacaattacaatcactgagtagcagcaacccatcggcagcgatcaacgtcgctggtggaaccatcgttctaaatggttttacggcaaatagcagtgtaggtggtatcccaacttcaggtagtttgagttatacctatactttgaacaatgcccagacacatagcgctgttggaaatgatggtttacttctgagtggcattccactgagtgtcacagatgcaggaggggtaaccacaacaggtagtctggttgtacaagtgattgatgatgttccaactgctgtgaatgatagcaatagcattcctgtaggtagtttggcagtagttactggtaatgtggtcagcaacgacacgaaaggtgcagatggcgcacgagtaactacagtaaaatcagatactgctggtggggcagatgtcacgattaatccagttggaaactatcaagttagtggtcaatatggcacattaacgattcattccgatggtagctatagttatgcacgtaatgcaggttcagctggtggtgtaagtgacgtatttacttatactttaacggatggcgataacgacaaagcaacagcacaattgacaatcactattgctgatgcaaccccgaccagcacaataccaacggctggtggtgcaacaacgacagtctatgaatctggtttaaatggtggtacagaagcttcaaccaataaagaaaccaccagtggcacaattagctttacctctccagacggtctggcagccagtgatgccattaagctgggtggacatactttaactaccacgaatcagagcttttcagaaggtctaactgcgcgttatgaatacaatgcagcaactggaacgggtacgatttattatagttataccttgcctgcaaaaacgagtggcgataatacaacagctactttcgctgttgaaatcaaggatgctgatggagatagtgcaacagcagggaatttggttatcaatattgttgatgatgcaccaatcaccgtagcggatacaggaagtgttacagaaggcgcgcttttgaccaaagatgcagccagtggtgtactttctagcgaccagtcaggcgcagatggttgggctataggtggcggtgtggtcggtgttgctaaaggcaatacaggtacaacttcgagtactggagtaggaacaagcatcacaggtgattatggtacgcttacattaaatgccaatggtagttatagctataaagcggatccaaacaaaataacagccaatgcacaggatgtatttacttatacagtgcgtgatgcggatggtgacttaaaaacatctacccttaccattaatgtgcaggatgttacagccaatccattaactactgtgggcagcgtacgtgaggatgggatcgatgccaatggtactcagccggcgggaacagatgcgagtagttctagcaatattattaatggtgatttgaatctacagacgggttggacagcacaagcaaaaacaggcactacagcaaatggaaagtataccgtcaattcagatggtacttatagctttactttaacttcagcaaccaaagatttagcaggcaatgaaaccaatagcttcacttacactgctgtagaccaatatggcaatacggtcactaataccataactattagcattgttgacgataaacctaaaatcagtgagaacggtgcaaatgttggtcgtgtaactgttgatgaaactaattttgtctcaggttctgtttctgcaacagatgctaattttgtcaaagatgtattcacccctgtgtatggtgcagatggtcaagctacaagtaatgcgttgatttatgcacttaacattagttccaatggtgtggatagcggattagataccaccagcggccaaaatgtcttgctgtataaagtaggtaatcagattgaaggacgtgcgggtagtgcatcaggcgatgtggtatttcgtatctccattgatccgaccacgggtgctgttaccttaactcaatcagaagcacttaaacatcccgtgggcggttcttcttatgatgaaagtctttctatcagcaatgcaggtttaattaccctaactgcaactgctacagatggtgatggtgatgcggtcaccagtgatcctgttgcggtaggtgatcgttttatctttaaggatgatgggccatcaattggttctgcgccagcagtaacttctgtagatgaaaaaggtctagcgacaggaagtgaaccaaacacatcgttactcaccgcagaaggcaatttgagtgtgagttatggtcaggacggttcaggtaatggcggtggtttaagctttgctgcaaatcaaactgctttaaaggcagtgctagatagtacaggtaatagcggtataagctttagtattaatgcggcaggtaacgtactgacagccacgcgtggcggcagtgatgtgttcaaagtcactttggatacgactacaggcaaatatacctttgaactattgggttcattaaaccatccaagtcatactacaccattgaatctgaattttgactttattgccaaagatggtgatggcgatacggcatctggtagtttcgttgttcaagtgattgatgatgcaccaaaaactgagattgtgatcacgatggatgaggatcatagttatggtccgttcaccacctcagctgattcacgacttgagaatattaccattcaggatgctaatggtaataccattgctggaacagataacggtaatggaagcaaaagtttcagtgttgcacatggcactgtgactgtagatgaggctggtcgaattacttataaacctgccgataactatagtaactatgatggaagctcttcgaccagtcccgatacatttaaagtactagttactgatgacagtgggcaaaccacaacaaccaatgtgactgtaaatgtaaatccagtcgcagatgcaccaaatttagccggaacaacgggtgtgggtggtaatgtaacactagcaaatgtgactacgaatgaagatacggctgttatattgggtctgaaagcaccacgtgtaatcgatgctattgatcaaaatggcaatacaacaacgggtgatagcccagaacgtctaggcgtgattaccttaagcggtattcctgctggcgcagcgctcttatctggtactgatgctacattattcacatcgaatggcggcaatatctccatttggttaaccgatgttaatcatccgactgatgaaaccaaaccagcaaatgctttggagatgacgtctgctgagtttgaagcattaaaggttttaccacctgcggaaagtcatgccaactttaccgtaacggtaagtgtaaccagttatgaagttaacgatagcggtactaaagtttctggtgttaacggtgcaaccagtactgcaacagtcgtggtcaatgttcaggcggttacggacggtatcgatctgaaaatttcagatggcaatagttttgttgatacaagcagtgcagcacctgtggttcaaaccattgcggaagatactgcacttaatttgactaatttgttgcaagtgacattggcgactactggcgataacaacacgactgctgacatcgacggtagtgagcaacgctggatgaccattacggggctaccagaaggtacaaccttaactgtaagtggacagcctcacaccattactgcaacagaatcgtcgaatggctatcgaatagacattccaaataattacaatggcgtttcaccaagcttaccatcgattacagtgacaccaccaaaagactttagtggtgacattaacaatatccagatcacgctacatgcgcaggaccaagatagtgatggtgtaggtaatgggccgactactggaactgaaattactgacagtgtttatttaaatctacatgttacgccagtagcaggtgatgtcgcagcaggtgatgtttctaccaatgaagacacagcagttgctttcctgcaaaatgtaagagtgacggatacgactactggtacagaagtcattacacaagtcgcatttgaaattccgacaggttgggtcgtgactgctccaaccaataacggaggatggagtattagtggagatggttcgagcagctctccatataccatcacttttaacagcaatgtgactgaagcagaccgtgaagctatattggatggtttcacaattttgccgccagcacacagtagtcaagatgcaaccattcaagtaagtgtaacatcaactgataccaatggtttggatacagatacccagactaaaactttgccaataaaagtcactgtaaatcctgttgctgaaatcgtgggtaatcttcctggttcaggtgattctgataaagatggtacagctgacctgaccatgacaggtggtcacagttacacgacagcaggtgcagaagacacatggtatacactgggtactgagagtagtggatttaaccttgccaatggctggacgaatcaggacgcagatgaactgacttatgcacatttaacgcctgagttagtttcaggggatagctatgcgacagtcatcggatcacaattcaaatggacagtttctggtgttgactatactgcaacttatacaggcacaccaattgatgtacctgttagtgcattgtcaacattacagttcttggctcctgaaaatgtatcgggtacctttaaaatcaaagttgaagcttatatagtagactatgatgatgacaatgaagggacgggtacaccagcgacagcagtatcaggtgaagcttggttagaaggtattatcatcgcacctgttgctgatggtattaataccttgtcattaaatggtcgtgcgattggtttggaagatacgccaatcccactgtctattacgccaagaagttctgatccatcagaaacctttaatatcaccatttcagatattcctgctggtgcaaaaattatctatggcggcgtagaacaaacgattactaacggttcagtcacgatctctaactttagtacatctacgccactgacgattactccaccttttaacagcaatgtaaactttaccttaagtgttactgcgacggcgacggatggtagcgtcacatctgcttcatctagtccgctctctatacatgttacagtttatggtgtagcagatacaccgacagttaccttaaaagattatgacagtaatcagtctggtgtacagtcttatacaaccactgaagctaatctggatggtactgcccagcataaagtgtcactctctaatttgattgaaaatgtttcatcgattgataatacagatggctcagaaagctttacccttcgtatcactggcttagccaaagatttcaatctgggtggacgagccactgttttggtcactggcacaggtgaagaacgtgtctgggtgattaaatcaacagatttaaataatgtatttatcacagtaccagagaattacagtggcaatttgaatttcaaagttgcaggcgtttctactgaaaatgatggtgattccaaaactggtgcattaactgacgttaatttcacagtgacaccttctgccgaagcagaagcaacgaccagtgcgacactggttgaagatgaaattacgaccctgaattttggcattgttcatgtaaatggtgacaatgacgaaactttgggacatgtttggattgcacagaatcaggcggcaggtgcaaactatactttatatctaggtacaggcacatcggctgttctcttaagtaatgcaggcttaccaatcaaaaccattgatggggtggactactacgaattgactgctgaacaagctcaaaccttggcagctaaaggtggtgatcagcttgatggtgatcagggcttcttcacttataaatatgaagtgaccgataatcattatggttcggtgcaaaccgcaccagcggacacggtggttaaagatggagaattaaaattaacggcgagtgcagttaccgatgctgttgagttatctgttactggtatttctggaataagcaataccacttcatcatcagatcaacatgcaaatgatgatgctactccagacaccgcaacactgactgcaacggatactgtgaccgttaatctgaacgtcgcttcgattgaccatgatggcagtgaacacgtggttcgtatcttgatcgaaaatgtgccagagggtgtaactgtacaaggtgcaaatgttcaacagataggtgctggtacatgggtactggtctatcaggcaaataatgtaccttcaatcaacgcacagggtggtattgatgtaccagtcactttcaagattggttccgacgcggatggcttaacagaccatccgattaagataactgtacagacacaagatctagggtctgatttgactgctataacagacatcaaatctgattcagtgacatggtatctaaatacagattttgctgaggctccaggcagtaaagcaccgcttattgaccaatggcaatataatgatgcatctgctacggaagatacaccatttaaattaagcgatgtggtagatcaagccattaccattcaggataattcggcaagcaacttgtttactgtcaccttgaaagatttaccagcaggtacaatcgtcaatggtatggtacaaaccatgatcgatacaaataatgatggtaacactgataccccagtatggacagcaagtgttacggtagatccgaatgccactgatgccgaagccgaagctgctttgcaaaatctgttagacagtattgtgatcacgccaccagcagactggaatgataatggtcaatctggacagttccatttcgatgcgacacttacgacttcggtcttgggtggcgctaccgaagaggcaacgattcaagacatgacgattccaatcgctcctgtgacggataatccgatattcaccatgtctggagatagtatggtgggtgaggagggtgcgacagcaatcacaagttctattacactcgaccctgccgatggaagttttggtaaggttgtcgatggtaaaatgtatgtgcaagtcaatgctgctgatacaaccgatgccatggaaggtggtcagctatacatcacgggtagtacaacaccacttgttttacaaagtgtagatattgatggtgatggtacaactgatggtgatttctacgtcattgacattggtgaaaatggcggaacagtagacttaacgtataccatgccaaatggtgagaaaactgtaccaggtaatgtatcatttactgcttatgcaaacgtacaagaagacggtgcagatgttaaagcagtcagtgtcacgggttctgtggaagttcaactgatcaataatggtgtaaatgttgtttcacaaaactttattggtaatgagtcagaactggcaactaaagccaatgcaattgagctgactggtgcaggtggactaagcgtgagtttgaacgattcagatggttcagagtcttatggtgcaattttgctatctgatgttccaaatggcttcttggtttatgtcggaaatgatgcggcatccgcaacgcttgcaagtaatgcaggtggtgatggcacaaccaacacttgggtactctcagaaagtggtggactaccagcttatgttgcgatattaccgccgatacactggagtggtactgttgaaaacttacagttggttgtaacttctggtgaaagtagcttatctcctttaactgaaaccaaagacattggagatttggtggttaatgccgtagccaatggcgttgatatcaaaccgactcaaactttcggtaaagaaaatgagattattccacttaacctgaatgcatcgatgcatgatccaaaagtttcagaagttgcaaatgacagcagtactgaaactatgaccattaaactcacaggtctgggtcaatatgcctctttttatatcgatggtgtacagatttcatctagtcaaattacagtaagtggaactggatcaagtacgacttataccattacaggtttaacccaaagcaatatagataagttaggctttaaacaggcgaaagcagctttaactgatcaggattcagcgactacaggtacacaaatcggggtagaagcatggacagttgaaagtggtgctggaaatagtgcatctgctcatgtttctacgaacattactgtaaatatgacggcccaacaggctacaacaggtaatgataccttgctatatacagcaagtagtattaatgctggagcaggtatagatacgattcagctccgttctggtgaaactgtatcaggtgctactttggcagcaaatctgaagaatgttgaagtgctggatttgtctgtaaatggagcaaataatatcactagcctgacagcatcagatgtattgaccatgactgatgcggcacataccttgaagatcaatggtactgctgaggatactgttggacttggttcaggctggacacaaagtgcaaccaataatggttatgtgacatacaccagtaccgtatcgggtacggctgtcactttgctggtgagtgaaaatgttcatacccaatctggagtaaatccattatcagcgagaagcttcagcgtagctgaaaccagttcggatgatgtgattgtggccaaagcgggtaacgataccattacgacgggtcagggtcacgatacattgatttataatgtgctagatgcgagtgatgccaaagcggggcatggtattgatcattggacagatttcggttttggttctaccgcaacagatagcaatgccgaaacgattcaattctcatcagaattctttaatgatttgcttagtgatagtgatttgacatcatctcatctttcacaagtcgaaaaattcattaaggttgactatgatgcagcaactgaatctgcaaccgtgaaagtagatcgtgatggtgaagcaaatggttcaaattatcaggatcttttggtcttagaacatcaaacttcgaatgtaacgcttgcagagctgttaaataatcatcaaattacgattggctaa

SEQ ID NO: 54350 - DNA, 1515 bp, Acinetobacter baumannii
atgaataaacgggatgtattaataaagacgagtttatgttcacttcttagcctttatatgcctttactttatgcagcgtctggtcaggaaattgcaacttcgttaaaagataatttacaaggtgtatttaccccaaaatcggatgatcattttaataaagtagagcttaaacagctctcaaattttgatgtcgatacctcaaagtttgatgaacttcctgttatcggttcaacacattccaatacggtcaatactgcgggattgagcttggtaagccccacttcaagaacgcttgatatttctgaggcagtgcaaattgcggttcagcgacatcctgaaattagtcaaaatattgcgagtcttgcttctcaaaatgccaatattgatgtggctaaagctgcatattatcctcaattatcgggtggtatttcgactggagatatgacttctggcgaacgcggtcggcagttattaagtcttaatgcgacacagatggtctatgattttggtaaggtcaaatccagtgtggatattcaaaaagccagattagcattgcagcaggcgcaagtgctggtcaagattgatgaggttgcacttgaggttgcaagtgcaatcgtgaatctaaaacgctatgaggaagtctgtcgcattgcacagcagcaagtagatgggattgcacgtattgctgagattgccaatttgcgtgcaaatgctggcattagcagccaggcagatcccgtgcaggcgaagtcgtatcttgaagcttcccaatcaaatttaattgctcaacaaacacaattaagactgtatcaacaaaaattacggactttactgggctttgatatcagtcggatcaactggaaaatacctgaaaatgtagtcactgaatcaaagatttttgaagcacctaaaatcaatacgattcctacgattatgtctgctcaagcagaagtaaatgtcgcaaaagcacagaaaactcagacagatctcagtcgttaccctactttaaatttagttggaacgctaagtcaggcactgaatggtgtcaatccaaacaataacaaggatgacggatttgatagttcaattaaatttgaagcaagcagtaacttctttcagggtggatcagtgggggcgcaaagtcgcgctgcaagttatgcagaagaagctgccaaagccaaagtacaaaatagttatatggatattctggaacagattcgcatgactgaggaacaagtcacaaataaacaacggcagatgcaggttttggttgccagacaatcaaccaccaccagaacaaaagaattatatcaggagcaatataagcttggtacgcggacagtagtggacttacttaatgctgaacaagccattcatagtgcaaatatggaaattgaaaataatcgttatgatatttatgcaaatctagtccaacttatctcgactacaggtcaatcacgagatgtttatcatcttaatcgtctatccattcagggggttgaggttcagccatga

SEQ ID NO: 54351 - DNA, 2133 bp, Acinetobacter baumannii
atgagtacgatgaattaccagccatatcttcaggcaattttattgattgccaaacattatcgtatcgaaacctctgaagaacgtatccgtttgcagatggattgggcaggggctagtgcagcagatgaggtcgtgaaaacgattgcacgtcagattggcttaagtgtacgtaaaagtaaattttcaaaagagatgcttaatccatggcgtttaccagtcatcgtggtattcaaggatggtcaagttggtgtggttgatcaggcagatgtcgatcataatgtcagtatccagatgagtggtgatcaggggcttgcgcaaagttttgttgcttctgaccttcaacatgaaattgaaagtgtttatatcctgcgacctgaaaaatcagttgcagatgcgcgtattgatgaatatatcaaaccttatgagagtagttggttctggtcgatcgtgttacgtgactggaaacgatatatcgatattatgtttgcatcattaattgcaaatattctggcactggcaaccattatattttcaatgcaagtctatgatcgagtcgtgccttctcagtcaattcctacgttatgggtgttggcaggtggtgtattgattgcggcaatttttgaatttgttttacgtgtagcgcgtatctatttatcagatattattggtaaacgagcagacttgcgtatttcagatcgggtttttggtcatacgctcagaattaaaaatagtgagcgttccaaatcaacaggtacttttatttcccaaattcgggagttggaaggggtgcgggagctagtcacctcaacgacgattagcgccattgccgacttgccatttttctttttatttttggttatattctggatcattggcggcaatcttttctgggtcatggtacttgttgtaccgcttatgattattccagccatattggcacaaagaccactggctaaacttgccagagagggaatgcgtgagtcttcgattcgtaatgcaatattggtggaatcagtgcaaggcatagaggacattaagctgttacgcgctgaatccagattccagaatcaatggaatcatatgaatgaaatgtctgccgatattagtatgaagcagcgtaaaatagtgggcgtgatgactgcatggacgcaaaaagtccaaggtctgacttatgctcttgtggtacttgttggctgttttgcagtgattagtggagaaatgaccacaggtgcattggttgcatgctcaattttatcttcacgaatgttggcaccaattgcacaaattacgggtgttttgggacgtttacagcaagccaaagtcgcaaaaagtagtcttgatgagttaatgaaaaagccagttgaccaacctgatcgggcgcatttgatccatcgctcagtattgttgggtgattatcaattgaatggcactttatttaaatataatcaagatgatgcaaaacccaatctagcgattgctcaactagcaattcgggcgggagagaaaattgcaattttaggccgaaatggcgcggggaaatccacattattgcaattattatcaggcatgcaaatgccgcagcaaggtaatatttatcttgatggtcttgatttatcactgattgatcctgctgatattcgtcgtgatacagggttacttaatcagagtgcgcatttgttttatggcacaatcagggaaaacctaactttaggcgcacctttagcctcagatgatgacttgattcaggcgctcaaaatgacaggagcttggtcatttgtacaagataaaaaagaaggtcttgatcatcttgtacttgagggtggcttaggtttctctggtggacaacggcaggctttgttgctgtcacgcttgcttattcgccaacctaatattgtattgttagatgagccaacagcgtcgattgatgatgtagcagaaaaacaatttattgatcatctaatgaattggatggggcatcggactttaattgttgcaactcatcggcgagctgttttggcattagttgatcgaattattgtcatgaatgaggggaaaattgtgatggatggtccacgcgatcagattttgagtcaatcaaataatcaaactcatccatccagtggggcacaataa

SEQ ID NO: 54352 - DNA, 1191 bp, Acinetobacter baumannii
atgaatgaacaaccacaacaaacaaaacgtcctgctaaagcttcatttcatgaaccacctttacctaaatcgagtatggtcatctggattattggcttaggacttttggtgttctttatatgggctgctttatttaaattggaagaagtttctacaggtacgggtaaagttattccatcttctaaagagcaaattattcagtcattagagggtggtattttgaccaaactcgatgttaaagaaggtgatattgtagaaaaaggcaccatattggcacaacttgatccgactcgctttgcatctaatgtaggtgaatcgcagtctttgctcgtttcttcattggccacttcggcacgtttacgggcagaagtaaatggaactgcattacaatttcccgagatagttcaaaaagattcgcaattggttcgtgaagaaacacagttgtataatacacgacggataaatttagaagagtcaatatcagatctaacgacttctttaacattggtacagcaagagctaagaatgactgagccgttagttgctaaaggagctgcaagtgaggtagaggttttaaggttaaaacgtcaagcttctgatttacaaaagcaaattaatgatacacgtagtcagtattatgtaaaagcaagggaagaattatccaaagccaataccgacgtagaaacacaacggcagattgtgaaaggaaaatcagatacattaaatcgtacagtctttagagcgcctgttcgcggtgtggtaaaagaaatcgatgtaatgactttaggtggcgtaattcctcctaatggcaagattatgacgattgtgccgttagatgaacagcttctgatcgaagctagaatttcgccaagagatattgcctttattcgtccaaaccaacaagctttagtcaaaattacagcgtacgattatgcgatatatggcggattacatggcaaagtgaccgtgatatctcctgatacgattcgagatgaagttaaacaggatcaattttactatcgggtttatattcgcactgattcagataagctgcgaaataaacagggtaagacttttgcgattacgcctggaatggtggcgacagttgatattcgcactggacagaaaacagtgctggactatttgattaagccattcaataaagccagagaagcgttaagagaaagataa

SEQ ID NO: 54353 - DNA, 693 bp, Acinetobacter baumannii
gtgccctttcaggatagtcgttcaggccagcatgctgcagagttcctgaatggctggcagggcaatctagtctgtgatgattacagtggttataaagcacgctttaaatcaggtcaggtcattgaggtgggctgcatggcccatgcacgtcgtaaattccatgaactgcatgtgaccgggaaaagtcaggtcgctgaacaggcattggtgctgattcagaaactgtatgcgatagaagcagaactcaggaaaaagaccgatggtacggcagaacagcgccgcgaataccgacaacagcatagtcaaccggtgatgcaacaactgtatgaatggcttaaccaacatcaactgactgtgccatcgagttctccaaccgccaaggccatcaattacactctgaagcgttggccagctttaagccgctatctggatgatggcaatctacctatagataataattgggtggaaaaccagatgcgaccttgggcgttgggacgtaagaattggctatttgcaggttcgctgcgcagcggtcagcgagcagccaatatcatgacattaatccagtcagcaaagctgaatggcttggatccgtatgcctatttaagtgatgtgctgaaaaggctgccgacgcataaagcgacccaaatagaagaattactgccacatcgctggaaatccaactcaaattaa

SEQ ID NO: 54354 - DNA, 4734 bp, Acinetobacter baumannii
atgaaaagatataaaaaaataatacaatatttagtaaatatattatttctgatttttatgattgggggggaacagatttatgccgaaatgtatacggtagataaggaatcatttgtatcatatgatccaaatattaaatcttgtacagctgggtataatcttctctcggggcagattacttataataaaaacctgatttcaggagcacttccatacagtctttcatatcgaaaagcgacgagacatcaaattttagatcaagaaacagctattggtgcggattcatggtcggataattatgatggctacgtaaatgtatattatggaacatatacgactgcaaatagaaatatgatttcaattattaactatgcaattaaattaccaaataataaccatcgctattattttaagaatggtcctactaattttacagattatggttaccctgaaccttgggttcaagagaaaaatcgtgctttatatcgaatatatacatcatcagaaccacctgcttcaagtttgccaggtgatggagagtccggcggttatgcatcgactgattttggccaaatcaagtttactgtaggttcaaactccatgacagtggttcgagcgggggttacatatagcgctacggtttcaaagtctgtcaataatgaggttttatttagatttaataagattacttatccagatggacgagttattaatctaagttatgatagtgcattaaatttaactacagtgactgataataaaaataataaacttgcattgactcgaaatggtgcacaagtttcatctgtaatgtttactgggggatcacaaggggatagtcagcagtatgatttgacgtatgcttctgtaatagcaggatcaaccagttatacacaattaactcaaattaaaaatgctaaaaataatcgaaaggaaagttatacttatagttcggctttgtcactgccatattatgaagcagctaaaatcaataatattgctaatccggaagtagctgctcaaagacctgttctacagtcggtaaaagataacttagatcaaattaaacagacatggacaattgaatatccaagttacttttatgatgcatcggttcttcgggtgactacagcaaagattatattgcgctcatttataggtgatgcaggtggtagtgtatcgggtgataccactacaacctatgacgataaagagactagtagtaaaatcacaatgtccttttctccagatggaggtcaggcggtgaatacaattataaatacaactcatccagattattcaaaaactaatgttgatgtgtcaggctttccatgtctgactacaggtgatagtagaccaattaagtcaattatttatgcccctgctgatatccggccaatgcaaattactgatcaaaatagtaatgttacaacttatgcatacgataatttaaatcgtatcttggaaattatagaagcatcaggatcaactttaagcagaaaaacaacctatacatatggtgcattatctaatggtgcaacaaattcatttaatattccaactcaaacacaaactggaaatgtaacaataaccaatcaagtgaatgcgaaaggacaaattactcaacgaagtgagtcatcaagtcagtcaggaagtacgacgaagaccactacttatacttattatacggatacaacaaaaccgaataatgggttgttaagtagtgaagatggtccgcgtactggtacggttgataaaataagttatgtttatgataattatggaaatctgtcggaagtttctagtagtgtaaatggcgcgactagaaccactcaatatgttggctataattcatttggaaaacctgaaaggattgtccacccaaatgggatggttcaaaaatacgtttataatatagatggaacgctgagtagtgttgttttgggtaatggttcgaccactggtgttattactggtcaaaatacttcatatacatatgatactttggggcagttgattaaaacggttaatcctgatggagaggtaactagctatagttatgataatttaggacgtatagttaaagtgacctatgctgatgggagtgtgaataccaaaacctattttaataacaatgcagtcagtagtgatgaactaaaagatagctctgcaactgtggtttataaagggttgtatcagacgcttgatgcgaatggtagagttgccaaaattcaggtgggttcggatagtacttcttactggaagacgtttagctatgacgccaatggtaatgtattgctgacgaaaacagctctaggtactacagaaagttggacttatgatgccttcaatagagtaataagccatacggacagtacaaataatacaaataccaaaacttatgatgctttagataataccatttctgctttagatgcacttgcatcgggtacgaatccatatgcttatcgtaatggcagtattctgactcaagaaacaaataaagactacggtacaaaaagctatacctataatgaggcagatcaactcattcaaagtttgtatggtagcagaaagtgtagttatgcagatattgatgaaattgggcgtaatcgtagtattagctgccaacatgcaacagctactactgttgatatgttgggatatgacgatgcttatacttatgattcaagccgttttggtcgtttagataaaataacgtcaaataaaagttatggtgtagacagtaactatggatatgacctttatgaccgtgtaaccagtaaatctcaatcaaataaagctttgactgcatggggtgcaagtgcaaatacactttctacaggttatacgtggagcaatggagataaactaacgagtttgtcgttaccttcaggtcgcaaattaacttataactatgattcaactttaaagggacaaattacagggcttacgcttgatggatcagctgttattagcaatgtgagttatgatgccgcaggacaaatgacaggttggacttgggggagcaatgcaggtagctatacatggacatatagcacatcgaaaaatggtttgatcaagcaaattgtaaataagacaagtggtggagcaacgacctatagcttgagttatggatttgaccgggatggtcgaattacaagtgttagtcgaaataatagtttgaatgatacgtatagctatgacaatgctaatcgattgcttactgagagtcgtgtaaatggttcaacaaccgtatatagcattgcttatacatatgacaaaaatggtaaccgcttaacattaagagcatctggtagtcatttacaacccgcagcaactgtgaactatggctatacaggtaataagctgacatcacttactaaaaatggtgcagctcaatctgtcaattatacggcaaatgctgaactgtatattggttcaacagtaccaagttatgactatgcaggacgccgtcgcggagaaggaacatctacaacgattaaccgttatatgagttataacgccaacaatgaaaggactttgaccagtcttgcaagtggttgggtaaacagtacaacgcagtttgtgtatgacgaacaaaatcatcttgttggtgaatacactgcatctggtgtaccaattgtggaatatgtttggttaggcgacaaacctatagcagccatttatgggagtggttcagcgacaactatttattatattgttaccgatgtacaaaatactccgcgtcgtttagttaacactagcggtaatgttgtttggagttgggacagtactgcttttggtttaggtagcccaacaggaagtgttacgtttaatttacgtttccctgggcagtactatgatgcaacaacgggtcaattttataaccaccaccgtttttatagccctgagttagggcgttatatggagcctgatccgattggattaaaaggtggtttaaatccgtatatatatgccctcaataatcctgtgatgtatattgatcaagtaggtaaaattcctttacctattgtgacgggtattattggagggattgtcggtggaggagcttcagttatcgtacaattgtcaagccatcaaagtattaattgggaaaaagttggaattgctatgggtgttggtgctattgcgggggcagtctctccttggacagcgaccagtgcaattggctctattatgactggttctatttctaatacaattcagtatagtgcaggtcaatttgctgaaggtaatagtgtttctgcaatggggttggtgagtaatgctgttattggtgctgttggagggggaatcggcggaactactattagaaatgtagggattccacttagtacgacttccatctttatatctaaagctttggcaaaaaatgtaaacacgaatagagctatattagcaaatactactgatagtgcaatggcacgtggttttacgggggcagtatcttcagaggggcttggagatattttagatagattttcaggaggaagagggagtgaagtaggatttcaaagtagtggtggtaatggatatattggtaacaatggatattatattagtaataatgggttaggaagtataagaagcgtcggatatgcggatggttatcttaatggagtatctttagggactaacattactatatttttcgattcaggtgcaattgtcacttatggttgttctagtttatgccgtttggagatctaa

SEQ ID NO: 54355 - DNA, 309 bp, Acinetobacter baumannii
atgcttgaatttattccaataattgttttgttaggagctttttcaggagctatttttgggcgctactatagagcagtctttgtctttttatatgataaagtttatatactccttaaaggccttctaactaatcctttcctttcaattgtttcgatgctttgtgcaatagtttctgttttcttattcgcgctatggggcaatgtcttttctttggttatctctgaagaaaattgggtgtatttctataggccatattttgttggaatattggtaggtctttttttgcttaggttaagtagtgaaaaataa

SEQ ID NO: 54356 - DNA, 1134 bp, Acinetobacter baumannii
atgaaaagacccttttaccaattaaatcaaagtaaagatgttatacggcattttaccccaaattggtttacagcaactatgggtactggcgtggtcagtatgattttaattcagcttccatttgccaaatcatttttatttatgctggctacgctgttatggcaatttaatattgttctatttagtgttttttcagttctctatttattgcggtggttactcttcccgcatgaagcgaagcaaatatttaatcatccaaatatgagcttgtttttaggtgctataccgatggggcttgcaaccatactaaatggctttttaagcttcggaatcggactttacggcgaagtggcagttcatatcgcccaagctttgtggtacatcgacgtttttttagcactagcaattgcatggatcgttccattttgcatgtttagtcgtcagaaccatcaactacataccatgactgcaatttggcttttaccggtggttgcatgtgaagtcgcagcaagttctgcgggcatgttggttgcacatttaccagcagatgtgcatagctttcatttattgttagcgggttacgtactttggggaatctctgttttacctgcatttgccattttaacgattttaatgttgcgtatggctttgcatcagttaccagaaaaagaagtcgcgatttctagctggctttctttaggtccgattgggacaggtgctttaggtctattattgctaggtgagcaggcacaaagagtatttgtaaatgttggctttcctgagttggcccatgtctttcaagccttgggtgttgtgggtagtctggtacttttaggctttgggttatggtggcttggccttgcgattttaacaacacttcgtcatgcaaagacaggtattccgtttaacttgggttggtggggtttaaccttcccatttggtgtgtttattttggctttatttaatttaggtcatcagattgaagttgtatttttacaatacgtcgctgtggcattcagtattttattattagtgatgtggagcgtggtaatgaagaaaaccttagccggagcatacagtggcaaactattcttctctccatgtttggtggctttacaacaaagaatgcagtaa

SEQ ID NO: 54357 - DNA, 699 bp, Acinetobacter baumannii
atggaagaaagtctcttgagtatcattgttgcgttggacgctaaaagccaatatgacgctttaaaaattgttgaacaacttgatcctactttatgtcgcgtaaaagtaggtaaagagctttttactcatgaaggcccatctgttgtaaaaaaacttcaagaagaaaatttcgaagttttcctagatttaaaattccatgatattccaaatacgacggctcaagctgtatgtgctgccgcagacttaggtgtatggatggttaacgtacatgcatcaggtggccgtaaaatgatggaaacctgtgtagagcgtttaaaagcaggtaattatcaaacacaattaattgcggtaacagttttaacttctatgggccgtgaagatttaaaagatatcgggttagatattgaacctgtagaacaagttaaacgattggcgaaacttactaaagaaagtggtttagatggtgtagtttgttctgctcaagaagctaaaattcttcgtgagttaatcggacaagatttctctttagttactccgggaatacgtcctgagggtagtaatgcagatgaccaaaaacgtattgtaactccgaaacaggcaatgcttgatgggtctacacatttagttattggtcgtccgattactaaagcagaaaatccaactgaaatgttgaaatcaattcttacttcaattgcttaa

SEQ ID NO: 54358 - DNA, 129 bp, Acinetobacter baumannii
atgaagttgcaaggttccaatatattgggacaggaacaaatagatttattaaccacacgcggattaaatttcgtatggtttccaaagcaacttgaaacgatatatcgttttcaatatcaaaatgtttga

SEQ ID NO: 54359 - DNA, 1629 bp, Acinetobacter baumannii
atggttagtgcctataacgaattaccacgtacacccgcaaactttgttgcattatcccctctgcgctatttagagcgcgcagcttatatctatccagaccaagcttctattattcatggcaaccgtcagatttcatggagacaaacttatcagcgctgccgtcaatttgcatctcagcttcaacaattaggcatagttaaaaatgatacggtttcagttttactgccaaatgtaccagcaatgattgaagcacattttgctgtaccaatggcgggtgctgttcttaataccctaaatacccgtttagacgctaaaaccatcgcttttatgctagagcatgctgaaactaaagtacttttagttgaccccgagtttgttaatttagcaagagaagctttatcacttattcctaaccaacatattattgtgattgatgttgctgatgaagagtatgaaggcgaaaaccaattccttggttctttcgaatatgaggaatggttagctcaaggcgatgccaattttgaatggcaattacctgaagatgagtgggatgcaattagtttaaattatacctctggaaccactggaaatcctaaaggagtggtttatcaccaccgaggtgcttatttaaatgcagcaagcaatattttagcctgcggtatgaaaccccgagccgtttatttatggacgcttcctctttttcactgtaatggttggtgctttgcatggagtattgcagcaagtggtggaaccaatatttgtctacgtaaagttgacccagaactggtgatgcagcttattgcaaaacataaggttgattacttctgtggcgctccaatcgtcctatctatgattattaatctgcctaaggaaaagcagccaagcatagaacatcatgttgaagttatggtggcaggtgctgctccacctgtcgctgtcattgaaggtatgcgaaatattgggattaatgtcaaccatgtgtatggtttaaccgaaacctatggaccatctgcgctttgtgcttctcaagcgggatggagcgacctctccattaccgagcaagcgcaactacactctcgtcagggtgtaccttatcctttacaagatagtatgcgggtgttagatcctgaaacgatgcagcctgttccaaatgacggtgaaaccatgggagaaatcatgttccgtggcaatattgtcatgaaaggatatttaaaaaatccaaaggcaactgaggaagcttttgcaggtggctggttccacactggagacttagcggtttgccacccagatggttatgcaaaaattactgaccgctctaaagatattattatttcaggtggagaaaatatttcatctttagaagtcgaagacgttttatataaacatccagcagttttaacagccgctgttgtggcaaaacctgacgaacgttggcaagaagtaccatgcgcatttattgaattaaaaactggggctagtgtcacgcctgaagaaattattgagcattgtcaaaaagaacttgcgcgctttaaagttcctaaagatgtagtgattactgaaattccaaaaacctcaacaggtaaattgcaaaaattcatcttgcgcgaatgggcaaaagaacgtgcttaa

SEQ ID NO: 54360 - DNA, 693 bp, Acinetobacter baumannii
atgtataaactattttctaccctactcgttgtcgtctgtttaaatttgagtgcttgtgccacgacattactttcagaagctttacctaacgaaaccacaaaaaccgagaaaatcattttagcaaaagatcaaatcattgctttaggacaagctgttcaaaaccagcaagaacaaggcgtcgtatttataggacaagactttaattatttaatgacggaaggaagttcggaatttttaaatatcattaaaaatattcctgtaaatcaaagaactttaattattccatctcctctgctacttgaaatggatgaccctacgctttttcatggtgaactcaagtttcaatacaatattcccgcttcaaaactttctgatcaacagaaagaaaatttaaaaaatttagggtttaaaaatcattttatggttatggagaaccaaacacagcttttatatccctacgctattattcgttttaaaggccaaatttatcaaaccagtcctactttaaaagttcaacaaacgattccaactccatatccaatcgccttacaacaaaaagatgaaataaccaagaaacatccgtttaaacgtgtaacgcgtatggcgctttatcctttagcgatggcatttgatatagtgacggtagccccttctctcatcttgtcagatttacgaggtgactttactaaataa

SEQ ID NO: 54361 - DNA, 2808 bp, Acinetobacter baumannii
atgtataaaaaagacaaacagggaatgatcattgttttgatcgctttgactttgtttttagccatttcaattggttttaaatttcagagtgccgttgttgctttatctattgcgctcactgtcatactggttcagtcattatcaagtctgcatcaacgtttaactcatttagaacaacagttttctcaccagacaacgccactttattctattcatatgcaaagaacggtaatttataccgccgctttggttgcattagttgcttatatcaatcattggatgtggattgctggtggggcattactggttttactgttatgtttgattcaaaccatcagtgcatttcatactcgtttattgttcctcgagacagccaagcaaacagtaaatgtaaatgaatctatacatacagaagtgataacgcctgttttagagcaagttgatccaaacaatattaccgagccagctttacctgaaacaacagcgttaaatcaagaagaacaaatagttcgtacacagaccaccgcatggtggcaaccagcagtcgattggatgattcatggtaatccaattttaagggttgctgttgctgtgcttatggttggggtagtgctcttactgcgttttgcaagtgagcactggcagttgagcttaggtgtaaaacttggttttattgcgattgcaggaggtgtattaacagcatttggatataccttgcaaaagaaaaaccagctatttgctgtagcattgcaaggtgtagggttagctgttgtctttctaacgcttgtgttctcacatcattttggtgtaatcacgagcctaactacagcaagtattctatttgcgattttattagcaattacagtattcctgagtttaaaacaacaagctatttatttggcaatactcgcactgggtatggcgtatgcggctcctttagttattccacaatatcgtcctgatgtggtttttttatttagttactatcttgttattaatcttgcagtcgctgcggttaattttattcagccttggaaaatcctaaatcagatcgctttctttgccacaatgtttattggcggtagtgcaatcgcattttatggagagccagcaaaatttgacacattagactggattttatggctccatatagcgctatttatttggttaagtgttcgttatagccaaaatatctctcgggtttcagaacatgaaaaacaagaggggatccgtttacctccgctcttagatgttggtcttatttttagtgtacctgtactaggctttacgcttcatgcctatttagttcatgagtctacacaagctttaacaattggtgctgttgttttagcaggcacttatgcggtgttaacgttctggattaaaaaaactcatccccagctttcggtccttgcaaaaagttttttcattctcgcggttgctttttttgccttaattttcccgcatgcaaaaggagcacattggactgcgattggttgggtagcccaaggtaccgctttaatcgtttggggagtaactgaacgctaccgtttaagccgatatattggtgtgattttagttttactcagctcacttgcactgttttatcaggtttgggcaaatgaagagtttccaacgctaagcactagcatttatgcaattgcccaattcatttcggccttttatttattgcaatacaacagcaaagaacaacgctattttagcgcaagcatgtttagcggtattttcttatgcttaggcatgtatgcgggcgccgtagcaggtgtagaaataatggcatggcatcatcatgctttaagtccatatttgatgtttgctatcgttctaatagcaatatttagtgcgattgttcactataaacttcgtgtgcaatggcaaagtttgcagttaattttaattagcctgttactgttgttaattttgggggaggtctctgttagtcaagtatttacgttgtttaaatggggagactcattacagcaaactactttcctagtctctaccattattcttagtggcttatttattatggctcaaccgcagtcaagtcatttgggttacgtcaaggtatgggcgggtttaagctggttagcgttagcgatagttggcgtggctattttcccaaaaatgccaattgtcgctttggcttttgttcctgtggtttattcgctttggggctataaaactcataaaacgacactattgcatcaaattccggtgtggtgtttaagcctcatttggttgcttgtggtgagtgttgatgatcattcagctgaatacctttactttgttcctttaattaacttaactgacttcttttcaattttggtattcgctggcctactctttattatttatcagcatgcttttgatcaagataaatcgttggaatggacttttaaaattacaacaattttagtgggcttactggtatttagtagtgtagtcgtcagaggcttgcaccattactgggcaacaccgctatggagtgcttcaatttggacaaatggtgtagtacagctaagtttgacgttactttgggttatattggcatttgttttgactacatactctagtcgaaaaatgattcgtcaactctggtttgtaggcgctgcacttttagggattgttgtattaaaactaattttgcttgatctatcacaaagtgcgacattaactcgggtcatttcgtttattggagcaggtggggtaatgttgattattgcttatcttgcgccattaccaccgtcatcctctgtacagaagaatcaagagcctaagctttag

SEQ ID NO: 54362 - DNA, 258 bp, Acinetobacter baumannii
atgttattcaaaaaattcgctgttgctgctgctgttgctgctactttagctttcgttggttgttctaagaaagaagaagctcctgctgctgctgctgcatctgaagctgtagctgctgcttctgaagctactgaagctgcttctgaagctgctgtagctgttgacgctgctgcttctgaaactgctgctgctgcttctgaagctactgctgctgcttctgaagctactgctgctgctgacgcttctgctgcacactaa

SEQ ID NO: 54363 - DNA, 1314 bp, Acinetobacter baumannii
atgactatgggcacatcaatgagtggttgcggttgtaataaagaaagttcttgtgaagacactaagcaaaatcaaaatgaatcagaaacaaattctggtaacagtaaagatttaactgctgaagaaagtaaaagctcttgttgtggtaatgaagtaccacaacaatctaagccagatgaaaaagattcttgtgctagtactcagccatgttctacgcagtcaaactcatgttgcaccccagattcaataagttcacctgagataatcagtgataatgagggtgtagcgactttcatcagtgactataaaatccctaaaatggattgttccgcagaggaacaaatggttcggatgactttatcttctttggtaaatgttaagaggctagtttttgatttgccgaatcgaaacctaaaagttatgcataatggtgaaagtaatgaaatcactgcaaaacttgaagctcttgggtttggcgctaaattaaataaaactgaagcctatgtaaataaagagcatgcaaaagaaatcagtacgtttctgattccgaaaatggattgctctgctgaggagcaaatggttcgtatggcattgtctccagtgagtgaggtcaaaggactaatatttgatttacctaatcggaaattaaaagtttttcataatgatggtcttaatgaaattactagcaaacttgaagcacttggttttggagccaaacttgaaagtaccgctgcctctgtgggtgaaatgcctgaaaaagcagatacgtctgaacaagcaaaagttttaaaaattcttttagcgattaatctcctattattctttatagagtttatcagtggtttggtagctgcctctacaggcttgattgctgactcattggatatgcttgctgatgccacagtgtttggtatagcactgtttgttgttggtaaaagtgtaaaaaaacaattaaaagcagcgcatctttcaggctggttacagttaattctcgctacttctgtaattgtagatgttgtgcgtcggttcatttatggtagtgagccagagtctttcttgatgattggaattgctgctttagcgctaattgccaatttttattgtatatacctaatgtctcatcaaaaaaatgatggtgcacacatgaaggctagttgggtctttttatccaatgatatcatagtcaattttggtgtgatttgtgcagggatactagttgctttgacaggttccgcatatccagatcttgttataggaataattgtttcacttttcgtacttaacggtgctcgaaaaattttggcattgaaataa

SEQ ID NO: 54364 - DNA, 363 bp, Acinetobacter baumannii
atgttgaaattcatgaaaattattgctcttgttaccactattgctgcattaagcgcatgtagtaaaaatgaagcatcagagcagaagaaagcagacgcacctatggagcagatgaataaggagtcttctaccgctacaacggctcaagccgttggggtgattactgctattgatacgaaagaaaatattttaacactcgaccatgaagcaattcctgcgattaattggccagcaatgaagatgggctttaaagttgctgacccatccttattaaatggtttaactgtaggggataaagttgactttgaattaaaaacagagagtgagaatcagattattgttgctgtgaaaaaaagctcataa

SEQ ID NO: 54365 - DNA, 1500 bp, Acinetobacter baumannii
atgttaagaaataaattggcagtgactgtcataggagttgccacaattagtttggttgcaggtggtggtgctggatattggatagcacatcagaaagacaatcctcaatctactttagcgggtcagcaacaggatgccaaagtgttgtattggtacgacccaatgaagcctgaacagcattttgataagccaggtaagtctccatttatggacatgcaactggtacctaaatatgcagacgaaaatactgcgatgacggatgaaagtcgtcctacagtcaaaatagatccatctcttcaacaaaatttagccatccgttacggcactgttgaacaggctgtaattggaaatgccatgtttactaatggcatattacaagcaaatgaacggcaaacagctattttacaaactagagcaagtggctttgttcagcgagtgtatgggcatgctgttggagatatggtgaccgaaggaagccctatagctgatatttcaatacccgaatggactggagagcaaactgaatttttagctgtgctccgtactggagatcgttcccttattcaagcaagccgtcaacgtttgcagcttttaggaataccacaaaatgtgattcatcaagttgagcgaactcgtcgagtgcaatctaatataactttgcaagctcccattagtggatttattgattcactagaagtccgcaatggtatggctttggctatgggacaaaccttggccacaattaaaggtatcaacccgatttggctagaggcagccgttcctgaaaaacaaattgctggaatcaaacgaggtatgagtgtagaagccaattttgctgctttttctcaaaaagtaactggcaaagttatcgacattttgcctaccttagatacaacatcaagaactattaaagttcggattgaattaccaaatcctagtggtcaacttaagccagggatgtttgcttctgtcaatataataaataatccccaaagcagtttggttgtaccagagcaagctgttatacggacaggtactcggaatgttgtcattgtagggcgtgagcaagggcgttttgaaccagttgttgtacagttagggcaaagtgatggcaataaaattgcagtcctacaagggttgaaagctggtcagagagtagtgatttcaggacaatttctgattgattctgaagcaaatttgcaaggcatattggataagctcaacactgggcaaccaattacatcatctcaaacgattaagaggtcaacatatcaaggtcttggtaaagttgaaaaagtcacaaatcaagatattaccatttcacaccaagctattcctgagttgggctggggtgctatgaccatgatctttaaacagccagtacaaccatttacccgaattcagcaaggtgaccaggtcaactttagttttacaaaagttggaaattcttatgtcatttctgacatttcaaagatgtctatggcatctatgaagaactaa

SEQ ID NO: 54366 - DNA, 894 bp, Acinetobacter baumannii
atgcaaaccactaaaaaacttttttcaaaaacacttttatcagttgctttaattggtttagcaggtatggcatttgcgaatgataattcgactgaaaatctaaataagagtatttcaagtatgaatgtgcttttaagagaatcaggcggattaggttatgttgaacgcaatgttgctcaaaaaacttcaaaagacaaaggaattgaaactttaactcttagccaaaatcatgataaacatctgaacgagcatggtgggcagatttaccaaacaactaaattttccaatgagtggatagttgataaagatggtaaaggcagtttaggttcgagtttcgaaacattgattggaacagatgaaaatcgaatgtttgttgaagccaatctgaataaagcagagagtaatgatcccaattatgatgtatcagctctttacagtagaaatgttgcaccattttgggatgttcaagctggggtaaggtatagtgaggacaaaaataaccgtaatagtaatcgcattgatggcgttattggattattaggtcttgctccttatttctttgagacaaaagcttacctttatggtggtgaaaataatttttggggagccagttttgagtttgatcgagatttattactcactcaaaagctaattactcagccatatattgcagcagatattgtgcttaatgataattctgattttgctgcaaagtcaggtttgtctgagttaaagacaggtataaaaactcgttacgagattaataagcgtatcagaccatttgttgatgtcgcttatcaatatgaaaaagggcagaaagccacttctatgcaagcggctactaattccgaaaaagggtggaaatatggtgcaggcatcgaattagttttttaa

SEQ ID NO: 54367 - DNA, 939 bp, Acinetobacter baumannii
atgtctgcattactccgttttactcagtttgttcaaaagacgtttgccctatgggtaattatttttgcagctctggcgctatggcagcctgaattttttgtttggctgaaagcttatattccatggattttgggcattattatgcttggcatgggaatgaccatgaccgttgatgattttaaaggggtactacaaagccctaaagccgtgttaattggggttgtcgcgcagtttgtcgtgatgccgggcttggcatttattttatgtaaattatttaatttgcctcctgaaattgcggtcggcgttattttagtcggttgttgcccaggaggaacagcttcaaatgtcattacctatatggccaaaggcaatgtggctttatcggtcgcctgtacctcggtatcaacactcttggctcctgtgttaacacctgcaattttctatctacttgctagccaatggctaaagattgacgcggcttcgatgtttatttcgattttgcaggttgtactacttccgattgtgattgggctgattttgcgaacttggcttaaacgtcaggttgaatcctatattcaagtcatgccattagtttcagtgattgcaattgtagcgattgtggcagccattattggtggcagtaaagcagctattttacagtcgggtttgctcattttggcggtagtgatattgcataatgggcttggatatttattaggttttgccgcagcgcgtttctttaaattgccttatgcggacagtaaagcaattgcggtagaagtaggaatgcaaaactcaggcttaggcgtggcgcttgcagcagtgcattttgcggcttccccgattacagcggtaccaagtgctattttcagcctttggcataatatttcgggtcctgcacttgcgacttattgggcaagtaaacacaaacaagaataa

SEQ ID NO: 54368 - DNA, 396 bp, Acinetobacter baumannii
atggccaagtgtgaaatctgtaaaaaacgttggttattctcaaaaaccgttaaatgtgactgtcataaaaaaccaattattacccatactcatcagggattatctaatttgacttcaaatggtccagtttgggttggttatggtcctgctgatacacggtatccccagcgagatccagatccacatcttcagtattattcaagtattgctatccaaaatattgaggcaaaatccgataattgctcggaagaccgctatcgatctcagtaccatcaggatacatctagctattcaaatcatagtggccagagttcaagtgattcatcaggttggagttctggatcaagtgatagtagtagttgcgatagtggaagttcttcatctagttgggattaa

SEQ ID NO: 54369 - DNA, 288 bp, Acinetobacter baumannii
atgcggggaaaacaccaattatattgtccacattgcaacgcaaaactgacgattagaagtagcagacaacaacacgttttacttagatcaatctggcttcagtgtagcaacgttatgtgtggttttaccggggcgggaataatagaaatcactcatcaaatttcaccaagttcacagaagaacccggatattaatctaaagaaattaaaacgtagaccagataaatatattaaagaaatcgaaccacttccaaatctcaatttattccctgaactggaggaaagttaa

SEQ ID NO: 54370 - DNA, 792 bp, Acinetobacter baumannii
atgaatattcaatacaacccaaaaggtcatagtttcagtggctggcttggtggtaaatctcaactggccagaactatcgtagagctgatgccagcacataaaacctatgtcgaagtgtttggtggcgcaggctgggttctctttaaaaaaactccatcccctgttgaagttattaacgatgtaaatgatgacctcattaatttatatcgcgtccttaaattccattttgatgctttcttagctgaatttgatttgctgttattttcacgcaccatttttgatgacatgaaaaaaagtgaccgtggtttaactgatattcaacgggcagccaaattttattatctattacgtgctgcgttcagctgccagctagatggcgctttcagttattcaaaaacacgaaaagccgggttaaaactaggtgatgaactccgtgcacacttacattcagtgcatgaacgtttgcaaggggtaactattgaaaatgccagttatgattatgtgattaatcgaatggatagtccagacacgcttttttatctggatccgccttattgggattgtgaaaaggactacggtaaaaatattttcggtaaagatgatttttatgctctgaaggagattttagactcgttaaaaggcaagtttattctaagtcttaatgatgtacctgaagttcgtgagttatttaaagactacaatatcaaaaataaaaaaatccgctggactgttaataacagagcatcagcggaggagcataacggtaacgaacttattatctgtaatttctaa

SEQ ID NO: 54371 - DNA, 1218 bp, Acinetobacter baumannii
atgtttagtgttagcaatgtcaatgcacaggccatttataaacttgtagtcaatggtacagacatcacaactaagattaattcacgattgaataatatgaccgttacggacaatcgagggattgaagcagattcggtacttattgaattacttgatcatgatggtttactcgagattccaccaaaagatgcggaaatagacgtctggattggctggagtacaactggattgatctataaaggcaaatattacattaaagagcgtgagcattccggagcaccggatattctctctctaagggccaccagcgctgatttaaaagcgagtttgaagcgtaaaagggaagaaagttatcacgataaaacaatcggtgaaatcataagtagcattggggctagaaatggcctaaatgtgattattcaagataagctaggcagtattaagttagctcatattgatcaaaacgaatcagacgcaaatttaatgacccgtattgcagatgaacacgatgcgatagcaactgttaaaaacggcacattattgtttatggctaaaggaaaagctgaaacagcaagtggccaaactctaccagaagtcgaaattacccgaaatcagggtgataggcatcgttttagcgacacatcggaaggtgatgatatttcaggggtgacttgttattactatgatattgctttgccccaaaaacagaaagtgaccgtaggcaatagcactcaaaatgttaaggaaattcgacatgtactgcgtgataaagaaacggctctacacaaagcttatgccgaatataacaatatcaaacgtaaagcgacgagcttcagctacacgttttcgcggggacgtcccgaactcataccagaaatgactttcaaattttcaggtttaaaatctcctatcgatgacatcgtgtggttaggtacaagagtaacgcataagctcgatggatcggggggattcactacagacgttgtacttgaagtgatgatgccggatgctgatgacgtcagccaattaattgaagatgagcgtggagattatacggggattgtggtgtattacggcacagcaaaatcaccagaaaagttaacgcagggggatcagtcaaatcctaaacgcttaacgtatttatataaaaataaaattactgctacaaaagccgctgaacgagaattcaaacggcttcaggacgaaaagggtacttag

SEQ ID NO: 54372 - DNA, 420 bp, Acinetobacter baumannii
atgatgatgatttttggtgtattcgttttttcgctaccaacggcaacctatcaaacactaaaacgacaaacgaactggagacatgcctcaaactcacgagtgggtgatatgcccgactatcagttcgtggggcgcggagatgatgtgattacgcttgatggcagcatcatgcctgaatttatggggactccacttagtcttacagctttgcgcgtaatgggggacaccggaaaatcattcccattgatcagtggtactggaaaaatattcggtctgtattttcttgaagatgtggaagaaacacagacattttttttcccaaacggagctgctcgtaaaattgaattcagaatgaccctgaagcagaaaatgaagccgggaacgttggcaaacaatatcattagcagtgtgttgggttag

SEQ ID NO: 54373 - DNA, 3630 bp, Acinetobacter baumannii
atgaaacaacttaaactcgaagtcatcttcggttctcaagacaaactcagtcccgcccttaaaatcctttctggcaacagcaatgctgctgccagagcattgaagcagaccaaagatcaggttaaaagcctagaatcacaattagccaaaatcgatagctttgagaaacaaaaagcagccgttcaacagagcagtcttgcattaaaaaatatgcaggaacatgtgaagcatttgaagtctgaaattgctcagaacccgactaaccacttggctagttcactagaaaaaactcagcaacaactgaaggcgactgaagctgcaaaaaaacagctagatgcccagctcaagcgtatcgatgggtttagacaacaaaaacaagcggctttagaaactacaaaaaattatcaggcggtacaaacacggattgctgatttaaagcgtcaaatggacgcacagccaagtaaaaaactgactcaagattttatccgggcatcacgtgaagctgagcaactgaagaaccgtattaatgagcagggtgtcgctctacaacgtgcacgtactgaactcagtcaatacggtattagtaccaagaatctaagtaatgaacacatccgggtacgtcgtgagattgagcactcaaatcaaactatagataagcaaaagcagagccttcgcgaacttaaagacgagcataaaaaaagccaagcgtctttaaaaggtctaactcagcagctctccagtagcgaacgcgaagtcggaaaactaacggctgaatatgacaaacaaaaacagcatttaaagaatttaacaagggagttagatcaatccggtttatctgtaaatcagcttggatcacaccaaaaaaaattaagagaacgtttatccgggacaacgtccgaaatcgataagcaacagcgccaaatggcccaattaaatcgggtacagcaaaactatcagaaggtgcaacaacactcacggacagccatgatttatggagccgggataactgcagctggagccactacactgtactcgatgagaaagcctatcgaagaaaacaaacgggtcgaaattgagcaaaaccggattgcatcgttggggcttggtgctgaagccactaaggaggcaacaaattacgctaaagctatgaaaacttttggcacaagtacatttgataatttacagctcatgcgtgatggtgtcactgcatttgcagatgtacatcatgccaaatttgcagcacctatgctttcaaaaatgaaatttgccaatgaagccatgtatggcagtgagcagggtggagaaaatgaaaaaaaattcatggacatgcttaaagtcattgaattacgcaacggcttaaagagtgaagcagcatttaaagatcaagcgaatatcattcaacaagtcatcacggccacgggtggacgagtacaagctggggaatggctgaatgctattaaaacgggtggtgtagctgttaaaggcctttcaaatgaagcgttctattacaaaatggagcctatcgttcaggagcttggtggccatagattcggtacgtcggcaatgtctgcatatcaaaacatttatcaggggcgaacaacaaaacgagccgccaataatttgatggagctgggtctaatcgcggatcaaagcaaggttacacacgataaagctggccaagtatcatttttaaacccgggagcacttaaaggcgcagagctattcaagcaagaccaattcgaatggatggagaaagttctattacctgctttggctgaaaagggcattacatcccgtggtcagattcatgatgcaattggaagtattttcacaaaccgtaatgcatcaaatctctttacgacaatgtatgaccagcgcgttcagatccataaaaatgcgaagctcaacgctggagccgataatattgatcagttgaatgacaaagcaaaaaacaccacaacaggtaaagaattagaagccagagcaaagttacacgatgcatatcttaactttggccaaagtattttgccgatctataccaaagcaattgaagtggccaccagcgccttaaaaaacttcaatatgtggatgcagcagaacccaacactggcaaaaatgcttggagctggcttacttgttatcgcaacatcattagtggccattggcggggcgttagtggtgttttcaccgcttattttaagcatgctgagccttagactcatgatggccacagtgggggcaagtggtagttcattaggctttgttttcaaaatgctatctgggccagtgggcttattacaaaaaggattcgctttcttaggacgctcggtactttggttaggacgtttgtttatgaccaatccaattttattggctgtgactgctattgctgcagctgcatatctgatttatcaaaattggggtgcaattactaatttcttcagtgggttatggaatagcgttaagcagattttcaatgatggctgcaacgcaattatgtctgtttttcaaagaatagacagtatttttgcgaataatccaatcttgacctttatctttccttttattggaattccccgtcttattatcgctaattggtccagtatttctggtttctttagtggactttggagtgggattgtatccggggctaatgagttatgggtcggtattaagcaaattttctcccctataagcacttggtttaccagccagtgggaaggggtaaaaatccatactgcagctgtatggtctgcaataaaagcgtcggtatttaatgcatggaatagcttaattgcgagtattcagactaatcctattcttcagaaattgattaatggctggcaaagcatttttggctatctacagtcacttaaaaatcaaatggtgggtatcggtcgcaatatcattgatggactcattaatggtattaaatcgggctttaatggactgaaatcgttgtggggccagatcaatagctacatgccggatttcatgcgtaaaaaaatggatattcacagtccatctcgtgtcatgcgtggtattggtcgattcatcgttgctggtcttgaggtgggtttaggtcagcaacatggttcgcttcagaaaacataccaacgcattgttgatacgtttacagcaccaccgtcagtggagttttatcctggtgcgaattcactgccggaacaaaatcaattattcgcacaaatagcaaaaccgaatgttgacggtgctccagtattcaagctattcgaccagattaaaagcgggtggagtcagttatggaacgggctagaaaatatctctgataagtttccagaacatttgaagacgttgcttgaagtacagacttcagtacagcaaccagtattagctacaccttcttttagtgctccggtgcaattgccgccaattgtgacaaaaccgcttattgccggggcaccaagtacacaaaccgcccaagcttcaaaacagcatcaaatcacagttgagggcgattctatttcgatttatgtcacagcgcagccggggcaatcgacccaagacattgctgctgaagtacagcgtcaactccgaagctatgaacgtgagaaagcaatgcgggtacgtgatcagtttttggataactaa

SEQ ID NO: 54374 - DNA, 381 bp, Acinetobacter baumannii
atgaatacacaaaaccaaaaccctgagattgaaactcaaccaacagaactcgaagttcaacaagctgaaaatcaaaaggcgattaacccggatgtggaagtaatttatttagataaacccctaaaaatgggttcaatggaaattacccaattagacattcgtaagccaaacgttatggcccttcagggtgtgaaaatcacagatttgattcaaggtgacgtaacagcaatttgtacagttatcccgcgtgtatcgagtccgactttaaccaaagcacaaattaatcaacttgaaccttcggatctggcacagattggagctgcattaatgctttttttgcaaccgagttcagtacgtgtatcaatcttacagcaacagtag

SEQ ID NO: 54375 - DNA, 522 bp, Acinetobacter baumannii
atggctttaccaaagaaattaaaactaatggacctctttaatgagggtattagttatttcggtcaaaccggagaagtaactattccaaaactagcgcgtaagttagaaaactggcgtggtggtggcatggacggcagcgttaaggtcgatttaggtttcggtgacgacatcactacattccaatggaaacttggcggtgtagatccactcattcttgaacagtttggtgcttccacggtagcagcacacatgctgcgttttgccgggtcatatcagcgtgacgatactggtgaaatcgatgcttatgagattgtcgtacgtggacgtcatgaggaacttgatttcggtaatcagaaagcaggtgatgacactgaaacaacaatcaaaactatctggagctattacaagctcagcatcaatggtgtggtttatatcgaaattgatattccatctaacaaattcattgttaaaggtgtcgatcgcaacgccgagcacatgaaagccattggtcatttaagttaa

SEQ ID NO: 54376 - DNA, 1170 bp, Acinetobacter baumannii
atggtagattcatatcaccacggggtccgggttttcgaaattaataacggaagccgacccattcgtacaatttcaaccgctgttatcggtgtggtatgtactgcatcagatgcagatgaaaaaacattcccactggatacggcagttttaattactgaccttcttgcagccattgccaaagctggtactaaaggtacgctagcccgaacattacaggcgatccttgatcaaaccaatgccgttgtaatcgttgttcgggttaaagaagaaaaagacgaggcgactcaaaccagctcaattatcggcggatcggtcgacggtaaatacactggtttaaaacaattgctcacttcaggtgctaaattcgggatgaaacctcgaattctaggtgtaccgggcttagataatgcagctgtcagtgctgctctaatttccatagctcaacaacttcggggcttcgcttatatttctgcctatggctgcaatactaaagaagaagttattgcttatcgccaaacatttggcgcacgtgaagcgatggtcatttggcccgactttttggggtgggacaccgcgacaaattcaactactacactctatgcgacagctcgtgctttagggctacgtgccaaaatcgatcagcaaattggttggcataaaactttgtcaaacattcctgtcaatggtgttacaggcatcagtaaagatgtgttctgggatttacagtcttcagcgacagatgccaatttcctcaatgaaaatgatgtgaccacaattattcagcgtgacgggttccgttattggggttcacgtacttgttctgaagatcctaattttgcattcgaaagttatacacgtactgctcaggtcatcatggacacgatgggtgaatctcacatgtgggccgttgataagccactacatccatcacttgcgcgggacatcattgaagggatcaatggaaagctccgtgattggaagacaaatggctatctcattggtggtgaagcttggtttgacccagcatttaacccagccgatgttttaaaagccgggaagcttcgtatttcttacgactacacacccgttccacctttagaagacctcagtctacgtcaggaaatcactgacagttacttggctgattttgcttctcgtattgcggcataa

SEQ ID NO: 54377 - DNA, 498 bp, Acinetobacter baumannii
atgatttattttagtcaatcgaaacaatctttttatgatttaaatcttgagtacatcgaactgccagatgatttaatagaaattaatgaagaacagcattttgatttacttcacaaaattagttctgggcattatgtattttctgatttgactttatcagaacctaagccaagtccttaccatgaaatgaatatcacaaaaaagcagtgggaagataatcgtactctggaaaagaaacgaatcgattatttgttgactttaagacctttaacacgacgacagttcaaattgggattgttggaaaatggccttttagacttaatcgagcaacgaattaatgcaattgaagacccacaaatgcgtacaaagattcaaattgaatatactgaatcttttaattttgaacgtaatagtgaatctgttttgttcatgtcaactttgttagaacttgatgaagaacaagtcgataagatgtgggaatatgcaatgactttatag

SEQ ID NO: 54378 - DNA, 3777 bp, Acinetobacter baumannii
atgagcagcccatattttaatgtaacgaccaatgctggtgacgcagccattgcaaatgcgattgccacttcaacaaagctcaacattacacatgtcgcatttggtgacggtaatggatcttctccgactccagataagacccgtacatctctggttaaagaggtttatcgtcaaggggtaaataaatacgagaagcatccaacaatcaataatttcgttgtagttgaagcaatcttacccccgattgtgggtagcttttatatccgcgaaattggtttaattattgacgggaagactcttatttcacatggtgcagttgccccggtgtataaagaggctaactcagttcgagagtatcaacttcgattcacaatcaatattcaggatgctcaaattgttaatgtcacacttgatgacacgctgatctatgcgacacaaggctgggtaaatgataactatgtccctcgtaaagagatcattgataatttaacaaccaatgatccagttaagccgctttcagcaaagcagggtaaatatttacaagataataagcttgataaaaatgccaatgccgttggccttcaaattaaagacaatcgcactttaaaaccgtctcaattatcacaatcaattcaggcttttttcggtactttaaattctgatggtagtagttttttctgcgattatttgacattgaacggctggaatgattattcgggtggccgtaaaaatgcacttgtctttaataaaacagctcagactttgcatcattatcaagctgattatgatagcgaaacatggactttaaaaaagcaaattgcttatacagactcagatatttcgggtaatgctgcttcagccacaaaattaaaaattgctcgcttaattaacggtgttacgtttgatggcagtaatgatattagagtgccaccagtagcattttatattcccgcaggtgcagatttagacaactatcaaagtattggtttttattatcaagatacggatttaaatgcatcccaaatcgcaaatgtcccacaagcaaacgcgtttggtttacgcgtagagacccatgcaggcgtatcacaatggttcatgccatacaatggtggtgggatcatgtattaccgtcatttttatgtcggtaaatggacaccgtggaaaaagattgatccatcaaatattgacggaaatgctgcaacagcaagcaagctgcaaaatgtgcgtcgtattaatacggttccttttgatggtaccagcgacattactatttatgatgatacgaagttcaaagcagatggtacgacatcaaatgtttatgacgttgcttggaacgcaaaatcaggtgtctatacgattcaggaaagcggcggcacatcaacggtaatgcatttcttaggctctggttctgcaccagcaattcagattttagccaaatatgcgaatggaggactttggtatcgatcagcacgtgatgcaaagggctttgaagtagaatttgaaaaaattctgaccgaaaaaggcggtacagttaaaggtggtcttgcaacaaatagtatttcaaatactggtgatatttatactacagggacttttgttgctggaaatgcagcaggagaggcaagattacaactagcgggtacaaatcgctatttttatcttaattctggttcttggggcgtttggaccgaaaatggatctgaacccttatctaaattgtgcggtggtacaggccgagcagatggggcagccgaaaagcttgttacacctcgacaagtttctttctctggcgcggcttcaggttcattcacttatgatggttctgcaaactcatcgtgtgtattaacacttgcgaatagtggcgtcgttgctggtacatattcttcaacaattcaaatcccttcaattactgtaaatgacaagggtttaatttctggcatctcacagcaaacgattcgatccgcttcagtaacgcaagcgggagtagtgcaattagttgatgacttggtaactgacgataatgcaaaagctttaactgcgaaacaaggtagagctttacaacttctcaagttagataaaaatgcaaatgcagtcggcttacaaatgggtgatgatcgaacattactaccgactgagctttcacctctttccgttcaaactttctttggaacttataactctgacggtacttccgcattttgtgattttataactttgaacggttggattgatgcttcaggtggacggaaaaacgcacttgtattcaacaaaatatctacaggtttgtaccactttcaagctgattataatagtcaaaactggactattaaaaaagaacttgcatataccgactcgaacatttccggtaatgccgcttcagctaccagattacaaaatggccggaacattaacagtgtttattttgatggaacacaagacctaaatattgaagctccgctatgctggaacggaaccatcgcaacctttgatcaacttaatttagctttgaaggacggcaagttcacggttactgagttaaatattgcagggttatatggctacggttttcttgtcgtcattagaagcggtggtacttgtcatcaaatttattaccctcatgcagctcagggggtaaataatggcactatggcgatgcgccaaagctggaatgtgaatggcaataccgctacatggtcagaatggagagtagtgggtacacaagatgattcaaaacttccccttgtaggtggtactgttacagggaatttgcgtgtaaacggcattatcttttcaaataaagtttacggtgattctgacttatggtttacatcagaaaatgagcaaaaaggtcgtagagttctgaccggtggtgtacttgcttcagatacttattctgaagcaagtcttgttccaaaccttggtatgtatgctaaaggtgcgattcatactggtactggcgtctatgcagataaatattatggttataacgggacagctcaattcattggtaatcttgacggtaaacttttaaatccgcgattaattaacggtgttgcatttgatgcaagtaataatattaatgtcccaccagtaagcttttacattccagcaggggcagatttaaataactatcaaagtacaggctttttctaccaagatactgatgcagccacagcacaaatagcaaacgttcctcaagcaaatgcatttgctttacgtgttgaagcaagcgcgggatgtgatcaatggtttatcccatataacggtggtggggttatgtactatcgccatttttataatggcaattggtcttcatggaaaaaaattgacccctctaatattgatggaaatgcagcaactgcgacaaagctccaatacgctagaaatattgcattaacaggtgcagtttctggctctggtaactttgatggttctggaaatttaagcatttcaacaatattaaataactttggaagtttaaaggcggaaaatggctataaatacttaggtgatgggttgattttgcaatggggaacgatggattacacaagttatccgggtgaaacgaaggtcgatattaccttcccaattacattccctaataacgtcttaaatattaattcaacacgtaaaatgatccagcattcagcttcaggggacggtggcgttttattagtaagtcaatctaattcaggggcatctttctctttaaatgtatttaacagtagtgcaattggcgatttgcgtggttttacttggttagcgataggtttttaa

SEQ ID NO: 54379 - DNA, 537 bp, Acinetobacter baumannii
atgaaatctttattgcccccaaatgcaacagatttagaaaaaaagctggctgaagttggtgcggatgcttttaatttgccatcgatcaaacttgccaaagatgttgatcatgcaccatctgattttctcgcttatctagcttgggaacgacaagttaattattggcgtgatgagtggccagatgcgttaaaacgccacatcatcaaccaagcaattccacagcacaaaattaaaggcacaccagcggctattaaaagggcattagaaccctttggctttcaagtgaaattaatcgaatggtttcaaatggagccaccgggtaaacccgggacattcgcgctcgagttggatctcgtcggtaaagaattatcagaagaaacatatcacgaagtgaaccgattagttgaagactcaaaagcggcaacccgtcatgtctctaacgttcaaattacatcgaatccagtcttatacatcaatacagcgattgcactgcaagacgcagtgattatcgaatgcatgccacaaggttatcaataa

SEQ ID NO: 54380 - DNA, 918 bp, Acinetobacter baumannii
atgagcgttgttgatttttctcagttgccaccgcctgacctcattaaagttctggattacgaacagattttggcaaagcggaaagctcgttttatttcattatatccaactgaagaacaggcgtactggactgaagtattgacgcgtgaatcagagcctgtgaccaaaattttacaagaaaatgcttatcttgaattattgatgtctaatcaaagaaatcaggatgcccgggcattattattggccttcagtactggatctgatcttgatcacattgcagtaagttattacggagttactcgtctcgttattactccagcaaatcctaatactgtcccgcccacatctgctgtgatggaaagtgatgaggatttaaaagaacgttgtttactttctttatctgggtttaatacggctggcgcatcaaatgcttataaattcttttctaaatcagccgatggccgtgtagctgatgcttcgattatttcacatgaagacaatccttgctttttagatgtctatatcactcaacatgacagtgatgacttttcagcatcgcaagagcttatagacaaagtacagaaagctttagaccctgaagacgttcgcccggttggtgaccgtccgactgtgcatagcagcacacccgtaacatatcaaatccaagcccggctttatatttcacaaactgcagaaaacgtcatgttgctttccgtagcacaagaacgtttgcagaaatacgtaaaaaattcgaaaaaaattggtcaatcaattcgattgtcagccatttacgctgcattacatgtagatggtgttagccgtgtggaaattctaaatccaacttctgacatcgttattagcaagtcccaacatgcattttgtacaggcatcgacgtacaaatcgggggaactgaataa

SEQ ID NO: 54381 - DNA, 351 bp, Acinetobacter baumannii
atgacaatgaatcgagtagttggactaagaatcacagatgagctggagtcaattcgccagtctataaccgacattttgactaccccaattggtagcaggctcatgcgtcgtgaatatggttcattgctctatgaactaatcgaccagccgataaacgacgtccttattttgaaatgttacagcgcaatatattcagcgcttttgcgctgggaaccccgtatcaatatcaatcagatcaatatctttagcattgatggctcacgtatgcaaatcagcctcgatgcggatctggttcaacaaaatcagcctgtgaatttatcgctaggattgacattaggagcagctgcatga

SEQ ID NO: 54382 - DNA, 555 bp, Acinetobacter baumannii
atgaacatttcagaaattatccgtcgtttagaaaacattgtcagattcggttcaatcgatacggtcgatcttgaaaaggctctgtgcacagtcaatctaggcgatattaaaacagcccaattgaactggctcaacattagagcagggactgactcatcttgggatccaccgaatccgggggagcgttgcattgtgttttctccatccggggaattagcgcaaggagtagtgctgtttggaatttacagcgaagacaatccagccccagctcagtctgaaaatatcaaattgcgcaaattttcagatggcacggtcattcaatatgacacctcatctcatgtactcaaagcaactttaacggatggcggtaaagtcgaaattaccgcttcaggtgggatcactttaaacggtaatacaacgatcaatggttccttatctacgactcaggacatcacatccaaagcagatgtaaaagctggaaatattagcctaagcagtcacaaacatactggtgtcaaaggtggtggagagacttcaggagtaccagtgccatga

SEQ ID NO: 54383 - DNA, 462 bp, Acinetobacter baumannii
atggctgagatgaaaactttacttgatcatttagggattttacttaatcaactgagtgataaagaaaaacgtaaactcagtatggatattggccgtaaattacggcaaagccaaagtgcccggattaccaaacaacaaaacccggatggcagttcatacgtcccaagaaaaaaacagaagatccgggataagaaagggcgtattaaaaataaaatgtttaaccggattaaaatggctcggttcatgaagattaagcaagaaccacaaggcgtttcggttggttttttgggtaatgttgcttttattgcccaagtccatcaaatgggcttaaaagaccgtgtaagaagaactaagaatagtccagttgtaaaatatccttcgcgtgaattacttggctttacatcagcagagatcgaaatgattgaaaatgatgtcttaagccacttctcaagcaagttgtaa

SEQ ID NO: 54384 - DNA, 531 bp, Acinetobacter baumannii
atgaaaaaattaaatgaccttcgtgctcatttgatgaatgcagtgattgagttacgacgagatccagaccggctgcaaatctttgccgaccagggtgcattgaaatgcacctttgcggcagggctttcttatgagttttcatatttcgcaaatatcattttgactgattacgctggtgatcttgattctgtggccatacctttattcgactggctccgggtaaatcagtctgagcttttggcgaatttagaccgggttaaagagggagttcgttttgaggcagatttactcgctaacgataaagtcgatttggccattactattccactgactgagcgtgtcatcgttaaacgtgcaccagatggcactataaccgtcgatcatcctcttgaaccccaagcaactcaaaccgaaccagcgcaggaagtaagcttgatcgatcaagcgacaggtgacgttttagcacaatggatgtccgttgaaagtccagatagtttcgctttagcaatgccgctacctgttaggaaatag

SEQ ID NO: 54385 - DNA, 831 bp, Acinetobacter baumannii
atgatcttaaaattcggctcaaaaggtaacgcagtagttactttacaaagacaattagcgggctttggttataaaggtaaatcaggcaaagttttaagtatcgatggtattttcggtgaaagcactgaatatgctgtgatccaatttcaacaaaaagttggacttgtggcagatggtaaagtcggtgacaaaacccgtgaagcattggcagggaacggacttgataaatttcttaaagactcggattacgttaatgcggccaagcgattggggttaccagaattggtcattcgtgtattcggtgcggttgaaggtcaaggcgttggctttttaaaaaatgggaaggtcaagatcctgtttgaacgtcaccgtatgtatgaatatttaaaacgattcaaaggtgatgcttttgctaaaaaccaaatgaaattggtgccgaatttagtgaatacaaagccgggtggttatcaaggcaatgaagcggaacatgtccgtttagcattagcaaaacagatccatgaagattcggcacttatgtctacgtcttggggtcaatttcaaatcatgggtgagaactggaaagatttgggttacgactcggtacaagattttgtagcacaaatgcaggccagtgaatctcttcagcttgaagcatttattcgctttatcgaatggaaaccgggtttgctcgaggcgttaaagaaacaggactgggatgctgtttttaccctttataacgggccgaattataagaaattaggctatcaagctaaattccaaaaagagtttgatcacctcgagccaatttacggagttaaaaaagcagcatga

SEQ ID NO: 54386 - DNA, 258 bp, Acinetobacter baumannii
atgatcattgttcaaatcgttgctgtgctttgttatttgttctgtggcttccgaatcttaagttttgagcgctcagggcatcataaaggctttgcaattcttgcgactgttttggtggccagctttattggccaagcagtctatatcgtattttttaaagaaccagtaacagtgtgggatgccattttagccatgctgctcactcttattgtttatcgaacaaaaggtaatgttgcgaaaatctggagtacatcatga

SEQ ID NO: 54387 - DNA, 360 bp, Acinetobacter baumannii
atgccagaaccaacttcaactacagctgcaacaacaacaggtctcgcagcggtttcattattaccatttatcaatggtaatgccttgcttggtgcggttttgggagcagcttttgtggcttatctcgaaaaagaacttagcgcaaaacaacgcattgcattcatgcttttatgcgttggctttggttatttgcttggccctgaaattaccagccgaactcaatacattagtagtgacgcaacggcatcaatgcttgcggccattttttcaatttacatcctgatcaaattgcttgattgggtaaaaaactcaactcttgctcagctctggaaaacttttcgagggggaggtaactcatga

SEQ ID NO: 54388 - DNA, 210 bp, Acinetobacter baumannii
atgaacacagttcgatcaattcaaaacgacacgattgacctgatttgctggcgttattacggacgttctctaggtgttgtcgagaaagttttagaagccaatccaaaacttgcgaatatcggcgcaattctacccatcggtacagaggtcaatttacccgacttatctgctccccaacaaattacacaaactattcagctttgggactaa

SEQ ID NO: 54389 - DNA, 450 bp, Acinetobacter baumannii
atgggatttgtcgcaaacggtaatacaacaccatccaatataacaatcagcagtacagattttttcccgagcatttctttagatgaaatccgcagctttgttcgtattgatggggccgtatctgatgcccggcttaagcaagttactttagaagagatcatcgatgtaaatcgcttacttaataaattagtaagttctgcttcaagtttggccgagttagcaacagcaaaagttgatggaaaaccagatacagaaattttgtatttttcagcaatttcaaacggagtggctgcaaaagttaatgagcaatatcgaagttatgacacaagtacttcgggcaataaaaatgcaaaagaattaacacctacgattgatgaaagtcgacgaaataaacagtgggctatcaaacaattattgggccaatcacacactacggttgaattgatatga

SEQ ID NO: 54390 - DNA, 765 bp, Acinetobacter baumannii
atgaatttggcccgtcaacattttcgtaaacatcaagccaagtctgcagctgaacaagctgcagagtttggcagtatgaaaaatgcaacggcatacgagctgcagcttatgcagctcaacaatgaccgtgctcgcttaaagcagatccagtcgactgaaaataagatcaaacttaaatcagaattgctaccaaattataccccttacatcgatggcattcttgaagcgcaaagtggtgtacaggatgaaattcttactgaaatgatgatctggaatattgatacatctaactacagtcaagcgttacagattgctgaatatgttctcgttcataacctgtctttacctgaccgctttgaacgaacaccagcatgcgtcatcaccgaagaaatttctgcaactttccttaagcagcttaagacaaatgttgaaattgacattgatgtgttgaagcagctcgaaagcttaatgactaatcctgatttaccgcagacgactttagacatgcctgatcaggttaaggcaaaaatgtatttagccttaggtaaagcggaattgcgtttgattaccgataaggacgcgccggatcctgttcatacaaaagcggctttagattatctacaaaaagcagttgaactggatgacaagtgtggtggacgtggtgatttgaatctcgtgcaaaaactttacgataaatttacaccaaatacgaatcctgccactgaaacagaaacaaatatgggtgatgtaacagcatcatcataa

SEQ ID NO: 54391 - DNA, 1011 bp, Acinetobacter baumannii
atgcgtaaacttacacgtcaaaaatataatgctgttatgactaaattggcccaactcaatggcgttgaaacagttagtcaaaaatttaatgtagaacctactatccaacaaaaattggaagaaaaaattcagcagtcatctgaattcctttctcgcattaatattcatcttgttccagaacagtcggctgctgcggttggtttaggtgtaagtcgtccgattgcatcacgtaccaatactaataatgctgagcgtcaagcgaatgatcctacttcaatggatgatcgcgtatatttctgccgacaaactaactttgacacttcaattaagtatgcgaagttagatcaatgggcaaaatttccagacttttatcctaagttccgtagcgtaatcattaaacgtcaagcacttgatcgtattatgattggtttcaacggtattacagctgccccgaccactgatattgttgctaacccattacttcaagatgtcaataaaggctggctacaaaagcaacgtgaagaaaataaaagccgtgttttaaaagaaggtaaaaccgctggacaaatcaccgttggagcaggtggtgactatcaaaaccttgatgcattagtcatgaaccttgttgatgaaatgattgatgaagtacatcaaggcaatcctgatttagtggttatttgtagccgtaaacttcagtctgataaatatttccctctggtaaataaagagcagtctaactctgaaaagttagccgctgacattattatcagccaaaaacgcatgggcaatttaccagtctatgcagttccgtttttccctgaagattgtttgcttgtaactactttcgataacctttcaatttatgttcaagaaggtgctcgtcgtcgtaccgttattgataatccaaagcgtgaccaaattgaaaactatgaatcttcaaatgaagactactacatcgaagatttagggttagctgcaatggctgaaaatattgaagtacttgcggggtaa

SEQ ID NO: 54392 - DNA, 852 bp, Acinetobacter baumannii
atgagcagcaaagagcagaatccaaaaaaatttaaatcaaagtggtttcgtattgccacggcaggggacaccacagatggtcgtgaaattcaggaaaactggattcaagaaattgcagaaacatacaacccgcaaacatacggtgcgcgtattaacgttgagcacatccgtagtgttttacctgatagcagcttcggcgcttatgggaacgtaattgcagtaaaagccgaaaaggttgaagtgaatggtgaaaagaaactcactttattcgcccaaattgagccaaatgacaatctgattgcgctcaataaacgcaaccaaaaaatttatacatcgattgaagttaatccaaattttgccaatacaggcaaagcctatttggttggtttggctgttacagacagtccagcttcgttgggtacagatatgttgcagttcgctgcaaaagctgaaaaaaacccatttgagagtaaaaagcagcataaagacaacttgtttacagctgcagctgaagcagaacttgaatttgaagaagtcgaagaaccaaaagtttttggtgctggtctcgttggcacaattcgaaatctattcaaaaagcaagaacaagcaacaactgagtcttttaccaacacagagcaggccatccttgagattgctcaacagacggctgaacagggtagcgaagtcactaatctccaaacttcctacaacgaactgaagcaaaagcacgatcagttagctactgacttttcacagttgcaatcaaagctcgacatcacacatgaccaatccccacgaccaaaagcgtctagcacttccttctcagaaattgaagccgaagtcgattgttaa

SEQ ID NO: 54393 - DNA, 1779 bp, Acinetobacter baumannii
atgaatgaattttcacaactagctaacgtcaatttgtttctcgacaatcgacttaaagctaaatttctatattggtgtgggtggaaaatcaccgacatagccgaagttctcgatgaaaaagagagaaccattcaggcatggaaaaccagagacgagtgggaaaaaaccaaacctgaaaaccgagtggctcaagctattgaagcccgtctaattacactcattttcaaaaacaaaaaatctagcggtgacatgaaggaagttgaccttctaatgagggaactcgaacgactggcccgaattgagcgttaccgagatacaggcaaagaatcagatttaaatccaaatattcagaaccgtaatgcggtagccaaaaaacagaaaaaacctaatacctttaccgaacaagaagtcgagatcctcattactgcattcgaggaaaatctctacgactaccaatgggactggtatcgagctggcaatcaacgtacacgcgcaattctaaaaagtcgccaaatcggggcaacttactactttgcacgtgaggcatttatcgatgcgcttaaaactggccgcaatcagattttcttatctgcatcaaaagctcaagcgcatattttcaaaacttacattcaacaatttgcttttgaacatacgggggtagagcttaaaggtgatccaatcatcataggtaataaccaagcaaacctcactttcttgggtacaaatgcccgaacagctcaaggccaccacggtaatttttatttcgacgaatttttctggacgtatggatttaacgaactaaacaaagtcgcgtcaggtatggccatgcataagaaatggcgcaaaacctatttctctaccccatcaacgatggcacaccaagcctatgcattttggactggtgaacgctataaccgaggcagacctaaagaccagcgtttaaatattgatgtctctcatgatgcgttaaaacgtggtcgatattgtgaagacaaaatttggcgtcagatcgttactattcttgatgctgaaaatggcggctgtgatttatttgatattgatgaacttcgtttcgaatattcagccgaggaatttgcaaacttattgatgtgtcaattcatcgacgatggcgcatcaattttccctcttaacatgctacaagcctgcatggttgatagttgggaagcatggtctgaagactataaaccgttccatattcgtccacttgcaagccgtccagtttgggtgggttatgaccctgctgaaacaggagatagcgctggtcttgttgttgttgccccaccttcagtggctaatggcaaattccgaattttagagcgccatcaattcaggggcatggactttaaagcccaagcagaacagatccgccaaattaccctacgttacaacgttacttatatcggtttggatacaactggtatgggcacaggtgtagcccaattggttcgccaattctttccagcattaacaacattcagctatagccccgaagttaaaactcaactcgtattaaaaacactagatgttatccgcaatggacgtctcgaatttgatgcgggtcataccgacatcgctcagtcccttatgagcatcaaaaagacacttacagcaagtcaaagacaaatgacctttaccgcgggacgttctgaagaaatcggacatgcggatttagcttgggcactcatgcatgccgtttataacgaaccgttagaaggcacaactatttcaaattcatcaattttggagatttactcatga

SEQ ID NO: 54394 - DNA, 1047 bp, Acinetobacter baumannii
atgaaaccaattcacattttaaaaagtgccttcaatgccttttctactcaagttcaaacggtcaaatcctctggccgagctgaagcgtttacttttggtgatcctgtaccagtattatcaagtgaactatcagaatatatggaatgttggttcaatgggcgctggtatgaacctgcggtgagtattgcgggactgtcaaagtcttttcgtgcaaccccttatttaagtagcggcatctttcttaaacgaaattatctagtaagtcagtttatcccccaccctcttttgagccgttcggcatttgaacaaatcgctttcgattatatttggtcagggaacgcatatttagaagaaatcaaatcattaactaaaaagacacttcaatttaaaccaagcctctcaaaatacatgcgagtgggtcaagatggtcgttatttcatgattacaaatgatcatcttggttattctgaatatgaatttactgaaggccgaattactcatatccgcgaatcagatattgatcaagaaatttatggcaagcctgaatatatcgcagccttacagagcttatggcttaatgaatcagctacacttttccgtcgcaaatactataacaatggtagtcatgctggtttcattatgtatgtgaatgaccctgcaaatgatccacaagatattgataatttacgtcaagctttaaaagacagtaaagggccgggcaacttccgaaacttgttttattacagtccaaatggaaaaaaggatggtgtgcaaatcattccagtttctgaaatcgcggctaaagatgattttgcaaatattaaaaacattacacgggatgatgtactagcttcgctccgaatccctccccagcttatgggtatcgtgccaaacaattcaggaggttttggttctgttaccgatgccgaggatgttttctatagtaaagagatcgtacctttacaatcacgcttatcacaaattaatgaattaacaggcatagaattaattcgttttaaagaatatgattcgaaaaaatccgcttaa

SEQ ID NO: 54395 - DNA, 249 bp, Acinetobacter baumannii
atgattcgaaaaaatccgcttaaaagttattctatggctgttgaatttacatacctttatgaaaccgataaaaaagatagtttacctatcttggctttagttacattagacaatgagggatattttaaaactctctcaagtaccaatggtaagttgtttaaaataattggtagtgatcgaatagtaatagaaggtaaagaatatatttggcgagaaagttcagtatataaaagaaagccccttaaataa

SEQ ID NO: 54396 - DNA, 180 bp, Acinetobacter baumannii
atgagcttcaacgagtttaaacgatggctaattgcacagggagttatctttgtgcgtaaaggtaagggatcacatatgattattgaatttaacggtaagaagactgttttccctaaccacgggaaaaaagaaattcctgaaggcactcgtttaaagatcaaaaaggatttggggctttaa

SEQ ID NO: 54397 - DNA, 414 bp, Acinetobacter baumannii
atgaaatgttatgtcagtattcatagggagggagaggcttttatagtcagctcaagtgaactccctgaactaaatagtgtaggctatactttagaagaagctttatcagaagctttggatggtatagaaacagtattcgaaatttatatggatgagcgtaaagccatcccattaccatcgaaaggtaagaaaggtgaatatgcagttcatcttccagttcgagtcgctgctaaggtacgtttatataatgagatgatctcacaaaacgttactaaagctgaattagctcgtcgcttggggtggttacagaagcaagccgatcgtttgctttcattaaagcattcaacaaaactagaatcgattgaaagcgccttccaagcattaggcaaggatctcgatatagttatcgcataa

SEQ ID NO: 54398 - DNA, 528 bp, Acinetobacter baumannii
atgatgatttacatgcactttaaatatgttcgacaatcttatgatgattacgttttaagatatgattcatttcctgatcttatttttttgggaagtagattttttaatgacttcttttctgaagatagtaatttacgaaaactttatgacgtccataattggaaagtcttgaatgatccagagaaaaaaaattatgaaatttttggatgcaaggtaattctcgtcagtgatgaactttataactttggcttttttgagtttgatgacttagacaaagcaaaagatttcgttatagctgacgaatatcgtaatagagcacatcgattgtcatttgcgaagaacgtactaaatgtagattatagacctcgtgatctttctcaagttcggcctactactgttactttaaatattccttttttcgtcattgatgccttcaaactagaaaacataactaagaaagaaattgaacaacgcaaaagtgattaccagattcgaaaggggatatatgaacctgaaatttcgttttag

SEQ ID NO: 54399 - DNA, 237 bp, Acinetobacter baumannii
gtgctcaatcagatcgtgaacttcctaacatcacatccagcttacaccttgacactgtatggatttaccaatcagcaggcaaatgaacaatataatttaaaattgtccttgcgtcgtgcgcaggcagtatctcaatatctaactcagcaaggtgttgccctaaatcgtattgcgacagaggcaaaaggtaagacccagctgattaaaaatgaaaacccgtatcacacaaatggatag

SEQ ID NO: 54400 - DNA, 828 bp, Acinetobacter baumannii
atgaaatatgtcacacctgccttgcgtcaattttatcgtggtgctgcaactgttgtggtttgctggagcgtgatggtttgggcaaaaaatcctgatcatttggctgcacctgttatggcgcaagattctccagatactacagcccagtcaggtatttataatccaaaagatcaacaggttgctgccttgcaaacacgtctcgttccttttttgaatgaacagggaattgaacgttatcatgctgtcaaagcagccgcatggttgacttatgcagcccatgagggaagtgaaaaaagtgcaacggttgcgcgaaaagaggcccttgcccaggcggaaatgattatagtggcattagagcaaggtcaggctaagcagttaagtttaaccacaccgattctgtctacctcaagtgtaatgcgtcgggatttatgggcaaatactgaattattgaaacagcatgcaggtttttcctgtgcccagtctcagattgcacaggcagaggtgatgctggtctgggcagccgctgaacattgtgagttgggctggcgacattcacgggagctgtttttatcagcacagcgcttaattgatcaggcaaatagtcgggcgtttagttgcagtgcagatgttcctcaacagcttccgaaaattagttatccatctttacaggaactgaatggcagtgagcagggatgtcatggtgtggtcggaacatggccgatttggtcgccacaacaaaaaacagtcatctctgaaaatagccaggttgctgatcaacctgtgccgaatgttgtacattttgctttggatcaggcagttttatcgtaa

SEQ ID NO: 54401 - DNA, 6093 bp, Acinetobacter baumannii
gtgctacaacagaagcaatctaacgcattccataacatgacattcatgttatcaacgttgacagtatcaatattgtcagcgcagtacggttatgcagcgaatatgcctgaagtgggtagctctatccaaaatatcgcctatgcaacttatgttgcacccgatggtaaatcccaacaatcagtttcaaataccgtagaaatcaatgtttctgctctttacgcaattgctttaactactccaccagttcaggaaattgaaccaagtacccgtgttatttgggcaaataccttagtcaacaatagtaatgcgcctgtcaatgtacaactagaagcgttaacaataaatgaactaagcaacgttaaaatttatgtagataccaataaaaacggtcaattcgacaccgatgatcaacaactgacaaccaatgttgccttggcggtaggccagagcgttcatttgtgggtagttgcaacagctagtgccacattgactgaaagtcagcagttaaatttaccgttaaaagcaacacttgttgaggataatagtgtaatagcaacggctacagatagtgccatcagctatggaccacaactggttgcaaccaaagaggttgtccagaaaacttttgagccatcagccaatgccagctatgaccttaactatactttggccataaccaatcaaggtaaaaaagcggcaaaaccagtggatgtgatgatcgatggtcaggcacagaaaatggtgcttttagttgatgatctgcctgccaatacaacatttaagtctgcacagttaaaaaatacgcaggccaaggttttgtacaagcaaacaggcaataactatacaacgaccttgccaagtgatttaagcaaggttgatcaattggtggttggctttccacaaatagacgccaatacaactgaacaagtcgatcttacggttacaatgaaccgtaatattgccaaaacaacggttaaaaatacctataaagtttcgtatgcaaccacaaatagccaaaaagaggtattgtctaatcctgctttaaccgtggtaggtggtcttgcagcgattaataataaatctggtgatttccaaaatgtcttgactacaggcagcgtgaataaaccactttatcttgaagcgcaaaatgcccgctgtaatgcagaccgttatactgccgacaaggtgaaaattaagattaaatcagccaagacaggtgatcttgaagaagtcattggggtagaaactgggccgaatacaggcgtattccattacacgctaccaaccgcatttgcggaagttggggtttcttatgatgcgttattgcagaccatcaaacgcgatcaggtacaggttagcctgacggactgtctggatgcacagggtaattcaacccagacatttaccgatattagtactcaggtgcttattgacccatatggcacagtgtttgatgccaagacaggtttacctgtggcgggagcaacggtcactttattagaccagaatggccagccaattgcggacaatattgcatacaaacttgatgagcagactggagagctggttacaattcctgccaagcagatcaccaatagcgagggtaaatttatttatccccttgttaaagcaggaacctacagttttgttgtggatacaaccacaattcctggaaatacacgttatagttttgtcagtgataaatcggtttatccaagtttccctgcggataaggctgttgatctggaatggtcttatgctggcaaattcaccttaaataatggtgatccagcactcaatattgatattccaattgatcctgatttgactgtaccaacctcgccgttatttgtacaaaaggttgcgaccaataaaaactcggaaatcggtgagtttgaagaatataccgtgacggttgccaatcgtggcacggtggattccaaagatgtttcgattactgataccttgcctagaggctttatctatgttcagggttctatgcgtatcgatggcaccaaggttgctgacccattaggtggaaaaggtccttatttgaaacttggtttaggtacactgactccaagtaaggaagttaaggttcagtatcgcgtctatattggtccaaatgccttgaatggtgatggcattaaccgtgttcgggcaaaagatggtcagggaatcgaatcaaacgaagcatctgcaaaagtagaagtaactcctggcgcaatgatctctgatggctttattgttggtaagatttttactgactgtaaccgtaatggggtacaggatgcaggtgaagtcggtgtgccaggtgtgcgtatttaccttgaagatggtagctatgtggtgactgacagtgaaggtaaatatgatttttatgggatcagtgccaaaacccacgttctaaaggttgaccgtaccagtttgccagttgattctgagttggtgttaattggcaatcgtcaggcaggtgatccaaatagccgttttgtggatttaaaacgtggtgaactacatcgtgccgattttgcaattgccaatggtacaggacaatgttcgcaagccttattgcaacaaatcgcagaacgtaaaaaacgcattgaacaggacaacaccaatttagaacaggtgttacgttcagaccttaccattgatccagttttttccaagattaccgatgttaaaggtcagccagcaagtggttgtatctcggcacagggaatcagggccaattgtaaccttgatttttccaaggaacaggctaaggaactgaaagaggttacttttgaaccagaaaaatctggcgttgcttcttcagttgccttgccactgactgaaacattggcagcaactgagagtgtgccagccgaatccactcaagctgcgaaaatgcttagtctggaaacagtgctggaaaatgctgccaataatcagctagaaattatcaacttaaaagatgggcagcttcttggttatgcccaaacagcggttcaggttaagggtgctgctggcacacaactacaactgtgggtaaatggcacacaggtttctgagaaacgcattggtaaacgtgcaatattgcctgacttacaggttgcaggtctggattttatcggtgtcgatcttgctgtgggtaaaaacagtattgaagttcgtcaagtcgacatgatgggtaatgttcgggatagcaaacaggtcaatgtgattgtccctgaccaaatggataagctgttacttgagtcagccaaagtacagccgcaagccaacggccgtgattattttaacgtgaccatgaaaattgttgaccgtaatggcacattggtttctaccagaactccagttacgctcgacagctcgattggtaaaattgagttgactgacctggacccgaaacaacctggtattcaggtgtttgttgagggcggtacacttgttgtgccaataaaggcgccaattgaggcgggtgaaggaacgctgtcggttgaaagtggtatttttcatagcagtacaccaatacgtttcttacctgatttacgtccgatcattgcagttggtttggtagaaggatcacttaactttaagaaatttgacccgaaacagttaagcaatgtcggttcgcaggatgggtttgaggaagaactgcaagagatttcatcatcggacaatggcaaaagcaatgtgacagggcgtgcagccatgttcctgaaagggaaagtcaggggtgaatatctactaacccttgcctatgattctgacaaggataaaaaccagcgcttgttccgtgatattcgtccagatgaatattatccagtttatggtgactcggcggcgaaaggttttgatgcacaaacaaccagtaagctctacgtgcgtgtggataaaggccgttcttatgccatgtatggtgattatgttacccgtactgaaaatgatgagggcctggctttaggtcaatatagccgttcattaacaggtgttcgtggggctgtcgaaacagaccgctataaagtcacggcctttgctgcgcagaccaatacgcaacaggtgaccaatgaacaacgtgctatggggatttcaggtccgtatagcatgggcaatgtcaataccgatgatgtgcttgccaatagtgaaaaagttgaggtggtgacccgtgaccgcgataatccaggcctgatcatttcgcgtagcactttggcacgttttaccgattatgaagtagatacctttagcaacagcatttacttaaaagatcctgtaccaagtgtcgatgctgacctgaatccagtctatctgcgtattacagtggaatctgagcagggtggggatgaatacacggttggtggtgttacaggctcggtgaagctgctggatcaggtgaaagtgggcggggcttatgtaaaaagcaataatccactaacgcaggaccagttggccagtgtcaataccgtggtgaaatttgccgacaagggtaaattgattgctgagtttgcccgttctgaaaatatcaatgacggtttaaactctttaacacagattaacaccacaccagatgcaactggtaaattatcgggtaatgctgcacgagttgaattaaactattcttataaagacttggaaatgaaagtttatcataaccaagctgatagagaattttataatacagcggcaccaatcaccgctggacgtaaggaaagtggtataaaagggcgtgcgcaactgggtaagatcggtttggcaaaactggaggccatccgtactgaagatttgcaaagtggtgtcaatcagggtgtttctgccagtatcgaacgtgcgatcagccgtattgtcgcggttgagctgggtctcaagtactacaatgagtctgagaatccagcactgttgggggcttcacaaacagcgccgtatcatggtttaaccgcacgtacaaaaatcaccacacagcttccttggcagggttcaaatgtttttgctgaatatgagcaggatgtttccgaagctgagcgtcgtaattttgccttgggtgcgaattaccagattaattcaaaactacgtgcctatggtcgccatgagttggtgtccagtattcagggactgtatgacctaaataacaatcagcgtcgcaatgtcacagtgtttggtctggacagtaaatataacaataacggtacggcatttagtgaatatcgtgttcgcgatggcatcagtgcgcgcgaagctgaagctgcaatcggtttacgtaaccgttgggaactagaaaaaggcttctatgcaaccaccagttttgaacaggtgaagtcattgtcaaaagcagataccgataaccaaaattccgataacactgctgcatctttaggtgtggaatatctggccaatccaaactggaaagctgttgcgagaattgaagcacgttgggctgaccagtctgacaccatcctgaataatctggggattgcctacaaatattccaatgacgtgactttattggcgaaaaatgtagttagcctgactgatagtaagaatgaaaacagtggtgatcgcctggttgatcgtttccaggtgggggctgcctaccgtgacactgagcacaatcgttttgatgcgctgaccaaggtggaataccgctatgacagtaacaagtcagatttaaataatccatacttaaagcatgtctatattttttcaaatcacttgaattatcatccaagtcgcgatattaccctttcaggccaatatgcagttaaaaatgtggacacaacgttctctggtttggagtcaagtggtatgacacatatgcttagtggtcgggcaatgtatgacatcaatgaacgttgggatgcgggtattcatacaggcgtgttatggtcgaacatgagttcgggccgccgtgttttggttgggggggaagtgggctatttgctggctgcaaacctctggttatcaggtggttataacttctctggctataaagatgatgatctggtggatagtgacacaactcttcagggcgcatatatacgctttagattcaagtttgatgagaacctgttttctcgcaacaattctaccgtgaacgcttcaagagaaccataa

SEQ ID NO: 54402 - DNA, 3966 bp, Acinetobacter baumannii
atgtgggtcagtaagcaaaaaatgaaaaagaatatctctaattacagcatgatgaatcataaagttagttatatatatactttggttttgtttatcttaacttgtttgatgtgtagtcaagctatattggctgctccaccaaccattgagatttattcaggctctgggtctgggcagggtccaactgcatcttcaggtacgcacacttttttgttaaataggaataatccatccgataataatagtgagacatatgcaccgacaacaacggttagttatacgattactaactcagtatataaccgtacgccttattcaagcgctcctagttcattgactaggccagatatttttattggtggagacactgattcaaatgcagttgtacaacctgtaaatattttaagaccgatgaatggttatggtagtcccgctaacaatatgtttgctgcttccttacaaaatgcgccaacaggctgtactaatggcactgcttgtttaagtacgaatggtggtattagtgttagtacaaaccatggtgtcgctatggaaataactacaaggggattaaatgcaacaaatgcgccaacaaatactagaattaaaatgggcactatagttattaactttaacagagctgtaactaatccaatattacaagctagcgctttaggtgcagaaacaacaactggtttaggttttggtgcggagtttacattaacaagtagtaatgttcctgtagtaatgagtcgtttagcgggaagtaaagaattaacagttagcggaaatgatattgtaaataatgccactacaattagagcagccagtgggaatggtggtgcgagtggaagtgtatatatcaaaggtaagggaattacatcattgacatttgatatttatgttcgaggagatgggcgagcttcgacttggtcaactactggagcagatgctttcttttttggcatctcaagtatggatgttgatagtgatgtcaccttggttaaaaaacaacgtgtaggcaacacaggcacatttgtatcaactcagttggacaatgtgcctctcggttcattaatgcaatatcaattggaaattactaacaatacaccatcaggtgcaacattgggtggcacagttgtaaatttaccttttaatgacacactcccagtcagtttaaaaaatgtttctattgtcggaacaccagctacgacacaaggtacaggaggttcaagccctgttactacctcctgtactcctacattaacaggcgataataccgcaggctggaaagtctctgggttatttacgggagcaacaacagcaacctgtataatcacgattcagggtacagcaaccgcagcaggtacgttaaccaatacagcaacaatagagtcaacctcatcaaatacgctagtgagtagttctgttaatgccgtgatcgttaacccaacagcaattacaccagatccagttatcaaagaagctcgttttacaattactcctgatttaccaacgattgtacgaggacgagttggtacacaaaccatcaatattaaaaatgaagggccgaacgatgcaaccaatgccatcgcaacctatattgccgcaccacaaacgggtgtgacagtgacgggtgtaagtgttgtcggtggggcggcatgtgcccaaagtggtagcaactggacatgtcctttaggtagtatggctaatggggctacaaaacaattatctgtgagttacagcacaacggcggcttcctctctaggtactgctcagcaagcaaccgttaaagtatcgagtgatgaatttaacccaggtagtggtgtaggagagacactctataaagtatggggaagtaatcaacaaaatgaatatagaccaaatggtgcattttgggtgggttatgaaggtactgggggaactacaaaagttggtgcttttgctgatgagagttcatcaatcgtaagtgcgtggccagctaaccaagcgagtccaacaggtgggtacttaatttctggtaacaatggtaccagtgattcaacttatggagcatcaagtacaacagcttctgcgatgattcaaagaattattaccaatatgagttcagatgcaaatgcaacagttcaactaaataacattgatgtcccagacattggggataaccgtagagcatgggaattcactactggggtgtatattgctaattcacaaacaataacggtatgtatgggtaacaccagtcttggtattgatgatagtggttatatcatggtggatggtgttgtagtgagtagctcaaataactatttgggtggaggtatttcatcatcaacatcttctgctttaacaccaggttatcaccgaattacttatcgtattgctaacagaaatacttattctggaaatagtgagagagcgtctggtggttatggatcaattggtttatcactcactggcagttgttcaactacaaattatgacaatgcaactacgagtggggtccctgcaagtatcaatattatagatggtgcaaaaattaaaattgctaaaaactctgtgaatgggacgggtacgtttaactatattaatcttagcaatcttgtaaatagtacaacagcagttaccacggattctgtaactacagtcacagcaggaaccacagcaacctctgcacaacagctttgggcgcaaacattgaatacagatgtttcttttacagaaagtgctttagcaggatatgttttatcaagtgttagctgtgtagatgcaaatagcggtgtaacgggtaatacgggtactttttggacgcttgtaaataatattgtgacgattcccgctgttcgcataaaagagggcgccgatattacttgtacgtttacaaatacgaagcttatttacgttgatattactggacgagtatttgttgataatagcggaacaacattagatgtgagtaaagcatataatggcatacaagatgcaggtgaagttgggattgcaaatagtacgattcgtttaaataactgtagtactacgcagttagcttcaacagtgacaagtgcgaatggtgattatgctttctcaattgaacaaagcttattaccatcatcattttgtattgttcagcagaatttacctgaatatatttctgtcagtgccgatagtataacggtagcaaacacaagtgcgaccagctatccaaacaataactttgccgatgttaaactcaatgtacttctaacagaagatggacaacataccattaccgcaggtgaagtgactgattatccacaccgtttaagtacccaggcccctgtttgggtaacaaagttggaacaaacccaatcaaactcaaacaatgatcaaccttggcaggcattggtttaccaagacaccaactgtaacggtaccgttgatacaggtgaaacagtgtttgatccaacagcctcaggtactgtgttgttgcaaccaaacactgatatctgtcttgtacaacgtgtatttgcaccgaccaatatttttgctggtgcacagcatattggaacgctacaggcaagctatgctgtgagtgcattaaacctcacagaccagaaaacccaacaacgtcaggatgtgacacttattggtagtgcaggattaacactgacaaaaaaagtacgtgcagtgaccagttgttcttcaactccatctgattcttcaggctttttagtgaataacgaagccacaaaacagcaaaatctggagtatgagatcacctataaaaataatagtgtgaagaacctacagaatgtcaaagtaaaagatagtttaccaactggtactaattttggcagtctaagttgcggcctaacaccaagtggaaatacttgtaatgcaacacgttctggagaagttcttgaatggactttaacaggtttgctaaaaccatcagccacaggaactttaagattttgtgttagtcagtaa

SEQ ID NO: 54403 - DNA, 237 bp, Acinetobacter baumannii
atgctaactcgtgtggtgtttaaccaaaaaggcggtgtagggaaatcaagtattactgtaaatttggctgccattagtgccaaacatggcttaaggaccttggttatcgatcttgatcctcaagccaactcaagccaataccttttaggcgaagaagcaacatacgctgctgataaagcagttttagaaccaaatattgaaaacttctttgaagatgtgttgggaaataatcaataa

SEQ ID NO: 54404 - DNA, 747 bp, Acinetobacter baumannii
atgaataccatgcttaaaacactccagtttcgcgcagaaacaacggaaacactttgcgctacccatcatatacccttgatggaaattgcaggtcacaggctctgtaaattgtgtgccaaagaaaccgtccatcactcaaatgcagcctatgaggatgaactgcaacagcgattgctacaacagaaaatcaaaaactcagggctcaataaacgctatctggaccgtggcttcaagaattttgtagttgcatgccctgctcaagacaataccatcaagctatgtcaggcctttgcacaacagattatttctgaccaaaacccgaacatgttgatgattggtacaccgggtacaggtaaaacccatctgagtgcatcaattattcgcaacattctgcataacagtacaaaatctgcacgctactataccagtgcagaaattgctcaaaaaatgatggacacatggtcagatgcttcactctctgaaaaggaagttatcgaacatttctccagttttgatttattggtgattgatgaatatggcctgcatgaccggcatgagaaacgtttggagatggtgcataagatcttatatagccgttacgacaacatgaagtcgacgctgctaatttccaatttcacattacaaaatatacagcgggatttaggtgtccgattatggtcacggttgcatgaaaataatttgactgtagtgccgtgttattgggatgaccgaagaataaatggatag

SEQ ID NO: 54405 - DNA, 1785 bp, Acinetobacter baumannii
gtggaattaattgattttttaaaaaatattcagagtgatgtacaaactgaaatatctacacgaactgaagaatcagatcaacaaggtttatatgcagaagttatatttactgaaattgttactcagcacatgtcagagattggtatgacattcgagcctgagatgtgtcgttattatgcaaatatacaaggtatactccgtttaagtggctttgcaatatctgaagaagccgatcaattagatctatatgttactgaatatagtggcaataacgaattagaaaatattcctgactcagaaattaaagcagcagcagaacgctgtttgagatttctcaaatactgtgttgaaaaaaagctatcttcaaaaatggatgagtctcatgaagcatacccattagttcgtacgatagaagatggttattctcaatttgaacagatacggatttatgtattaacagacagagtggcaaaaactcgtcaatttcaaagtagagaaatacaaggtaaaacaataaaacttgaagttattgatatatcaaggctatttaatcacctacaagaaggtaaacctagggatgaactcattgtgaattttgaacatgtttctggtagcccacttccatgtgtgtgggttccaaatgagcatggagagtatgattatgcaatgactgtaattcctggagaggctttaagatatgtatatgaaaaatatggtccacgtattctagaggcaaacgttagatcttttttaagtcagacaggaaaagtaaataaaggtatccgtgatactttaattgatcagccagaacgtttcatggcttacaacaatggcgtggtaattatcgcagatgaagcacatttaggcagattagaaaacggtggaattggtatctcttggttaaagggaatgcaaatcgtaaatggaggacaaacaacagcttccatgttctttaccaagaaaaaaaatccagcagttaacctgaaagctgtgcatgtacctgcgaaaatcattgttttaagaaaaacagaccctctggaagaagagcaactgatttcagatatttcacgctatgcgaatagccaaaatgcagtcaagcaatcggatctttcagcgaataaaccttatcatattaatcttgaaaagttagcactatcaacttattgccctgatggtgtaagccgatggttctatgaaagagctgggggaagctataaagtaatgcttgagcgtgagggcaaaactcctgctggcattaaacgtatacaggaacttatacctaccagcagaaaaattactaaaactgaattagccaaatatgtttgtgcatgggagcaaaagcctgatctggtgagtttaggagggcaaaagaactttactgcatttatgaatatgattcagtcgaccgatgaggataagcagttacaatttgatgtcatctattataaaaatattattgcacaaaccatcatattcaaaactgcacagaaagttatcaggtcaaaatttcctgctttccaagctaatataactgcatatacagtggcaattttatctcaaaaaatcggaagtcgtgttaaccttcaaaaaatctggttaaatcaaaaactttctgaaggacttgttaaacagattctgatttggtcagaggaagttaataaatacctgcatgaaagtgccaaagggaaaatgatttctgaatgggcaaaaaaaaatgaatgttgggaattattatcgcaatatgaatatttagaaaatgatcctgacattgaggagctaaagtaa

SEQ ID NO: 54406 - DNA, 528 bp, Acinetobacter baumannii
gtgaaacagcaacgcaccgccggcctggctgaagggcagataacccagttcgtcgaggatgaccagatccatgcgcagcagagcttgggcgatccgcccggctttgccgtcgtgcttttcgcgctccagcagattgaccagatcgaccgtggagtagaagcgcacgcgcttgccgtgccgggtgatgccggacacggccagcgcagtggccaggtgggttttaccggtgccaggcccaccgatcagcaccacgttctgcgcggtgtcggtaaaggccagactggccagttcgctgatcaaacgagcgtctgcgctggaggcgctgaagtcgaagccggccaggtcgcggtgcatcggcagcttggccatgttcatctggtggctcaccgagcgcatggcgcgatctgtgtgctcttgttccagcaggtgttcgagcagccacttggacgaggctgtgttcgactcaccctgcgcagtcaactccgcccaggccgtggccatgccgtgcaggcgcagctccttgagtga

SEQ ID NO: 54407 - DNA, 444 bp, Acinetobacter baumannii
atgaagtttgaaaagtcacagacagcaatcgaccacctgactcccgagcaacaccgaattacccaggaggcgggcaccgaaaggcccttcacgggcgagtacaacgacaacaaggagcctggcatctacgtcgacatagtgtcgggagagccactgttcgcttcgacggacaagttcgattcgggtactggctggcccagcttcaccaagccgatcgtttcggcaaacgtgaacgaggtgcgggacagcgcacacggcatggtccggacggaggtcaggtcagtacacgcagacagtcatctcggccatgtgttccccgatggtccttccgaccgcggcggtctgcggtactgcatcaactcagcgtcccttcgcttcatcccgcgcgacgagatggagtccgagggatacggtgaatatctcgatcaagtagaggaggcttaa

SEQ ID NO: 54408 - DNA, 540 bp, Acinetobacter baumannii
atgcatcagcgcgctgttctcgcaggaggatgtttctggggcatgcaggatctgatccgcaagcggcccggcatcatctcgacccgtgtgggttacacgggcggcgatattccgaacgccacgtatcgtaatcacggcacgcatgccgaggggatcgagattgtcttcgacccgacagtgacgagctaccggaacatcctggaattcttcttccagatccacgatccgacgacgctgaaccgccagggcaatgatcgtgggctctcctaccggtcgggcatctattatgtcgacgaggagcagaagcgcgtcgccgaggatacgatcgccgatgtggatgcctcggggctgtgggatggcaaagtggtgaccgaggtccagccggtcggcgagttctgggaggccgagcccgatcaccaggattatctggagaagcacccgggcggctacacctgccacttcgtccgtcccggctgggtgcttccgaagcgccaaaaggttgacgacgtacagccagcggccgggaccgcggcggaatag

SEQ ID NO: 54409 - DNA, 705 bp, Acinetobacter baumannii
atgccagacctctcgtcctttccgatcacgcagcgctggccggcatctcatcccgatcgcctgcaactctacgcagcccctacgcccaatggcgtcaaggtctcgatcatgcttgaggagactggcctggcgtacgagccccacctgatcgacatctcgaacaacgagtcgaaggatccggcgttcgtgtcgctgaacccgaacggacgcataccggcgatcatcgatccggctggccctgacggtagacccatcgccttatgggaatccggtgcgatcctcctctatctggccgacaagacgggtcagttcatctccaccgaaccaggccagcgttacgagaccctagcgtgggtgttctttcagatgtcggccatcgggccgatgttcggacagctaggctttttcctgcgatttgccggcaaggactatgaggacaagcgacctcggcagcgctttgttgatgaatccacgcgtcttctcggggtcctggatcaccggctggagggccgcgaatggattgtcaatgattactcgatcgcggacattgcgacgtttggctgggtgaatgcgctggtcgaattctacgcagcgggcgacatcctcggcctaagcagctattcgaacgtgcaggcatggctcgaacgcgggctggcgcgaccggctgtacagcgtggcctgcgaattcctgcgaggcctgcatga

SEQ ID NO: 54410 - DNA, 969 bp, Acinetobacter baumannii
atgaccattatcgccgcatattattacaacgaaggtaagcgagtccgtgaaatcaggctcgatgagcacgtcgaactaaacgagaatcgctcgggcttctgctggatcgcgcttagcgagcccaccgcagacgaactcagcgcgatccagacgacgtataacctccatcctttggcgatcgacaacgccatgcacccgctgtgcccgcccaagctcgaggtctacaacgatgagttgtacgtcgtcgcccagaccgccgagctggtcggcgaccggatcagctacggcaagatggcgatcttcaccggtcacaatcaccttatcaccgtgcggcacggcaatgccggagcgctgggcaaacttcgggagcaactcgaggcatcgccgacgcagttcggcaagggtgtcgactatgtgctgcacgcgatcttgcaccgagtggtcgaccagtatctgcccatcttcgaaatgatcgaggacgacgtcctggcgatggagcgacggtcgctgcacgatttcctcgggccagaagaggtggcgcgaatcttcgaactaaggtccgaactcacgcggttccagcgcacgctcggggctatggccgagctggtgcgaaagctcgttcgcggccactttccctgcatcagcgccgaaatgacaccatatttccacgacgtcgcggaccatgtccaccgcgtgcagtccatggtcgacggcctcctgcttgtcctgtccacggtcttcgaggccagcagccttctggaagcgcaaaggatcggtgtggtcactcgccagctcgcggcctgggcggcgatcttgacggtcccgacggcgatcgctggaatatacggcatgaactttaagcacatgccggagctggacacggcctacggatactttgtcgtgctcggagtgatagcgatatcgtgcgttttcctatttgtgcgcttcaagaaggctaagtggctgtga

SEQ ID NO: 54411 - DNA, 1014 bp, Acinetobacter baumannii
atgaaagccattggttacaaggttccgggacccatcgccgcggatgccgcgctggtcgacatcaatctgcctcggcctgtcgctgcaggatacgatatcctggttgaggtgaaggccgtctcggtcaacccggtcgactacaaggtccgcaacagcacgccgccggcagatggcgattggaaggtgctgggatgggatgccgccgggattgtgcgcgaggtcggccccgacgtcacgcagttcgagttaggcgacgaggtctattatgccggatcgatcacacggcccggtaccaatgcggagttccatctcgtcgacgcccggattgtcggtcacaaacctgcgtcgctctcctgggcggaagcggcggcgctgccgctgacgacgttgacggcctgggaggcgatgttcgaccgcctggacgtggcgaagcccgtacccggtgcggcggaggcgatcctcatcatcggtggcgcgggcggggttgggtcgatcgccgtccagatcgcgcgacagcgcacggacctcaccgtcatcgccacagcctctcgaccggaaacccaagagtgggtaagagggcttggagctcaccacgtcatcgaccattctcgtccgctcgcgccacagatcgccgaactcggcatcggtgctcccgctttcgtcttttcgaccacacataccgagcaacatgtcgccgacatcgccgaactgatcgccccacaaggacggttcggactgatcgacgatcccaaggcattcgatatcatggttttcaagcgcaaggcggtgtcgatccaccacgagctgatgttcacgcggtcgatctacggcacgcccgacatgaatgagcagggcgagattctggatgcgatggcagcgctggttgacgacggcaaaatccgcacgacgctgacccggcgactgtcgccgatcaatgccgccaatctgaagacggtgcatgcactgatcgaaagtggcgcggctaaaggcaagatcgtcctcgaaggcttctaa

SEQ ID NO: 54412 - DNA, 432 bp, Acinetobacter baumannii
atgaccaaatctattgccaccgcctcgatcaaccgcgaaaccgcagtcgccctcatcgacgcggcgctcgctgcggcccgtgccatcggcatcccggctgccgtcgccgtcgtcgacgccaccggtaacctgcgcgcgttcgagcgcaccgacgatgcgccgttccttaccgtcgatgttgccatcgacaaggcctggagttccgcctcgtttgggttcccgacccatgtctggaacgactatgtgaccaacgatccaaaagtggcgccgctagcctatcgccctcggatggtcgctgtcggcggcggttatccgattctggaggatgggaagttgatcggcggcataggcatctccggaggcaactatcagcaggatcaggatgcgtgcgtcgaggcactcatgaaaatcgggttccagttgccagcctga

SEQ ID NO: 54413 - DNA, 291 bp, Acinetobacter baumannii
atggaagcgttcgtcgtctttacgcgggaagaaaccagcgacccacatgcactcgcaacctattctgcaggcgtcggaccatcgttcgatggtcacgacgttacctttctcgccgcttatggcgcgatccagcatttggaggggccgcccatcgaaggggccgtaatcttgcgtttcccgacgatgcaggccgctcgcgactggtatgacagtcccgcctaccaaaccatcgctgctcaacgctttgccggttcccgttaccgcgcctttatcattgaagggcggcggtga

SEQ ID NO: 54414 - DNA, 471 bp, Acinetobacter baumannii
atgaacgagatcgaacgacaagcgcctgagctgcgggtgcaaaaatggattggcaaagatggggaaagtatcgcgccgttcaaactgtcagatatcgggcccggcccgaaaatcttgtttgccttccagcattggtgccaaggttgccatttgcatgggtttccgacgctacaaaagttgcatgcagcgttgagctcaaaagacgtggggttcgcagtgatccagaccgtcttcgaaggaacgcatgagaataccttcgagaagttgcgcgtgaaccagctcaagtatgagcttcctatcgttttcggtcacgacgagcaaccgaccggctcgccgtttccaaccttcatggaagactaccgcacacgaggaactccgtggtttacggttatcgacgctggcggtagcattgttttctcggacttccatctcgacgcggagcgactagtgaagcaacttgagcaaggttaa

SEQ ID NO: 54415 - DNA, 603 bp, Acinetobacter baumannii
atggtcaccagaggtttcaccggtcgcggttcaggcgaccagtccgatcggattccgccaggtcagcatctggtggaggatttccctgttctgtcggccggccctacgccgagggtagagccctccgactggaaattcacagtcaaaattggtccgaagcccgtcaaaacgtggaattggggcgaattcaacactctaccaaagacccaggtgacaaaggatattcactgcgtcacctcttggtccaaactggataccgtttgggagggtgtactcattgaagacatccttgcagatgcagagcttgatcggcctaccgatttcgtcttggcgcactgctacgataattattcgacaaacgtccctctgacggatctgctttccgggaaagcgatggtcgccctcagttatgcgggcaagccactttcccgcgatcatggggggccggcgcgtcttctagtgccgcacctttacttctggaaatccgccaaatgggtgaatgcgctgcaattcacgacgcgtgacgaggccggcttttgggagctgcacggctatcacatctacggcgatccgtggcgcgaacaacgatacacccatgactga

SEQ ID NO: 54416 - DNA, 747 bp, Acinetobacter baumannii
atgactgaaaacgaagcgcaagtccgttcgtggcaatcatgcgtgatcgacgacatcatccagcaaacaccgagtatcaagagcttcttccttcggttgagcaagccgttcgcgcacaccgcaggtcagcacgtcgatatccggctgaccgcgcccgacggctacagtgcaatgcgcagctactcgatcgcgtcatcggcagtttcgaccccgatcgtcgagatagctatcgagcgcatgccggatgccgaagtttcgccgttttttcacgacatcgcggcgattggtgacgaaatcgaagttcgcggtccgctcggtggccatttcctttggcctgagcctgccatagatccggttctgttgatcgggggaggctccggcctcgtgccgttgatggcaatgatccggcagcgccgcgcattggcccaagccgttccgacagcgttgctcctgtccgcacgaaccgccgaggacgttctcttctcagaagaacttcattgcatcgaaatcagcgatccggcgttcgtcctggcgctcgcgattacgcgcgagaaaccggttcgcgcatcggactttgcgcgacggatcgacggcatgatggtccaagaaattctaaccaggcttcagggaaagccgacgcaagtgttcgtctgcgggtctaacggattcgtcaacatcgcaaccgatagcgcgctgctggcgggcttggacgcctccatcatcaagacggagcgctacgggggctag

SEQ ID NO: 54417 - DNA, 273 bp, Acinetobacter baumannii
atgacaactgatgtattgctgtacaccacgaattggtgcccgttctgccgccgagcgaaggcgctcctcaaggaaaagggcgtgcgatggaaggagctcgatattgaggcggatccggctcaccggcaggccatggcggaagcgtcggggcgaagctccgtgccgcagatcttcatcaatggcacccttatcggtggctccgatgagctattcgcgctcgatgtcagaggcgagctcgacaaacttctcgggcgcaacccgcctgccacctga

SEQ ID NO: 54418 - DNA, 375 bp, Acinetobacter baumannii
atgaataaaaagcggccggttaatcttgatattcgaaccattcagcttcctctcacggcgcttacatcgattctgcaccggatttcaggaattatgctctttatttttctgggactgatactgtatatgctgagcaaatcgttggagtcagaaaagggttttaatgaagtcaaggagattttttcttcacctttcggcaaagttagtttctggttggtatactcttcatttatttatcatctcgtagccggaattcgacacctagttatggatgtgggtgttggtcatactttgaaaggcagcaatcgcgcctctactattgttttagtagtgtcgggtgttttaatggttgctggcgccgtatggatttggtag

SEQ ID NO: 54419 - DNA, 354 bp, Acinetobacter baumannii
atgattttagaaaaagaagcagttaaaggcctttgtgaaatggatcatgaaacatcagaagagctacaagcgttaaagagaatttggttagttcctgtggaagagtataaacaggaaaccaagcaattgatttttgtattgcctgagtatcgtagacagggaatcgcgacagagctttgccagttgttatttgcatatgcacagcaacaaaatattcagcatttatatttgcatacggatccatttttacctgcggcagaaaagttttggcggttgcaaagttttagtacagtcagtcgtgatcagctaggtatgtacgacacgatatatatgttgaaaagattatgcttataa

SEQ ID NO: 54420 - DNA, 441 bp, Acinetobacter baumannii
atgcaacaagcaggctatcgaatagtctatgatcaaactcaactctcccagatgaagttaggaaagaacgaaaaattattgggtttgtttaatactagcaatttaagttatgacttaaatcgaaccaaaaaaaacttgcctgaacctagcttaaagcaaatgacgttggccgctttggacattctaacccaaaataaaaatggttttttcctgatggttgaaggtgggcgtatagaccatgctttacatgacactaatgctaagcgtgcattacaggatacgattgccctaaatgaggctttggatgcaaccattaaaaaacttcaacaaagtgaccctgaattaaaaaataccttgattgtgataactgcagatcatgatcacactctaattttaaatggctatgccaagcgtaccggaaaatatgtacaaggtcagtaa

SEQ ID NO: 54421 - DNA, 531 bp, Acinetobacter baumannii
atgggtatcacgacactaacagctgcacgaatttatactgttggtgaagatggccaactgccagggtcagcatttgttcgtactttctcaaaagatgcacaggttacagatagcgcaccatcgatgggggcctatatgacaggtgtaaaaatgaaaaatgaagtgatatccatgcagactggaacaattgcagtagaactaaatcagggcggaaatcatcaatgtggaaccaatcctcagaatcagaataagcaagacacccaaactttactcgaattggccaaagtacgaggttggggtaccggggtagtcacaacaactcgcattacgcatgctacaccagcatcgacttatgcccatatttgtcatcgtgatgctgaaaatgacatagcatccccattagtaccaagttcgcaaggcgatatttatcagcgttataacgtcaaattaaaagatggggttgatgtgattctaggcgggggtaagcgtcaatttctgccgaaagatcaagggggagaacggatagactaa

SEQ ID NO: 54422 - DNA, 327 bp, Acinetobacter baumannii
atgtcgaatttttctgatccaattttcaggggttgcactcgtcctgccatgctttttggcgttccaatgttgccttttttgttggtgacgggggtagcaattcttttagcgggttggtctttttatctgcttagtgcctatgtgactttatttatagcagctatttatgtgcctatttacttctggatgcgggcaataacaaaagtagatgaccaacgattaaagcaagtattgatgcggtggcgcataagagggaaacagatccagaaccatcaaaaatggggagcaatctcattttcgccacttaaattaaagaaaaggaaataa

SEQ ID NO: 54423 - DNA, 282 bp, Acinetobacter baumannii
atggttatagagaaatgcagtattgcacaagctactgaaggttatggaatgaaaaaacagggtctatctattgctgagctaattagtaaacgcaataagattgtttatacaatctgcggattgttggtcttactgacagcattatcctttgccagatactttttaaattttagtattctttatctattaatcttgcttattccattctttactctgatgtattggatgatacaaatcactgaagatataaaaataagaaagcaggaatctattgcaaaatag

SEQ ID NO: 54424 - DNA, 441 bp, Acinetobacter baumannii
atgttcagcatcattcttagtcacgtagcgtacaggttcatgaggattaggaagagcaccatttttgccgtttggtgttttccatgtatatcctgtcttaagttgccaccattgctgaggatgatgtgggtctggagaaaaaacagcagcttgtttttgtttttcagcatcggtgatataaccagttgccttcacaaaactcgcgaactgagcaacagtgacttcagtttgatcaatccagaaacctttaacttcccgttgtttttttccaaagttaagttcatctggataagctttttcagaaccaaaattaaaatgcccatctggaatgaataccatgcctgcggttgtatttttaagccagcctgtaggaagtcctgtatagctcttacactgttcgatggaacccaaagcagccgattgaatggtatgctttggtaa

SEQ ID NO: 54425 - DNA, 1677 bp, Acinetobacter baumannii
atgaagtacaaagctcttttatctagtctttccattgctttatttagcttatctttagctggatgtaacgataatgattcacaagaaactgcggtaagtacaccaaagcagccgaatattttattcattatggccgatgacttaggctattcagatttaggagcttttggtggtgaaattcataccccgaacattgatagtttagcgcaagaaggccgaattttaactgactatcacactgcacctacatgctcgcctactcgttcacaactcatttctggtactgatcaccacttggcaggcataggtgctatggcagagcttacccctgatcatttaaaaggacagcctggctacgaaggctatttaaatgaacgctcactatcgattgctcaggtgctcaaagataatggttatcgaacttatattagcggtaaatggcatttgggattaacacctgaaaccaatgcacatgctaaaggttttgatcattcatttaccttattacaaggtttagaccaccactttaaacaagctccaagtgcgtttaagcgaaattcaacctataccgaagatgggaaaattattcctgtttcagcattgcctgatgactttttctcgaccaattattttaccgacaaattacttagctatttagagtcaggcaaaaatagtggtaaaccattttttgcctatgcagcctatacagcaccccactggcctatacaggcaccagcagaataccgtgaaaaatatcgtggcgtttatgacgttggttacgatgctatccgtaatgcccgtattgcacgccaaaagcaacttggaattattccagtaaactttgaggctgcagaaccaattgcaactcaaaatgccccacaaaaatatggcaagtggaatgagttaacagctgaacaaaaagcgcttgaagcacgcaaaatggaaatctacgcaggcatggtagaaaatctcgatgccaatgtaggccgaattattcaatatctcaaacaaaataatctttatgacaacactttaattttctttgtttctgataatggcgcagaaggttttgttcgcggaagctatggcagtgaatctggctttgataattctgtagcaaatgtaggtacccctacttcttatcattacattggtccacgttgggccgaggtcagtgcagcacctttccatttatggaaagatacagctggtgaaggtgcaactaccgctcctgctattgtgaaattaccaaatcagaagaaagctaaagaaaccaatcatagctttgcatcggtactcgacgtttttccaacattattagattatgctcatattccagtacctcaagggcaatataaaggccgaaccattaatacgccaagcggttattcttggaagtctgtacttgaaaataaatcacaaacgatacgccctgccaatttcagttttgctgatgaattgcatggtagtaaatatgcaaaacaaggtgaatggaaaattgcacttcaaggtcgccctgaattaggaacaggttcttgggagctctataacattgccactgatcgtggagaaaatcataatgttgcgcagctttaccctgcaaaagttcaagagctattagcggtttatcaaaaatacactgaacaaaatggcgtacaggaatataacgccaaatga

SEQ ID NO: 54426 - DNA, 1173 bp, Acinetobacter baumannii
atgatgagacgattagcagcccccttattatgtagtagtttcttcttgttaatggcctgtggctctaataatactaattcaaaaagtcctgaacaaaatacaactgcaaaaacagagcagaccagtgctgccaaacaaatttatcaggtcgaggcagtcgcacattttaaagagccttgggcgatcaccagtttgcctgatcaacgcttattggtgactgaacggcaaggtaagctaaaaatttttaatccacaaaataaacaagtgctagatgttcagggtgttccagcggtgaactatggcggacagggcggtttaggggatgttgctctacacccagactttgccaaaaatcactggatatatcttagttatgcagccaaagggcaaggtgggtctggtgcagtgatttcacgtgcgaaactagatttatctgatcctaatcagccaaaacttaccgatataaagcagatttggcagcaagtacctaaagtctcaggacagggccattatgggcatcgcatgctttttggtgcagatggtaagctttgggtcagttcaggtgagcgtcaaaagtttgaccctgcccaaaatatgaaaagtaacttgggcaaaattttgcgtttaaatgacgacggttcagcagccttagataacccattttatgagcaaggcggtgtcactgctgaaatatggtcacttggacatcgtaacccattaggaatggcctttgatcgtaaaggacagctatgggtggttgagatggggcctaaaggtggtgatgagcttaatattattaccaaaggcgaaaactatggttatccgattgtttcaaatggagatcattattcaggtcagcctattccagatcatcacacgcgcccagagtttaaagcgccagaaattgactggacccctgtaatctcaccgtcgagcttaattatttatcgcggacaacaatttcccgcatggcaaaataaagctttaattggcgggttatcttcagaagcaattgtagttgtagatttagagcataagcccgtaaaagaagtacaaagattagagatgaagcaacgtattcgtgggttacatgaagcacaagacggttcaatttgggtaattgaagatggccccaatgctcgtttactcaagctgagtaagaaaccctcttaa

SEQ ID NO: 54427 - DNA, 1008 bp, Acinetobacter baumannii
ttgtgtcacgttctcactcaaaaacttaacgagtattcaagccagattacttggtatatgaaccattctgttgaaagatttgaagaacataacgatgaagttcggatatttggcagtcatcaaaatcaaaagtttgatgcttgctttgatggcctactcattgccaatggtgctcgtagtcaattacgccctaaagcatgggtaaaggttgacaaagcttatccttggggggctgcgtggagtatcgtgcccgagtgccaagttctcgattctgaaattctgcatcaattttatgatcgctcgaaaattatgatgggaattcttcctacgggagcgattccaaccgaacctcaacagcgcctttcaagtgttttttggagcttacctacgccacaattacaaagctttttgcaagatgagcaggctaaacaagcttggttaaagcaagtctcagaacgttggcccaaagttgcagagtggctcaaagaaattttgtataacagtcaaactcagcccaaatggttatctgcgaactaccgtgatgtcgtcatgactcaatttggtcaaagtcgaattggagtaattggagatgcagctcatgcgatgagtcctcagttaggacaaggggccaatatggctttattagatgcttgggctttttctcaatcattgcgacaagctcaaaaaaaccagaatattgattggtccctgctctggcagcattatcaccagcttcgcggttcatctacccagttttatcaatttcttagtcgcttactaacaccactttatcaatctgaccattggtgggcgggaggtttaagagatttagttttcccttggatgtatcaaatcccgtattttcgaaaagaaatggccatcacaatttcaggtttaaaggcagggccattccgccatcttgaatatgatcaggttgctcaactacctaaagaaagcaaagaaagcagtgcgtttcatttaaaaaatgaatctctgactgatttttaa

SEQ ID NO: 54428 - DNA, 1014 bp, Acinetobacter baumannii
atgaaaaagcgcatctttattacaggcggtacgggctacatcggtggtagttttttacaactgatgtgggaacgacactatcttgaccaatatgaaattcgagttttatcgagaaactcttcggttgcagaagagcttcaaaagcgaggctttatccctgttgttggattactggatgacgatgaattactcagtcgtgaagctgaagcggcagaaatcgtatttagcactgcaaactgtgatcataaggccagtgtagttgctttattgagcggtttacacaagcaattcgagaaaacaggtcagcagcctattttcattcatacatctggtgcaggggttctaaccgagcattcgattggacttggtgtgccgcccgaattagatcgcaatcaaactgaatgggatgaacaggatgttgaaaaacatcaagacattggttatgccgcaccacatcgctttgtggatgtcgaagtctttaaagctgctaagcaaggttttgtaaaaacttatttggttgtgccaccgactgtatttggcgtgggcttagggccatttgctgcaaatcggatgtcgattcaaattccacgtttggtttatcactcattagttcgacgtcaagtcatgactgtaggaacgggcgataacatttggccgaatgtgcatgtggctgatttagctgaactgtatttgctgattatggatgctgctcaaaacggtactgcaccaagtggcgtcgaaggcatctattacccagctgccgaacatttctactggaaacaggtctctcagcgaattgctgaaatctttgatcaacagaagctcttaccgtcacctgtagtcacgatgggactgcaatcgggttggttctggggcagtaatgtttgtgttcatccgacgaactcaataaaactcggttggaaagcgacccatggcggaactgtagagatgctacgcgatgttgaacatgatgtttctttagtgatcgaagcaatgcgttcaaacaatttttaa

SEQ ID NO: 54429 - DNA, 921 bp, Acinetobacter baumannii
atgaacagtcggaatcctttagaagatcgtttctcaggaatagtgacctttattgcagtagttgaaacaggaagtttttctggggctgcatttcgaatgaatctcacgagatctgcaattgcaaaatctatttctaaacttgaacagcgtttggggttacgactttttcatcgaacgacacggcaacaaagccttacccatgaaggtggaatttattatgaacattgtctaggcatgttaaatgatatcaatgcactggaatctgaattgagagatggtcaagttggacctgaaggtaaaattcgaatcagttgccccgttttattcggtcgtcgatgtgtcgcacctgtattacgaatactcacgcgattacaccctaaaattctgttcgaaaccgagttctcagatcgtgtgattgatattttggctgaggggtttgatcttgcgattaggatcggtcctgttgcagattcaacgtctttaattgcaaaaaaaattgcggtacaacgaatggcaatttttgcctctccgcagtatctcaaacagtttgggacacccatttcaatcgaagatttatatcagcatcaaggcatcttatatggcagagcctcccatattcagccttggaccatacgagatcataaagacgcactggttaatattattttgccgagtaaagaagtgtatgatgatttgcaagtgattgctgactcagccatcgaaaatggaggcttggcatggttaccgaattggttaggtgcgccttatgtagaaacaggtcaactcacactggtaatggacagtgaacgcgtccagccgatagacatccatgtcgtatggccaaaaaccaagtacctgcctcatcgcacccgtcttctaatcgattcactcgcggaacaagtccctgtaatgatgggttaa

SEQ ID NO: 54430 - DNA, 972 bp, Acinetobacter baumannii
atgtttgatattaacaatcatattgggttcagaagaatctttgcacccaataaattgactcttggctttattctcccactcgaagcctatccagatactgctgcacctatgatgaataatcatgtggagctggttaaattggcagatactgctggatttgctgctctttgggcacgagatattccgctgcttgatcctaattttggtgatgcaggtcaactctatgatccgtttacttatttgtcatttttatctgctcatacccaaaatattgcactggcaacaggtagtacggtattaaccttacgtcaccctttacatgttgcaaaacaggcgaattcagtagaccaattatcgaatggtcgtatggttctaggcattgcttcaggtgaccgaggtgttgagtatcctgcctttgggttaagccaagaatatgatgaacgtggtgagcgtttcagagaagcctaccactatttccgtcaggcggctgaacatgagtttcctcagcatttttctgctcgttttggtgaattagatggcagtttaaatctgctgcctaaggctcatcaaagtcgagttcctgttgtggtgactggtagtagccgtcaggatattaactggattgcagagcattcagatgcgtggttgtattattttattgatgcgagtcgattatcacctttactgcatacgtggaaagttgcttcaaaagcattcacgcaagatggtttacctaaaccatttgcacaagggttattcttagatttagcaagtaatccagatcatcctgttcaatcgatccactcgggtatgcgagtaggacggaataccttaatcaagtatttaaaacgcatacaagatatgggtgttaatcatctcacttttaatttgaaactatcacagcgtcctgcagttgaagtggtgagtgagctggctgagtttgttttacctcattttccagcacatgactaa

SEQ ID NO: 54431 - DNA, 993 bp, Acinetobacter baumannii
atggcacgtcatgtacgttttcatgaaactggtggtcctgaagttttaaaaattgaagaggttccaacccctgaacctaaatcaggtgaagtccgtattcgagttcatgcactaggtttaaaccgagcagaaagcatgtaccgttcaggtcgttatgtgattgaaccccagtttccagcaaccatgggttatgaagcttcaggttatatcgatgcaatcggtgcagatgttgaaggctttacagtcggtgatgcagttagtgttatcccagccttcatgtttgatgaatatggtctttatggtgatcttgttgtcgcgccagcccgtgcagtggtgaagaaccctgaaggtgtgagttgggaaactgcagcagcaacatggatgccttacaccacagcgtggggtgcattaattgatatcgccaaccttggcaaaggtgacttcgttgttctaggtgctgcatcaagtagtgttgggcttgccgcaattgaaattgcgaatagtgtcggtgcgactccaattgcattaactcgtaaagatgaaaaagttctagagcttaaaaatgcgggtgtagagcatgttttacaggtcggtgttgatgatcttgagcaagaaattctgaatatcacgggtggtcaaggtgcacgtgtcgtgtttgatcctgtgacgggaccagattttgagaacatcattaaggcaactggcaaagatgcgattgttttcatctatggtgcattaagtcacgatgcaaccccaattccagtgatgcatattctgggtaagcacacaacgattcgtggtttcgaatttattgaagtgacagcagatgatgcaaaactagaaagagcgaaacaatttattacgcaaggtttagcttcgggacagtttaaagcgaagattgcacgtatattcccatttgaacaaattgtggaagcaacgcaattcctcgaatccaatgcacaagtcggtaaaatcatcgtaacaatcgactaa

SEQ ID NO: 54432 - DNA, 912 bp, Acinetobacter baumannii
atggactttatccgccaactccagattttcgtgaccgtggttgaaatggggaacttttctcgtgccgctgagaccctacacatggcaagacccggaataacaaaagcgattggagaattagaaaaacatgtcggtgtacgcctcttacaacgcacaacccgaaggactaatctgacgggtgaaggtgaaaccctatatgcaaaagcaatggagttattgcgtgatgtagaggatgcacagaacttgtttggtgggagtaaagagaagcccagtggaagattaagaattgatattccagcagcattagcaaaatctttggtcattcccgagttagcaaaatttcgcgctcagtatccagatattagtattgtgcttggagtgaatgatcaacccattgatctgattgctaactctgttgattgcgttttacgccttggcacgctaccagtcagcagtatgataggccgcaagatcgcagatattcctatggtgatctgtgcttcacctgagtatctcaaaagaaatggaataccgtcttcaattgagtcccttaatgatcatacgatcattaattacttctcaggacaaaagcacatacccctcgcatggcatttttccaatgcaagtgatgaagaagaagtaacattttcgagtggcattatggcaaatgatgccgaagccatggttgcatgtgcactcaatcatattggcttaatgcaagttccgggcatattggtcatggatgaactccacaatggaacccttgttcaagttcttcaagatttaggacacgtcaacttcccactctcgattatgtaccccaatcgacaataccttgcaccgcaagtacgcacttttattgactgggttattgaaacgattcaatcaaaaacaggatcttggattcagtga

SEQ ID NO: 54433 - DNA, 402 bp, Acinetobacter baumannii
atgaaaaaactccgtaattatgattctgctccgggctgttcaatggaagcggcattacatattttaggtggaaagtggaagggtgtaattttatttcatttgtttaaagatgggactttgcgctttagtgaattgcaacgtcatctggtgagtattaatcagcgcttactaaccaaacagttacgtgatcttgaagaagatggattggtcatacgccatgtatatcctgttattccacctaaagttgaatattcactcagcgatgaaggacgagagttacaggatttgattatggatctcagtttgtggggcaaaaaatggctcgaaaaaagaggcatgaaaactgcagcggatgaggatctagatactttgaaagcggtattcactaaacaaagtcactga

SEQ ID NO: 54434 - DNA, 195 bp, Acinetobacter baumannii
atgggcgatagaaaaattttaaaattaagtgaagtggtgcatgcgacaggaatcaatcgtaatacgctgacaagtatgtattatgaccgtgctatacgtatcgaattgccagtcgctgataagttatgtaaatactttaactgtacgatgaatgatttgtttgagtttaaggaagaagttgaagaaaaaaattaa

SEQ ID NO: 54435 - DNA, 252 bp, Acinetobacter baumannii
gtgttaccaaatgagttattaatcagccagcaagctcgtgacttaggaaatcaattaattaaagaaatgaacatcaatagaagttatggattggctaattttcttggagtaaatacttgctatgataatcatcaggctgtacttatttggacatttcaactgctagaaagagaacctaccttaaatgaattagcagaaattaaaaaatattttcttttaatctttccagatagtgtttatcaattagcctaa

SEQ ID NO: 54436 - DNA, 459 bp, Acinetobacter baumannii
atgggggctgtcgtgtccgaccccaacgtgctgacatgggcagccaccctcgtgctgctgggcggtcgtgcggccgagaagctcgtgttcggcgagctgtccaccggggctgccgatgacctcgcacggggcaccgacattgcccgcgacatgatcacccgctttggcatggacgaaggactgggctacatcgccttcgaggcgcagcggccgcgctttctcgttacaccagaactggcccacggcggctgccgggtggccgaatcgacccaggcgcgcatcgatcaggccatccgcgacatcgtgatgggcgtgttcgagcgcgcctaccggatcctcgacaccaaccgcgcggtgctggagcgttgtgcgcgcgaactgctggcgcgggaaacgctcgacgagaacgacatccttcaattgacccaaggacttgttcttgatggaaacgaaaagtag

SEQ ID NO: 54437 - DNA, 462 bp, Acinetobacter baumannii
ttgacaaaaaatacattaagcatcgaccaactggttgagttgcaaggtcaagaattaggtagctcgcaatggatgcccattgatcaaaacatgattaatacctttgcggatgtcacacaagatcatcaatttattcatgtggatgaagaagctgctcgtcagacaccttttggtggcacgattgcccacggttttttaacactctctttactttcagcgatggccgctcaagtcttgccgactgtacaggggcagaaatctggcgtgaattatggcatcaataatttgcgttttattagtcctgtacatagcggtaagcgggtgcgtggaaattttcacttaaaaaatgtttcccaaaaaaataagggaagttatcagttgatcatggaagtcacgattgaaatcgaagatcaggcaaaaccagcacttgtggcccagtggcttacacttgtaaatgtatag

SEQ ID NO: 54438 - DNA, 807 bp, Acinetobacter baumannii
atgtttaaagtgtggaactttcaatgttgtttaagcattatttttgccattcttttatctacaaatgcggtttatgccgcaggttcagataaagctcaaagctctgcaaaaataaatagaaaaattttagtcgtcatgactaatcactcggcttacccttctcgttcggataaaacaggactgtggttgactgaactcacccatttttatgatgttgcatcagctgctggctatgaaatggattttgtaagtcctttaggcggtcaagtgccattagatgagcgtagtttaaagtctatttacttagacaaatccgctcgtcagcgtttagctgacccagcatttatgcagaagttgaaaacgacattggctccgaacacgattaatcctacccagtacaaagccatttactatacgggtggacacggtaccatgtgggatttcccaaacaataaagctttgcaaaacattagcgaacagatctatcgccaaggtggggttgtttcagcggtctgtcatggcgtaggtggtttattacctctacagaatgaaaatggtaaaccactaattgcgggtagaactgttactggttttgcaaatattgaagaaactttatctggtattaagtctcaagttccattttctttacaaaacggactcattgaacgtggagcaaactacaaacaagcatttattccatttacctcgtatgtggtttcagacgacagaattattactggacaaaaccctcagtcgagtaaagaaattgcagaagcagtcgttaagcgtttaagtagcattcaataa

SEQ ID NO: 54439 - DNA, 186 bp, Acinetobacter baumannii
atgaagaaaaatacaaagcttgatcaagacaagctatttattaaattattatttaaatctacctctgaagtaacagatgaggaaattgagtactatcgaaagtatcccgaccaaattgaccaagtcactgcacccctaaacattcataaatattcttgtgggcgggcgctttattgggagttatag

SEQ ID NO: 54440 - DNA, 498 bp, Acinetobacter baumannii
atgtgtcaaaacttaggtgaagttgtagtccgtcatactatagagaatgactgggaaattttgaaaatggttcgcctagagtcactactcgatagtcctcatgctttttcagtgacatatgcggctgctttgaaatatagtgaggcagattggcgtgctcgtgcttctggccgttctcaatatcaatatattctagcgatgcaaagaactcgagcgattggtattgttggtggtaaagcagatgcatcacttgaatttaatgtcatcgctatgtgggtcaatccagagtttcgtggcagtgatattgccaataagcttatttctgcgattaaggagtttgccagttcccaagggcataatagagttgtgttaagtgtaacttcacataatttgcgagcaataaatttttattctcgacatggttttataagagttgattgcgagtctttgtcgttgaattgtggcgatagaaatccaaaaatggaatgtttactttaa

SEQ ID NO: 54441 - DNA, 222 bp, Acinetobacter baumannii
atgaaacttcataaatttatattggttttaagccttttggtcggtgcttacagtattacaaatgatgatgccaatgctcagcaggaatttaaaagaatttgttcacctcaaaccgtacaacgtttaaaacgcaccagttcgcaaagtcctgttctcccacaggactttgcccctaacttgtttagcagcattcaacactgcaacaaaactgaaatgggctaa

SEQ ID NO: 54442 - DNA, 282 bp, Acinetobacter baumannii; identical to SEQ ID NO: 50593

SEQ ID NO: 54443 - DNA, 435 bp, Acinetobacter baumannii
atgctgaattttaacttttataatccgacccgcattatttttggtggcgatacaatagctgaaatcaatgactatgtgcctacagaagcaaaagtgttaatgttatttggtggtgaaagtgcacgtaagaatggtactttagctgaagtgcgtgaagcattaggtgcaagagaaattcatgaatttggcggaattgagccgaatccgagttatgaaaccctcatgaaagctgtagagctgattcgagaacaaaagattgatttcttgatggctgtcggtggtggatcggtaattgatggtactaaatttattgcagcagcagtcaattatacaggggatacatgggagattttagaaacccatggtactaaaattactcaagctttgccttttgcgagtgtactcacccttccgaactggttcagaaatgaatag

SEQ ID NO: 54444 - DNA, 1461 bp, Acinetobacter baumannii
atgcaggcggtagtttaccatagccaagatattcaggcatgggagcaacgttggtttgctgcgcaaaactcatcattaggcctaatgcaacaagcagcttggtcaatcactcaacaacttattgcactttttcaaaaacaaaattttaagaatattgctgtttggtgcggacagggtaataacgctggtgatggctattttatagcaagctatctcaaacaagctgggtttcaggttgaaatatttgcggctgagttgggcgagtcagctgatttactccacgctgtccattttgcgaaagaaaatcatgttcaaatacaccaaggttttgagatcaacgggacatttgattgtcatattgatgcattgtttgggattggtttaaaccgtgaattaaacggttattggcaacatgctattcaacaatttaatgggcaagcagggctaaaaatttcgattgatataccaagtggtttaaaagcaaatactggctctaccttaccttgtgcaatacgggctgatcatacatttactgttttagggcttaaagcaggattgtttacaggccaaggcaaagaatatgcaggacaaattcatttaattaatttaataccaataaaccaagagctgaaacctcttgcttacttgacgccaacacatatcaaccttcctaaacgtttggcttttggacataaaggaagttatgggcatgttttggtgataggtggacatgagcaaatgggcggggccgtcattatggctgctgaagctgcttttcatgcaggggcaggcaaggttacggtagtttgtcatcgcaaccatcatcaggctattttgtcgcgagctcctaatattatgctgcgtgatattaatgatttcgatgaaaacggtattaaagaaattttatctcaggttgatgcagtatgttttggaatggggttaggtcgtgatgactgggcacaccaaatctatcaacagtggtttaattatttaaatcagacttcacatttagaagttgtattagatgcagatgccctatggtttctcgcaaagcagcctgaaaaattgagtttacatatttatgcaacacctcatccgggggaggccgctacattacttggttgttctacttggcaaattgaaaatgacagaattgctgcgatttatgcgttgcagcaaaaatatgcaggccagtgggtgcttaaaggagcaggcagcttaattttagaagataacttgtatatttgtacgcaaggtaatgcaggtatgggaactggtggaatgggagatgtgttggcgggcatgattgcaagcttaaaagcccagttccacaaagcagttaccctacatgagatcgtaactctccatgctcaggcaggtgaccaacttgccaaacaaggcatgcgcggtttacaagcttatgagatgaatcaagcaattactcaagtagtaaatcaataa

SEQ ID NO: 54445 - DNA, 315 bp, Acinetobacter baumannii
atgcagttggcagctttggctgtagttgcgttctgtctattttcatcgactgccgtgttttggacattaccaggtcgtttcttaacgggtgcaagtgcagcggctggtattgccttaattaactctgttggaaatttaggtggttatgtcggtccatttggcatcggactgttaaaagaatacacgggaaatatggctgctggtttgtatttcttatctatcgtcatgctttttggcttgattctgacttacatcgtctatgccaagctcgaacgtcaaaaaacacaaacagtgaatattcaaaagcctttgtaa

SEQ ID NO: 54446 - DNA, 639 bp, Acinetobacter baumannii
atgtgggaattatttgtaattctaatttcgcttgggctgttgatgtatacagcttacaagggcttttctgtcattctcatggcaccaatttgtgccttacttgcagttttactcattaatccagccaatgttttaccgttttattcgggtgtttttatgcccaaaatggtgaactttattaaagattactttcttgtgtttttgctgggggcaattttcggtaaagtcgttgaaatgtcaggaattgctgagtctattgctcgcaccattgtaagatggattggggcaaaaaaagcaattttaacggttgtattactaggtgcaattttaacctatagcggtgtaagtttatttgttgctgtatttgcaatttatccctttgcaaaccagctttttagacaagcgaatattccaaaacgtttaattccaggaaccatcgcgctgggtgcatttacattcactatggatgctttgcctggtaccccacaaatccaaaacgtaattccaactacattctttggcaccaatatttatgccgcaccatttctaggaattattggtgcaatttttgttctatgcatgggtttggcttacttggaatggcgtcgccgtgcagctgtaaaagctggtgagggctaa

SEQ ID NO: 54447 - DNA, 3249 bp, Acinetobacter baumannii
atgcatgtcattttcatctcggcttgtgaaaaaagagctttaaagaaaactcgagcgattttggatagttatgctattcgtacaggacattcgtcttggcaagcaccaatgacaatggatggcttaaaagaaattcgtagtgcattaaaaaaagtagccacccgacaaactgcggtagccgcttacattaattttggtgtacgaagaatgaagcttgcatgggttgtaggagcaaaacataaatttgcccaggacggtgcatatccagttgcatcgaccaagaaacagcaaaagttattgatgctagatgaatgggtcaaagtaagtagcttattggcaggtgcagcaggggacatgcatgatattggtaaggcatcccaacattttcagaaaaaattaagtccagaaatggcgggacaaaaaattagagatgacattcgacatgaatggttgtctttaaaactattacaacaactcagaaaaaatggatgggactggcagcttgcttggaagaatttaggtaaaggtttagagaaatttactttaggtgatcgacaagaaattgaacagggaatccaaaacgagttagaagcagtcgattatttagttgttacgcatcatggcttattaggtgttgagcctaatggtaatggtaaggacaaaccacctttcgattcgttacctcactatgaaaatcatgtccggacattggttccaagtcttgaacaaatgagctgtgcaggtgagttgccagactctatttttaaaagtcatcaaaaacgtatgcaacgtttaactgcattaataccaaaacaaaaaatagaccagcttttatattggaaagctttagcatttcattcacgagcagctctgattcatgccgatcatattgtctcggcacaacaatattctttgcaaaaacctgaaaatgtatcgttatttgcaaatacaaagcttaaaactatagaccaagacaaaaaagccaaattacaagatcaaccactagaatggcacttacaccaagtcggagatcgggcttcacgcattgcagttcaaatgatgactgatttgagtttatctggtctatctgagcaaacagttgaatatatttgccagcccacaactcacccgcgtttccaatggcaaaatattgcagcaaatgcattgcaaaaaaatatacagaagcatcctgaaacaccagcattggtattcaatattgcagggactggaagtggtaaaacccgtatgaatttgcgggcggcttgtactttaagaccagatgacccaagaatagcgattgcgcttaatttgcgttctctaactttgcagactgggcatgcacttaaaacgtcaatgaatctatcggacgatgaaatcgccgtgattattggggacactgttacccagactttattcgatcaaagtaaagagaaaattgagtttgttgatgaagatgaaaatcatccagaacctatttttgatgcttggggtgaggactgtgatttacctgagtggttacatccattatttacggttgaaaaaaatggacataaagttttagatcaaaaggaaactacaatccttgcttcgccattattagtttcaaccattgattatctgattgcagcgggtgaaccacatagacaaggacatcatgttaaagcattacttagagtgatgagtagcgacttgattttagatgaagttgatggctatgaacctaaagcattaatcgctgttttacgtttagttcagttagctgcaatgtatggtcgaaatgttatttgttcgtcggcaaccttatcacttacagttgccaaaacaattcatcgggcttttgagtcgggtatgcaaatgcgggcagccctttatggtaccgagaaaaaatcaatcattgcgattattgataatgagcttaaaccacaggtctggttagaaagatcaaatcaaaaatcagaatttaatacaaactaccaaaagcatttagataatttacaagttcacttgctctctaagcctacccatcgactggctcagttgctttcgttacctgaaactacagttttatcgtggaaacagtcggtattggaaggagtaaagcaacttcatcaagagcatgcatggaattttaaaaagaccgaaaagaaaatttctttggggcttatacgggttgccaatattaaacatgcaattcgacttgcccaatttttatcagatcatttacctgaggcaaaaatagcttgttatcatgcgaatgactggcttatttcaagattttataaagagcaacgtttagatcagcttttaacacgtcataaagacggtaaaaaaagaaaaactggtaatgagcagatcgagcaagatgatgaaatcattgacctcattcaaaaatctaattctctaaatattccatttattgtgattgcaacaccagtggaagaagttgggcgagatcatgattttgattgggctattattgatgcatcaagtgtacaatcaattgtacaaacagcaggccgagttaatcgtcatcggttagaaaaagtacaacaacccaatattatgattccccagtggaattatcgttattgtgagcgacgcgatattgaaaaacttaagcagcaaagtaagcagcgtcgacctgtatttgtatatcctggctatgaagggtatggttcatctgtaacatcaacttattcatctcaagatttaaaagagcttttaccatgggatcatcaatctcaattagtcattaatgcccgtttgcgttttgatcaagtaaattgtttatttgcaaaacatgatgatcaacaaataggatatttttgccaaaattattttaatgatcaaggggagcagttattttctcggtcggatgtagatgcaagtatcatgacagagaatatttataatttaacgcctttacgagaacgtaactatcaagaaacctatatgtttgagtggactaatagcttgattgttaaaaaacaagtttatggttttgatgaaaaagcgactaaagctttaaaatatccaaaatatggtttggtatgggaccaagtgaagttcgaagaaattcctgctaagccacaagcatggttagctctcgatccacaacaaatgaaagattactgttatgagtaccaaattgccaatgagcaaggctgccgtatatctttaacaccttacaatagagatgaagtgcctacttggtcttatgattatggctttggcgtgatgcaaaaatag

SEQ ID NO: 54448 - DNA, 219 bp, Acinetobacter baumannii
atgtctaaattcattatcaatcaaaatgtccaagcaaacggcgattatgaagttcacaacctaacaacaggttgctcattcatgccatatcctcaaaatagagtagatttaggtgaacatttgaattgttttagcgcagttttagcagcaaaacgaagatggcctaatgctcgaatcaacggatgttattactgctgtaatgcatgtcataccagctag

SEQ ID NO: 54449 - DNA, 714 bp, Acinetobacter baumannii
atggcctgcttaatttttaaagtcagtcaaacgtgttatcgctataaagctcgtttggatcagaagaatattcaaatcgcagattggctgattaaactgaccaatgaacacaagacttggggcttcaaactctgctttttgtatctacgtaatatcaaaaactatcagtggaatcataaacgtgtctatcgcatttataaggagcttgagcttaatttaagaatcaagcctaataagcggattaaacgagaacaaccagaaccccttgcagtaccgacagctaagaatgaatcatggtcaatggactttatgcatgatcaactcagtgatggacatagttatcgagttcacaacgtgattgatgactataatcgcaagtcattggatatattgattgacttttcattgccagcagaacgtgtgctgagagcacttgatcagctcattgaatggcgaggcaaacctaaacgcattaggaccgacaacggcccagagtatataagtgagctgatggaaaagtggtgtgatcagcatggtattgagcatgtatttagtcaaccaggcaatccgcagcaaaatgcatatgttgagcgatttaatcgtacagtacgttatgagtgtctaaatcagtatttatttcgagatctgagcgaggtgcagaactatacaactaactggcagtacttttataatcatgaacgacctcatatgtag

SEQ ID NO: 54450 - DNA, 126 bp, Acinetobacter baumannii
atgaaaaaactaattttaatttgtgtgttggggatgcttgtcacatatgctaatgcacattcaggtggtacaaataatcaaggctgtcataccaacagtaaaacaggtgactaccactgtcattaa

SEQ ID NO: 54451 - DNA, 426 bp, Acinetobacter baumannii
atggcctatgttttattatttttaagtgcatttggtgcagcaacattattacccctgcaatcagagacagtattggcaggcttatttctgttaggtaagtattctgagctgttgctcaaacttgtagcaacagttgggaatgtacttggttcttgtgtgaactggtggttgggtatcaagcttgaagcctataaagacaagcgctggtttccagtatcagaaaagcaattattgaaagcgcaaactctatactcaaagtatggttcacccattttattgctcagttgggtgccagtgattggtgatccacttaccttggtaagtggagttttaaaggaaaaatttattacatttataattttggttttcacatctaaatttttaagatatatcgcggtttacatgatctatttagaggttgcttga

SEQ ID NO: 54452 - DNA, 648 bp, Acinetobacter baumannii
atgtacaacactcaaattccacaagatgttgaattaccatctactaagaaacttgttaaatcgaccattatcgctgcagtgagtgctgcagttgtcttagttacagttgttatgccagctgaatacaacattgatcctactggggttggtaaagttctaggcttaaccacgatgggagaaattaagcaatctttggctcaagaatctgaaaatggtatgggaatggctgcttcaaacacgatatcgagtgaagctgaaagtgaccctaatatccaatcatctatgccaataggtgagacagaaaaaatgactatgcctgcaattcaaaagcagcagatgacaattgaattgaagcctggacaggcgactgagatcaagttggcgatgccacagagtgccagcgttaactttaaatggacgacatccggtggcggcctaaattatgacacgcatggtgaccctgtaaatgcacctaaagacttttatcatggttatggaaaaggccgtaatgaaacacaacagtctgggacaataaaagcagcatttgatggacaacatggctggttctggcgcaatcgaactgaaagtccagtttccgtgacgctggaagttgaaggtcaattcagtgatatgaagaaggtcttttaa

SEQ ID NO: 54453 - DNA, 363 bp, Acinetobacter baumannii
atgatgggtatggtgcgagatagaaaatatcgaaatatggtgatgtggcttgtctgcatcatcagtcttgcactatgcctgcattttaatcagcacaatacagatacagcattccaagaacatacagtttatgaatttgaaagcgtacattttcatgatgtacagcaacataaacagaatcatattcatcatgataattttcatgagcattttggtgaacatcagtctagtcagcagaccaaattgttattcactttatcttttatatccatcattgatagcgtaaaaaattatctctatctcatgatcagccgtattttcaaacctccaaaaacagccctaaaaacttttctttttagttaa

SEQ ID NO: 54454 - DNA, 1479 bp, Acinetobacter baumannii
atgaataaaccaaagaatacagtaattgctacaggcgttatagctttacttgtcatgttgtgtgctctggcttggtacaaaacaggaaacaaatcacagacgtcttcagcacatggtgaagctgtcgaagaaaaagctgctgtcgcaggcgatgaaaaaggtccacatggtggacgcttatatcgtgatggagacttttcggcagaggtaaaaatttttgaagaaggtgtagagcctcatttaagggtctacggatactacaaggatcagcctttaaagccgagcgagattaacgctaatatttttattaagcgattagatgctgagcaaaccattcgattcaagcctgaaagtgattacttgattggcgatgaaattgtgtatgaacctcattcgttcttgatggtgattaatgttgattatcaaggcaagaaacacagctggaaatgggataccaaagaaggccgtgtaaccatgttggatagcagtatcaaaagcagtggtttagaacttcttaaagttgaacctatgacgtttgagaatgcgcttgagcttaaaggcgagcttaaattcccagacaattttgaaagtttcattacacctaaagcaagcggaacactcatcaaaacctatcgcactattggtgataaagttagtcaaggtgatctgttagcgactgttcaaagccaagatctgattcgtttaaatgctgagcgatctattgctttagataatttgcagttttcacgtaaaaaaatggaccaggaacgcgcattatttcaaaaacgtgtatcgcctgaaattgattatatcaatgcaaagcgtgaatatgatgatgcacagactcgtgctaatgagctgaatagcttaatcagctcttacggtggttcaggtaatggaacgattgaggtaagagcagcaatgtcgggcacagttttacaagtgcttgctgcggtgggctcaaatgtaacaccagcttcaccactctttaaaattgccaatacctctcaattattggcagtggtgaatgttccagcggataagctgaatgcaattaatccaaatgcaaaagtaacagttaaacctcaagtacaggaaagtactgaggaagcactaggtaagattaaatacattagtgatgtgattgatcctaaaacacgtactgctcaagtctttattgagattgcgaaccaattcaaatggcgttctggtcagcttgttaccgcacaaatatttgaaaatcaaagcacgaaagccatggttgttcgtgaagatgcattgcaaaacttccgtgattgggatgtggtatttatccgtgtagggaatgactttgaagcacgtcctttagaactaggcgataaatataatggttttgttgaggtgaaatctggtcttaaagcaggtcaggtgtatgcagcaggcaattcctacttattaaaagcagagctgggtaaatctggcgctactcatgatcactaa

SEQ ID NO: 54455 - DNA, 1200 bp, Acinetobacter baumannii
atgtctaaaaaaagtcaggtaattttcgcctgtggcttagtcatcattgctcctcagttattagcaggaacaaattatgcacagttacagcagcaagctattgcaaatgattcagttctaaaaagtttgcagcaatctcagcaagcttatgatgtaaatcaaaaatatgctggtcggatgaacaatccaactttcaatgtcgaattggataatttgggtaattctaagctgaaagatttggatggcccaactgcattcatgggtttgtcccaagaaattccgttgaataataaactcgctttgcgtaagcaattggcaggtttgcaaggaaataataaccaatttgagattactcaacgacaagcagagttaaaagctgattttcgaatctgtatgtctaattggtatgcagcttctcagcgagcagaaatttatgctgcagagagcaagctgagtgcaagacaagcaacagttctaaatgaaaagctaaagtatggacgtgtgattccatctgatgttcagcttaattcagctttatctgctgagtccaagttacgttatcaaaatgagctgaaaaaggttcagtttcagaaaaatctctgttcaaaatttgcttttgatttgccagccaatgctatagatgttcctttaacgattaacttcactgacaaggttagcttatctgaaaagcaggctttactaaaaaagcagcaggcaaaaactcaatttgaattagcaagaaaagaagcggttcctgatatcacgcttggcgttggtgtacgtaattatcaagaaacagatgacaaagtttttttggtttccacttctattccgctttcgatattcaatcgcaacagtggaaatattgcactcgctcaagcacagcaaaccaatgctgaaactcgttcagaattaatcaatcgaaattcaaagattgaattggataacaaatctattgaggtatccagtttgattgatgcaatcaagcaatatgaccaatctgttttacctgcaacaaaagaaagtttacgcattgcagaaatgggttatcaggcaggaaaaatttcattattggaatttaatagcattaaacaagtttggttagacaaacatctcgctcgatttgatctgtggttggctttgcaaaatcagattgcagaagttgaacgaaattatgtaacgaatttagatcaagaataa

SEQ ID NO: 54456 - DNA, 402 bp, Acinetobacter baumannii
atggcaaaaattactaagaacaggaaaaagaacggaaaatcggcaatcgcactaattgtagttgaggtgaccagttcacgaacgccttcgagttcacgaatctgggaaataaaactacctgtagattttgagcgatctttatttttaattcttaaggcatggccaaatacacgatccgacacacgtaaatcagcacgtttaccaataatatcggataaatatactcgtgaaacacgtaaggtaaactcaaaaagagcggcaatcagtacaccacccgccaaaacccataaagtgggtattgactgggatggaaccacacggtcatacacttgcatcgagaaaataatggttgccagtgccagcacattggcaatcagcgaggcaaacataatatcaacgtag

SEQ ID NO: 54457 - DNA, 696 bp, Acinetobacter baumannii; identical to SEQ ID NO: 47821

SEQ ID NO: 54458 - DNA, 336 bp, Acinetobacter baumannii; identical to SEQ ID NO: 47820

SEQ ID NO: 54459 - DNA, 2994 bp, Acinetobacter baumannii
atgaatagcttaggaaatttaaaaggtctaattgagagatataatcaggatatcgaattttaccgttctactcgatataatgaaactcaactacgtactgattttattgatcaatttttttccattttaggctgggatataaccaacgttactagaaaaagtactcatgaacgtgaagttttggttgaagaaggaattcgatttaaatctaatgaaaatacaaaaaagccagactatacctttcgtctcttttcagagcgtaaattttttgtagaagctaaaaaaccaagtgttcatattgatatcgatcctgaatcagcaaaacaagtccgtcgctacggatttaccgcaaagttgaagatttcagtccttactaattttgaatatatagcgatatatgactgttcgaacccagtttccgaaagtgatttagcatcaacttctcgaatcaagctttaccattacacagaacttgtcgataactttgatgaaattaagaaattaattgggagagaaagcgtttactcaggccaatttgaaacagaatggtctgatattgaaagtaagatatctcgttttagtgtagacgatttatttctacagcaaatcaataattggcgggtaatgttagcgaatgattttatttctataaaaccagaattaaatgaagaacagcttaatgatctaactcaggattatataaacagtattgtttttcttcgagtttgtgaagatagagagttagaagactatgagacactttatcactttgccaaaaacaaagattttaagtcactaattgataaattaaaattttccgataaaaagtataactcaggattattttctttatcatatatcaatcaactgataaataaccaagaatcatatatttggactattattgagcaactatatttccctcaaagtacttattcattttcggtattttcgtcagatattttaggaaatatttatgaagtatttttaagtgaaaagattcgtctcaatcaatatgggaaaatcgaaattaagcccaaggcggaacaccttgatagagatgtcgtgacaacccctacacacattataaaagagataatacgaaatactgttatagagttctgtcagggcaaaacagataaacaaatattaaactcaaaatttgcagatattgcttgtggttcaggagcatttcttctagaaatatttcaggtcatacaagatatactaatcgattattacattgcacatgatcgttcgaaattgcaacaacttactgaacatagtttcaaattaaagtttccagttaaaaaggagattttaaataattgtatttatggaatcgataaggattttaatgctgtaaaagcatgttcttttggattactgttaaaacttcttgaaggtgaatcaaaagaaactattacatcagatattccaattttaccgaagactgatgaaaatattttgtttggtaatagcttgatagaactaacagataatgtaaagagtactgacgttttagcgattaatcccttcaatatagatcttcaatttgatgtaatcgtaggtaatccgccttatatggcaactgagcatatgaagcagctcactcctttagaactaccactatataaaaagaaatataaatcagcatttaagcagtttgataagtattttctctttgttgaacggtcattacagttacttaaagacaatggttatctaggttatatcctgccatcaaaattcgtaaaagtaggtgcaggtaaaaacttgcgacaactactagtagatagtaaatctctttgtaagttaatttcatttggtgcaaaccaagtttttaaaaataagactacttatacttgtttgttatttttaaaaaaatcacaacaaactgagttttctttttatgaagtgaaagactttaaaaaatggctagctcgggatgaagacgttgtaaatactagtacctatgaaatttctaatcttgatgcagatacatggattttagaaaatgaaataaatcaaattctagaactaatgtatagaaactctcaacctttaggtaatattttaggtaaaaaagcaattgctaacggtatacagacaagtgctaacgaatattacattcataaggaaattaaaaccgaagatgggtatatttactttgagtaccaaggctgtatttaccatgtagaaaaggagcttacgagaccttactttgaaactcaacgctcaggtgatgatcacttctacacatataaagatgttgagccgaatgcttttgtgatttatccatataagaaagtaagtaatcatgttgtttttgtagaatacgaagaactaaggactacttatccaaaaattttcgactttcttcatctagtgaaagaacatcttgataacgacaaacgttctataaaaccagatcctacgacatccaatgaatggtatagatatggacgtagccaagcactcgaaaactgtgatgttcctcagaaaattattgtgggggttttatcaaatggctacaaatactctatagataatcatcgaacttttgtttcttctggaggaactgccggatatagtattattaatgtgcctgaatatagtccatactcaatttattatatacaagctcttttatcatctaagtatttagaatggtttgcgtcagtttatggcgaagtatttagaggtggatttatcgctcgtggaacgaaagtacagactcgtatgcctattcctataattgatttcgaaaataagtcggaaaaagagaagcatgatcagatagctaatcttcaagcaaaaatgaataagctatactcagatctttccaaagcagacaaccgttcaagaatcacgttaaaaagacaattcgatgctatggttttagaaatgaatgacctgcttaaaattctttttgacttaggtgattttgataaaaacataccaaatgtgaacgaattatacagctcactctaa

SEQ ID NO: 54460 - DNA, 654 bp, Acinetobacter baumannii
ttgcttggaattactgatctaacaacttttattattggcacgactttaattgtattattacctgggccaaactcactttatgtcatatctattgcatcacgttacggtattaaaactggttatttagcagcctttggggtttttagtggtgatttaattttaattattcttaccattttaggtgcagcgtcgttattgcatgcttttccgtggttatttactgttttaaagcttataggagcgctatatttaggttaccttggcgtaaaactcttgattgctgcttatcgaacttggcatccacaacctcaaatttctaaattgatagccaatcaatctactaaaaatgaaagtatcaagccatatcaaacggccttgttaattagcctaattaatccaaaagcaattttattttacttatccttttttctacaatttgtggatccaaattatccttatccatcactcagtttcactattcttgcgattgtcttacaaatcataagtatgagctatttatctctattaattttttcaggtgtaaaattagccagctactttaatcatcgttataaaattactgcaatcagtgtggcatctattggtttgttattttgtggatttggagtaaaacttgcaactacaggtctctaa

SEQ ID NO: 54461 - DNA, 702 bp, Acinetobacter baumannii
atgaaaacactactcccacaaataaccattgatgtgtggtccgattttatctgtccgtggtgctggattgctaaaaaaagatttgaaaaaggattagatgcttttgaacacaaggatcatgtgatcgttcgatatcatagctaccgccttgctaataagtatgtgcctgaaccatttaaagcagcattgtataaaaagtttggaggaaaaaatggtgcagaagcgatgatgagccaagtaaagagtgcaggtgagtcggaaggactaatctataactttgatactatgctttttggcgatactttagatgcacatgccgtagtaaagctagcacagcaaaaaggtttaggtgagatacttgctgaaaagttattcatggcaagtgtaacagaaggtcggtctatatttgatcgtaaggagttggttgaacttgctactgaaataggcttatcccgtgaggaaacggaaagtgtctttagcaatgatttgtttaaacaaggtgttctacaagatgaagcaaacgcacatgcaataggtgctagtggcgttccactttttgttataaacaataaatattcaatcagtggtgctcaatctgtagaaacctttctaagtgttttagagcaggtatggacagaaaagcagagtgaagtaacggctactgaaggtcaaagctgcggtattgatggttgtagcatttag

SEQ ID NO: 54462 - DNA, 1110 bp, Acinetobacter baumannii
atgaataaattattcactccccataatttggcggatattcaattaaaaaaccgtgtagtaatggcaccaatgacccgtactcggacattaaatgatgtggcagatgagctagttgcactttattactctcaacgagcttcagcgggtctaatcattactgagggtttacctgtatcagaagaagggcgtggttatttatataccccaggtttatataatgaagcgcaaatgcatggatggcgcaaagttacagatgcagtgcatgcaaaaggtggacgtatttttgctcaactttggcatgtgggacgaatgtcacatgtttcagtgctacctgaaaatcaagcaccagtatcatctggaactattccagcaactaacactacagtatttgcgtattctgattctggagaacctagtgcggttacaccaagcattcctagagcactagaaactgaagaagttaaacgtgtcactaaagattttgttaaatctgcacgtctggctatagaggctggttttgatggcgtagaaattatggccgcaaatggatttatctttgatcagttcctcagtactgaattaaataaccgtaccgatgaatatggtggctctgttgaaaatcgccaacgtttcctttttgaaacgatcgatgctatctcgcaagaaattggtaatgataaagttgctgtacgtctttcaccatttggacgtatttatgaccttgcagcttatgaaggggaagctgacacgtggaaaaatattgcattggctcttgggcaacgtgaattagcatacgttcatttgtactatcaacctacttatgaaacagcacctattgaagctgagagttttaaaactttattccgtaaagtttttcagggcacgattattgccgcaggaggttttaatcgacaaagtgccgaagctgccttggaaaaaggtgacgttgatttaattgctttcggtgttccgtatattgctaacccagatttagtagagcggatgcagaataattggcctttggcagaaagtgatcgcacaacgtattacggtgtgagtggttctccagaaaaaggatatacagattatccgaattatgaagtgaagtaa

SEQ ID NO: 54463 - DNA, 405 bp, Acinetobacter baumannii
atgcgtaaattacttccctttaatgaagataacttccacaacattggttggaaagaaggtttggctgtggtacgttttcacgcaccttggtgcccgccttgccatagtagtgaaaatttatttaatgaatttgcagaacatatagagagtaatgtaactgttggagtggtcaatgttgatcaatcaccagttttagcaaatcgttatgaaatatggggtttaccttctgtactcatgtttaaagatggacaattaattcaacgtatcgtaggcgtaaagcccttaacggattatcaaaacgcgttagaagagctaatgaaattagattcaaacggttttgaagatattgatcaagaaacaataggctcactttgtctaacaaattccaatagccatcccgaatga

SEQ ID NO: 54464 - DNA, 555 bp, Acinetobacter baumannii
atgaaaaatacaatcaacggtattgatgtagatgctttccaacagtttgcggagggcgttagccaaaaccctaatacatcaaaagctagctttaatgtagaaactcgctgggcaggtcaaacacgttctgtttcaacgattaagtcctatgaactttgtggaaaaacatacgagcgtaatttccatattgccgcagatgaaccaactgatatattaggaactgatacagcaccgaatccacaagaactgttaatggcagctcttaatgcttgtatgactgttggatatattgcaattgcggcatcaaaaggaatcactgttaataaattagaaatcaacacgactggtgaacttgatttacgtggttttctcggtctagatgaaacagttaacccaggatatgatgaaatagaatatagcgtttttattgatgcggatgctacgcctgagcagctagaagagattcacaatgcagtgattcaaacatctccgaattttgcgaatttatcacgtgcaattcgcatgaaacctaagcttgtagtcgttcaaaagtaa

SEQ ID NO: 54465 - DNA, 564 bp, Acinetobacter baumannii
atgtctattgataccagagcatcattaattaaatcggctgagtatatgttacggtctaaaggctatgctgcatttagttatgctgatttggaaaaagtggtcggaatcaaaaaagcgagtattcatcaccattttccaaaaaaagaagatcttggtgcagtcattatcgagtcatatatacagcagtctattctagacttcgagagaatagagcaagattttccgaatgcctttggccgtctatgcgcattcgcttctctttttagagcagcaatgtcagatggaatgctgcccttatgtggtgcgcttgcagctgaaatggccgcattaccagataagttacaagtgctgactcgccaatattttgagatccaattaaagtggattaaaaaaattattgatgaaggagttgcatgcagtgaattatcttctaaaggtgacacacaccaaaaagcttttcagattttaagtttattggaaggcagtagttttgttcgatgggctatggatgacggtacagaactagatccagctattattcgcagtattgttaacgccctctaa

SEQ ID NO: 54466 - DNA, 150 bp, Acinetobacter baumannii
atggctgaaaaacttcttgcaaatgcatcatcgaaattaactttagaagaaaaagcaaagatggaatggattgccaaactagaaggcaagaattccttatctaatctaatctcatccgttctatgtgtaagaaaaagatttcagaagtag

SEQ ID NO: 54467 - DNA, 123 bp, Acinetobacter baumannii
atgaatcaggatttagttttagtctatacattaaagaaatctgaagttgaatcagtccatttttttggttacctagacaatcttaatgatcaatatatttgctgtcttactaaaaaaatgtag

SEQ ID NO: 54468 - DNA, 282 bp, Acinetobacter baumannii
atgactgaaagagatttttttcagaaagagaatgattatttagaaccagttgaagtttcactaatcgaatatgatgaaatgtttaatattcttccccctgcccgcacgtatggaggttttaactttgaaatgttcatgctgactgaacagttgggaggtgggctattttcacactttttagtgacctttgagccatacaccaaaaaacgccttaaagcgtatagagtgacagcttataggaatgatccattccataaaatttttaattcatgtccaatttaa

SEQ ID NO: 54469 - DNA, 936 bp, Acinetobacter baumannii
atgtctttaatgtcgatactgaaatcttcagatcctaagtgcaaagaagtaaaagaaattataaaaagtgtcgccccccaaagaaaagatttcaaaacttacagtggtattcctccttttactaattatgaagtgatgagtgaatataaattaacgagtagttatgattcaggcttggttggtacagcatttgactacttatcaaaaataatttgtgcgtactacacgaatactgaattgagtgctaaggaatttgagcaacctaaaattactagctttctagaggaaactaaaaataaaagcattttgatattatataaaaaaattcaaaatcacatagattctttactagctaataaatcaaacaatttagaaataagtgaagagtttattggtggaattattcttatgtctaaattggaaaatctatggcgatcaggatttctaccagtagcaacaaagaaggtcatactaaaaccaacggagaaaatggtttacgaagatatatcttccttagtcaaaaattttgataatgtattcattaagaaagggcttattaagcctgatagtttgatcacatacaatcctagatattctgcaaatattcgtgttgcactaggtgggatagatgcagatatttgtattgatgaaacactgtatgactataaaaccacaaaaaatcatggatttatgattaaagacagtatgcagatcacatcatattacttattctatttaatggatcggattatgtcgtcaacagtgcagatgcaacgacatagaatagaacgaattgcattatataaagctaggtttggccaaattgaatattttgatgttaagaatatgcctgaaaaagatttaaaatatgcaatttctgagcttaatagaatgtttaaattaggtatgcccgctcagaaaattaaggatttttaa

SEQ ID NO: 54470 - DNA, 312 bp, Acinetobacter baumannii
atgaaaatacaaatcgggaaatttctcaataagcgcttaaaagaacttggtattcaacaagtttttggagtacctggtgattttaatctctcataccttgagcaaattgaagaatctgatgatctcgaatttgttggtaactgtaatgaacttaatgctgcttatgcaacggacggttattccagaaataaaggttttggagcatttgtaactacgtatggtgttggtgatttaagtgcgattggtggaattgcaggttcatacacagaaaatattgcagtcatccatatctcaatcctgcaacctatgtaa

SEQ ID NO: 54471 - DNA, 480 bp, Acinetobacter baumannii
atgaaggatcctgctacgaataaagtgggacaaattggggatactttacaattcactaagagccaccctacagtagtgcttgggggagctacttttattgaatgtgaaatacctcttatggttagaggccaagagataatttctattagacaagagggtgataggtattttctaaatgcaaacttatgggatagtaaagagcagcaatcattaaaaatagttgataatgaatggctagtttctaaagaaaatatttgggatttgactattgtgggtaatagggtctctatccacgagaaagataaaactcctacattagtttttaaaattgagaataataataaatttataatagaaaaatttgatatgagaattgcagggaatagattatatggtgatgaaaattttttaaatattaatactgttcagctgttttgttgtagtgcaaagcgttgtagggttggaataaatattggttga

SEQ ID NO: 54472 - DNA, 375 bp, Acinetobacter baumannii
atggtttcacttgctttttgtgagttttattttgaacgaaataatttaataggggttataaggcatcttaattcttttcatttttttaatggtataaatacatcaaaaaatgatatcaaaatacaaaagctacagcggattgatgatggccgaaaaaagggacaaatagatagtattaaggcccaaaaaataattaaagaattactgattacaagggtctgggatagtcgggggcaattttatctttatgctcaagaggaagttgaaaaatacaaagttactcggtcattgaaatctattgaaaaggattttcacttagttaaaaatcaaattgaaaattataaccaatactttaaacacaaaggcaaaaaataa

SEQ ID NO: 54473 - DNA, 249 bp, Acinetobacter baumannii
atgaacagtaaagctttttttggcggcgtagtcgttagcccagaagcagatatggtcgctcgtgaattaatccatgagctacacattcccaaactgcacaatctggcctttttgctggaaatcaataaatgcttcgatgatcaccaagcattaagactctggctacagcgaatgctggatgaagggcaagctcattatgatgacttggctcaacaggcccgtttccggttaatgagcctagctcactaa

SEQ ID NO: 54474 - DNA, 1185 bp, Acinetobacter baumannii
atggctgccatccgtactagatacggtaagttatgtgtcgattttcgatacttaaacatccgttgtcgtgaaacaacagctcttgaagacaatgctccgaatcgcaaaaagcttgaaaaagtgattgagcgaatggaagcggaaatcttattgggtatttttgactatgctaagtactttccaaaaagttctcgtttgaaagaaatcaaaaatgcagaaaacagagtaaatgaaatcagctctaaaacacctctattttcaaagttctgtgaaatctggttcactgataaagaaatagagtggcgtacaagttataaggagaaaattcaaattgtaatcaaaaagtacttgatccctttttttggcgcaattcctgttattaatattaaaaagtcagacattcttggattccgttcatccctcgccaaagtgactcacggaaaaaaccaagaatgcctttcaccatcaagaatcaaccagattatgatagtgcttcgtatgatactcgatagtgctgccgaacgatatgaatttgatagcccttataaaaatatcaagaacttaaagcaaggaaagattgaagtaacacctttttcattaaaggaagtacacgcaatccttgccacagttcgtgatgattttaagccttattatactgttcgatttttcacaggtatgcgcaccagtgagatcgatggcttgcaatggaaaaatgtggacttacaacgtcgggaaatccacattcgtgaagcattggtgaatggggagcttggtggaaccaaaacttatggttctgaccgcacgatccagatgagtgatcgggtttatcaggcctttctgcaacaaaaaagcttaaattctggaaaatcagaatttgtattttgtaatcgcgatggtgggccgcttgattatcgcctggtcaataagcgtgtctggcatcccctgctacgctatttagggctaaaacctcgtcgtgcttatcaaacacgtcatactgcagctacgctctggctgtcggcaggcgagaacccagaatggattgcacgccagctgggacattcaacgactgaaatgctattccgggtctatagccattacatccctaatgttacgcgccgcgatggtagtgcttttgaagccatgctggagagactgaatacagagaagcttgtccatgaacagtaa

SEQ ID NO: 54475 - DNA, 216 bp, Acinetobacter baumannii
atgaatcttacttatattactacaaaagaattggcagaacgaatccattataacgaacgtaccattcgtaatcagttaaaggatagcgttctaatcgaaggtattcattacatccgcccttttggtggacgcaaaattttatatgtatgggagcgtattgaagaagatatgactaaaaccactttaggctcgctacacagcctacaacttcaataa

SEQ ID NO: 54476 - DNA, 165 bp, Acinetobacter baumannii
atgaaagtggcagatgtagctcgggcaaccggaatgagtaagacgactttacataagctttataatggtcaatcaactcgtattgattttgaaacattagaaaaattgtgcgtattgttaaatgtagacgttggtgatttattaaagttcaagccagatgaataa

SEQ ID NO: 54477 - DNA, 2451 bp, Acinetobacter baumannii
atggtaacactcgaaatcccgaaccggaatttcggtaatcagcgtataaatgaccctgatttttcagtcagctatacaaaaacgtttgtgctacacgacattgtgaaatgctggatctacagactaaaacatcaaaagtttgatttattttcggatattgaagatgcagaacatctgattaacgcttgtattattgaatgcttccccgaggaaaagctacgttgtaaagacctgttaaaatacggtttttactatacacagttcctgaaaaacagcggactggatcaaatgtccatttgtatcttaaaaaatgaaatttacagttccagtcctctcgaaaaacaattagaagcttattttgttcagtttgaacaaaagcacaccaataacattaaagttgagaatacttgtgaaaaccatcaggcccactctagagtcaatatcgcatcagatatagcagaaactcttgtagaaatacgtcaagccattcgtgcaaaaaactataaagatcaactcatagggttatattccagagaactgtctcctgccttagagcgtttgttgctgtggagcattctacgttcaaaattaacggaacctcaactggaccttctcaatcatattattcagcagcagcaacgatttaagcgcaagcttatacgtgcagattttcagccgctcaagcaaagttctctgaagaccatgttttcacagtttgcagtccattggctgcaggcaacgcaagacaaagatatttcatcattttcaaatgctgattttgaagatctgtatggagaaatgcttttattaaggaaggaaacaactagagagactttacaaaaacgtctacaggagtttcatcacaaacagacattattttttaacgcgcccactgtggatctggatagtttaatccaagtaaaaatctgcagaaccgcattgatctcgccccatattttttaccgcatgctagagcagctcgaaaatactcaagatatttcaattcaggataaaaatatatttaaactgatttttattctggggttcagagtcggactacggatcaatgaaacattgaatatcttcgtacgtgatctatttattggtgcagatgctgtgatactcaccattcgcaacaatcgcaataaaaatcaaaaaagctactcagcttaccgcaagattcctttacatcatctacttaaagccgatgaattacatgcatttaaaacatatagtcagaatagaaaacgcctgctaaaagaacaaagaaaatcagttactcaaccgctatttttaaaacagtccctagaagaaactcacgaaaatgaagtcaatgctctcttgaaacaattgatccagtctgcttctggagaacacagttttacttaccatactctgcgtcattcagcatttaatcatctctatctggttttaaaacactcaccgcttgctgatgcatttacagactatacgccaaatgatcaactacgcatccgttatgcattgctgcgaaacaaaaatactcagcaaacctggtatgcgctttctcattttgccgggcacctaacgcctgaaaccacttgttcaagctatctgcatttaatgcatctagcaattagctaccagctgaatcaaatgcacagcccgcttcctaaagaagcctattttaatattctgaaacatgatgattctattaaatatcctgttcagcagcgggcgatcaaacagtttttatttgagcaactcactaaagaccgttacaggcaacatgatcatcaatttcaactaggtcaacagaaatcgcctgattcactgatgctaggagctcatgactcagagatgacttttgaattattgcatcacattcttgcagtagaaaaagaacaagaccttatgttacctgaagccattcctttgcaaatcgcgcaaaaattacgtgctagagcccagcatttgaaaacctcctgtgtaaaccaaaaaaaatcatcgaggttatttaccacagattttttaaggaaaactccgaatgcattggtcaccatgttgccaaccaatcaggaggaaaaaaaggtcattcaacatgttcaggagcgttatgcaaatgtacaaagtaaatacaaaaaacagcttcatacgatctactcaatttatcttgaaaaagttcagcccaattcagcccagttaatttttgaactcaatgaaaaacggcaactgaagaaacttctttcttttattcatagcctatttcccaaaaaatatcttcatttagaactctctcagcagagcaagacagagctcaaaagcacattacaggatttagcattacggacagaaaattttagcctgaatgaggaggaagagcgaatcaagttctctttcaagtataaagatgcaaaagcacttggggtattcaaactactgatgtatctcatgatagtttctcatctttaa

SEQ ID NO: 54478 - DNA, 513 bp, Acinetobacter baumannii
atgataaaaataattaaaaaacagaaacctgctgtgttaattaaaaatgccagtaaatggaagtcacaattacttgatgatattaaagcagaaaaaaaatcaacaaagtacctcttaacaagatatagtcatcctgagattaaagagacattaatcgaagagacacatggtaaatgtgcttattgtgaaagtaagcttttgcatattcatcatggtgatattgaacatatttttcctaaagcactagatcaatccaagcgttatgaatggaataatttaactctttcatgtgaaatatgtaatcagaataaatctaatcatgatcctaatttgaatcatattttaaatccgtatattgataatcctgagagtagccttattttttttggtaccttcgcgcatggtatggataacaaaggtgaagcgacaagatttttattagagctaaatagaacagctttggtagagaggcgtaagcgtccgctgaacacaccttctgaattcatcctataa

SEQ ID NO: 54479 - DNA, 132 bp, Acinetobacter baumannii
atgacaactttaaatctaatttctattcaagatattgctaaaaatccattagttgtaattgatcaaatgattagtttctttaaacctaaacagccctttactgggctattgaagggtagactaataatgtga

SEQ ID NO: 54480 - DNA, 501 bp, Acinetobacter baumannii
atgcaacacaatcttgagaaagtcgaaggtatcctgagcaagcaacaaaagtacaaaaatgacttcaatcagcagctcgcccaagacattgtgaaaagcagactcaaacaaagtcatgacaaattgcaaagcctggtggatcaacacaacgagttaggtcagaacaagcccttgctgtttggaaaaaaagcttgggaggcacaacgtgatgcaatttaccaggaacacaaacaactgaaagatagacatgaataccagaaaaaaaatggtgtgaaggatttattggaaaacgaaaaattcaaagcacatgcctggacacagtaccaaaaagagcatccgaccaaagccgagcaatatcagaacctctaccaatcttaccgagctattaaaaactgtgtggataagatcaaagcagaacaacaaatgaaacttagacaagaacaacagctcaaagcacagcaacaagctcctaaaatgaaatctcgtggcatgaggcgataa

SEQ ID NO: 54481 - DNA, 759 bp, Acinetobacter baumannii
atgtatccagagacgcaaagagaagcagtccgcagacttgaaattgaatttcgctttaaaagaagagaggaatatttaatacaaggtgtttgcccaaattgtaagcataaagaactttatgctcatattgaagcaccgtggacccttcaatgtaaccgacgcagtaaatgtgcccatgttgtttacttacgtgatctctatcctgatcttttcgagaattgggaaaaacgctttgccccaactgagaaaaacccgaccgcaaccgtagatgcatatctggttgaaggtcgtggttttccggtcgacaaattgcgtggccattacacgcaagaatattacaagctttggggtacagatttaggctctgtcacaatacgtttcccaattactgacgatccaaacaacgttggttattgggagcgttgtctcgatgacaaaggtaaattaccaaaaactccaaatcctaagaatttcaaaatgaaaggtcatggttgggtaccacctgaaaccgacctgattaatgcaaaagaaatttggattacagaaggagtttttgactcgattgccttgtggctctccggtgtaactacgttcaccgcattaacctgcaataactatccatctatattgctgaatagaattgcagagcaatgtaagcaagaagataaaccacggccaaaaattatttgggcatttgatgcagatcaagctggccgtgatggtattgataaaaatctctgtacacgacaaatttcatag

SEQ ID NO: 54482 - DNA, 171 bp, Acinetobacter baumannii
atgagacacgaaatgcaacttaccgagcaagaagaaaaagttttcgaagaggttcgccagttacataacttggcgaccattgaggaagcgattcaatttgtgattcagcaaggcattaaaacccaactgcagcaaattgcagaacatgttgtacaaccaagaaaatcctaa

SEQ ID NO: 54483 - DNA, 240 bp, Acinetobacter baumannii
atgtctcaatttgttagttaccaaagtaaacagcctcgtgacaatcgtcgcaacgtgaatctaaccgaatctgaaaagatgcttttcgatgcgatgtcacaaataaccggtacaccaattgccatcattatccgcgagtttgctctacgccatgccattcgtctcatcatggatacggagcaatctatcttagatcgtgccatgaatacaggcgctctagagcacctccagaggggctaa

SEQ ID NO: 54484 - DNA, 201 bp, Acinetobacter baumannii
atgaacacacaaacaacaccatatccaagacaaagacagaaacgtatctctgcagaacgaaagcctttcacgatctatctcacagaagaagaaaaaaaggagctagaagacacagcaaataaacgaggtattagtctcggtctattggcaatgaaccgctacaacgcaggtttacagttagaacaacaaaaggagcagtaa

SEQ ID NO: 54485 - DNA, 351 bp, Acinetobacter baumannii
atgtccgttgatgtcgtaacaaaggaaatgaccgaacgcttccaaagagaagtacgccgatgcagttatccagctaagcggttgtcacgtgagattggtgctcacgaaaatacaataggaaactatcttcgtgaccatgtcccatatcaatgggtttatttacagcaaatgcataaaaagggtctggatattcattacattttgcttggtgcagaccctgatcatcagggtctgacattagaagagtcagttatgctcaaagcctatcgacaattacctgaacatgctcaacgcagtttaatgtctttgatcgaaggttatgcaactgatcttcagcaactgcagagttaa

SEQ ID NO: 54486 - DNA, 579 bp, Acinetobacter baumannii
atgaatcacaatagtattttttcttatattccgctaactccacgagtcgtagtttctaacccggaacatatgcctatacttgcttatttcatgactatcttggatgcggcaagtaaacaagagctagattttaatcatacgcctgagctttttggatttttaagtataaatcctgaacaagtcaatgatttagctgaattaacatcgttaaagccaatcgacatggcagatttgagaaaggctctggatagtttgatttatcctgttttccggggggaaaccacgataaatagtccgctttggaataatcaaccaactgtcgtttggcaatttcaattgaatgttatggatagttggaactttaaaacgatgaaaaattcagtagacaaagcagtaatgtcatttgatcaagtgttaggtatggttcgtattttaagaagttcgctagaagcaagacatcaagacccagaaattacttttaacgcaaatgactttgctaacgttcttttaatggtagaggagaagttgtcggaggcccagcaacttctcgaccctgataatgggcttctggacgattaa

SEQ ID NO: 54487 - DNA, 324 bp, Acinetobacter baumannii
atgacttaccaaaatcatggcgtagctatacgtctaccaaataataatatccatccgttcccggctctcgtcggacctgttcatccttcagcagttctacaaaacgtactggactattcagttcaggagcgtatgtatcaagtttgtctgcagcgtttgctctcaccagattttgctggccaaactggcacattagtgcctgagttccaacaaaatgaagaatttcaaggaggagttaagctctatatgcatcctggtgtgatcgcatttttgctcttactgtttttaacatctgtttatttacttgtaggggcatatcaatga

SEQ ID NO: 54488 - DNA, 1008 bp, Acinetobacter baumannii
atgcaattatggtttgtgtactttacttttggtatgtatttcattgcagtgtggagtattattccttatctgattaaacctaaatggtttggctttactagggggaatacactaccaactcgtttgaagatcctgcagctttggcttggctatcaagcaattcttattattattttctgtatagccctacctaagcaacctaacaatgattttagtttatgggggctattaatcggacttataatacagctcatcatctgtattcaagcaggtaaagccgctacttctcgttataccctcttaaaaccgacaaatattctacttacagaacaatttattaaacccgaaaataaaatcgaattttctgagcttaacgttcaacattctaaagaaattaataaaccaattagtttacgaatcaaaagtgaaactctatttaccccctatattcccccaagatcattatggatagacttgaaaaatgggatacaaaagacaaatattcatttgaatgaaaatctaaaaaacaacaaatcgatatttaaagaaaactggaccaaatacaaaaatgacttaaaagaagaatggaaaaaaactaaagctaaaatggaggaacactctaaggctattgtagaaaaaaataaagttgctaaagaaatggctgctttagaaaagatgagtaatcagccgcatcatttaaatcaatttcaccatttaggctatgaagacgataagcatttttcttatggctataccccaacttttagcattcaatatgagtctgctaatggcgaaatatcatcacgtaatattgatcccttagattttgaaaagaaaaaatatgatggagaatattactactatgtaaatgcgttctgcttctctgctgaagatgaaagaacatttagggttgatcgtattttacaattaatggatctaaatacggggagaatgtattttacagagaaagatattagaaatgtacttcgaaaaaaatgtaactcataa

SEQ ID NO: 54489 - DNA, 810 bp, Acinetobacter baumannii
atgaccagacaatatcttgcagataaactttattattcaacagtgcaaattattggtaataataaaacaggaacagcttttttttacatccatgactttggaggtatggcgaaaatatttctagttactaatcgacatgtaattactgataataacaatggtgcagttctatttcacgcttcacgctctccataccctacaaaggaattagatgtaggcaattgcgtaacatggagattaaattcacatgaatgggaaaacaaatggaaatttcatcctgatagtaatattgatattgcaatccttgactttaccgaagttgaagcgatattagatagtaaaaaagaatatatttactataactatattagtaataacactcttatcagtgaagaagacctcccagatatttctggcatcgaaaatgttgtttttgtgggatatccaaaaggtctcattgatagtgccaacctactaccaatagctcgacatggatttacagcaacaccaattaaaaatgattttaataaagagaaaaaattcttaattgatgcatcagtttttcccggttctagtggtagtccagtttgcatccttaatgaaggaactccattcattgaccgtaacaatactttaagaattgatgcaactagatttatatttttaggtgttttatctagcgtccatgtcgatctgaatcctgatgagagcactaaggaacatttagatctaggggttgtaacaaaagggatcacagttaccgagactattaatcaccattttacaattaggacacaaacaggagcttaa

SEQ ID NO: 54490 - DNA, 1158 bp, Acinetobacter baumannii
atgataatttttcaaaatgaagcaatgttgctgcttgctttattatgtcttactgtaacttcattggcattcatttttactaaagtaagtattttaccggattcagattctaatagaacttctacagttgatggtttacgtggcatattggctttatcagtgatggcacaccatttttatatcacttatatatggaaaactgcaggggactgggaaaagcctgaaagcattgtgattgataattttggtgcagtagcagtttctttatttttcttgattactggatatctgtttatctcaaaaatcagaaaagacaaagtgtcatggaaacaactctacatttcacgtatcaaacgaatcgttcctttatatctatttgtttttctatttattttggcaattacattactcaatgtacagattacagcatcaaatttcacagaattcctgaagtgggtgagtgactggattttttttaaaggtggaagttttcaaaactttgaaagtgggcgagtcattgctggtgttcattggacattaatatatgaatggaagttttatttcgctttacccctaatttttgcgatctggcaacaaaagattccaaaatggctatctagcattttattcattgctttcattatatatgtctttaaacataagtctcatcacgtatatgcattgttttttctttcgattccagcagtactgtataaggatagatttaaacaatttatgcagactaaacccgctattacccatattgtagtatgcactttaagcatcatagcattgttcttgacggaagcttattcgtggccacagatgctaagtttggctgttattttctcattcattgtttgtggatatagctttggagtcttaaatcataagggtttaaaggtacttggagaaataagttatagtatttatctagtacatgggcttgtgttgtacatactttttaccgtaattaatattgtggacttgaaaacaatttcattggaaaaatattatttattcttctttcctgcagcattattagtgtcgattgtatctttatttacttataagtttattgagttcccttttttacgaaagccattaaaaagttctggtcgtggaagattagatcaaccaaataaaaaaaccgcataa

SEQ ID NO: 54491 - DNA, 1005 bp, Acinetobacter baumannii
atgaaataccaaccgccttataccatcacatctaaaatcatttacctgattgctcagatcagtgaaaatatagggcgtttgactgttttagaggaaattcaggatagattaaaactgcgaaaagccaatcgtatacgtactattcaaggttcacttgcaattgaagggaacactttaagtacgaaacagatcacggcgattctaaatggtaagaccgtaattgcacctccaaaagaagttcaggaagtgcgtaatgcgattaaagcctatgaagcctttcagcagtggcaaccaagtcaagagtcggacttactacaagctcatcaaattttaatgacaggcttgattgatgaagttggtcagtatcgtcatggtggtgtcggtgtaatgtcaggtgatcgagtggtgcatatggctccgcctgcaaatcaaattaatcgactgatggttgacttacttgattggttaaatgatagcgaagtgcatcctcttatccaaagttcagtatttcactatgagtttgaattcattcatccatttgcggatggcaatgggcgcatgggaaggctatggcaaactttaatattaagcagatggaatccaatctttgctaatattcctgttgagagtttgatctatcaaaatcaaaaagcctattatgaagcattacaagcaagtacggatcgaacagattcagcaccttttatagaatttattttgcagatgattttagatgcaattcttagttcaactgataccgctcaagatagcggtcatgttaccgctcaagcttacgtacaagtgagcgatcaagttcagcgtttaatttcagcaatgaagctagaagactacactttggctgagttgatgcaattggttggtttaaaccatcgggcaacattccaaaagaattatttgaatccagcaatagaagcagatttgattgagcgtactattccagataagccgaaaagccctaagcaaaggtatcgtcttaaatcatga

SEQ ID NO: 54492 - DNA, 1530 bp, Acinetobacter baumannii
  misc_feature (674)..(683): n is a, c, g, or t
atgaagttaattcatatcattgataccgatcaaaatatttggattgatgttgatgtattctttcaacaatctgaaatggaacttacacaatggcgtagtaaaataagagagcaatataaaaggaataaaaccaagcctcattttacatgtgcttggtgtcaatcacctgtaaccctcgctagacgtacagatcacatgcagatcaacacttcggcaacattctttttcagacatattcctgagttggaaaataacccaaacttcaagtgtcctgtaaagcatattaaacagctatcggagcaagaaaaaactgctttaaagtatcagattgcgaaagaaacccaacaacataaattgctaaaagagaatatatataagagtctgcaagtggatgaatcttttagtgatattcatattgaacaagttcgtaaaagcattgacctaaagcaatggcgtagaccagatgtatcttcattatataaaaagcaattagttgtttttgaaggacaactttctacaacttttttgaatgtgattattgatcgtaagattttttatcaagataacaatgcttgcttactgtggatttttaatcattttgaaccaacagaaaaagcgaagaagcagtcaatgcaagatatttactacaacaataatgcaaatgcctttgtagnnnnnnnnnnctttgtagtgaatgattctacagtcgctcaatcaattaaaacaaaagtttttactttagagtgtcattatttaaagcctgaaataaagaataatcaaatcattaatcagtggaatactgagttcgtcgaattccaaaacttagtccagaacgaagctacaaagcaaatatacttttttgattatgaagctgaatatcaaaagctaaagcaaaaattaggcttacgacatagttatttacaagagagtaagaatcaaaaagataaactaaaagttcagaaatatatcgaatcactagaacgggttgatcttgatacaaaagttccatcaaaaactaaatctgaattattggtcgagtttactaaactatggataaaaactcattaccttaccgacaatcaattcaactatgagtggttttctattcgtaaagagcttgagctaatgggaattagtactcctaaatatcttttacatgcgccctataaaacagtggttaactcaattttaagtgcaaaatttggctatgctgtaggtaataatattaacgatatgattagtgtggctcataacttgatggaacatcatccagcttacataaagcattttatgcttactttgaaagtaactgaaaaacctaacttattgaatgagagagatagttcgggtaaatggcaagaacgctataaaaaatatacccaacagcctgaaagcactaagatatacaagcatgatttaaatcaatttattgagtttttagtgccagagtttgaggggcggttgatttcttggggggaaactagtgcatcttattctaatgcacaatttagtggagttagccaaaaatga

SEQ ID NO: 54493 - DNA, 1389 bp, Acinetobacter baumannii
gtggtatgcacaatcacaaggcaagcaaggtcgaaatcaaacctactccgatacaggagagatagcctagttgaaggggctggttttgatactaaagaagcggctgaatttgttaaagcaggtacgggtgagcaagctcgtttggactttggaaattctaaaattattgtgaaaccaataacaattccgttacctgaaaagccagatttaaagtctgttacacctacggtaaaaaagaaagtagaatggaataataaaaccaatgaattgacgattattaccccgttgactaaagaagagactgtggaactaacgaaaactgtttcacaactagagtcagtgcagcagattgagaaaggggccgaggttagccgtcaatctatcgaatattttcagacacctgcggaattgggtaaagagtttaaagtcccactattagcattatcggttcagggcgagcttcaattatttgatgatccagaagttcttgaatatccttggaatttaacaacagtagatgcaaaagttttgcatgatgatatttcaattttaaattcagcttatgcttcaaatgattttggaactttagatattgatgagactaaaggtaaggtaaaagttacttttcttccaaaacttcagagagatttaggtttggtgtataaacctgaaaattgggatgaagtcaaattagcaacttggttctgtaagaatatcttagaagaatcgttaactcatgaggctaaacgaaattttgttcttgcgtggctaaatgatttgttaagtaaagatgattttgatttggctcgaacaaatactcagaaatatataattcgtcagttgattgaaaaaagaattaatattttacgaaaggaagctgttaatgatgcttaccaaaatttcttatttggcaatgatgagcttcatcaaataacagtctcaaacgaacaagaatatcagtttaatttccatccaaatgtttatgcaccttctcgcgatgataatggtgaatacggatattatgcatttaacaaacattactatggccgtattggggcttttgatagtggtgaagagtttgcttgtgcatgttggttggatcagcaagcagttaaaggaaatattgagttttgggtgagaaacttagttcgtaaagaaggctgttctttttacttgcaaaagggaaatggtcgcttctatccagattttatatgtaaactacctaatggaaaaattttagtggttgaatataaaggggctgataagtgggaagctgctaaggatgatcgccaaattggggagctatgggctaatttatcagaaggacaatgtaaatttattatgattaaagataagcgcttcgatctgattgagagcttgttaagctaa

SEQ ID NO: 54494 - DNA, 1086 bp, Acinetobacter baumannii
atgaacacagacctaaatgactatcattatgacaattatgaaaaatattcaatccatgagacagatgaagacaatattgaaattattgatgatgatgaagcaatacataaagatactgtcattcaactcattaaaaagatgccaatgtatggaaacaatgtatataagtctcatcccacaaaaacgcaattgtacttaataaatcattgggcaatacacaatgcatttaaaaagattgatcctagatttatatctgatgtcacatacacaagtgctgagacagatctatttcgtaaaatctgtgtgaaatgcctgcctttacatattgtaaatgatacatctacaaacttttggcaacttgctcacaacgaaccaatagcgatcagtacaactcattacaagctcaaagctcaaattttaaatgagttctaccaacgtctttttaaggcattatcaactgatgtagactataaaaaagcagtgcaactacgcaaagaaaaaagcctaaatcagaaaaagaaagcgaaacgccttattctgaaattattaaataaattcagcaaactactggtgcttagaattgatttttcaattcatcgagattttaaaatcccacttgaactattgaaaacctacatgagcattttcttaaaaaaactccatacactaaatgacaatgtacctcccattgtgggctatatttggaaattagaatacggaataaaaaaaggctatcactatcattttatctttttcatggatggtaatatccataaaaaagagactttttttatagatcaactcgctaaattatggaatgacattaccctaaataagggcacttaccatagttgtaaccacaacaagagttcttacagaaaactcgcaattggcacacttgttcatgatgaccaagaaaaaatcaacgcactgtatatggtcgtggattacatcaccaaagtcgatcagttcattatcgaaaaaacgcttaagaaccatcgtacttttggctatagcactcgcaagcttgaaaaaagcaaagctggaaggcctcgtaatatcaacgcaggatcaatatcagtctaa

SEQ ID NO: 54495 - DNA, 1005 bp, Acinetobacter baumannii
atgaacatgctaatgcaacctacgaatactacagaaagcaccaatctaccttatttttgtatgggtgagttgaacctatccatcatgcaaaaagtttcagaaatcataaccaatcccaactaccagcctttcaaaagaaagaccaaaaaaattgctcaaaccgttatccaatactatgttagtaatagcccacatacggatcatgctttttattatttgcaatctattcaccccatcagtactccgttattacaacatactgctttcaacatcagtcagagtgtcaaggctataaatcaggcatatacaaacttgggttacgtttcagatggacctattaatccaacgctattacacaatgaacattatgttgagcagataaaatcagttgtagatgcattcgtatatgaattgaaaaatcattcaaccagtaaaagtgcaatcgctgatcgtgataatcgtattgcattaatcaaagaaatacgtaaagcaaatgtacctgtaatgaaaaaactgtttaaaactcagcaacgatttaatcttaatcactttatctatacatttaatatggagaaatgtgagttgcatgataaagcatttttggaacgagaacttgcaaaacaaatttcaaatatgattgaacaatttcatgaaaatcatcaatctgaaattttggctttatttttttgcgtacaacgtaatttatcaaacaattatgttttaaacgtatattgtgcgacagatcttgaatatgaaaagctttctatgaaagattgcattcaattacgaaatggcaattatataattgttgcaccaacttccaatatttcgttaagtactgaggaattcaactacccaatggatcttcaaggcgcagacggcataaatgaaaagacttggaaagcaatcttcggagaaatactttttaaatacaactatttttattacgaaactgaatacgtatcacccaaatttatttacagaaaatgtgactccaaccactga

SEQ ID NO: 54496 - DNA, 267 bp, Acinetobacter baumannii
atgttagaaataaagtcaccgaactttaaaaatattgattcaaaatatggagttcctaaactgtataactacgctggtaaattactatccttctcgcttcatgatcttttaaatagttctaatcatgtccgtagtttctctaataatgagatgatagttaaatttacatttccaaaaaaccttagtgtctttgtaaagtcactaaagactggtagcctttcacaagtgataggttatgagacaagtgaagcattcttcaaaatgtaa

SEQ ID NO: 54497 - DNA, 588 bp, Acinetobacter baumannii
ttggtatgggattcagcggacgcttacgatgaaagtagcaatgtaactgaagctaaattgattgctaaaactctaatcaacatcaatctacaaatgaaacaacaaggttatcacagtaagaataagcaaaaagttggtgtggtgtctttttaccaatcgcagtgccgaactattcgagatgaaattcgtaaagccaatggtggcaaattagattttgatgccattcatgtcgaaattaacacggtcatccgttaccaaggtaaagaaaaacctatcattttaataagcctagtgcgtaatgatggtaagccaaaagaatatagacgctcatctcgtgccaatatcgcccgttttgaatttattaatgtcgcaatgtcacgtgcacaaaacttattaatcgtatttggtgcacgtaatatgttggagttacgtgatgtgaatttaccgaatatggataaacctggcacgagcaaacgtaaaatttatcaggacatctttaatcggttggatcgtgaagggcaggtctgtacagcaagggaatttatacaggcttgtgaaatttcaaaatcacaggtggctaagtcataa

SEQ ID NO: 54498 - DNA, 2157 bp, Acinetobacter baumannii
atgttgaaattgcttaaaaattttgaagtgagcctacctgtgtatcagatggaatctcaggtaagttatgaagccattcgccaacccactgtatttgaagatttactgttaaaattagcagtgaaatataaaacaatgctggggcaatttagtttaaaccaagtgtgtgagaaatttaaaatagaaccatttttactgcaaaaagctttgtatagcctgattgataatgaaatgttggaacgatgtgacaccgatttaactactacgcaggtcaaagatttagcaataactacacgagggcaagagttatattataaaaatcaaatgccaagtgaaattaaaaaaactgaattaaaaactacatttcatccattaataaatcagtttattagtgataaagactataaattgaaaccatatgatacccaagcaccttatgtaatgcctcaaatgctttttgaagcgaacatatcgcatatcgatcaaatgattcgtgacatgcttaataaggcaagtgagaaacaatttgaatggaaaaagccgaatactaatatcagtgacgttaatagtttagtggctaaaacagtagcacatcgcttaccaatgcgtattgcacttactatgcaaggtcatcttggatttgatgctaaaggtaattcggaagtacagcaaatatttagtatgtggcttgagcaaactaagcatgaagtgctgtgggagcatcttttagccccaacgttccaacagatagacaatgatttacccacttttgaatggtcatcagtattagatgtgacgctggcagaaaatactttactcgatgagaacgcattaattcaggtttatgctgaaaaaagtccaaaccaagtcagtaataaaccagaaatcgttttgtcggaaaaggcaaaattagcgaaattacaaggtaaaacactaactttgccattcactacggctttaccacaaggctttcaggcattgtacctatataaagatcaaacagcgacaatagtattaaaaggtaatacccatatcttttatgccaaacaaccacgtttagtggctttgaaaattaaacttcgtgatgagcatgtgtggtcgacaattaaaaatgaagtgatgcattggaataccactaacaccttagatgtcttagcattttcacgttactttttatcagaacatgaagtgattcaacaggcaccgaatttaactatgaaagaagccatgaatttgcatgaagccatgaaaaaattgaataataccggtttacgtgctagtgcatggttagacaaaattcaacagattgcaaattttaatgaattaaaagattttcgtagtaccttttcacatttagaacttgcaccacaatgggcagaacctctcttttttgcaaaattacttgatgatgcttttgacaaaggtcaaaaagctggaacaacgctcgatcaagactttgtcaatattgtacagacacaaaagtcattaaaaagtcagattaatccagatgtacttaatccaaatcagcagattaattccagctctttaagcaaggtaaatataaaggccctagctttaatcgacgattggctagattgttatgaggaactacaactcaagcatactgaaattttgaatctttgcgaaaggctgaaaaagcaacaacgacatttagttgcattaaaacaagggatagcacaaagctttgcacctttacgcacagatgctaagcctattgcagtattagatactagctatttgatgcgtcatagtgatgatctgactaatttagaaagagattattttgtagtgattccgcaagttgtcttacatgaactagacggccttaaaaagggacaagacggggataactttagcgagcaagcacagaaagcgagacgtgcgattcgtgctattgagcatttaacatcagaacatattgaaccgactcacgatgagtttgtaactatcattgcaaaaagtaaaacagcacaagaaatgactccagatgaacaaatcctttcagtggctttattttatcgatttaacagtagtgaactttttagtttagataaaaatatggggaatttggcaaaagcagtcaatattcgcactatatccgaatatcagcctaagttaattaaagaacatcaataa

SEQ ID NO: 54499 - DNA, 1116 bp, Acinetobacter baumannii
atgagcgcaattcatgaacgacgctaccgcctacaacgtgagcgtgaaattgctcaggcacgagtacgtgaaacaactacacaatatcttgagcgttatcaaaacactttaaatcagctagaggaacaaggtttaactgcctatgtagaagttgaagttacgcaaataaaaaaacaacttactcaaatgcaaaacttattgagaaccgatgcttttgctgcacgtgagcttagtctaagtatcggacaacgtatctatggcttaagggctcttgcacgtgataatcagcagattgaaattgaaaatcagcgtcttgaagccttagaaaaacaacgtcaattggtagaaaaacgtcgacaagaacatgctgaattagaacaaacatggcaacacaattggcaaaaatggagtgataaacttgctcgtaatttggctttaaatgagttaggtactttacgccaaaagatttttgctgatggaagtcattatggtattgcacaaatcaatcaagagatggataaaatccaacaacattatgaacaactagcaaaaaagcaaagagaaagccaacagcaaaaaattgaacaggtagcaacacaaaccttattacagcaacttgctgatgatgttaaagaagggcaactacctcttgcggaaacccagcagttgcaaacagctttagtaaagcttatggatgatcctgctgtcagttttgatcaagtgaaaagcatggcgcaaaaaacagatcaagccttagaagatgaaagtattcgccgtgaaatggtaaaagcagtttatcagtccttacaaaatgcagggtttagcgtattaaaaccaaagcgggtaaaagaaaaggatcaggacattgtgattatccaggcacaacgtccatctggtaatcaggcaaaatttaaaattgagctagatggtaaagtccgttacgaatttgataattatcgtggacaaacctgtaaagaagatatgcaaaaagtcttgccacgactctcggaagtctatggtgtagaacttagtgatgaacgtgttatttggtcaaaccctgatgatgaaagtgcagaaatgaaacctttagcccctcatcaacagcaacgtggttaa

SEQ ID NO: 54500 - DNA, 1854 bp, Acinetobacter baumannii
atgaatacacaacatattcaaacatggttagaaaattttgagcgtcaaagcatgttgcgccgtgcactggtggtatctggtaatattattgatctcgccttcgctaaaaatgggcaattacagccgattaatcaaatcattagtgatagtctaaaaacaaagggctttcagcatgtggtgttttattcgcgtgttggtggggtttcaggtgtaacaccacagcaatggaatgatttacaagcgacaggttttcagtcatcagtatttgatgatgccgatgattatgacatgggtgaagaagataactcttcagctcaggaaactaatagcaatgcaggtcaaacagaactcacaccgaaagacttttttgccgttgcacaaaaggtaatgtttgaatctcagcaacgtgttgcttttgtggtggattggtccaactatatgtttggtcaaattaacagtttaagtgatgccgagcgtgcatggttacaacaaatttctaaaagtatccgtgatgctcaagtcaatttaagtgcaaatgaaattgataaaccgcaaagtttattagtatttttatgctcaggattaagcaacttgccgccaagcttatatttaaataatccattatttgcggaaattaatatcgacttgcctaatatgcatgaacgtgaacgtgctatttcagcattaaaaatggcgtttcaagtacaagaagatctattgccacaatcacaagccatgactgattttgtgacgctgaccgatggttttaccgttcgagatatctatcatttggcacgcttatcacgtcagcaaaaagaaacattaaatttacaaaacttggtgtctttatatcgttttggcaagcgtcaatctccttgggagcagttaaatcatagcaagttaaaaggtacaaaagagactcttaaactgagggtgaaaggtcaggatcaagctattgaggcagtcaataaaattctaatccgagcttatacaggcttatcgggtttacagcattcagccaaagctcgaactcctaaaggtgctttgttctttgtgggaccaacaggggtaggtaaaaccgaattggcaaagtctttagcacaatttttatttggtgatgaagatgcctgcatccgttttgatatgtctgaatttaaccatgaacatgctgatcagcgtttagtgggtgcacctccaggttatgtcggttatgaacaaggcggacagctcaccaatgccgtaaagaatcgtccattttctttattgttatttgatgaaattgaaaaggcgcatccgcgtattttggataaatttttacaaattttggaagatggccgtttaactgatggtaaaggtgaaaccatttcttttgcggatacttttattgtatttacctcaaatattggcgcaagcgaaattgaaccaagtactcctgaacaagtctcagcacaatttcaagctgctgtacaacatcattttaaaactgagttaaaacgacctgaattattgggtcgtattggtgaagccaatattattccatttaattttatggacaatgatgaaattttaaaaaatattgcgcgttcaaaattacaacctcttgaacagcgtttaaaagacaaatggcaaattcagtcatttcgttttgaggatgaagataaagctttgcaaaccttgatcaatcaagtcaataaacaacatggcgggcgtggtgtccttaatgttctgaccaagcatttatttgatccattggcagatttcttatttgccgaagtacagtatcctgaacaattgaaaaaccgaaatattgaggtaattcaggcaggtaaagtttttgattttaatatcgtgtaa

SEQ ID NO: 54501 - DNA, 582 bp, Acinetobacter baumannii
atggcatggttgaatattgcaaaaataattgatgttacccaagccgaaggacctggcctacgtactgccatttgggtgcaaggttgtttaaaacgttgtgttggttgttgtaatggacaatttttaaaaattcaaccagctgatgtgtgtgattcaaagatgattattgaacagattgcacaaaatctacaacagtacggcattgagggtgtgactttactgggaggagaaccatttttgcaggcagaaggtttggctgatgtggcacaagcatgcaaaaaaatgggtttatcagtaatggtgtttagtggttatcagctagaagaattagatgatgctcgctttaaaggagcatcacaattgcttaacgccacagatgttttggttgatggggagtatcaacaagctttcactgaaaatgtgcgtaattgggtgggatctactaatcagcggtttcattattttactaatttttatgacccaagcattgaaacacgaacattaacagtaaccaatgaatggcgtatcgatgcacaaggtcaaatattgggtaatggcttgccttttatcttacgagtttaa

SEQ ID NO: 54502 - DNA, 342 bp, Acinetobacter baumannii; identical to SEQ ID NO: 47765

SEQ ID NO: 54503 - DNA, 837 bp, Acinetobacter baumannii
gtgcgtaagtcctatctaattgcaaaagttggtatttcgcgtacctctgtattaattaaagagtccttttgcgtgtatgcaatggaaacacctgatgcggtaatggtggtccctgacgctactttagatcacagattcagtaccaatgctatggtgatttcaggacctggctaccgattttatgctggctcgccgctgattgatcccgaaggtgcagtgattggtactatttgtgtctatgatcatgttcctaagcagctgaaccagcggcagataagctctttgcaggctctgtccagacaagtgatcgccatactggagctgaaaaaagtcggcgaacaattacataataccagcatgacggatgcgctgacaggggtgaacaacagaagagcttttgacctcaagtttgaagctgaatttgctcgctggcaaagaacaggacaatcttttgtactggcattgattgatattgatcactttaagagttttaacgacagctatggtcatgccgcaggagatgaggcactgagtcaagtcgcggctctgtttcagcgccatagcaggaactatgactttttcgcccgttatggtggtgaagagtttgtgctgatcctgccaggcacagacacagcgtccgcaaataaaacactggaaaagttaaggctggtagtggctaaccatgagtggttattacgacaattaacggtcagcataggtttggccagcgctgatttatttgacgacaaaaagcagttgctcgaagtcgccgatcagatgttatacaaagctaaaacccaaggccgcaatcaaaccagtgtgttcgccacactgtaa

SEQ ID NO: 54504 - DNA, 663 bp, Acinetobacter baumannii
atgtcggatctaaaaatgaataaagaagacggtgttgaaagctatgaatttgcaacccctgaagcaatcgaagaagcattgaaaatcgggaagcttagtcaaacggttttcggcatgggttgcttttggggaccggattctaattttggagggacgcagggagtagtgcaaacacgtgttggctacgctggagcatcaactctggatccgagttaccgcaacatcaacggacacgccgaagtcgtcagagtgatctacgataaagaccaaatcagctacagggaacttcttggaagttttgaatcatggtctgttcatggtagaaagcagggccagtatcgccagatactttttgtttttgatctggagcaaaaacaagtagctgaagaactgattcaagcgattggaaaggagaaatctcccgaggtgattgaggccggagaacaaaatggttatttttggcccgccgaagattaccatcaaaagcatcgtcttcgcagaaacaaacagcttgtaagtcttgcagaagtagatttcggtcctcgctgggatgaacatctgtattttactaaattaaatagtaccgatagaaaaggcttcagtctctcaagctggctaaaaaagttgtctccggaaatgcagaaagcttaccgaatcggttaa

SEQ ID NO: 54505 - DNA, 1275 bp, Acinetobacter baumannii
atgaaaacgagaaacgtttatatcgtaggtggagctcggattccatttatgaaatctatgaccgcatatcgagacgtctcaagtgaagaactaatgacggcgagcctaaagagtttagttgatagatataacttggaaggaaaaactgtgggcgatgtagccttaggagctgtcatgcacagctcggctaactggaatttggctcgtgaagtcgttcaatcctccggtttgcatccaaacactccggcatataacgtgcaacgtgcttgcggaacgagcttggaaaatacgattcagattgctcacaaaatttctagccaccaaattgaaagtggcattgcgggcggtgttgatagcaacagcgatttgcccattatggttagtcgaactttcgcaagaaaattgattgcgttgaattctgccagaacgcttggtgagaaagtaaaaatcattttaggaattaaacctagcgatctaaagccagtgttgcccgcagtggttgagccacgcaccggaaaatcaatgggtgagcattgcgaactcatggttaaagagtggaatatttctcgccaagagcaagatgagttagcgctggcaagtcacagaaatgcagctcaagcatataaagatgggttttatgatgatctcgtctttccattccaaggaaataagaccgatggaattttgcgtgctgatacaactttggaaaaattgtcgaagttaaaacctgtttttgataaatcagaaaaagggactttgacggcgggaaattcaagctcgctcacagatggctcatccaccgttcttttagcatcagaagaagaggcaaaaaagaataattggcccctgttggctaagattgtggattctcatacttccgccgtggattatgtcgctggcgaaggtttgcttatggccccaactgtggcggtcagtgaattattgaagcgaaacggcttaaagcttcaggattttgatttttacgaaattcacgaggcgttcgctggacaagtgctctgcacgatgaaggcgtgggagtctgctgaatactgcaaaacacgtttgggacgatcagagcctctcggaaaaattgaccgctcgaagctaaatgtccgtggaagtagcattgcccttgggcatccgtttgcggctactggcgctaagatcgtcggagttttagcaaagatactgcactcagctggtcctggaaaacgtggccttatcgtcgtttgcacggcgggaggaatgggagtggctacaattcttgaaagttag

SEQ ID NO: 54506 - DNA, 309 bp, Acinetobacter baumannii
atgattatagcagttgtccgcagtcgtgttgccaaggagcacggtggggagtttgaaagaagatacgccgagatgtccgcgcttgtcgaagccattcctggttacggaagccatgagcggttttcttctcctaacggtgaagatgttctaattgtcgagttccttaccagagaagctttcgatgcttgggataagcatcccgaacacaaaaaagccaagatgcttggcaaagactacatttttgaatcgtacgacgtgaaggtcggagaagtttttgaacggcacacaaagccggaggtgaaattatga

SEQ ID NO: 54507 - DNA, 441 bp, Acinetobacter baumannii
atgttcaactgggaaagcattaacaactatctcgataacggcactcccgctcctcctagaaaagtagaaaagagcgaggaagagtggaaaaaaattctgacgcccgctcaatttaatgtcatgcggaagaaaggcaccgagcgccctcacactggggaactctgttcattttatgaggcaggacggtatgcctgcgcgggctgcgacactgaactgtttgattcgaacgttaagtttgattcgggaacaggttggccgagtttttctgagcccgtcgccgacaacgtaattcaatatgaactggacacgacttacggacgaagaatcgaagtgctatgcaatgtgtgcgaagcccacttagggcacgtttttccagatggtcctgagccctctggggctcgattctgcatcaactcggagtcattgaagtttgtagaataa

SEQ ID NO: 54508 - DNA, 237 bp, Acinetobacter baumannii
atgaaagaacttaagaacgttgtcatctacacaaaagaccattgtccgtttagtaaacgcgtgaaggagtacttaacttctgaaaaagttgattttaaacaaattcgcgtggatgacgatcccaagacttatgatgagttgaagaaaaaaaccaaccttcaaactgttccgcaagtttttgtggatggaaaattcattggtagcgcgactgacttcttcgcgtggattgatagctaa

SEQ ID NO: 54509 - DNA, 489 bp, Acinetobacter baumannii
atgaaactagattatgtgatcgttgccggagggtgtttttggggtctcgaagacctccttaggagtctggacggtgtgacgtcaacgaaggtgggctactctggcggagattttgatgatcctacctacgccgatattataacagggaaaacggggcacgccgaagcggttcgcgtggaatacgaccaagacgaaatatctctcgaagagattctacattactttttcaaaatccatgatccgactacgaagaatcgccaaggaaatgatgttggcacttcgtatcgctcggcagcgttctatcgtgacgatgcacagaaagcgattatcgaaaacgtgattgatgaggtcaatgagatcggtcgcttcgagaatcccgtggtcacgacggtagccttggaaaaagagttttatgacgctgaggagtatcaccaaaactatttgaagaagaatccccacgggtacacgtgccattttgagagagattaa

SEQ ID NO: 54510 - DNA, 585 bp, Acinetobacter baumannii
atgaaaacaatagactattacaaccaatacgcagatcaatttttacaagccacgttgtatgtggatatggaaagtctataccaaccatttttagctgaggtgccagattcagcacggatcctggatttaggctgtggctcagggcgtgacactttggcttttaaaaataaaggctatcaagttgatgctatcgactattctgaagtattggtcgaacgagcgagccaaatgactggtatcgctgttcagcagcaaagtttttatgagcttgatatgcacgatgtttatgatggggtatgggcatgtgcctctttactacattgtgctcgtaatagactccctgatgttttaaaacgtattcatgctgcattacgccgtggcggtgtgtgctatatgtcttttaaatatggaacagcagatagagtaaaaggcggtagggcgtttactgacttaaatgaagagcaggctcaggaattgttagaccagttgaatggggttagggtattaaaacagtggattacagtagatcagcgacctgatcgacaagaaaaatggctgaatgtactttggaaaaaacatgcctga

SEQ ID NO: 54511 - DNA, 840 bp, Acinetobacter baumannii; identical to SEQ ID NO: 45719

SEQ ID NO: 54512 - DNA, 276 bp, Acinetobacter baumannii
atggaaaatacaacgaatcagtatccatcagaagttcctgcacaagttcaacctcatcaaccaggtgatcaggagaaaatgcatcctgaaccagaaattattaaagtatcccataaaggcagtgaaaaactaaaaggcaaagttgccgtcattagcggtggtgatagcggtataggccgttcagttgccgtactatttgcccgtgaaggtgccgatattgctgtactgtaccttgaagaagaccaagatgctgaaattactctgccagcttattga

SEQ ID NO: 54513 - DNA, 129 bp, Acinetobacter baumannii
gtgtttagtggaccactttacaaacaagatggaacattacttttgggaaaaggtaaacatctctcaaatacgcaattgatgagtatgaattatttcgttaaaggcgtggatgctgcttatccaaaataa

SEQ ID NO: 54514 - DNA, 2031 bp, Acinetobacter baumannii
atgagttatctttttttgtcgtgtacaaaggataaaaatatagaacttgccaaatctgaaggttgggagtgcggagcagcattgccgccttctggttggaataaaacagattggaatgatctttataaacaagaacgattaacagaagctgacctaaaaaaatatcgttattacggtgatctacatatagcagaacgtgctgctgataaagccattctaatgttcaaaaaaacaaaatcccattcattcccatttgatttcaataactctttatattggttcaaaatggatatggatgcttataacgcaaagcttcgcgagttaggtcaagaagatgatgaaaatgaagattggctgcaaaaagaaaaagatgaatatgaagaaaaagtaattgatcaagctattcgtagttgttactcggtcacagaaatggccaagtgtaaacctactgccctttattaccaatattctgaagaaattgaagatgcaaaatactatttccgtatcgattttccaaagaatgctcacacggtaaaaactacctttacaggtgcccaactagcttcagcagcagaatttaaaaaacgacttatagcagttgcacccggagtagtcttttttggcaatagtacccagctagatcgatttgttaataacactactgaaaatattcgtagggttcagttaatcaattatcttggttaccaccatgaacttgaaacctatgtattaggtgatattgctgtgcaaaagggtaaaacctatcacatcaatgatgatgattattttgcattaccacgtcaggttaatctaaaagcaaatatgcctttcaaattaaaaattaacaaagaacaaaatgaatataaaaaggaatgggttgctgatctgatacaagcttatgacgtccgagggcttgtcacattaactgcattttttggaagtctatttgctcaacaaatcagaaagatgcataaatctttcccatttttagaggtggtcggccagcccggtacaggtaaatccaccatgcttaattttatgtggaagctgcttggacgtgaagataataacggggactacgaaggtcttgacccaaataaaacatccgaatcaggcttaatccgtactttccggcaggtctcaaatttacccgtacttttgattgaatccgaccgctctggcgagaaccagccctatacacgccagtttaattgggacatgctcaaaactttgtttgatgggggatcactcggtgctcgaggtgttaaaactggtggcaatgaaacttatgatccaccttttatggggtcattaattgtaagtcagaatgctgaagtcaatggttcagaagcaattaaaggacgatttatacatgtaggttttgagaaaaaacatcttactcagcagtccttagatgcaagtaaacggcttcagaaatacaaaattgaagatgtcagctatttcattctgagctgcctagaaaaagaagaaaagattttagaaacgtatgcgcagttgcaagaagaatacgatgacatgcttcgtagctcttacacgattgaaagttcccgaatcattcataaccattcgcaatttatggccttattcaaaagtttggttcagcacgtaattcagattgatgaagaaacgcaacgccaagtaattattgaattaggtgagatggccatcaaacgagataaagctcttcaacaagacagtgcaattgttcaaaacttttgggacacctacgaacagattgaaactcataaatcacttaatgaagacactgtacttaatcatcacagcaaacgtcacaaatatatcgcgattaacttcgctcatctctacaaagttgcagccgatttacgattcaacttacccgaagttcgggagcttcaggacgcgctacgtcaaagcatgcgttacaaatttttagattcaaacaagatggtggccagcaagatccagaacgggaagtccgttcgctgctggttgtttgaggttccatctgaaaccaacaccaatgactaa

SEQ ID NO: 54515 - DNA, 591 bp, Acinetobacter baumannii
atgtatcacttaatcgctaaagaagttcacggaataaaaacttggactcatgttttaggaaaagacattcctaacgttccaaagtcttttagtgtggatcgctataacctttcggtatcacttatgtttttaccgcaaagtgatttaaaggatttttttaaaggagttttagcttctagttcaaaactagctttttcattcgaaatacaaaaggttgaagaatctacttatcaaacagtttctatttttaaagggatggatgttatcccagaaacaggtcgtgaacttgttttacacatggtaactgggcaatttttggctccagcaatctataaaaaaagttgtggccacttccatacaccaggtggggaagcacggccatatatgattaaagaatgggcttatcaagatgagttgaatcaagctttaggtcttgaaccagttgattctgagacattagaacaacttaacaaacgggcagatgcagataaccctaatacaggctttaacccggagaaaattttcgatgccataacagaagcaataagtgaaattttccctgaagcaaaagttcaagttcgtaaatcttaa

SEQ ID NO: 54516 - DNA, 342 bp, Acinetobacter baumannii
atgcaaagcgattctaccgcagaaaatacgcaagcaaacatacagtctaaatttcattgcaaatgtggaggactgattctccctgattttgacgcttataaagttggcgatgaagttaattttatggttcaaaaaagagaaaatacatatcaagggaagattgaggtaagccagaaggcatacataggtgaaattaccgagattaacggtgaccaaatcactgtaaaggcaagtgtaagaacctatgttttgagtcgatatgaaattacaccgaaggatgcaccgggtccgattgattattttcgtattggtaaatgtcgtagcagctcaggacaggattga

SEQ ID NO: 54517 - DNA, 354 bp, Acinetobacter baumannii
atgcgtggaataaataaggtgattttagtcggttcacttggagctaatccattaaccaaacattatccgaatggtaatacttacgttcagttttcgattgctacttcagaaaagtatcaagataaaaacactggcgattggattgagaatacagaatggcatcgcattattgcatacggtcgattaggtgaaacggccacgcaattattaaaaaaaggttcaaaagtttatgtagagggttctttacgaacaagacaatttaccgaccaaagaggtcagcaaggttatataaccgaagtaagggcaaatacctttcagtctttagatagccttccgcaagcaaacccttattaa

SEQ ID NO: 54518 - DNA, 204 bp, Acinetobacter baumannii
atgaatagaaataataatttgacttatggccagtggtggaaatgtgaagaaaacgttttaatcacaatgcttgaagacaaaagacctgttcattttattgcagaagttttaactagggattacaacggagtaaagacaaaaattgatgtcttacttagaaatggacgaattccattggaattagtaaaaaaacctaagaaataa

SEQ ID NO: 54519 - DNA, 348 bp, Acinetobacter baumannii
atggaccgcctatgccttggtcatctgaatttgagtagaaaaactcagactctttctggtggtgaattaagacgtataaaactatgtgaatatttatccaaacaaagaaataccgataaaattttaattattgatgaacctactgctggattagatcctgagacctcctctagtattgccagtttcctgtatgaaaaatcttcaaaatttggagctataattatcattgaacataaagaagaagttattcaatattgtgattataaagtaatagttggcccaggctcaggattattgggtgggaaagttctcaaacaaataaactctttagaatctcttccacactaa

SEQ ID NO: 54520 - DNA, 177 bp, Acinetobacter baumannii
atgacctttagtttagctcaaacagctagtgcagaaaccacactaaaagcacctgctgaagcagatcagaacctgcgggatatcactgaactggcgtgttatatctgtgatgcaccagtggctatggtgacgcgaaccgatgacacaaagctgaatctaataggacttacgcattga

SEQ ID NO: 54521 - DNA, 1287 bp, Acinetobacter baumannii
atggcagtagatttgagcatagaaaccgctctgctcctagagcgctggcaaggcattgtaaactcgatggctcaagtcgcggaagtgccttgtgtgctgattaatcgattagataaaaacgaaatttgtcaggctgttggcagtgtgtcagtaccaactttttattgcggtgaacctgttccattggcacttaacacttattgttcccaagtcatttccagtaaccagccattactagttgaaaatgcaatcggtacccgatatgaaaacaataacccaacatttgcagcaggctttagttattactatggcctgccattgctttggcctagcggaaaaactttcggtactttgtgtatgttggacttttcaagcccagatcgggcatcacaacactgttccttactcacactttttaagcaggccattgaatacgatttacagatgcttcaacaacagcaagatctgctaaagcgtgagcaacaagcagacaaaaaatttatacaactattcaatgagatgtcaaataggataagaccggtaactaataataagttgcttcaatctgagttgtttgtacttttgacaagccaataccaatactggcatcaggaactggataagcagcttaatcaaaccgtcctgactgatgaaaactccattcatatagcggcactggttcgaatttggtcaaatttgttggcgattgcccatgaaacagaatggttgagagctacggcagttctagaaccttatagttgtgatgctgttgcgtcactggtcaatgcaactccattattagaacaagcagtgtataaaacagcgctgacccttggtgctgatctcgttttgaggagtcatttgcctaatccactgttactaagtgggaaaccagagttatggtctctgataggactagctatcacgagctttttagttgttggcgccagcggtacaagtataactatttttgtcagtaaccgattaaaaggtaagtacagagttttggaatggtcccttcttgtaaaaggccagacgatgccgctgcgttttacccgcgataatcaagcgctttatggttttgcaacagtatgtgccgagttagcgggtgctgttcttgaatctggtgagtggcaattaactgagagtcttcagcaacagagtcgttatctcaactcaaatcgtgatcacgttgacgacattgaaagcaggaatgcttcaagaactgctaatggcataaccaggcttatctgcttatcgataccggtgatgggagacgatttataa

SEQ ID NO: 54522 - DNA, 555 bp, Acinetobacter baumannii
atgtcacgtttgaacacccctaccacaatcgacgccgcgcctactgctacccatacctcactcaaggctgtggaaaaacaactgggccgcgttcctaacatgttccgcgtcgttgccaacagccctgctgcgctgactggctacctgcaattgagcgcagcatcagcacagggcggcttgggtacagcgactcttgagcgtattgccctagccgtcgctgagatcaacggctgcgattattgccttgctgcccattccttcctaggccgtaaggtggccaagcttgatgatgctgaactcactgccaaccgcagcggtgcatcaaatgaccctaaggccgacgcagccgtgcgttttgctgccgccgtagtccgccagcgcgggcaagtcagcaatgaccaggtccaagcggtgctgaacgctggctacagtgatgcacatgtagtggatattctgttggctgttgccctgaacactttcactaactacgttaacgaagtgacacagaccgaggtcgacttcccggccgttcaaccactaggcattgatgtctaa

SEQ ID NO: 54523 - DNA, 516 bp, Acinetobacter baumannii
atgactattcccgaaattgaaaatggtgtccagactaccaatacccttagtaataatctcggtgcaaaaatcactaagtttggtataggtggcatctacgttgccatgacgataatatatttgtggtttggtggcatgaaattcactagctacgaagcaaacggtatacatggttttgttagtaatagccctctgctttcgtggatgtatagcttcctcagcattcaaggattctcaaattttctgggtgtgcttgaaatttcagttggcctgttaatcgctgcacgagttttctcccctaagctcgcaatcttgggcggtgtactttcaaccggactcttttttacgacattgtcgttcatgctgactacacccggtgtttttgaggcatctcttgggtttcctgcgatctctgtggttcctggccagtttttgctaaaagatttaggcttgtttgtcgtgtctatatttatcgtaggtacatcacttacagcactggagcacaaaaacaaataa

SEQ ID NO: 54524 - DNA, 381 bp, Acinetobacter baumannii
atggttgaggggacaactgaacggttattaatgcctcgcctcagagaattagttgataaatccttaccagaacatcaaaaattagcaagccagtatgtaacttgtattgaagctggaggagctcatgctcatcttttttatccactcctcgactttcttgaacttaagactttggtagttactgatttagattcaatcaaaaaggtggaaaaagaaaataataaaaaaaagaaaattaacgtatgggaaaaatgcccagtagcggaaggtacgcgaacctgtaataccgcaataagatattggtttgctcctaaggatattaaaaagatagaggattttcatttatccccagtagaactttcaggcaaatctcgccactga

SEQ ID NO: 54525 - DNA, 942 bp, Acinetobacter baumannii
atgcaactagttgttaaagacaatgctttaatcaatgcaagctatacccttagcttggttgaacaacgaattgtattgcttgcaatcattgaggcaagggaaactcaaaagggagttgataccgaaacatttttagaaatacatgcccagcattatgcagatcgttttgatataagcgtaaaaaatgcgtatgcaatgctttcagaagcatcgcaggcattatttaatcgtcaagttacatttatgatgatcgatgaaaaaagaaataagcccgaaaagcgtgttgtccgttgggttagtggtgtttcttatgttgatggctctggaattattaaactacgatttgctcctgaaattatccccctaattactcagttagagaaaaattttactagttatgaactatcacaagttgcaagtcttgggttgtatgctacacggctttacgaactacttatagcttggcgtagtacagggaaagtacctgaaataagcctagatgattttagagataaaatgggacttgcaagtaatgaatataagttaatgcataattttaaaaatcgcgtacttgagccagcaattaagcaaatcaatgaacataccgatattacagcgacctatgagcaacataagcaggggcgtacaatatctgggttttcatttaaatttaagcaaaagaaagtacgaaaaggcgaaagatgtgaagatctaataagagatccgaatacaccagatttttttgtcaaaatgactgatgcacaacgccatttatttgccaataaaatgtctgaaatgcctgaaatgggtaaatattctcaaggcactgaaagctatcagcaatttgctgtccgtattgccgaaatgcttttagagcctgaaaaatttagagagctttatccttgcttagaaaaagcaggttttcagccaacattaaactaa

SEQ ID NO: 54526 - DNA, 216 bp, Acinetobacter baumannii
atgcaacgcctagaagatcacctaagaaaatataaagcaatttatactgttattttcggtattatttttcttttcatattatcaacaaatttaggtcgtatagaaaacaatactagaagtttggagtatgacaattctaaacttgaaaaggctctcattgatattaacgacaacttagatgagattcgaaaaaaatatactgatagcgtcttttaa

SEQ ID NO: 54527 - DNA, 963 bp, Acinetobacter baumannii
atggcaatttatcactgttcaaccaaaacgattaaccgcagttcgggacgaactgcggttgcatcaagtgcctatcgttcaggagaaaaactcgtagatgaacgtacaggactgacccacgactttacgagaaaggatggtatcgcccattctgaaattgtgtcgaatcttgatattcaagttgatcgcaaccaactttggaacttggcggaaaaatccgaaaaccgtaaagatgcccgaaccgctagagaatgggtaattgccctacctgatgaattagacgcagatcaacgtaaggacttggcaaaagcctttgcgaagtccttagttaatcgctatgacgtgattgcagacctagccattcacgaacccagcaaaagcggaaatgataaaaaccatcacgcccatatcatgctcaccacccgaaaggcgagactagaccctgaaaacaatctgatcctgaccacaaaggcagaaattgaactcagtaacgccaaaagaaagactctcaacatgggaacaacccaagaggacatcaaacaaattcgagcaacgtgggcagacctggcgaatcacgccctggaacaagcaggacaacagcaaaaaattgaccaccgcagctatgccgatcagaacaacggactacaagccacgattcatgaggggacttcggtcactcaattacgcagacaaggcatagacaccgaaattagccgttataacgacaaggttaaagagcacaacgcccaatacttaaaccaaaaagaacagcagaaagaaaccacgatccaacgtggttttagccgtgtagaacaaggctttgaccaatggcagaaagaccgagaagccaaacgcttagagcaagaacgccaagcggaacagaagcgacagcaagaaagagaagtgaaaaaagccgaacaaaaggcatcacctaatttgaataaaggcggatggtcaagatga

SEQ ID NO: 54528 - DNA, 474 bp, Acinetobacter baumannii
atgagcaacccaaacgatgatttagacgaccagttatatattttattggcatcaatgaaagaatatcgagaagccatagcagacgatcagaagcgattagagacgttttacacccaagttgccacagatgtgctcgataaggctgaaaaatcactacaggacaccaataaacaagcaataggcgcattaaagagccgtattcaggaactagacaaggcaacaagccgtctaaacacccaattcatcatgatatacgccagcgcctttgttgcagtggtcatgattttctttttggcgttattcctattcgttccaagcatggacgaaattcaacaacgtagatcggaagtaaataacctcaagcagtacagcctagacatatccaaatgtgagggacagatctgtgtcaaagtcatgaaaaagcagtgtggatatggaaaaaatggtgattactgtgtgattgaccctaaataa

SEQ ID NO: 54529 - DNA, 162 bp, Acinetobacter baumannii
atgtttattttaatttttttgagtgtggttttatgggcaaatgatcttttacaaatggccctaaacttagatcttcatatcattgctgaagttttaaagctgatatcaattgagcctacgtttgtgctgacgattaattttaataataaaaaagacaaatga

SEQ ID NO: 54530 - DNA, 339 bp, Acinetobacter baumannii
atgtggactgattcattaaataatgaacatgtcttttgtactattgatcacgaagttctaatagagttagctagagcgattctgaatacaatctataaagatagtggctgttttcaaaaacttataaagatccctgatggcggtttaaatatcaatgatataattcttgattatgcaatacctgcttcatgtgttgtaactaacctaacatctgattgggaagactcatatcttggtattccaagctattatattgttgatctttatcagtcatcagactataggttctctgaaccaatgcactccaaaattttaaatttagttgaatttaaaatttaa

SEQ ID NO: 54531 - DNA, 393 bp, Acinetobacter baumannii
ttgtcatacacttgggaatttggaaaacagtttgctgttgagtttggtaattatcctgaaaatcaacaagataaaattctagactttactgatgtttatgagaagtatggattaaacgacttttctaaataccaaggcaaaatttcacaatcatggcgtggaattgataaaactcatccaatatatgactatgcgtattcaaataacctttggcattaccatataggtattcctgaatacgttaaaagcaaatataacaattacttaacatcagatatgattctccattttcagtggaaaaaccgttctaatcatatttttattgcagatatcacatggcactataaatctaatggcgagttttggttgcctgaaccaaattatttagattga

SEQ ID NO: 54532 - DNA, 171 bp, Acinetobacter baumannii
atgagtgtaatgggctttatggtaactactacacaaacccaaaaaactgcacctatcaagattaatcttgatagaatgaaatctgctttatctgcggaaagctttgtaatgcctcaaggtttatctcgtgaagaaaagcgcagattcattttagaagcaggaaaaaagtaa

SEQ ID NO: 54533 - DNA, 738 bp, Acinetobacter baumannii
atgcttaaacaatcggtgaaagataaattagagcgactgaaactcaaaggcttcttacgtacagcagaggtttctttagatcaaatgcttgctcaaggtaaaagctttgaagattttttagatttttgcctagacgcagaattaaatgatcggacaaatagaaggatcgaaagacttttttcgattgcaaagtttcgttacccaactgcgcgattagagcatattgactatgcccctgaacggaagataaaaaaggctgatatttctcgttatgcaaattgtgaatggatcagtgattgcagagggctaattatctctggggcgacaggtgtaggaaagtcatggctagcctgtgccttgggcgcggaagcttgccatctcagctacagtgccatgtattttaatgcaataagcctattcgatgaaattagcagtgcaataacattaggtgaaatcaaagattttaagaaaaaggtatgttctacgaaattacttattattgatgattttggattaggtggttttaatcagtctttagctccatcatttttggaaatcattgacaagcaatcacaaaatggtggcttgctcattaccagtcaagtacccaaaagattatggtttgaacaattccaagatccaacgattgcggatgcagttatggatcgtattttacatcgctcatacgagttagaaatttctggtcgatcttatcgggaaaaaatctacgctcaataa

SEQ ID NO: 54534 - DNA, 1566 bp, Acinetobacter baumannii
atgcgtattgaaacagataaaattaggcaaattgttcgactacttaatcttgggcatagccaaaggtcaacagcgatacaggctcgggctaaccgcagttctgtaaaaaccatttttgataaattaacacttttcccgattgataatagtgagcttaatttatttactaatctggagttgttggattattttgagatttcacgtactccaacttatccaacacgaaaaatctatcctgattttgaatatatcaatcaagagcttaaaaagcgggatatgactctggaactcctttggcaagaatatattgctcaatataaagaaggtctctcttattctcgtttttgccatgtatttaatcattttcggaataaaaaacatgcctcaatgcgccaaacttttaaaagtggtgaagtattgcttgttgatttctgtggtagaactatggagattacctcacctgtagatggatcaaaaagctatgctcaagtatttatgggggttctaggggcttctgcgtatacatttgcttatgctgttccaagtcaaagagtggaacattggctcgaatgttttatcaaaacctttgatcatattggtggtgtacctgcaacagtgatcacagacaatcttaaatcagcagttctcaaaaacaataagacaggtttgatattccaaaaggattttgaagactttgcagcatattatgactttgcaattattccaactcgtcctcgtcatccaaaagataaaggcctagctgaagtgagtgttcagattgtacaacgtgcagtacttgcttcattacgaaatcaaaaattcttttcgattgaagaattgaaccaagccattcaggaaaagatggatgtcattaaccgaaaaacaactcggcgctttaccatcagtcgctacgaacagtttttggtgctggatagcaaagatatatcaccattacctctttatccttatgagctttgttcatggaaaaggcatgtgcgggtgagtgaattttatcgagttgagtatgaagggaatcaatattcagttccttatacctatatacatttgcatgtcgatctcaaagttacccaatcagcaatacatattttttatgaacgtgaaaaaattgcggaacatgcaattagtcacggtatttgtctagatatatgtcttgatgaacatatgtcacctgcacatcgtgcccaaaaaggattgtcaaaagatgagattattcattgggcaaatcgggctggcccaaatacttcatactatgtatgccatattttaaatcaaaaacgtgatctcgctagaaatattaaatcattaaacaaactgagaaagtgggtagttgacaatcaaaagtcccattgtcttgaagaggcttgtgattttgcatcacaacgacaaatttatgctctggatcgactacaacgcatcattgcaaacagtgcttatcaaatccagcaacaaccattgtcagatgcattaactcatattccaacatcccaccataatatccgcggtgctgattactatttacaaaattctggagttgctcatgcttaa

SEQ ID NO: 54535 - DNA, 177 bp, Acinetobacter baumannii
atgaaccccaatactaatgaactcgctcaacttaaaattcgtattcctgctcatttaagaaaacaattgcaggaagaatctattgctcaacaaagatccatgaatgctcaaattaactttattttaaagcaatttttgcaaattcctagcaatgtacaacagatgaaagataactaa

SEQ ID NO: 54536 - DNA, 948 bp, Acinetobacter baumannii
atgagtctattaagtgattctcaagtaaaactcagaataccaactgaattaaaacaaagaatcgaagctgaagcgcaagatgctaaacgttcaatgaatgcagaaatcgtagcacgcctcgaaaatagctttaattttaaaaagttagatgcagagaatggaaatattatattaagtccttaccaacttttagatcgtaaaaaagaattatcagatagactagttcatgctattcaatgggcaaatttcaataattttagagaattaaaatattcccatattgcagaacagcttgagtatgaaacagcagaaatatttttggattgggtccaaggtaaacaagaacctacatttattgaactcagaaaaattgctgaattcttaggagttgagcaagattggttagtccatggagatggttatccaacaccacattcttcatttgacgcttcaggtttaccagagcgagatattccagagctatttcaaactgaaggaatttctgatcatgaaatttttatgagtaaagttaaaaagattcactttgtaagaaatatctcccctgaaggtgaattagtgattgtccgagagtataaagatgataaagttgatgtactggaaactcgagctcacatttctaccgcaattggggatggcgggcgaagaatgctgcaaaattttgccagtttgtgggcttacctttacgatagccctcaccgtaattcagtacatagttatttaatgaagagagaaaaatttaacgagcttcgtaaactatacacacaccctttagctctcctacgccatactcagccatcttattggtgggaggaaatttggagaaagcaaccaagtgcccatacagcacaattatatgaagatcaatggtcagactggttatctactgttcatgttgcgagtgaaaggattaagaatacaaatcaataa

SEQ ID NO: 54537 - DNA, 1122 bp, Acinetobacter baumannii
atgcctattaataattccaaaatcaatttcgtcagccaacatgaaaagtatatctgtcaaaatggaattacctaccatgaaatttgtgctttcttaaaagacatcaaggcatttttaaatgtcgagagatttaaagggtttgaagaaattatttcaactaagattgataaaaccaaaatcatgaatgggttaacaagtgaactgatcaactgtaaaggtttctggtctgacaacacaacaatcggacttaatattgcaagcattgtggctcgattttatcgattggatactcagcaatgctatagcaatatcaattatttaaagcaacgcttactacagttcttatctgatgcacatatcactataatcaacaatgataccgccttgcctcaagcaatggaggatgcattccagcaaagtgaaaattcattggaagaacaacgcaaagatgctgttattaaagtacgacgctcactcttgcttacattacacaaagttaagacttttaaagagttcaagaaaaagattgatcatctccctattcatgagagtcctgaatttgaagaggatgaaaatcctactcgtgcggaagtctatgaagaagctatggaactttctgagagactagataatctcaaggatgtatgtttggcgataagacgcgatcatacaaataaaatcatccaaatcagtcacgattatcaaagcaatcccattgtcattagtgtaatgcaacaactacgtattgcctaccaacgtaaggagttcaagaaagagatacacagttatgatgagattacacagcttatgaataaggggctacaaaaaattgcggataagaaatccataatggaggcactaaaacactatccggataagtatattgagattacacctgagaactctctacaattcaaagctgggaaatctattctctttttacagaaatactgctttattcatgtgtttaacgctaagaaaccctcttcgttgaagaaagtacgattcaatggcttaaccgccttcggatatgggtttaatgagttcacagtgagatcaaagaaaaccatgcgcttaaatgatacacgatacaacgctcgtacagggcagttagttgaataa

SEQ ID NO: 54538 - DNA, 1827 bp, Acinetobacter baumannii
atggaaattaaagccaataaaaagtcagtatgtgaattaaaagatttctatttctcagtacctaattatcaacgtgaatatgtatggaaagcagatgatcaggttgagcaatttcttgtagatattgacaatgaatatgaagaagatagtaaagagcaacaaagctatttcataggttctataatcatagtaaaaaataatgaaggtaaatatgatgtcattgatggtcagcaacgcctaacgacaattatgctcacattatgtgctatgcgagatctcttagaagagcaaaatttagataaaaaacaaaagcaatatcttaagacaatacaggaactactatacgattttgatactagaactgatcaagaagaaattaggttagaactccaatatgatgaaagtaaaggcttcctatcacatttaattcttcaaacggaatatgaggatgaaaaaactgcttctattcaaaagatgcttgatgcccataggacaataaaggctcatctgaataaatatctcgaaaagggctgcgatgtacttgtttcttacattcgatattttatcaatcacattgatcttgtcattattgaatctgaaaacattggtagcgcattaaaaatctttgaaacgatcaatcaacgtggcgttggcctcaatgctatggatctagtaaagaacctattatttagcaaagcaaatgagaaagactttgagaaaattaaagatacttggaaaaaaatcactgcattactgcaaagttgtggtgaagatgagaatcctttaagattcttacgttatttcatgatggctcgttatcatgatggtattttaagagaagatgatatttacaaatggatcatctcaccatcaggaaagaaaagcctcaagtatgaatcaaatcctctagatttagtaacagaaattcaatttattgctcaacgttacgctcatttagtcaatgcaacaaaaagtatcaatcctaactatgcagataaaagtagttttccgaatgtaactaatattggttttataaataaatataaagcaaggcaacatttagtactcttgttagcgttaggaaagaaaacacaagataaagaattaaattatttagcaaaacagctcgaaagtttttatttttttagcaatacacttggcatacaatctaaaaataatgaaagattatttactatgtgggcaagagagtttagaggtaaagtcaccgaagcagagattactcaaactgttgctgtgactattcttccttatatcaaagaaaaatatgatgaatttaagcatgttttcctgaatattagacatggatcgtataaccctcaatatagacaacgttttattctcggtaggctagaaaatcaggcacgtatcgaatctggattaactccgttatcacacaagcaagtgcaagcttacgaaatagagcacatccttcctcagacgcctaaagatggaatacttactccagagtttatggataaagcaagctatcacaattccgtctataaattaggcaatgttaccttgatagaaagtgtaattaaccaagctgtaaatagaatgaatgatctgaatggagattggtttgcaagtaaatgtgatgaatatattaaatcagatgtattaacaacgaatctaataaatgatgattatgctattgggaagaacactgctattaatcgctttaaagaagcttccgcatattcatttaaactttgggatagcttagcagtatcaaaacgccaagaaattctcttagatcttgcattaaatatctggaaagtctgtgggcaacgaattgattcatag

SEQ ID NO: 54539 - DNA, 894 bp, Acinetobacter baumannii
atgaaatatgatacagaaagatatagaaaaatttatgaagcaatgtctcctgaggagattgcagaggtaaatcggaaaaatgatgaagagcataaaaagcaagctgaagcctttcaggctggatataaaataggaatatgttacctatgcaataagccattccaaactattagcaaaaatacaccgtgtttgcattggttattacgtcaatgcaagtttaagaaaaaagactttcctaaactctaccaaaaatatggttatgtaaatattgctgcatttattcgatggtgtgcaaaccaagaaagaatgctatcgaacattaatgatttggaagaagaaaaatcagataaaaaaattctgtcctatacagtgaaatggaaaaatattgaatggacattcgactgttctccaaatgactttgagggacataaaggaacatcaattgactacccacactaccactttcaaatgagaatcgatgggcagcagtttattaacttcaatgactttcatttaccattccatgaatatgatttatttatattaaaaataagtatggaacaaggtgattggtttagacacaatttcggtgctatcggttccggtatgcaagaagctattgatgttgatttaaatgatatacttgagaatacaactatctcagaaaatcaagtcgaagctacatatcacttctcaacattcattgatgctagcaataatcctatctctggcgaagaaatatatgatatacagaaagaagcagaacgaaccggaaaatcttttgcttatgtagctcaacataggttaaaagaacgtgcaagtgttcaaacaattattagcccagcagattcaatacctgacatcgcatctagaacggaacacaatcgaagatag

SEQ ID NO: 54540 - DNA, 396 bp, Acinetobacter baumannii
atggctcagcatcaagttgatcaatttaagacagggatttggacagtaaaaaatttgctattaagtttagatcaactgagtattcctgattatcagcgtccatacaagtggactgaaaaaaatttaaatgctctcgtcaatgatatacaagaacataaagataaatctgcatatcgattgggtagcatcgtattacatcgtaacccagatagtgatagtgatgaaaatatagatattgtggatggacagcaacgaactttaactttaatgctgcttgtttgggcggttattcagaagcaagaattagatttagaacgagaggatctgaaaacagctttgaatgaaatatcgaatcaaattaatgtctttatggatgggcaaaaatttagatattag

SEQ ID NO: 54541 - DNA, 1068 bp, Acinetobacter baumannii
atgtctttatggatgggcaaaaatttagatattagccattacaatatttatcagaactttaatgccgctaaacggatcgtttcagtaaacttttcggaacaagatattgattttttactcaataattgtcaggttgcggtttttattttagatgatatttcagaggcatttcagttttttgattcacaaaatgcacgtggccgtgatttagaaccgcatgatcttttaaaagcttatcatctacgagaattttctgcacaggagcaatatttaaaagcccaaactgttgctcattgggaaagtttagactcggctcatttggcaaagttattttcgaactatctattccgtatccgtctttggtcaagaggaaagtccgcaagattttttaataaagatcatgtgcatctttttaaaggtattcatcttgggcaatcagaccatcatccatatttagaaccattacgcatagcgcattattttattgatgactataacgcacagtatcaacggcaaatagatcgacaagaaatgagttttccgtttcagcttgatcaaatgatcataaacggtcgtcgattttttgaaatggttgagcactatgaaaaacagatcagtaaagtggtggatcatcaagatcagtctgagaagatttctatatttggtgcgacactacaggatcgagcgaatagaattatcaaaatattgaattcatatgatgcaagaaatagggatggggatcgttatgtgcgaaccttgtttgattctgcattgattttttatatcgataaatttgctacagatcggttatcagaagcgattgaaaagatttttatttgggcatatcgctgtcgtattagtcaatattcggtgcaattggcaacgatagataattatgtcctagaaaagaacatattcagtttactgaaatatgctcaatcacccagtgagttaatgggatggtcgcttccgatagtcgataaacaagaaggcactaaagttgagcctttgatcactttatttaaagaactaaattatctcaaacaggaagatcagaatgacaaatga

SEQ ID NO: 54542 - DNA, 2019 bp, Acinetobacter baumannii
atgacaaatgagtcaatccaagcgcttaagattcaggctctgttcgagaataaacagacttatattatcccgatgtatcagcgtaattatgcttggggtgagaaagaaattgatcagttaattttagatattcaagattatcaaaagcaacctgaacagttaaatcaagggcagactcaaggaagtaaaaaatattatattggaacattggttgtttttgagcgtagcgatggcacttatgaaattatcgatggtcagcaacgatttaccactttaaccttgttagcgatttgcctgaaacgattatccaaagaagaaaaaattgttcttgatatgtcttggtttaatcaattcaatcttgattttgaaagtcgtccaaagtcttctttaacctttcaggctttacttagaggcgatcatctacaacatttaaaatcatccgaatataacgccgatttagttcaggggtttgagttgctacaacgagcaatggaaaaaatcattaatcaaggcggtttgagtgttttttgcaaatatttatttgaaaatgtagtcatcacacaagttttagttccgaaagatactgatctcaatcattattttgaggttatgaataaccgtggtgaacaattagaaaagcatgaaattttaaaagcgagattgatgagcgtattgaatcaaatcaaagatgaagcagataaaacatcaagcatgacactatttacgagtatttggaacgcgactgccaatatggagcgttacgttcaatatggtttttctacaatatatcgtgatgtgatttttggaaaggattggggtgattttgttcctgaaaatgcttctagcttgctcgaaatttttagcagaaatgtagaatcaaaagaacaaacaagttcgaaaagcaattttaaatctatttctgaaatgttaaaacgagtgcctgagcgtattaaaaataaagatataaaagaagaaaagcctgaacgattcaacagtattatcaattttccgaatttcttgttacaggttttacaaatttggctaagtcaaacgaaccgtaatgaaaaagtggcattggatgataagcaactgattgatcaatttgaaaaatatattctgttaaaagaacagggaaaccaagagcatgaaagggttattgagaatgtaaaaggttttatgtttaccctgctgaagtgcaaatttatatttgatcaatacatcgttaagcgggattattctacggatcatgatgattggagtataaagcggcttaaacgatataaagatagtagttcgtatgtgaatacattggatggagatagttctgaaattacccaaaaaattctattattgatgacagcatttcatgtttccacgcctaccttgtcttataagtattggttaaatggtgtgctgtattggctttatcaaaatacagataaatctgagtctgactattttaatgcattacaacatttagcgagaaagtttatttttcagcggtatctaaatgaaaaacagattgattattttgatttgatttatggcaatcagacaattgatgattttaaaattgatcaatccaaactaagctttggcaatattgaaaataattttgtctttaactatttggatttcttgatttattgtgatgcagaaaatagcaatgataaggtaatcaaaaactttaaatttacgcaacggagttcggttgagcatttttatgcacaacagatagagggagagcgtgataaattagatcatgaaaatttacatcgctttgggaacttgtgtctcattagttcaagtaaaaattcaagcatagggaatcgcttgccaagcgctaaacgtgattattttatgcctgagataaggaagggtaaaattgatacccttaaattgtatttgatgattcaaacgcttgaagaagaaaaagtttggaaaaaagaacaaatcctagatcacgagaaaaagatgcttgatttgtttgagttagattaccaagactttgtgaaatga

SEQ ID NO: 54543 - DNA, 1626 bp, Acinetobacter baumannii
atgaaatttaaagtagatcagaccactcaaaaattacgtggcggttattatactcctcaaaatttggcagattttgtttctaaatgggtattggaaaagcagcccaaatcggtgcttgaaccaagttgtggtgatggagtatttattcaagctttacacaacaacaagtgtgacaaaaatattgaactgtcatgttttgaattgcttgatactgaagttcaaaaagcatctaacctgtgttcagaattaggattcaaaaatgctagtgttacgtctggcgattttttagtatgggcgaacgatcaacttgataaaaaaattgaattatttgatgcagttataggtaatcctcccttcattagatatcagtttttagaaaagtcatttcaggaacaggcagaacttgtttttaaacaactagatcaaaaatttactaaacacacgaatgcttgggttcctttcttattatcaacgcttgctctattaaacaagggtgggcggatggctatggttattccatctgagataattaatgtaatgcatgctcagtctttgcgtagctatatgggtgaaatttgttcaaagattgtgatcatagatccaaaagaaatctggtttgaagatactctgcaaggtgctgtaattatcatggcagagaaaaaaaccgatatcagcataccatctgaaggtgttggtatttttagtgtcgaaggttctgagtttttggaaaaaagtcctgaggtattattcaatgaaacattagggattaatggtgaaacagtagagggaaaatggactaaagcagtcttaaataaaagtgaaatttcattaattaataagattattagtcatgaatcagttcacaagtttaaaactatagctacagtagatgttggtattgtaactggagctaataaattcttcttagtagacaacgaaaccgtagagacatacaacctttcagcttatgctcatccaatgtttggtaaaagccaacattgtccaggtattttatatgatgagaatcagcataaatctaaccagctaaaaaaccttccaacaaactttttgtatattgaatctgattacaatgaacttcctttaagtgttcagaattatatccaacttggagagcaggaaaagctcaatgaacggtataagtgccgtatacgaaagccttggtataaagttccatcaatttatagtacagagattgggatgctaaagcgctgtcatgaggcccctagactaattttgaatagcgtcggagcttatacaactgatacggcctatcgtattacatctagtttcacaaatgctgaaaatttagtttgtagcttcttaaacccgttaactgctatcacagcagaattagaaggtaggtattatggtggaggtgtgttggagcttgttccttctgaaattgagaagctatatatacctgtaattgatgattataaacatgatcctgatactctgaaccaattagtaaaggatgggaaagttgaggaagttattagaaaccaaggcgaagccattttcactagattagggttctctaaacaagataatgaagagcttatgaaaatctggcaaaaattgcgtgatcgtcgtatgcggaaataa

SEQ ID NO: 54544 - DNA, 189 bp, Acinetobacter baumannii
atggcaaaaggtgaatcaggacgtatagttctggaagtagaccccgaattaaagaaagctctttactcgatcttagctcataaacagcaaacgttgaaagactggttcactgataaagcgcataagcatatagaggaaaataagccagaacttattaaaagctttttgaaggaacgtaatgaaatttaa

SEQ ID NO: 54545 - DNA, 582 bp, Acinetobacter baumannii
atgaatgcaaaaacaaaaggtggttatagggaaggtgcaggaagaaaggccatttatgatgaaccaactaagactatgcgtgtaccagtatcgcgtattgtagagattaaaaaattcttagcgggcaataaaaagcctactttcaatgatgtagcttctattactttaattaaccctacaacatttaaacgtattcctttggcttctgaaaaagtggctgctggtttcccctctcccgcacaggattatattgataaaactttagatatgaatgaacaccttgtgaaaaatgaagctgcaacatttgttgtcaaagttgcttctctttccatgcgtgacgcaggcattgaaattgatgatgagcttctagtggatcgtagtcttgaagctaaacacgaagatattgttattgccttaattgacaatgatttcaccgttaaacggttaatggttgaaggtgataagtgttggcttaaagctgaaaatccagattatgacgacattcaccttaatgattgccaagaattattaatatggggtgtagtgacctttgtcattaagccatttaggaaacataaataa

SEQ ID NO: 54546 - DNA, 309 bp, Acinetobacter baumannii
atgaatgagtctttacttcagcaaatcaaaaaaagacgaacccaattgggcttaaagcaagttgatatgcaatcccgtacaggcatttcaagacagcaataccaaaagctggaaagtcagggcaaccctcgattagagaccttagaaattatcgcggcaggattaaatgctcaactgatgctcatccctgatgataaggttcatttgattagacaattattgaatgatgaaattaaagtcactattgaagatcaggatgacttaatgactaacccatggaagggtcttctcggaggagaggaaccatga

SEQ ID NO: 54547 - DNA, 2361 bp, Acinetobacter baumannii
gtgaataataagttaaaagaaattgcagttagattacagcaaattttagaccaaatcacattattacaaaatgaatatcaaagcctttatcaagaaaaagaaaaacttatatcgcttgaagaaaaaaataagaattatttatcagcagaagaaagacttttattattttctcaaaggtttattggacgaactgatacctttgcttatcgttgggaaaatagcagtggaaaatctggttattctgttgcttgtgcaaatgagtggaaacatggcatttgttacaaacctcaaattaaatgttcagactgtaaaagccgtcaactattacccatcacacaagaagttctttattctcatttaactggacagaaagttataggcatttacccactattagcaacagatcaatgtaggttactcgcagtagattttgataaatcagattggaaaaattgtgtaactgcattttctgaagcgtgcttatctttaaatataccatttttggttgagcgctctcgttcaggtaatggcgcacatgtttggatatttttctctgaaccaattgcagctaagcaagctcgcttaatgggtgcaggtattctagataaggccatggaactttatccagctctagattttgaatcttatgatcgtatgtttccaaatcaagatcacatgccagcaggcggatttggaaatttaatagcattacccttacaaaagcacgcaagagcgctaggaaatagtacctttattgacagtaactttaatgcctttactgacccatggactgttttacaacaaactgaattaatgagttcttctgaagttaataatattgtgaatgaactaggctacaatttcatcgaacagaatcaaacagatgttgaccatgaggctccatgggtaaaaaatattcctaaaaaaaatcaaaagatcgcgggatgtccagacgctattgaattggtattcgcaaatatgattcacattccaattcagacattaccctctcaattgatagctcaattaaaaagattagccactttctccaaccctcgtttttttaaagcacaagcaatgcgtttttcaacgacaggaattccaagacacatatgctgtgcccgccttgaaggacaatatctcagtttaccacgaggatgcctaacagatataattcacttgcttaatcaacaagatactaaaataaaactaaaagatcaacgtactaaaggcaacatattagtcaatataaatctacttaccgaattatcctctgaacaggaaatggcatgtaaaaaaatccttgaacacgatgttggagttctacatgcaccaacggcttttggaaaaactgttactgcaatctctatcattgccaaacgccaaacaaatacactcattattgttcataacaaagaacttgtttctcaatggaaagaacgattacattcatttttagccgatgtcgaaattggtacaatacaaggtggaaaagccaaaccatctaatcaaattgacattgcaacatatcaaagtctaatcaaccgtgtaaataattcaatcaaacctatcgcctttaattacggacaaattatcgtagatgaatgccaccatttatccgcaccaagctatgaatttcttctcagtgaagtcagtccctactacattctcgggttaactgctacaccagaacgtcaagatgggcatcaacccattattttcatgcaagctggttctattgtatacaaagcgaaatccaacaatcacacccagcttaaaaaattattaataaaagtaaattatgaaggtgaattcccagaaattttctttggtaccgaaaataaaccacatatttcaaagctgatgcaacatcttactgaagatacagaacgtaataatgccattattaaagatgtctctcattgtattcaaaatggtcagatcccgttaattttaactgaacgtagaaaacatgccgaaaatcttagaaataagttgaatgatttagggtataaaacatctattttacagggaggtatgagccatacaaaaaacataaaagaaaaacaaaatttagatgatgctcatgttgtgattgccacgggaaaatacattggtgaaggttttgatcttcctcgtttagataccttgttcttggcattcccgatttcatggaaaggcactttggctcaatatgttgggcgtattcatagatcaaatgaaggtaaatttgaagttcaggtatatgattatgttgatgttaaccatccgatatttgtcaaaatgtttcagagaaggagtaaaagttataaagctctaggctatattgtagaacaatcacacaataatatcgttttataa

SEQ ID NO: 54548 - DNA, 1722 bp, Acinetobacter baumannii
atgttcatagaaattggtgaatttttaaatcttcgtctaaaacaaatgggtatccaacatctttttggtgtacctggtgattttaacctctcatatctagaacaagttgaagcagacccacaactcgaatttattggaaattgtaatgaattaaatgctgcctatgcagcagacggttatgcacgaattaacggtttttctgccttggcaaccacttatggtgtaggtgacttaagtgctattaatggtattgccggtgcctatgcagaaaatgtacctcttattcatatctcaggtattccacctttacatgcagttcaaaagggtactctcatacatcatacgttagttgatggtaactacgacaatattatgaactgtatgaaagagttcacagttgcccaaactcgtttaactcctgcaaatgcagcttctgaaattgaccgtgtattgcgtcagtgtttccttgaacgccgtcctgtacatatccaactacctggtgatattactcacgttaaaattgaagtgtctgagcgtccgctcgacctaagctacccagctgttgaacctgaattattgcaaagtgtggtaagcaaactttgtgacattattgagaatgctcaaagtccagcgcttttaattgataatgaagcctcagtttttggtgtaacttcacttttaaatgatttatctcaaaaatgctcaattccatttgcaggtatgaatactgcaaaaaatattatggatgaaggctcacctcgttacatcggaacttatgtgggtggagcaagccaaccgcatgtaaaaaatatcattgaacaatctgactgtttaattggtgttggcgcgcgctttaccgatgtaggctcagctgtatttacgcatcaaattgagaccaagaactacatcgaaattaaatcttatggcttaaatatttttggtcaggattttccgggtattgaaattggacaattacttgtcgagctaaataaaaaagttgcgccacgtaaatcgtcaatacctcttcttgaaaaacaacctcagaaagtaattgaagcgccagctcaacagaagcttagccaagatgtgctttggaactacatttcagggttcttaaaagaagatgatgtgattattggtgaagtagggacctcaaactctgctttgtcaggtatcaaacttcctgcctcagctaaatatattgcgcagccgctttggggttctattggttataccttgccagctttgcttggtagtttgttagctgctcctgagcgtcgtcaaattttgtttattggtgacggttcattccagcttacggtacaagagctctctacgattatccgccatggtttaaaaccaattattttcttgttgaacaatggcggctacaccattgaacgtttaattatgggtgaaaacgctgcctataacgacgtgcaaaactggaaatacaccgaaattccagcggtatttaacggtaaaaaaggccataccacttacgtggttgagactgctggccaactgaagagcgttttagataatgttcagcaaaatgatcagttaactttcattgaattgaaactaccagcaatggatgcgccggtaagtttgaaaaaatttgcttctgtgattgcacgttttgactacggtgatcgcggctatgaaattttaaaggagcgttcccaacccgttaaatgtaaggatgcaatctctttttaa

SEQ ID NO: 54549 - DNA, 246 bp, Acinetobacter baumannii
atggctactgttaacttcaggatcgatgaagcccttaaagaaaaatcttattcaatccttaaagagcaaggtattgcacctacggatttcttcactagtattcttgagtatgttgctacgactgggaaactgcctgtcaaaaaagctttgctttcggaagaagatgaagaattattagctcttgtccgtaagcgcattaatgatcctaaagagatgtttgaggaagtcacattagatgacttataa

SEQ ID NO: 54550 - DNA, 294 bp, Acinetobacter baumannii
atgacttataagcttttacgtcacaaggactttacagcagaatgggaaaaactccctgttgctatacgagatcaatttaaaaagaaactagccaaagtcatagagcagccacatattccaaagaatatgcttagaggcgatcttgcaggttgctataaaatcaaattattaaaagctggtgtccgacttgtctatcaagttaaagatgatcaggtagttatcctgctcattaccgtcggaaaacgagctgatagcatagtttatgacgaagcgaaaaagcgaattaaagactaa

SEQ ID NO: 54551 - DNA, 570 bp, Acinetobacter baumannii
atgaaaactgccaagcaacgaattttagaagcagcctcgatcctattttataacgatggcataaataacactggaattaatgccattacagaaaaggcaaaagttgcaaaaatgtccttatataataatttccctgctaaatctcatatagttaactcttatattgaggctagacatcaagagtggcttgatttatatgccattagaagtaaggaagcacatactcctttagataaaatattagcagtttttgatgcctatcaagatcatgctgaatttgcttatgaaaagggttttcgaggatgtggtctattaaatgcagcagctgaatttccagcgaatagtcctgaaagatgggctattaaattgcataaagatgaaattgaaaacattatttctaatcagctttctgagatttttccaaatcaagataaagttcaaaaaatagctttaatgctatcttttattctagaaggatccattgctagagcaggtttagaaggctcaagtcataaaattcaagctgcaaaaagaatcgtccttaatattttagagcaagaagttgtatga

SEQ ID NO: 54552 - DNA, 918 bp, Acinetobacter baumannii
atgagtaatatgcttcctaatgcttctaattacggatttattgctgttcttttagctgcttttctttggggaactacaggtacagctgctacgtttgctccaaatctcagtcctcttgctatcggtgctgccgctatgggtggtggtggtcttttacaagcacttttagcccgaaaaagtattaaaaagaatttaattcacataaattctaatcttattattctgataacaggagtcgtttctgtctttatttatcctttggcattttattcttctatgcatttagctggggtaactattggtactgttgtttcaattggtactgcccctttatttacagcacttttagaacgtttttttgatcaaaaaaaactttctatgatttggtttattagttttatcttgggaattatgggtgtaatttttttatctataggtgagtcacactcaccgacaacctcagaaaaaataacaaataatggacaaattttaggaatcattttaggtgctgttgctggactaacctatgccttatattcctgggcagctaaaaaacttatagatcggggaatagattcaaaagcctctatggggctgatttttggtttcgcatcgcttttattgttgcctactttattctttactggctcaaatttatttgaacagaatataaatatttatgtcgtaggctacatgatgcttattccaatgtttttaggatatgtattatttggctatggtttaaaaactgttccagcaagtaaagcaattactttaactttgtttgagcctttagttgctgcaatattggcaatagcattagttggagaaaagttaactcccattggctggataggtatgatttttatttctttatgcttagcactcctttctaaagccaaagattcttccatttaa

SEQ ID NO: 54553 - DNA, 270 bp, Acinetobacter baumannii
atggcgatattggatgatgatgagactggggggtttttatttgattatgataaatttttagggataaaaaacctaagtgaaagagatagagataatgaagttcaaggtgtggatagtgctatatctcgaactcgtagattattctatgtaatttgtagtcgttctgaaaaaagtttagctgttgtttgctacacgaaaaatcctactttgctaaaagaaaagttaattgagaaagaatggtttgaacaagaagaaattattttgatttaa

SEQ ID NO: 54554 - DNA, 3150 bp, Acinetobacter baumannii
atggctacacttttttggaaactttcagatcgtgaaactagacttgaacaaaatattacacatattttaaaagctaaaccaagcctcgaacctttatttgaaaatgtagcttcagacataagcacacattttttgaatatttttttcccatctatgccaacagtgtgttatgtcgcaaatttgtctttacaggataaatctgcacaacgcattaatttagctattcgtatccctcaacatcctgcttttagtgcgtatttagatgaacacagttcattagttgtgattggttactgggggactcgttcttccacaccttatttaatcccagaaagcgtaataattagccataatagtgaacaccctactaactatgaacatgaattagagtgtgaatatcagtttttgggggaaggggaatatccctctcgtggtatccaaaatgtattaacaccacaacttgtagaagaattacctaaaatttctgttttagctaatgagcgtttagaagagtggcgtaaatttttgggctttaaaaaagaactgattcggcaaaaatcagtaggtttgcgctatttaacaattaattatgatgaacaaaaacatatttttaaattgcttgcgattgctaacagtcaacaagattttgagcttgtacgtagagccttagcacgaaaagacctacaattatttgatctaaatacctcaactgatccatggaaatttgaattaccgagcttagaagataaacgtcaaaataagcaaaaagtaaaatttgaactcggacaatttaaacgtggtaaaaatgctttcagtttactgaatccagatgaagtaaagaatgtttttcaacatatagatttaaaagatatacctttttcagcacctgtatttgcatggctgaatattgagcccacagaagattggaaaaataaagtcaccaatttggtacctgatcaatctgatgaagaagccattctacaatatagagaagatattaaagaaatgcttgaaacagtaccaagcacaggttttgtatcttttgctttaattggtgattggtcattggtagatcgtcaggataggatcctgcgtaatttaaagcaaaatgaaaattgctatgcaccatatctctcaagttatttatttgatattacgcaagcacaattacctaacttacttcctgaaattaaagaatggtttaattctaacttaaatgatgcacaaaagcgtgcagtgcaaaaaatgcttgctgcaccagacttatgtttaattcaaggccctccaggtacaggtaaaaccacagttattgctgaagctattttacagctagtaaaacagggtaaaactattttgctgagtagccaatcacatgatgctattgataatgcgctatcacgtatcaccaatcacccttcattacgtgcggttcgtttagcaaaacaaggacgtgggcgagataaaattaccgaagaaggtaaactattttcaggtgagcaagctttagcacgtcattatgaagcattgagccatgatattcaggctcgttttttaacgccattgcaacagcaggaagcacaaattgatgcgttaaaaacatggttaaatcaagctgagtttttacaacttgatgcacaaaagtttgaacaacaacgtcaaagtatcaagcaacaaggtattgaaaagcgtcaacaacaacaacaggcgcaaaatgcctttgaacagcaacaactcgagtatcgggcacatcaacaacaactagtagaattacaacagttgcaagatttgttagcagggcaaagtattgcacctcaaggtcttgttttacccgatatgattaaaaatattgcagatcgcttatttgaattagacagctatcaggttcaattgccatttcagattacagattttcgcttttatccagaatcacaagctcaaattttgatggcattattagatgtttggcaaaatattcatagtagccttgaggttatggagcaggatattactcgcttgcaacaagcaggtcagggtagtctaacaagtatcgagacacagctaaaagttcaacaattacaacaagaaattgaacagcttgccaatcaaatggatctagatgatagtgaagaaatttctaatttatggcgtctaaaacgtcgtgaagtaaatcaattaaagcaacaaagtggtggtttaacccacgaatgttaccaattgtttaaggatagaaatcaattcctcaatattacaaatgcacaatctactgcaatgttattagcggagcgtttagagaaatttaaacaatttgagcaatgtcttaatggtcagattacagaagcaagccaaagcttaactgcacaaatgcatgcatttgagataaacatacccaatgatgcaccgatcaaacaaatcgaacgtgaaatcacaaacctacttgatcaatacaaaatgatcgaaattcaattgcaaaaacagcaacatgctgaacaacaacatttacagcaacaaaattttcaaaatagcaacttgagtgaatcaattaaatctactcaaaatcatatttcgtatttacagcaacaatatcaggagagcaaagcacaaaaccaaaattggcatggtttatttgaagactgggtacagtctcttaacaatccacaacaatcaaaattggattgggaattaatgagccaagaatatacccaaaactgtaatttagtggcgatttcttgtaatgaaaattcacgtaccttacaggatgcaggtattgatggctttgatgtggtgattattgatgaagtatctaaagctaccccaattgagctgttaatgccacttatgcgtgcgcgtaaagctattttagtgggtgatcatcgtcaattacctccaatgtttcaagaaggccaagatgctactgaaacatttgaagatttagtagaagtagaagatgaaaatcaagatcgttccaatttactcacaaaagacaatttcaaacgctatgaaaaattagttactgcatcattatttaaagagttatttgaaaaagcacctgatgtgttacgtgaacgtctcaccacacaatttcgtatgcatcctagcattatgaaaatgattaataggacttacgcattgacggattcaaaaaagtattaa

SEQ ID NO: 54555 - DNA, 1236 bp, Acinetobacter baumannii
atgaaattgcaccaattggggttgcaaaagcccacccttaaaggacgaagttatcgcttaagttataaccgactatttactccaaccaacaccaatttaactttagctacgtatagatattccacagaaaattatttgaaattacgcgattcaattttaattcgagacttgcaacaacaagatattgatagcttttccgtggggaaacaaaaaagtgaatttcagatcacattaaaccaaggccttccaaatcaatggggtaatttttatttagtaggctcgtggattaattattggaaccagcctaatcgtaatcaacaattccaatttggatatagcaatcaatttaaagatctgacttacagtatttctgcaattactcatgagcttgaccaagaaaatcaaaattctggtcatgaaacgcaatatttgttgtctttatcttttccacttcaatttaaaaaaaataccgttaattttaatagttctatttcagaagatagccgaactttaggaatgaatggttatatcggaaaccgctttgattatggctcatcaatttcatatcaagatgcaggacagacaagcctaaatatcaatggcacctaccgtactaactatacaactataggcgcttcttttggtcagtccgatacataccaacaagaaatgatcaatttaaatggaagcttggtcgctcactcacaaggtattttatttggcccagaccaagtacagaccatggtattggtatatgcgcctcaagcgactggtgctcgagtcggcaatacctctggtctaagcattaataaacaaggttatgctgtcattccttatgtaaccccctatcgcttaaatgacattagccttgaccctcaagggatgccatcaactgttgaacttacggaaacaagtcatcgtattgccccgtatgcaggatcaatcactaaagttaacttttcaacaaaaacgggatatgcagtttttattagcacccaaacacctaatggcggccatttgccatttgcagcacaagtttttaatcaaaacaatgaaatagtcggaatggtagcccaaggtagccggatttatttacgtactcccctaactcaagatcatctttatgtgaaatggggacaaagtaatagtgaagaatgtcaacttgattatgacattcaatcaaaaatcttacaggaaaaacaattaattattatgacagaggcagtctgcaaatga

SEQ ID NO: 54556 - DNA, 2694 bp, Acinetobacter baumannii
ttgattaccacacaaattttaaatgaaaaaataaatttagctgtttcattagatactaaatacaaagaaaatctggatagagattacattatagaagagcttataaggcgttatagtgtatggattgggaaaaataatatattagttaatgataatgggcatattccttggttgacgaatgaaagaaagaaagaatggaaatattggcaacggtataaagaatggcaagataagaaattgccatggatcgcgttaaaagctctggatgattctacagatactattttaggtttacttgaggaccctgaaagaactgatccttgggatagacgaggattagtggttggtcatgtgcaatcaggtaagacggggaattttactggattaatatgtaaagcagctgatgcaggttataagattattattgtcttagctggaatgcataataacctgcgggctcaaacccaaatgcgtttagatgaaggtttcttgggttatgaaacacatcctgatccagataaaattagaattattggagttggaaatattgattctggagttgcaagacctaattatgtgacgaatagaactgaaaaaggggattttaataataaactggcaaatggtactggtattagcccagagcaacgcccatggttatttgttgttaaaaaaaataaaacagtcttaaagcgactgcataaatggattcatgatcatgtcgcaaatacaactgatcaagaaacaaaacgaaaaattgtcacaaatcttccccttcttatcattgatgacgaagctgaccatgcttcggttgatacaggcgaacagatatttaatgattctggtattcctgatgaagattatcagccaaaagcgattaatagtctcataagacaaatacttcatttattcacacgaaaagcatatgtgggatatacagctacaccatttgctaatatctatattcatgaacacgcggaaacaaagcttgaaggaaaagatctctttccagaatcatttattttgaatctggctgccccctcaaactatattggcccttctagagtatttgggattaatgaaggcaccgatataagaaaagatcagctaccaataattcatgaggtagatgatcataattctgatgatggattaactggatggatgccaataaagcataaaagtgatcataaaccttatcatgaatcagaatttggtattcctttatctcttgtaaaagcaatagatacatttgtcattgcttgcgtagttcggcaagtacgtaaacaaggcgatgagcatacatcaatgctaattcatgtaactcgttttaatgccgttcaaaaagaagtatttgagaaagtagatgaatatgtaaaaaaaataagtcagagactaattagaaaaattgagaatcaggagatattatctaggtttaaagaactttgggaaagtgatttcattcctaccaatataacaatgaatgaagaagtacctgatttgtgttctgaatctttgcccacttgggagacaatagaacagattctgccagaggtgatcgaacaaataaatgtacggatgatcaatggaacagcaaaagatgctcttgattatgcagatagtgcagagggattaaaagtcattgctattggtggtgataagttagcacgtggtctaactctggagggattatgtgttagttattttttacgtgcatctagaatgtatgacacattaatgcaaatgggaagatggtttgggtatcgtggaggatatcttgatctctgtcgactttatactccttctgaattagttgaatggtttgaacatattgcagatgcctctttagaattgagagaagaattcaatcttatggtagatagtggaggtacaccacgagattatggactaaaagtgcagtcacatcctgtattaatggttacgtcccccctaaaaatgagaactgcaaagtctttatatttatcatttagtggaactgtaagtgaaacagtaagctttatgaaagatgagaaaattctaaaaaataattttgaagctttaagttacctgatcagcaccttggggaaaccatctaaaactcctatgcggctccgtaataatcctccagataataaatcgacttctaataattattattgggaaaacgttgagcatatacatattctcgatttccttgatcattataaaactcatccagaatctctcaaagctaacagtaaaatgttaaaagcattaatgggaggaagtattacacgttcacctatacaattatcggattcaattatagtaaaaaaagctgaacgtaaaagtaacgggaagcatgaggatagatatgcaatccgtaggttattatcacctagtgatgaagcattggatttgaacccagatgaatgggctgaagcattggaaattgcttcccaacacaaagaagagggagctgaaaaaaataataattatcctagtggaattagttgtcgtcttgttcgtggtaaaaatagaccagaaacaggtttattaattatatatttgccagaagactctaaactttctgaggtgaaagaaataccttatgtaggttttgcatgcagttttccttacagtaatttagataaaaaagttgaatataaagtaaacaatattgaatgggagaacctctatggggctgcaaattga

SEQ ID NO: 54557 - DNA, 207 bp, Acinetobacter baumannii
atgtttacgcgctcaatgttccaaacggaagatatggaaaaacaaagtgcgctactaaatgaagtcagtaaactggtggatgaaggtaaaattaaaacaactgtgactcaggttttaagcccaattaatgctgaaaacttaacacgggttcatgagcaaattgaaagtggttcaaccaaagggaaaatcgttttacacggattttaa

SEQ ID NO: 54558 - DNA, 2181 bp, Acinetobacter baumannii
atgaacggatatagttacttagaagatactcaagaattaaagcttgagccatttcgagacttctatcaagcactggcagaagcaaagctagaaagttttcaaaattcaatcaaactcaatgacttcattaaacctactgaaattattgaacttaacaatattataaatcaaaaacttatagaaaaatcaatcagtgaatatcctctggttcattatcttattgcagtcattaataccccttcagcatatcaagctaatgccctgaaatgggccattttcaatactagatgtattgaattgcttgatagcaaagaacatgcagccaccgtagcaaatctttgtatgcgttttcgtttagcctgcagaaaaagggaataccattggctttataacttcttaccagctctcccgatggagttggaggatctacttgagtttttaaataaagctgaaacagagaataaaaatttacttgaacgttctactccaaaattaacagcaaaacaaattggacaattggcaaatatccgcgttatttatacgtatgcgcatacgcaatcagatcggcaaaaaagacacaggcaaaataatccaagcgcccaggagcctcctcaaatcgatgttaggaaaacatcaaaaataactatcgatgatgagcaaacacatcagacttattttgaacgcggtatagcaaaacaaccacgtgaggataaaactatagaaaaagttgaagaccataattttgaattcaacccactagagcaatcttctattacagctcagatcaataatctcaaaaacagaattctgcatcaaaacaagaatgaattaatgagcaagtcaaatcctcatgtcttcgatttacctaccgcacagtacattatgcaaattttattagaacgggcagaaaactctccaattcatgcattgcttttattctcagtacttagtttcacgcattatgaagagctactggtattcagaactcgtttctttctaagctcaagaagtaaagaaatccgttttagtcatgaaaactgttttttcaagcaaggtattgataattcgaaatttaaagatgcattattaaaagaatatatgctcaacattggtaattcttttaccatccccttacccaaagtttatttagatcgaatctttcagttaaaaaattgggataaagctgatattgcttctgatgtacaagattatctacgtagaatcagtgatgatcttactttccctttaacaactcaaaatcttcctcgtttaatcagtgacattacattgaatgaactaggatatgaattagaaagtaaattattcgctggagaaaatgttaataactacactccatgccattatttctcaacgaaaattattgatatcttagatatttatattcaaacacttgatctggtttgccctcagcttgacactggatatattgaggaatttaaatcccctattacgtttggcagtcagcaagtaccgaatctcccattcgtccagtcttttttttaccagcttgaccacaaagttaggaataatctcaatccctttcagactttaaatcattattcgatgtggctttggcatatttgcatgttgacaacttcagcacggccgagtgagtccttcccgcccagtctagattatattgaccttgacaacaaattgatggctgttgcagataaagagcagcgttattcaggcaccattggacgctatttaccttttaataattttcttcgtgatgaaatacagcattacctaaagtatttgaaatattttctgcagctcgcaaaagcctatttgacgcaagaacaagtacaagcaatccaagaggtcttcgatggtgaacgtctcttgctcttattttacgattcgaaaggatatgtccgaaatctggaactttctgatattcaaaaatactgtaccgaaatagcattacagcgcaattggacccgccatttcgctcgctatttttttgcccaatactgcaatgaagatctaataaatggcatctttggtcatgatgaagctatgcaggaactgtttgaccgctattcaggttttaagacaatagattacgatcagattagagcagcacaagacaagctggtcgaaatcttagcgcttaaaagcatgtctacgtttacaggaatgactattgcatga

SEQ ID NO: 54559 - DNA, 459 bp, Acinetobacter baumannii
ttgagtgataaacaacagaactaccatcttgatttagcttttaaacagaatatcgacattccactcattaccactaacacactgggtcactatttttttagtagtcatttcagctggatctatgcctatttttacaacaagaataaaaatgaatttacgtttagagcttatgagaaaaataattcctacgaattcacaatccaggctttaagcgaagtaatggccttactgtgttccggattacatcactcaattcatggcttagatatcatcgcgcattggctaaatgaacaatacttagccgcacatcttcaggaagttttcggacaggaagttttaactatcaatcatctaagagaattatcagggctatctaaatcccaaagtccagtaagttctatttcaaattatgctggtccactttcattagaaaaaattctggctggaatatcatcatga

SEQ ID NO: 54560 - DNA, 303 bp, Acinetobacter baumannii
atggcagatttttttgttctttcatctaaatatgagggtttacctacggtcataattgaagcaatggcatgcgaaacttatgttattgcaacagattgcggaggtagtgccgaaattatgggagatacaggaactctggtacctatacaagatagtcataccttatcggatgctatggtgcatgtattaactttagacaatgtatctattgtaagcaataacaaaaaagctcgtcagcgtgtagagaatttattttcattaacttcatctgtaaatcaatggattgaaatatatgaatcataa

SEQ ID NO: 54561 - DNA, 663 bp, Acinetobacter baumannii
  misc_feature (614)..(623): n is a, c, g, or t
atgaatcataaaaaaattgctttaattggaacagcaggttcaagtttttatggcttccgcgctgatttaatacgatctctcgtagctaatggccatcaagtatatgctttcacttctgaatatacagaggactgtttagaaagaattaatgccttaggtgctgaacctgttacttatcaattaagtcggggaggcttaaacccttttgctgatattatatccacatatcagctcactcataaaataaaaaaaattaagccagatatcgttttttcatattttgccaaacctgtgatttatgggacattggctgcaagctttgcaaaggttccccatattgttggtatgcttgaagggctcggatatacttttacagcacaaccggaaggtcaaagcggtaaaacgaaacttattcgtaatattcaggttttattatatcgtttagccttcccaagattggatgatatgatttttttaaatcctgatgatgaaaaagatcttatacatacatatactctgccagtcaaaaaggtacatattctgggtggtatcggtttagacttgaaagattacagttatagtcctgctccagtagatcctgtaaattttttatnnnnnnnnnnaaaggtatatttgaatttattgatgcaattaaaatcgtaa

SEQ ID NO: 54562 - DNA, 426 bp, Acinetobacter baumannii
atgggagcattgtcgaagtctcagctagatgaactgatcgcagagggtttgtttgaatatcctggtcatgtttctaatgtaaaagactggattgctaactcgagtgtatttgtacttccctcttatcgagaaggtgtacctagaagtacacaagaagctatggctataggacgtcctgttattacaacagatgttccaggatgtagagaaacggtagttgatggtgtgaatggttttttggttcctaagtgggatccagaagctttggcagagaaaatgtgttactttatagaaaatcctgagcaagttaatataatgggtttgaagagccatgaaatagcacaagaaaaatttgatgctgaaaaagtaaacgccaaacttatagatatcatgggtttaaatagttcttatgaaaagattggttga

SEQ ID NO: 54563 - DNA, 615 bp, Acinetobacter baumannii
atgaaaagattggttgatattttcattgctacaatagccttactccttctatctcctatttttttaatagtgggttataaggtgagaaaaaatttaggttcacctattttctttcttcaagaaagaccaggcaaagacggcaaaatttttaaaatgattaagttccgttcaatgaaagatgctttagataagaatggaaatcttttgcctgatgaggaaagaatcacgccatttgggcagaaattgcgctctactactctagatgaaatgccccagcttattaatgttttaaaaggtgacatgagcattgttggaccgcgtcctcaacttgctgattttatgaagcattatactccaagacagatgcgtcgtcatgaggtcagacctgggatgacaggcttggctcaagtcagtggacgaaataatttaagctgggaagagaaattcgaattagatgttgaatatgttgagaatcataatatctggttagattttaagattatggtaaaaacagttctggttatgttgaaaaaagaaggtattaacgcaccagatcagttagtaggggccagtcgtttttctggttctccaaaaaaagatgaagtacagtattaa

SEQ ID NO: 54564 - DNA, 1515 bp, Acinetobacter baumannii
atgactgcacaagtttatatctcaggttctcttacacaagatgggcgagtacgaggacgtctcgtaggttatgagaaagtcggagattcttatcttgatcgctattcagaagaaaaaaacggttttcaaggaattttagaagctgacgttacagacactacaaatatttcagcaggatattcaaaaactcgtcaatacgctaatggttcgcaatggggtgcactacccttagttaactcaaaaggagaaccattaaattattcacgcaactataattatgcaccatcatggacatactacgattgggaaattgataattattttgccaatattgaacaaaatttatggggagactggaagctaaggttaggttataacctcaaaaaatcagaggttaaagataaaatgctttatctcaatggttctccttctgctacagacaatacatctggtatttcactattaccagaaatttataatcaaaaatttaaagaaactacagcaaatgcagatattcaaggtacgtttaatttattagggcagcaacacgaagcaaatattggttataactggtcaaagtataatgcacaaagtgtttattcgtatggtagtagtttaggcgttattactacagacttaccaagctggacacctgaagaaccgacttggggagactttacctatgctgacccagaagaaagagtaatgaagtctgtttacggtgccacacgtcttcatctaggtgaggatctgaaatttatcttaggtgctaactatactgaaatcgaaactttggattataaaaagaataaagtttccccgtatgcgggtattacatataactttactcctgaatacacaggttatatgagttatacctctatttttaggccacaaacggttatcgatctttctactaaacaaaccgctgtaccagtagagggtgaaagttatgaagtaggtgtaaaaagctcttggttagatgatgctttaactggaaatatcgctatctttagaacagacgaagataactttgcactaaacccattatgggatccgctctataataaatactcgtcaccaataggaactattagatcgcaaggggttgaagttggattaactggaaaattaactgataacttagatttagtttttggtttctcaacatttagtctaaaaaatatggaatcaggtgaaagaggtagaccaaatatcccaactcaaacacttaacgttttagcttcttatactgttcctcaaattccaaaattgaaagttggtgcaagcattaaatggcaagatgatatacatgacacctcttactcaactgtaaaacaagatgcttacgcattgcttaatgttatggccagctatgatttaaacgaacatgtaatgttccaagtgaatggtaataatctaacaaatgaaaagtatttgacaggtttatctggtggtcagggttactatggtgccccagccaactatacagttgctgtaaagtttaaatattaa

SEQ ID NO: 54565 - DNA, 1920 bp, Acinetobacter baumannii
atgttcttactgaaaaatctcgtctcttcaatatcaaaagttactcaggacctgggtaatattgtatcgataacccctgtagtaaacacaggttcctctgttaatgtaaatgtttctgatatcaacattgctaatgtttcaacaacaggcttactttctaatgtgatttcaactgtaaccgatacagtttcacatacaaccacagacttagtttctaatgtagttggtaccgtaacaggtactgtagggtctacaaacccaattgatactgtaaccaatattattggcggcgtaacgggtggtgttacaggtaaccctcttgaagttgttactgatattatcggcggcgtaaccggtggcattattggtggcggtacatctcctatttctccagttattgatgttgttcaaggcggcatcgatattcttcaaggcgttgaaagcctaaaaaccgaaattattaacactggtattgatacagtagccgacactattattggtgtattacctcaagctgagcatccagtttctgaaattgcagaccttggcacattaactttcgaaacgtctcgagacacggtcaacggcgctcttgaagttgtttctgatttagtcggtggtgatattcaaggcgctactgaaaatgcaactggtattttaggaacacttattcagaatggttcaacagcgactgggattgtgactgatatccttggtggcgtgacaggtactatcggcggcgtaactggtggtatcggtggtgacaatccgctcggtatagtaactgacattatcggcggtgttactggcggtattggcggtgacaatcctcttggtgtagtaactgacatcatcggtggtgttactggtggtatcggcggtgataaccctcttggtgtagtaactgatattatcggtggtgttactggtggtatcggtggtgataatcctcttggtgtagtaactgatattatcggtggtgttactggtggtatcggtggtgataatcctcttggcgtagtaactgatattatcggcggtgttactggcggtatcggtggtgacaatccgcttggtgtagtaactgacattatcggcggcgtaactggtggtattattggtggcggtacatctcctatttctccagtaatcgatgttgttcaaggcggcatcgatattcttcaaggcgttgaaagcctgaaaactgaaattattaacacgggtattgatacagttgcggatacaattatcggtatccttccacaagcagaacatccagtttctgaaattgcagaccttggcacattaactttcgaaacgtctcgtgacacagtcaatggtgctcttgaagttgtttctgatttagtcggcggtgatattcaaggcgctactgaatcggctactggtattctcgatacgcttattacaaatggtacaactgcaactggtttagtaactgaaatcattggcggagtaacaggaactattggtggcgtaactggcggagatagcccactaggattagtaactgatttacttggtggtttaactggtagcgtaggcggcgacagtccgcttggtgtagtcactgaccttctcggcggtttaactggtagtgtaggtggcgacagtccgcttggcgtagtcactgatctgctcggcggtttaactggtggtattactggcggtacagataaccctatcagtatcgtaacggatatcgttggaagcttaacaggtggtgttactggtgaaggcagtttagatgttatttctaatttgctaggtggattaactggtggtagcttactcggtggtgtaacttctacagtatctagcgtaacaaatacaacgcatacgatcgtaccgacatcattacctactgataacttcctagaaaactcattcaatactgtttaa

SEQ ID NO: 54566 - DNA, 321 bp, Acinetobacter baumannii
atgaaaaagctgaaatttcagtacctacaacctgaaaatactcaccctaatgacggtatacgacaacgataccctcatctgagaaatgtgtatcataaaaagttcagtacacttcaagagcgtagtttttattttcttcatttgattgaatataagaactatcctttaaaacttcgtgttgcacgaggtacgggcttgcctgaagaatgggatgatttacctgcttatgtctataaagttgcaaaaagttggaagcataattctagaagacggaagcaatattttaacaacaaccaaaatagtaaaatgagtaaagaataa

SEQ ID NO: 54567 - DNA, 384 bp, Acinetobacter baumannii
atgaaaaaattaataattgcaggattatgtttaagtctttcaaccttggctagtgcaggcgtaaaagaaagcttagttggtaaacgattggtcttagatttacccgatgtagaatgtgcaggcttgtccttttccaagaatggaaaagatgctgcaatgtatgcagaaatagggcaatgccaagatccattaccattaagagtaaaatggttagatgacaagactttcattttgattgagaaagtacgaaccaatgaagtttctccaccacgtacttatttatacctggtaaaaagctacaagaaaaatggtgttgaattgacaaatatctcgacaggttggggagatcataaagatacgaccatcagttattattttaaataa

SEQ ID NO: 54568 - DNA, 765 bp, Acinetobacter baumannii
atgaaatttcgatttaaacctctactgatcagcagcatgaccttgttgatcatgcagactgtgacggctcaacccctgtctacatctaagccattcaccttagagcagggcttaacttgtctggattgggccaagaaagaacaatctttgagtaaccacttagccttgatgggcaccgaaatgaaatggccatctggaatcacctcattacagcaacaatttcaacagcagtaccgcaaacaaaagagcagcgtcatcaatgatcctgatgatgaaaatttctgtgaagattgtcctgaaaccgaagtttatttacccaatagcaaaagcaatcccatcaaaaggattgaaaccttagtacacgtcagtgttgcaggggcaaaaactgcaatctatcgtgctgatgacattaataacaccaaacaaaagattgaggatggattaaagattcaatttagtcgctatagcggacaacaattgaaaagctttaaacagcaatgggataaagcttcaatgcatgatgatcaaaacagaagcaagacccacaaagtctttcagcaatatccacatttaaaggtctttgatggagaggttttcaacaatcaaaaggtctacacccccaaacaaatttatatctatagccagccctataaaagagatgtatctgatccgaatgacatgattgcttttattagcctttatgacaatccagtaaatccatcacaacacatcttacagtgtggctttattgacaatgtgttttaa

SEQ ID NO: 54569 - DNA, 240 bp, Acinetobacter baumannii
atgcaaggtgtatttatccatgagcttacgcatgtactacaatatcaaaagcatacgaatgttgtagtgaggggttttgtattacagagtgcttattatcttagttttaagaaatataatccatataaatataaattgatcaaaggtaaacagtttgagcaatataatattgagcaacaaggtgatattgctcgtgacattttttttgaaaagattcctaatattatcattcgaagctaa

SEQ ID NO: 54570 - DNA, 387 bp, Acinetobacter baumannii
atgtcagaagctcttattgaatattttgaagcacttgaacgattgaaagtaaataagcctattcgtatagatattggaactaaaatttctaacgattctgttgccttagaagctggacgaaataaaggagcaatcaagaaatcaagattaatatttgctgatttaatcgtagccattgactgtgcggcaaaagaacaaaatatagtgcctcttgatcaacgtaagcttttaaaaatacaagaagaattgaaaactgtccgtgaagacttagaaaaagcattaggaagagaaatctcgttactttatgaaaattatcaactaaaaaaacaactaagtgccttaaatggagccaacatcataccaattcgtcaatctgattatgattaa

SEQ ID NO: 54571 - DNA, 1743 bp, Acinetobacter baumannii
gtgcaacaaagccgacaggaattaatcaaagaaattaaacatattttctttatattaatttggctaagagataaaagcccgttaagttttgggacattaagaaattatctaactattactcgtgatattgcaaaatttgcagaacgtaaacacaccacgttaaaagaagtcatcggcaataataaattatttttagaattcgttcgatctcagaactcaggatggtttatagaaacactttcatcgcttttattattactaattgctagtagttatcaaaatcttgcaatcaagataattgaaccagaaataataagacaactgcaaaaacagaacaaacagtacagagcatctttaaatcaacatgcccctattcctaccagaatctattctgaaattttaaaaaattggacatgttatttagatgagtgggaaaaagtatcaaatgaattaatgcaattaattttggaatgttatgaatataaactaagttgttcagctaaaagagcttattttcattcaattttggataatgtatctgaaccattaaaaaacttcgttaatgaacatactggacaattcacaataaagcaaatctctagcttagttacagcaacgcaatgtatttgtaaacttgtaattcaagctttttctggtatgcgagacgaagaagcacaaactatcccttatcaatgtattaaagaggtgatctcgaactcacaaaaacattatttgataattggtagaacaactaagttaaaccagggaaatgccaaaaccacccaatggataacaagtattgagggtttaaaagccgtcagaattgctcaaaaaattgctgatcatatttaccaaattcttgatgaacaaggaattcaaaaaaacacagatatttttcagtatcccctgtttatttcagcgagttactttggattttcaagtaaacctattgagtcaacaattaagcaatatcgcattgggactctatacagtaagcaagtagttgataaactgataccccaaataaaattggctgatgttgaagaacttgaacaaattgatcctcacagagcatggagatcagaagagatttttcttatcgggcaatattggccttttactactcatcaattacgtcgttcattagcactttatgctcaaagatcaggtcttgtatctttaccctctctacgaaggcagttacaacatatcaccaatgaaatgaccagttattatgctaaaggttctacatttgcaaaaaatctaataaatgacgataaaagccattttgcaaatgaatggcaacaaacccaagtagaatctaactcattggggtatatttttaacgttttaatgtctaatacccctttatatggtggtcatatacattggatggaaaatacgcttaaaaatgaagaaggaatgataatatttgatcgcaagcaaacactacaacgtttcaaaaaaggcgaaatttcctataaagaaacaatcatgggtggctgtaccaaagttggagcttgtaattttacagcgaccaattggcttcaaattaactgtttaaaagataattgtcgacacttaattgtcagcctacctaagctagaaagagttattacagcacaagagaaaatgattaacttattagatataacttcgctagaatatcgaactgaagtatcacatttacaaatacttaaagaaacaaagcataaaattgttgaacttaagggagcagaatag

SEQ ID NO: 54572 - DNA, 786 bp, Acinetobacter baumannii
gtgaaacagactattagcaatcgtcaaggaaaacagttagcagtttatacagatggtctaaaagatgctcctgtgcttatgttttctaattcattaggaacagaccatggtatgtggcaacctcagctgaatgaattaaaaagtcattttaatgtcattacatacgacacacgtggtcatggtgaaagtgatgtaattagtgacaccacattgcaaaacttagctgaagatgttgttgatattttagatgccttgaatattgaaaaagctcatttttgcggcatttcaatgggcggaattacagggctgtggttgggtattcatcatccaaatcgttttaatagcattacagttgcaaactcagcagccaaaattggtcaaaccgaggctttgttaagtcgtgctgaatcggtggaaaaaaatggtttagccgagctagttaaaactacccatacccgctggttcagcgaaaaatttgactatcagcataatgtggttgcacagacaacgattcaaagtctcgcaaacacgccagcacaaggttatgccaatgcatgtcgcgctttagcgtatgccgatttgagagatgaaattgcacaaatccaaattccagcgctactgattgcaggaacagaagatccggtaacgacagtggcagatgccgaatttatgcagaaagcaattaataatagccagcttgcaaaacttgaagcatctcatctttctaatattgagcaaccacaaagatttactcaggaattgactagatttattcagcaaatctaa

SEQ ID NO: 54573 - DNA, 1722 bp, Acinetobacter baumannii
ttggcagcgcattggacgacagcaggtggtgacgatgctttaaaccagactgttccattctgctattctccaaacgttctatttcattcttctcatgacctcaggcatactgcggtcatgaatacgctgcctgacttaagccaactgacccatgaacaactgctggaattcaccagacagttggcaatgcagcatcagtctctggcagaatcaaatcaagagttagaaaaatcaaaccagcaattggatgccaaagttcaacatctttctattctcactcaaaaatacgagcatgaactggcgctgtttaaaaagcacaaattcgcccaaaagaatgaacacttaacggcaaaacaaatccatctgtgggatgaagcggttgaagaagatattgccgcggttgatctagaactggagcggctgaatgcagataaaaccgatgcagtgacacacaaagccacagtcaataaacctaaacgtcgaccactgccagatcatctacacaccatccgtattgagcatgaacctgcatcaacccaatgtgcttgtggatgccaactccggcgtatcggcgaagatgtcagtgaaaaactgcatttcagaccggcacagttctataaggaacagcatatccgtggcaaatgggtctgtgatcagtgcgacaccctgactcagcaagcgatgccagcctatgtgattgataaaggcattgcttcacctgaactgctcagccatgtgttggtatcgaagtatgccgatcatttaccgctgtaccgtcagcgcctgatctatcagcgggcgggcattgatctgtccagatccacgttatctgactggattggtcgctgcggtgtggaactggaacctctggccaatgccttaaaacaggtggtgctgcaacagcgggtgatccatgccgatgaaacgccggtcaccattatgcggatgggtgagaatgagaaaaaaccgaagaaaggttatgtctgggcctatgccaccacacagtacaatccagttcaagcggtgatctatgactttcaggatagccgttcaggtcagcatgcagaagagttcctgaatggctggcagggccatctggtctgtgatgattacagtggttataaagcacgctttaaatcaggcgatgtcattgaggtgggctgcatggcacatgcacgtcgtaaatttcatgaactgcatgtgaccgggaaaagtcagatcgctgaacaggcattagtgctgattcagaaactgtatgccatagaagcagaactcaggaaaaagaccgatagtacagcagaacaccgccgcgaataccgacaacagcacagccaaccggtgatgcaacaactgtatgaatggctcaaccaacatgatctgacggtgccatcgagttctccaaccgccaaggcgatcaattacagtctgaagcgttggccagccttaagccgctatctggatgatggcaatctacccattgacaataactgggcagagaactcaatgcgtccctgggcattgggccgtaagaactggttgtttgcaggttcgctgcgcagtggacagcgagcggcaaatatcatgactttaatccagtcagcaaagctgaatggcttggatccgtatgcctatttaagtgatgtgctgaaaaagctaccgacacataaagtgacccagattgaagagttactgccacactgctggaaacctaaatcgaattaa

SEQ ID NO: 54574 - DNA, 336 bp, Acinetobacter baumannii
atgatccgcattgatgaaatctggctttctacccaacctctggatatgcgagcagggatggatattgtcatggctcaggtggtgagagcctttggctacatcaaaccgcattgtgcttacctgttctgtaataaacgtggccatcgcatgaaagtgctggtacatgatggactgggcatctggctgtgtgcccggcggctggaacagggaaaattccactgggcgcaggttcaccagggtgaaagcatggcgatcagtccggaacagttacaggcactgatccagggtttaccttggcagcgcattggacgacagcaggtggtgacgatgctttaa

SEQ ID NO: 54575 - DNA, 588 bp, Acinetobacter baumannii
atgataattgagatagaaacccatccactacaaccatttttacctgaaaatgcccgtttattaatgctagggagtttcccacctcctcgtaataaatggaagatggacttttattatccaaactttcaaaatgacatgtggagaatttttggcttaatctttttccaagacaagacctattttttaagcgaaaatcagaaaacatttaatgaagaacgtatccgaaacttcttaactgaaacaggtattgccattttcgatacggcttatcaaattaaacgcctcaaaggtaatgcttccgacaaatttctggaaattgtcacacccacagacttggcggctttgcttcaaaaaatccctttatgccaaactattatgactacaggggacaaagcaactgataccttaatttcagttttacctgagaacactgaaaaacctttaattggaacatcgacaacaacttattttgccgaccgcaatattcatttatatcggttaccgtcatcttctagagcatatccactagcgcttgagaagaaagcagaagcctatcaaaaattctttaatgaaataggtttcttgtaa

SEQ ID NO: 54576 - DNA, 327 bp, Acinetobacter baumannii
ttggaattactctttgatctacagcaaattaaaaatattccttcaccactaagaaaacctaacactaaaggaatcgtaagccatactaaaaaagcaagaacgattaaagatattggtttgtggattgcacgtaaggaaattaagaaaaatccttctataaccaagaaagaattaggaatgaatatacaaattcacttaactaagaagttggaaaaaatacacaagaataaatctcaattaggaatcaaaggccatattactattccaaacgaagacacaattagaaaatggaaagagttagataaacttttttctaaagtaaaataa

SEQ ID NO: 54577 - DNA, 195 bp, Acinetobacter baumannii
atgaatcccctccaaatctcctattcgaaagcatgtcaaatgttagatgtatcgagagatacattgcgactacttgctcgtagagatcctttatttcccaagccgatcaaatacggcgaatcaagacaagcccctgtgttctttagctatgccgaattagtcgaatggcataacaaaagaaaggagcaagtatga

SEQ ID NO: 54578 - DNA, 225 bp, Acinetobacter baumannii
atgattggtcaaatgacatggttcacaagaccacaagcttcagagtatttagctgaaaagttgccttttaaaactgagaaacagtggtattcatttttggcaaataatcggacttccaaagaagtttacaagcttcgattcgagctaagaaatagcaaggttgcttatacccaattaacacttgatgcattcattcgggcatcaactactcacacaaaacattaa

SEQ ID NO: 54579 - DNA, 255 bp, Acinetobacter baumannii
atggacatggaaaaaaacgtagcgactaaaattgctttgacagtacttgataaagttagagcaacagatcattggcaagatcttaatttggaaattaattgggaggagttagagcacttaattcctgagccgaacttagatgaattaatgacgggatatcttaaagatagtgagtcatttaatcgtctgttagataaattaaatgaggatgtggatgcagaaattaaaaggcttgaaagttcgttagtgatctaa

SEQ ID NO: 54580 - DNA, 1050 bp, Acinetobacter baumannii
atgttaaatttgaaagttggtgatgaatatcatgctttgatgaatcggttgtctcaaattgatgaagagagacttaccgctacggatttttatgccaagttaaatgaaattcgatttgagctgaatttattaaaagcaaggtctgaccgatgtgaagaatcgagtcgtgagagcggatgtggttttcatgtaggtgaggtggtttcattcgatacatggagagctttagaacaacgatatgcagaaaatgctaaacatgctgatgagttagaaacaaagatctattccaatattaatagctacgattttaaggctatgaatattaagatcagagcgaaagtggattttttagatctttattttgaaactacaaaaccttctactcgacatgatattaaaaagtttttaactgagaaaactgggattagacattacatcaaagacagcttgaatggctatgtaattcgtttgcatgacatgaatttgcttaagcttttaaaggaacggctgagatgtttagatcattttggcttgcttcatcagagtatgaaaattgtagagttagaggtcgctttagacttctacggatataagcatctagggcttgctacggcgcttctaaagtccctcaggcttcctagtactgcaaataatttaagagtctttaaaacgcaaacaggcgtatttgtcccgattcctgttaatccgattgtgctccatagaaagttaaaagatggtttcaatattggcatcaatcatagattagctgatgagtattggcatatataccaaaagcagactgatcaaaatggtacgccgttgaaagaaagtgaatggagaattcgtgcggagaagaatattaaaaagcctgtactctcacggatgaataactcattttcaaacatcagacaattgttgttggagagctttaaagggcttagatttacacatctgaaagcagaagcatcgagtcatcaagtgtgtgtctatatgaacaaaattgggtggtgtttcaaaaagtatgctgaaacaaagcaggttgaattttga

SEQ ID NO: 54581 - DNA, 429 bp, Acinetobacter baumannii
atgcaaattaacaatattttagttgtttgtgttggtaatatttgtcgaagccctatggctgagtacttattaaaacaacaatttccgcagttacatattgaatctgccggtatagcaggcttagtcggacacaatgctgataaaaaagcccagctgtgtatgcaacgtctaggtatagatatgcaagcacatattgcgcagaaattagatgctgaacatattaaaaaagcagatctaattttggttatgagccataaccagcaaaagcatatcgagcagacatggccatttgctaaagggaaaacttttcgactaggccattggcaaaacaaaaatgtacccgatccatatcagcacgatcagacaatttttgatgagacctgtgaacttattcaaaaatgccttgatgactggaaaaactatatttaa

SEQ ID NO: 54582 - DNA, 1107 bp, Acinetobacter baumannii
gtgaagtatcagagcacctcactttttttatctatttgtattttaagtttatctggttgtgctgttacttcaggattacagacttatgatttaccagaacaaggtcactatagaactgaacaaggttcggatattacagttgttcagttaactcaagacaaccttcctgccatgactcctgcgatagcacaagatgcggcgagtgttcgtgaattattttatgctaagcatcaaagttatcgactaagtcccggagatattttatctatccaattatgggcatatcctgaaattacgccaccaatacaacaacaagatgctaacaatccaagagccagtggttatccaattgatacaactggatatactcagcttcctctactagggcgtgttaaaacagctggtaaaacgattgcagaattgaaccaatcactacgccaacaatatgcacgttatttgaagaatccagatattgtggttcgtgtactttcttacgaaggtaaccgttattttgtaaatggtcaggttcaaaaaagtggtcaatatacacttaatgatgaacctattagtatatatacagctttaagcatggctggggggatcaatacccaatctggtgacacaacctctattcagctaattcgtaatggtaaaacctatgatctaaatgcaattagtttagaaaaacaaggctactctttacataatcttttaatccaaccaaacgatacgatttttgtaaattcaaagcagaatcaaaaactctatgttatgggcgaatctagccgtaatcaggcgctgactcttcgtgatcaaggcatgactttaagtgatgttttaggtgaaagtgaaggtattaatccttactctgcaagtgcagctcgcatttatgttatgcgcaccaatttacaagaaagaacttcaactatatatcgccttaacttaagtagtattggcaaccttgcattagctaaccaatttcaaatgcaaaaaaatgatattgtatatattgatgctactggtttaactcgttggcaacgtgtggttaaccaaattgtaccgttctctaccgcactctatagttttgatcagctaggtaaaaaataa

SEQ ID NO: 54583 - DNA, 1227 bp, Acinetobacter baumannii
atgaaattaaagacattaacgacagcaatgattttagcaactgtaccaatgacgggggcatttgccgctgctctagatcgttcaggtcagtcaatctctgcattcttgcaacctggtaactattttgaagcaggtatttctgtattagatccagatgtatctggtaaagctaatgctaatggctcatcactatctgacatgggtgatgattattacttccctagcgcggcactaaaactacaagttactgatcacttctcgtttggtttactttacgatcagccatttggtgctgatgttacgtattcaactactgattcagctttagcgctaaatgggtcaggattatttcataatggtaccgagccaactgaagttgaagtaaagtcacaaagtatttcaatgatatttggctaccaaccaactgaaaactttaatttctatgctggtcctgtttatcaaaccattgaaggtgatgttcaacttcgtggcttagcatacgatggaagtgctacttttggtggctataatgcaagtattaaagaaactggtgatattggctggttagctggtgcggcttttcaaattcctgatattgcattaaaagcatctgttacatatcgctctgaaattgagcactctgtaaatgttaaagaaagttttaattcagctggtctatttgctggtttaaatgcagcaccttctctaaatacagatatcacgaccccacaatctgtaaacctagatttccaaacaggcatcatggcaaatacagttgcttttgctaatgttcgttgggttgattggtcaaatttctctattcaaccttataagtttggtttagcaagtaaaaatgcacttgtacaaagtcaaagtggtaagcctgaatttgatcttgttgcatatactgacgaccaaatttctgcaacagtaggtgttggacgtaagttaaatgatcaatgggcaggtaacgtttctgtaggttgggactctggtgcaggtaatcctgtagacacgctaggtccaacagaaggttattggaatgtaggtttaggtgctcaatttagcccaacaccacaaactttcattgctggcggcgtgaaatacttttggttaggtgatgctaaagcccaaactggcgctcagtttgatacagcaggttatgtagcagaattcaaagataaccatgcaatcgcatacggcctaaaaatgggctacaaattctaa

SEQ ID NO: 54584 - DNA, 459 bp, Acinetobacter baumannii
gtgttagtaaactttttggatgcaataacggaaatcggtaaagctacaaagcaaacttcaaatgaattcactattctgcactatattagcaatggatatttagatgttttaattaagcttaattcaaagtataaaaatcaatttttgcaagtcagccagttaggtgacgatgatgaatattttgtattaggaattgagcatgatgatcaaaagatttacaaagtagacactgattcaattaatctcaatgaacttctgaattgttttcagaatataaaaggaaagattcaggtcgcatcagtgaaaagctatccaaaggaaacttttgaatatgtattactagatcaaccttataatgatgatttttcaggaaatccgattgaattagctgaagtcttgaatagtaataatttgggtgaaccgtaccgggtttgtcggagacttttttatttaagttaa

SEQ ID NO: 54585 - DNA, 1227 bp, Acinetobacter baumannii
gtgtgttcagcggacgcttaccctttatcagataccgtattggaaaatctaaaacctgaagataaggattatcgggagttagatggcaatgggctatatttctttgtacagaagaatggaaacaagtcttggcaattaagatataaaaagcctgatggaaaatggtcttgggttggcttaggtggttatcctgcgattaaaggcaagcttgctcgaaagaaagctcaagaattattgaatgacatcggcaatggcgaaaatcctattgttagcaagcaagagcgaaagataaaagagctcgaaaccaacaatgctacttttgaggctttagctcgtgaatggcttgatactaagcaaacgcaatgggtagctgacaccatgacacgtaacaaaggtgcattagagaagcatatttttccaatgttcgggaaaaggttgtttgtttcaattcgcccgattgaatggatggagcatctaaagcgcattcagcttgaacaaaagatttatgagcaagtgaagcgtatgtgtgcaatgtgtcgtgacatttatgactatgcaaaggtcactgggcgcatagactacaatccattagaaggaatgcagaaataccttattcagggtaaaaaagagaatatggctcatgtttctgaaaatgaattgccagcacttcttcgggcaatcaataattatcctacgttagatagccgaattgggttgcaattgcttaccttgttatttactagaccaagtgaattgcgtgaagcgaagtgggaagagtttgatttagaaaacgcactttggactattcctgactttcgtatgaagaagcgccgtgaacatactattccattatcaaagcaagctgttaaattgcttctagaacttaaaagcattcattcagagtcagattacctatttccgagtagatcaaataaaaataagcctaaatcggatacggtctttattatggctttgcgccgtcttggttatgaagggcgtcagacaccacacggatttagacatattgccagtacgatcttaaacaataaaggctttgatgagcgccatattgaatctgcacttgctcacgttaaagatggcgtagcaggcgtatataacaaagcacaatatttagaagatcgtgcacgtttgatgcaatggtatgccgactatcttgaagagttggcggatataaaagtgattcagtttagtaaaaaagtaggttaa

SEQ ID NO: 54586 - DNA, 336 bp, Acinetobacter baumannii
atgtcaaatttacctaaaccccaagaaattactctaaccgcagaacaacacatctcagatagcttgagcactttattgcatggtcattcactcattcaaggcggaactggaatgggtaaaagcacttttgtgatggagtatctagctcaaaataatcaaattgttatgttgtgccctcttgtttcacaagtagagcaattacaacaaatttatggtcacgatgacagatatgtctttattcatgggacacaaactatctcaaagaatgaaatacctgctgtcatcagaaaacatgaaccgtaccgggtttgtcggagacttttttatttaagttaa

SEQ ID NO: 54587 - DNA, 846 bp, Acinetobacter baumannii
atgaaaacagctttaaaccgtacaccagcctcttttcctgtccgccgcatggactacaattttgaagatactccgcgctattggtgcaatcatgagccttctctcacccactatttcacgggtctttcgactttatttcctgaaggtgaatcatactttgttagatctgtccgtgctttacgagctaaagctaaagagaatgaaattctagatagagaaataggcgcatttattggtcaagaagcaatgcattctaaagaacatcatgctttccatgtcagtgcacaacaatatggtttaaacccagaatcactagagaaagctacaggtattgttcttaaagctattgagaaagtttttagtaaaaaatggaatttattggtaactgttggattagaacactatacagctgttctggtggtcagcatgatgcaatccgtaaatgagcttatgaccgacaacactattcgcaacctatggttatggcacagtgtagaagaaaccgagcataaagctgttgcattcgatttatatcaacatctatatggcaacggattagatgcatatattccacgtgttggaatttttacattcagtttagttttgattacagccttttcaactatttaccatattgttttaatgaaacgagataaacaactgaccaatttcaaaacttggcgcaacttttttaagtttgcgagcaaacaatataaagtgttgattcctaaatttcttgaatactaccgttttgattttcaccctaatcaaacagatgaaaaagctttagttgccgctacaaaagtaaaacttggaataaatgatagatcactcctcttatcttaa

SEQ ID NO: 54588 - DNA, 936 bp, Acinetobacter baumannii
atgttgataccatcgatattggtagacacgtatatggactatgctgaagaacaaggtgttgatttggcaaaattttgtagtgaacaaaatattgttaaggatcatgttgaactaacacaatatttcttgttattagactggattgggcgacaacttcctgatcatgatcttggtgaggaaattggttggcgatttacgtcacaactatttgaccccattggcactgcaatcatatcctcagaaacgttgtcatccggattagacgttgccttaaaatattgggatgtctttggtattggattggcgttactctctcgaaaacacggcaataatgttgaattagagattcaaccaactttacctatcaatgaaaaataccaaaagattattttaaaatctgcaatcatttgcctttataaaattatattgcaaatattaccatttaaggcatctgatattcatatatttttcaaaggcgaaaaaaatacccaagattttccttctggaatatacattgggtatcatgcgacggaatggaaaattcgttttcctgagcattttctagctgaaaaaagtttttgtgcgaataagttaagctttgagcgtgccatcacacattgcgaacaagtattggcagtgtatcatcaaaatcaagcctttgatcatgtgacgatgcacacattgaatgacatcgcacaaataaaatccgtatccaccaaaaccgtttataggcaactaaaacaacaaggacagaattttcaaaaattacaacaaagcaaaaaatatacgcaagccatgatgttattaaatcaaaaagaactttctatagagaaaatcgcagaaacattaggttatcaagatccatcgaattttacccgtgcgtttaagcgctgggcacatgtttcaccaagcttgtatcgcaagcaaaatgcttga

SEQ ID NO: 54589 - DNA, 1029 bp, Acinetobacter baumannii
atgccaattgataccatacaacaaacacttcatataagacgtaaaaaaaatacacaggtctttcgtaatattgcccgactttgggatgctggacaaaagtcacaaacagatcaagaactcttaaacgcgttacatccatggcgtgaagatcataaccttctttttgtgaataccctgtcgtatttattaagtatttgcagtattacgacgctattatttggatatttttttcatcctcatattcaatatatttggagtctattatgggcatttttaactggtttcctcgcctatttgctctatgaaccgcaaaaacctttaactgaagttattcattatttagaacagcgtatgactgctttacgttatggcctaaagtttcagcagttaccagcttatcttccaatacaagcccaacccattttagtcttaagcaaattaaaacaacactttccactttttaatcgaggcaatgaagcgaatgaaattaccgagtttgcttcagtgacatggaatgatggcattaccgatcatcaagtcctgctatttaaatatcactatgtaaataacttacctattcttcaagatcaaaacagcgataaaaaaatagtaaaagagattcataaagatttatggggcgcttttatttttcaaataccagccttaggtattgctgtaagtaatcaacgttctcgcttttttgaaccatacttatgcgaatggcaaagtactgacattttgattaaccaagagctcaatatcttcggtactgaccagcaccagttagctaaagaaattagtccaagtttaactttaaaacttcatgatttttttcaacattttaccggtgatttaatttatcatcatgaagagcaaatattatgttatctcggtgagcaagatctttttcaaaccaccagcaaacgtagtgaaattcatgatattccagcattacgtggacatttacgtaccatgaccatgccgcaatatgagaaatttcaacaattcatgcttaatttaattaaataa

SEQ ID NO: 54590 - DNA, 462 bp, Acinetobacter baumannii
ttggatctccgcaatggtcaaaaagcagcaagctatgtttcaaaatggggtttggaacacgaaatcactaagggtcatatcaagaaaggaaaaacagattctaaaacgcctttcgatttacttcgtgcttattcagaaggtgacgaaaacgcaggaaaattatttagggtttactttgaagccttcaaaggtacacgccaattgaattggtcaaaaggtttgaaaaagctctccagtaagggacaagaagaaaaaacagatcaagaattggtagatgaaacggacaacgtagcagagctgatgttcaaattatctattgagttatggcatccaatacgtaaacacggtagacaaggcgaattgctgattaaggtgcaggaagatcacacacttaaaaaagcaatggaatatgtcaaagaatgcttaggctatgacggacaactagacaacgtgtttacatga

SEQ ID NO: 54591 - DNA, 246 bp, Acinetobacter baumannii
atggcagtaaaggtgatgcttactttggatgatgaattacacgcatccattgagcgaatggcagaaattcaagggcttccgaaagcaacagttgctagaggtcttttagagggtcaaaaacctgtcattgatgcaatgattaaggctcatgatgatttggttatgggaaaggataaaaaagacgttgaacgtgaatatttggaatttatgggacgtctggttattgatgaaataactaaggactaa

SEQ ID NO: 54592 - DNA, 288 bp, Acinetobacter baumannii
ttggcagctgacttaagaagagcaatttatagacagttggctgaattagatgagcggccagcaaaaattttggaactcagatttggtcttaaagatgataatgatcttactctcgaagaggtgggtagccaatttaatgttacccgagagcgtatcagacaaattgaagcaaaagctttaaaaaaattaagacatatttcacgttctgaatatttggaaccttttattacgtttataaaagaagacttgaaagaagaagagagtacgaaggaaggaagtaatgcatag

SEQ ID NO: 54593 - DNA, 633 bp, Acinetobacter baumannii
atgaaatctctgaacaacacagctaaaccaattcttccacctatcgcacagttctcagttgcagatagagatgcattcctagaacagctcaaggaagatttttcaactcatgagtacatgacagaaaacggtaagattaaaatattcaaaacgagtataaaccctgaagttgaaaaaatgctcagtcgtgttgagttcatcaagtattttgagaaagagcgcccaatcgctactcttaaatctgttcaaagttttaagggcaaagagcaactacgtgttgaatatgcgaaggatattccacttttgcttaagtgccagcttacaacaatctttgtgtctgctcgctctggcaattacaagatgggcatagagttacaggcctttaaggattcattcttagaactttcaaaggaagaacaatataccctttatgaattttctctgatcaatcagtgttacacatctgaacaggctcaggcttatgttgcagctttaattaaatttcagaagttgtttgcaataagaatgagtagtgcctcaattcgtaaacaactttcgaatcgtgctagtaatcgacgccgttctaaagagcgttgtgttgagcttgtagagactctactcaagatccattga

SEQ ID NO: 54594 - DNA, 1566 bp, Acinetobacter baumannii
atgttagatcaaaacattaaaactcaattaaaagcttacctagaacgtttagaaagtccaatcgaattagttgctgctttagatgaatcagataaagctgctcaaattaaagaattagtaactgaaatcgctgagctttctgacaaggtaacagcccgttttgacggtaataatacacgtcgcccaagctttggtgtggctaaagcaggtgaacaacctcgtgtgttcttcgcaggcttaccaatgggtcatgagtttacgtctttgatcttggctctgttacaagtgtctggctatgcacctaaagtatcggatgaagttttaaatcagattaaaggcttaaacctcaaagctaactttgatgtattcgtatcattaagctgtcataactgtccggacgtggtacaggcacttaacctgattgccatttataacccgaacaccacggcaaccatgattgatggtgcattcttccaagacgaagtggaacaacgcaaaatcatggctgtaccgatggtcttccaggacaatgaacacattggtcaaggtcgtatgacgcttgaagagattgtggcaaaacttgataccaattcagctgaaaaagacgcagcagcactcaatgccaaagatgcgtttgatgtattggtgattggtggtggacctgcgggtgcaacagctgcaatctatgcggcacgtaaaggtattaacacaggtatcgtggctgaacgctttggtggtcaggtcatggataccatggacattgaaaacttcacttctgtgcaaaaaacacaaggtcctaagtttgctgctgaaatggaagcacatgttcgtgaatacgatgtggatatcatgaacctgcaacgtgtcagcaaaatcacgggtgcagaccaaacagcaaatggcttggttgaagttgaacttgaaaacggtgcaaaacttgaatcgaaaactgtgatcctttcaacaggggcacgttggagagaaatgaatgtaccgggtgaagctgaataccgtacccgtggtgttgcttactgcccacactgtgatggtccattgttcaaaggcaaacgtgttgccgtgattggtggcggtaactcaggtgttgaagcggcgattgaccttgcaggtattgttgagcatgtaactctggttgagtttgacactaaacttcgtgctgaccaagtcttgcaaaacaaattgcatagcttgccaaacaccacagtgattatgaatgcattaagtacagaagtgttaggcgacggttcacaagtaaccggtcttaaatataaagaccgtgcaactgatgaagagcatgtggtagagcttgcagggatctttgtacagattggtttacttccaaacactgacttcttaaaagacagtgaggttgagttaaccaaccgtggcgagatcattgttaatgaccgcaacgaaaccaatgtaaaaggtgtatttgctgcaggtgactgtaccactgtaccgtacaagcagatcattattgctacaggtgaaggcgctaaagcatcactctctgcgtttgattacatcattcgttctgggcagtaa

SEQ ID NO: 54595 - DNA, 633 bp, Acinetobacter baumannii
gtgggatattcagaattatccaatccctatcattatgaatctgataataaggaagttccctttgattcgaatattcataattgtagtacatcaattaagagagatatgattaaaggtaagttgaaaaaggatcagtttacttattattttgaaaaaatagattatttagatgttaatacggatggaatgtctggtggactgatagttgggtttcataataatcaagtgcaacctgttggtatgcatatccgtggagataaaagtagtaatagaattaattttttaccaattaatgaaatttttaaagccattgacagatatgagcaggcagaaagtattgtaattgactatcatcatgtagaacggttagtaaaaggtgaaaacttagtctctgtaggtgaattattttttgattgggctttgaatcagccagaagaaaatttgagatcaatacaaaaagacgaagatagtgcgttgatagatgatatgtctgatttcattattgaaaataaagaaatgctattaagtgcagctaaagatcgagatagaatacttggtacaaacaataccttagaacatacaaagtggttcattgatgtacaccaagcatatatggctaataaagagaaatag

SEQ ID NO: 54596 - DNA, 339 bp, Acinetobacter baumannii
atggcacgcactcttcttaccgaaaatatttggcagcaaattcaaaatactatgcgattacatggttgctaccgttcaaaaaacagtagaaatatcatggaagtgatcttatggaaactgcgtacaggcagtccatggcgtgatccacctcctcattttggtaaatggaataccgtctttaaaagataccgtgactgggtgaaagctggtgtatttgaaactatttttgcatctgtaaatgaagatgttgatttggaatacgccatgattgatggaacgattgttaaagttcatcgacatggccaaggtgcaaaagggggactttcaaacagtctatag

SEQ ID NO: 54597 - DNA, 198 bp, Acinetobacter baumannii
atgtccaataaaatagatctaagttttgaagttgttcgtcctgatattcatgctagtagagaatatacaaaaacatgttctggaggggtgagtgattgttgtacacgtacttgtacacgtattactgatgactctaactcatcattagatgcttgggaacaatacctagaagttaacgaaggtattctccagtactga

SEQ ID NO: 54598 - DNA, 921 bp, Acinetobacter baumannii
ttgcctttcaaatctttgtgcaacaaagccgatgcaggcctgcatagtgaagggcagtttgtaaaagctcttgatgagttttcaaaacaaaatggcttaatggggaaagccacacattggattaaaaatattggttctttaagtacagaggtggcaggggtaaaagctgaagtgacacttctacaaggacaagtgaattccagtattttgtctagcattactaaactggctcagcaggggaaacctattttactgttacttgatgagattcaggctttagctagttcaaaatataaaaccacgattgccagtttacgtaccgctttagatatgcataaagaaacaataaaggtagtttttactggttcaagtcgagaaggcctgagacaaatgttttctgtgagtagtgctcccttttttcattatggacagaatttaccttttccaaatctaacaaaagcatttacagatcatctggcagatgtatttaatcagacaacaggacgtagtttgaataaagaaattttatggcacgcttttttagatatgaagcaaagtcctcaactagcaagatcattagtggagcgtttagccttaaacccaatgctggctatagattttgccaaggaacagcttatagccgatacaatggggcatcgtgacttttcgggattatggggagagtttaagttattagaacagctaattttaaaagccatagcggaatcacaagttgaactttatagtagtcaatttagacaacatctggctgattccattggtgtagataacattgcggtacggttcattcaatcggccctacgttctttatcaaaaaaacaaattatttttaaaccagaaaatggtacttatgaaatcgaggatgctctttttaaagaatggattatggatgaagcataa

SEQ ID NO: 54599 - DNA, 747 bp, Acinetobacter baumannii
atgaataccatgcttaaaacgctccagtttcgcacagaaacaacggaaacactttgccctacccatcatatacccctgatggaaatcgctggtcacaagctatgtaaattgtgtgccaaagaaaccgtccatcactcacatgcagcctatgcagatgagttgcaacagcgattgctacaacagaaaattaaaaattcagggctcaataaacgctacctggatcgtggcttcaagaattatgtagttgcatgccctgcacaagaaaatacaatcaagctatgtcaggcctttgcacagcaaattatttctgaccacaacccgaacatgttgatgattggtacaccgggtacaggtaaaacccatctgagtgcatcaattattcgcaacattctgcataacagtagaaaatctgcacgctactataccagtgcagaaattgctcaaaaaatgatggatacctggtcagacacttcacgctctgagaaagaagtcatcgaccatttctccagttttgatttattggtgattgatgaatatggcctgcatgaccggcatgaaaaacgcttagagatggtacataaggttctatatagtcgttatgacaatatgaaatctaccttactgatttccaatttcacagtccaaaatatgcagcgggatttaggtgtccgattatggtcacggttacatgagaaccatttgattgtagtgccgtgttattgggatgaccgacgaattagcggataa

SEQ ID NO: 54600 - DNA, 342 bp, Acinetobacter baumannii
ttggcttttaagaaaaaaggctatcaagttgaggcaattgattattctaccgagctggttgaaaaggcgagagagctgacaggcatcgaggtacgtcagcaaagtttttatgagctgaatgaagtagctaagtataatgggatttgggcttgtgcttctcttttgcactgtgaaagagatcgcctgactgaagtgctggcgcgcatatttaaagcattaaagccaaatggtgtgtgttatatgtcttttaaatatggcgatacagaccgtgagaaagaagggcgcagctttactgacttgaatgagcagcaagcttacgacttactcaaacaaatagattag

SEQ ID NO: 54601 - DNA, 273 bp, Acinetobacter baumannii
atgactttcacgcattcaggtgaacaatggctggatgcatggcttgaagataatgcatatgtgtcctggataatttgtgaagaaccttggaatgttgaggaaaaggtttttgaacaaacgatactgccactcaatttgaaaggtaatcagcacgagtttaaagaaaccctttcagctatgcgtaaaaaagccattcaaaatgcgaaaatgatggaaatcgctacggaagcagggttacaaagacaggtgaagcttcaacatgtggcaggatga

SEQ ID NO: 54602 - DNA, 198 bp, Acinetobacter baumannii
atggaaaatcatgaatatagtagtggtcatgaatggtatagcaaagcacgggaccgtggtgcgccggagaagtctataaatgctgatctcagaagtattctattgaaactggataaatcaaaacgtattgaaatgatcgctagtctattgaaaaaagacccatacctttatagttggttaaaaagtatgcacaagtaa

SEQ ID NO: 54603 - DNA, 843 bp, Acinetobacter baumannii
gtggcggtatttttagacttcaaaagacagctcaagctttggttagaacatatcgttcaccatgtttcagaccttcaagaagaaactattttatttatatcatttggccctaaagatcacagatgtagcgtatggcatagtgaaaaaacagtgctttcacaagcaactctacaattatttgattttattgatgatcagttttcgccagatcaacttccagactatataaaaattgatgttgcgtacaatttagaaaagcaaagttggaaccaaatagagcagcaggttcatcaccaatttcacaataatcattaccgtagaggtattggatttgatgattcctgttcggtagcttttctggagcaagaaatatatggaaaagccattattcggggcttaagttatgacaagccgaacttttttgatgaaacaaatttgaactatgcaattaaacaaaaatatcgtgcggcaaagccggaaattagacttcagtcactacaagaagtgtggactttcgatacctatgcaactttttatgaaaatggacaatttattaatttagcgagtcgctacgatgcaaatggcattagagccattgctagtaataaaaaacagcactttagagacctcattgaaaaaaatgcagcgtttttacatagccagattcaagaaaatggcaaattcatttatggatattttcctgcttatgatcgtgatatacggaactataatacggtacgtcactgtacttcgctttacgcgcttttagagacttttgaagtacaagataaacctgaatacctgtctcttatacacatctccgagcccacgagaccgtactag

SEQ ID NO: 54604 - DNA, 804 bp, Acinetobacter baumannii
atggctcgttcagcacgggacttaagtttattattagatgttttagtcgagccaaatgcggatgactttagagcttttaaactcaaggaatctgaaaaacaaaccattcaagagtttaaagtattattctggatggatgatgaatcgtgtccaatcgattcacggctaaagaaaaaatacgatcaacttttgcaaaccctgcaaactgccaaggttaacgtggatgtaggtcgtccaaaaaattgggattttgatgaaatatttaaatcctacgccactcgattgatcagccaaatgacttttgcagatcctaaactaagtcgattgtccatgtcggcatctacgccattaatcaaattacttaatggtaaagcaggcattccgcctttggcctatggatttacacaaggtgctaacctgagtcatgcagaatggcttgccaaatatgaagagtcattgcatatcaagcaaaaatgtcttgaaatttttgcagaatacgacgtcattatttgcccacctattttgactctagcgtttgaacacaatcataaagaacctttgatgtttcgcacgctacaagtcgatggaagaaaacgtttctatcttgagttattcaaatggatttcgccagcaactgtatttgagttgccatcaacctctgcaccgataggcttatctgaggacaatctaccagtcaatattcaaatattgggacaaccgtatgcagacaaagtcaccattaaatttgctgaactgcttgcacaaattacggatggattccaaaaaccgcctttggatttttag

SEQ ID NO: 54605 - DNA, 402 bp, Acinetobacter baumannii
gtggttggctatagcttaaatgagcgcatgacaacacagcttgtttgtaatgcgctaaatatggctattcacaatcaaaaaccaaccaaagaactgattgtgcattcagacagaggaagtcaatattgcagccatgaatatcgaaatatacttgagcaatatggttttcaaggttcaatgagcaagcgcggagactgttacgataatgcaccgattgaaagcttttggggaatactgaaaaatgagttagtgcatcattacaactatcaaaccagagaagaagccaaagcagatattataaaatacattgagttattttataatcatcgaagaattcaaaagggtttgggttttaagacaccaaatcaaatggccgaagacttttataaattggctgcctag

SEQ ID NO: 54606 - DNA, 360 bp, Acinetobacter baumannii
atgagttcaggagagctaattaatcctccatttaccccatgtattgattgttcacaacaaacctttactaaagcgttagaaggttggaaacccacttatagtcatataaatacttccaatgtaattgtagaaaacaatcaatttgattctgaaaataactacacagtaggtggagctggaggactgattatgatgagtagtttttcagcaaatcttagttgtataaaaatactacaattcctatgcgaagattcatctttcgatcatacacctattagatatgaatatttacccaataagggagttatgactgaatttgtattgacgcgccaggagggatgtaatgtctgcaacaaataa

SEQ ID NO: 54607 - DNA, 552 bp, Acinetobacter baumannii
atgaatgaaagtaagacaattcctgatgtaaataagggtttgcttacaaacaatactactttaagaaactggattcctaaattgaagtcggttgatgaactattatttctggattatggtaaaaaattagagaagaatacgagaatttgttttcaaaccccagtagatattaattttaaagaacagatgaaaactgtttatccttatacatttgaagagtcaatatattttgaaaatttggttataattaatgataagtttactactaagaaaataaaaaatagtccaaaagttaaagcaacaggtgtgctttataaaatgttgaaagcagaagaaaatgatgagtttaataactatcgtgctgatgtttttgctgcacttgaaaacaataaagttgatatggctatggacttaatttatggcctagatccgcaagaacttaaggcaccaaaatatataaaagagggattagagtggctagaaagtgcaatagttggtactacaaaagttgaagatgaacaaaaagtagcaggaggtcaagatgctgcatga

SEQ ID NO: 54608 - DNA, 975 bp, Acinetobacter baumannii
atgggctttctcatgacagaaccgaactctattagctgcacacaacttgccgagacttataacatctcgcatgatagtgtaaatcgctttctagaacgtgaagactacacacctcacgacctatatcaagaagcaattcaacatattgataataataaacttatagtcagtattgatgatactgttttagataaaccctatagtcaacatatggacttggttagctatttttggtcaggcaaacaccaccgatccgtcaagggtattaatctcattaccttgtatgcgacagatcagaatggtcaaaatattccaattaatttccgaatttatgacaaatctgaaagtaaaaccaagaatgattactttatggatatgttaagtgaagtactcagttggggtgcaaagattcaatttattacaggtgatagttggtattcatcgactggaaatctaaaaaccataagaaaatatggtattcgatttatgtttggtatcgactgtaaccgtaaggtttccccagaaaaaggacaatggtttcaactgcgtttattgccaaatttccatcagggtcaagtggtctggctcaaagattttggctttgtacaattatttaagactcagttaaaagaacagcagaggttttatattgtgcatcaagatgaagatgatttattgtcctttgagggttttcatgaattacattcaagtcattggaaaatagagcaatatcaccgggtgattaaacaggtttgtcatattgaaaagtttcaagtaagacgatctaaactgattttgaatcatattttttcagccttgatggcctacgtcgagatacaaaagaaccagtttgagcggatctttgaaaatgtatatcgttggcagaagaaattatttagaccagttatcaaaaacttcattgatgactttattctcgataaaaatcatctgctaccacagagaatctataaataa

SEQ ID NO: 54609 - DNA, 228 bp, Acinetobacter baumannii
atgataaaaatagaagatataaatctacttgagcaagggtataagttggtatttgatttaaggtcatcttcttcaatcttgatggatgaaaattatatcaaaaatatacagcaaactacgttggataagggaacaactattggggctttgttgcacaaagatttaaaagttaagacttctcatatctactcaaatttaagtgacaactcgggtatgtggtctgcctaa

SEQ ID NO: 54610 - DNA, 186 bp, Acinetobacter baumannii
atgcctggagctttaccgtggttagtcggtgaaaaccttgaaaaactcggtgtgaagattttgaacactggcattactggtcaatgtcatcgagaccgtaaattgttaacgggcgatagtccgcttgcttctaataatttaggcaaacttgcagctgaaacattgctggctgaagtgaaggattaa

SEQ ID NO: 54611 - DNA, 258 bp, Acinetobacter baumannii
ttgtcgtgtacagagaaccctgagttaagtttgctacatgaaaactggcaccggcatactgcccgtgcgtttctcagccataaaattagcgaaattgaaattttagctttattcggtcatgaaccgatgcagcaagaagctgctcatccttattccagcttatctatttcacaatattcaaggattgctcatattcttgaacaaatgaaagatcattttaatattaccggtattgaactcgatgtcctcactcaataa

SEQ ID NO: 54612 - DNA, 918 bp, Acinetobacter baumannii
atgatttcgagtcgagtccaatttggggtatatggtgcctgtatccccatcattcttgtttgtcttatgtatattggctttacggccactggtgaggtactcgctggtaaagcaattacccatctagcacaggtgagtaatacaacaggtattttaatctatgcttgttttattattatatttgcggcaattggctatcgtttaattcattgggtaggcaaagttgcaagtgttattggtttaattgcttttgttattattttaactcaaattttagctctctctaatatttcagaattgcttgctgtacggcattttagctggtcatcatttttattagcagtttctctttctgcttcttggcaaatttcatttggaccttatgtagcagattattctcgttatcttcctacaaaaacatcttcaacacgcgtattttgggctgttgggcttgggtctttaataggctcccaaatttcaatgatgctcggtgtatttattgctcaagtctcgaatggtggttttgttggcaatgaagttcagtacgttgtaggcatgaatccaatcgctcttgtgattacttttttatattttagtattgcattcggaaaggtcactttatctacacttaatgcttatggcagttttatgtgtattgcgaccatttggaacagttttaagccaagtgctcaaatttcaaaattaacgcgacttacaattgttcttgcaatggtaattatctcaacatttattgcagttgtaggtgaacatacttttttaagcgcattcaaatcttttattttgttccttcttacatttttcattccttggagtgcaattaatttagttgattactattttatttctaaagggctttgttgcacaaacctatctgtaaaggctttttcagcgatataa

SEQ ID NO: 54613 - DNA, 228 bp, Acinetobacter baumannii; identical to SEQ ID NO: 47940

SEQ ID NO: 54614 - DNA, 318 bp, Acinetobacter baumannii
atgacaaaaccaaactatacccccgaaattagagaaagagcggttcaattactaattgaatctgaaaaagattatccttctacttgggcagcaatcacagctattgctcctaaaatcggttgtactcctgaaacattgcgtgtttggtatttaaagcatctggatcaactaaatcctgccaaagtacaacagatatctgaccaagaaaaaatgaagcaaatggaacgtgaaattaaagaattaaaacgtgccaatgaaattctacgtaaagcagccgcttttttcgcccaggcggagctcgaccgcccacacaaataa

SEQ ID NO: 54615 - DNA, 342 bp, Acinetobacter baumannii
atgccaaagaatgtgattcatcattccgatagaggtgttcaatatctttctattcgctataccaatcgtttagaagctgcaaatttacgagcatcagtcggtacaactggtgattcatacgataatgctttggctgaaacggtgaatggcttatacaaaacagaggtgattgaatatttaaaagcagattggcaaggtttagcagatgtacaacttgcgacactaaactgggtagattggttcaataaaaagcgtgtacacagtgcactgggttatgtatcgccttttgagtttgaagcaatgtactatgataagattaacccgttaggtcaggtggcctaa

SEQ ID NO: 54616 - DNA, 510 bp, Acinetobacter baumannii
atgagtcgcggaaatattgccatttggtttgatcctgctacgcaatggtatgcgccatcgaaaggcaaacaagggcgaaatcaaacctactccgacgcagccatccaatgctgcttaatgattaaatccttattccgtctgtctttacgtatggtcactggctttgtgcaaagtctgattaaactttgcggattaaattggatagctccagattacaccacgctttgtagaagacaaaagcatattgatattgtaatcagctaccaaaaaagtagcgatgggctgcatctactcatggactctacaggcatgaagtttctaggtgagggcgaatggaaacgcaagaaacatggacctgaatatcgtcgccaatggcgtaaacttcatattggtatagatgctaaaaccctacaaatacgagcagttcagcttacaaccaataatgtcagtgattcacaggtgcttggtgaaccgtaccgggtttgtcggagacttttttatttaagttaa

SEQ ID NO: 54617 - DNA, 306 bp, Acinetobacter baumannii
atgagttattcagaacattttagacgtaaaattttagctaagcttgaggaaggttattctattcgagcagtagctgcacaatttgaaattaataaaaataccattgttgaatggaagaaacgtatagagattaaaaaaactcgtgtacgtaaaccttctaaaattaacgatgatgctttacgtgaagatgttgaaaagtatcctgatgcttatcaatatgaacgtgctgcacgttttaattgtggtgtttcatctattggtgctgcattaaagcgcttaaatattacagttaaaaaaagacgttaa

SEQ ID NO: 54618 - DNA, 495 bp, Acinetobacter baumannii
gtgaatgaattagaaaaaaaccatccgattatttatctggatgaaagtggttttaagtcacatgattacagacctcatggctactcacgaaaaggagtaccctgtctagggcaatataattggcaattaaagaatcagaccaatgccattggagcaatccataaagggtatttattttcagtcggtttatttgactgcaaaatcaattcagatgtttttcatttttggattgagcaattcctcataccagcattaccagaaaatagtgtagtggttatggataatgcagcatttcataaaagagcagatattcaggagttattggaacaacaagggcataaaattctttggcttcctgcatacagccctgatttaaatcctatagaacagatgtgggcatgggttaaacgtaagcgtaaagaatggttgatcgactcagtcgatgagttatttcgagtttttttcgaatcttgtatgaataataaagtagtttga

SEQ ID NO: 54619 - DNA, 558 bp, Acinetobacter baumannii
atgagtgaaatcgaaaacggtaagttaatgccagatgcagaattactttctttgctatgtcaaaaatatggtgtttcagctgactggattcttggttttacgattgaaccggaactagataaaacagcttctgtagctggtattctgtttaacagtcttggtgaaatgatgagtgaatatactcaagccatggcatttcaattgagtatggcagcggcacagcatattacttctttccctaaagccttaacggttgagttactagaagcctcaaagggccttattcaagcttgtttatcgcaagatcagtctattcaagaaaaggttttaccagaacttcacacccttatgcgtatagtgcgtgagtgtgaacaaaatcgtgcgaaacaaatccgtaacttagaaatggctatcgatgatgttttccaacgcgaagagaacgatttacagcaaaaagctctaattgatcttatccaaaataaaaaacgttttagcaaggcttctttacagcaacaagctatagcagaagtaaaacaaataggtctatttactgaataa

SEQ ID NO: 54620 - DNA, 216 bp, Acinetobacter baumannii
gtgccatttcagaatagtagccgaactgctcaacctgagcacagattcgactcactcaataggaatattgtgaataaagacaatcaaattcgagaagttaaacagttcattgagatcgaaaatatcctgatagaaagtgatcatttcttcacaacagttaattttaaaccaaatggggtcaaaagttttagcattgtttctatgtgtgattcatag

SEQ ID NO: 54621 - DNA, 411 bp, Acinetobacter baumannii
atgccttttcccatacagcgaatacagaccgatcgtgggcgggaattctttgctgaaaaagtacagaaaaaaatgatgcagcatggaatcaaatttaggccaaataaaccaggttcacctcatctgaatggcaaggtagagcgttcacaaaaaactgataaatctgagttctacgctactgtagatatcaattctgaggatatccaagacaagctagccgaatggcagcattactataactggatgagaccacattcagcgttgaaaggtaaaacaccgatggagaggtactttgaattatgtgaagaaactcctttctcagatgaagtccagaagcaatacaacccctcaaatgaacggattcaacatgccaattacaagatggatctagagatcgctaaattgaaatga

SEQ ID NO: 54622 - DNA, 237 bp, Acinetobacter baumannii
ttgattaccgaacgtggatattctgtcactgatgtggctgaacgtttaggtgtatcacagcacagcatttataaatggctaaaggccgtacagcctttacgcaacaaccctgatgaacatgaactactcgaagcaaagaaagagatccttcgtcttaaaagtcagcttaagcaaactgaagaagagcgagatatcttaaaaaaggccgcaaggtactttgcaagcctgcccgagtaa

SEQ ID NO: 54623 - DNA, 375 bp, Acinetobacter baumannii
atgaaaagaaccgcaattaagaaaagacccttatctgatacgactttggccagccttgagccagaagataaagactatagggaattggatagtaatggtctgtatttcctcgtacaaaagaaaggaaataaatcttggcaattaagatataaaaagcctgatggcaaatggtcatggatggggttaggagcttatccagctattagtggagcattagctagaaagaaggcaaatgaaatattaattaacatctattctaaatttatccagtttagcaaattagtcttacggctttatattctggatagcagggaaataggttctaacctatatagcacaagctttacgccttttttggcaaataccatctcgtaa

SEQ ID NO: 54624 - DNA, 702 bp, Acinetobacter baumannii
atgcgaataactctagaaatcaaatgtccaacctgcctcagtgacagtataaagaaaaatggcatcaaagtagatgggaaacaaaactatcagtgcaaagactgtaaacgtcagtttattggtgaccatgctctgagctatctaggatgtaattcaggcattactcgaaaaatattacagttgatggtcagaggtagtggtatacgagatatcgctgaagttgagcgaatcagtatcggtaaagttttacgtactttaaccgaatcgacctaccaaattcagcctaaacaaagtcattatgagtctcttgaagttgatgagttttggacttttgtgggaaataaaaataataaacaatggcttatttacgcctaccatcgagaaacaggtgagattgttgcttatgtttggggtaaaagagacttagctacagttcaacgattgaaaacaaagcttaaacaattaggtattcactacacccgaattgcaagtgatcattgggacagtttcataactgcttttaaaaactgcaagcaaagtattggtaaattttttactgtaggtattgaaggtaataattgcaaaataaggcatcgaattaggcgtggttttagaaggagttgtaatttttcaaaaaagattgaaaaccattttaaagctttcgacttaacctttttttacatcaataatggcttcatttaa

SEQ ID NO: 54625 - DNA, 483 bp, Acinetobacter baumannii
ttggatgataattttttcaaactgaatagtttagatgaagatatagatttaattattaattgtgccgaccaaccaagtgttgattatacaagcagattagttgcaaaatatgcaatgaaaaataatattccacatatagtgggcggtggttataatcttcatctaacattaataggacagacaataatccctaatttaactgcatgttttaaatgttttgaaaaagcattacacgaaaaaaatcttattgatttaaaaggtataaaaaaattacatcgtgaaggaagaaaattaggatcctatccaccactttcaggtcttgcctctactctcgctgctttagatgcgtttaaagtattaattaaaaaatatgagtatttacagcaatcaaaccgacgtattgaatttagtatagaaaaaaataattttactattagagaaataccaaaagatccaaattgcgaatggtgtggagtaagttaa

SEQ ID NO: 54626 - DNA, 216 bp, Acinetobacter baumannii; identical to SEQ ID NO: 42270

SEQ ID NO: 54627 - DNA, 315 bp, Acinetobacter baumannii
ttgccgctattaggggcgatagtaaaacttaatttacctgctttacgtgacacatatattattttcgatggattattcttaactgcacaaagaaagcctagatataatgaggtaaaagaagttctcgatactgctgtattaacaaataaaacaagttttattcgacatgctgtcccatttacatctcaattagaccctgccgaggctataagtctgttaggagagtttccgcgtaataaattaacagaagattcgagaccggaatttttcaatttattgagtaatatttcagaagcgcaatatcaaaattattaa

SEQ ID NO: 54628 - DNA, 411 bp, Acinetobacter baumannii
atggagtcagatctgctcagatacagtttttgtgcattatatggtgaacagagagggttatcacctaaagctgaaaatttcccgactaagcttgctccacaacaccagaactggaattctgggtcttataatgaccgttttcgtgtgcagcttgctcataaggaagccaccacaataacaagccatatttcaaaagatggtcattatttcattcattatgatccaaagcaatgtcgaagtctcactgtaagggaagcggcaagattacaaacattccccgacaattatatatttgaaggaaaccgtactaatcagtatacgcaggttggaaatgctgtacctccatttcttgctcgacagatcagcaagattgttttctcattattaaaaaaacattatagcgatttataa

SEQ ID NO: 54629 - DNA, 396 bp, Acinetobacter baumannii
gtgggtgatcttctaaaagactatacagatgataaagttattagttttgacgagatttgtgaggctgatacctttctatatattaaatcgttagcacaattttcaaacagtggtgatttttataaacaaatatggtggcctcatgcatcattctatatttcacgaaatagacggcatgctttaagagttttcgttaaatcagaaagagcctcttattttgaagaaataaagaatgttttaaatgttaaagacctgcagttcattgtagatatattaaataaagggcaggagcaaatgtatggttactctaacccatatattccgaaatggaatgggtcatttgctagttttgatctaaaaaccttttctaatttggaaaagttacaacctttgtaa

SEQ ID NO: 54630 - DNA, 447 bp, Acinetobacter baumannii
gtgcatgttgtacgcaatagcctgagatttgtaagctggaaagactacaaagctgttacgtcgggtctgaaagcgatttatcaggcaagtacagaggaaaatgctttaaaatccctagacatcttctgtgatcaatggaatcaccagtatcccaaaattggagaatcctggcgggccaattgggaaaatatccgaacgatctttagctatccagccgaaatacgtcatgctatttatacaacaaatgcgattgagtcgttgaatagcgtaatacgccattcaacgaagaaaaggaaaatcttttcatctgatgactcagtaaagaaggtcatttacttagcaacatcaaatgctgcgaagaaatggacgatgccaattcaaaattggcgtttagcaatgaattggtttacgattcagttcgatgatcgattaaaagatcatttataa

SEQ ID NO: 54631 - DNA, 342 bp, Acinetobacter baumannii; identical to SEQ ID NO: 47681

SEQ ID NO: 54632 - DNA, 216 bp, Acinetobacter baumannii
atggtagttattgttgatgtttctacccgaagtcgtatgatggcggatatcaaaggacggaatacggaacctgagatactaatccataaattactacataaaaaaggatttcgctttcgtcttcatgtgaagaatcaaccaagaaaaccagatattgttttgcctaaatataaggctgtgattttttgtaaatggatgtttttggcatggttgtaa

SEQ ID NO: 54633 - DNA, 210 bp, Acinetobacter baumannii
atgcctgttttagcttttcttcccgaatttatagtgaaagataaagtaaaaagaagttcactacctaaggtgtccgaagaagacgtaaagacaattcgtgagctgtataaagcaggattgtcctacagacaattaggccataagtacgagatatcgcatgaaatggttagaagaatttgtacaaaatattgctataaggaagtcatctaa

SEQ ID NO: 54634 - DNA, 756 bp, Acinetobacter baumannii
atgcaaaattaccttacgcttgatgagaccattgaaaagctaaaaaataccaaggataaaaatcttaccaatttggttgtacaaggggtgctaacacctgtttttcactatataggttatgtagttgtgattgctgatacacaagcaattgcttcggattacggaatacgtctattaaaaccaaggttatcaaatgatttaattgatcttttagaaaatagaagagaaagcctagaactgtcttgggtagaaagttcaccaaaggtattaagtggggtctttgatagtgaaatattagaattatttggctatcaacctactggttttttgctatatgaatacgatcttgaagaattttcacctatctcatttcctttagatattgaggctttgacttattaccaccctacaaattataagtttaacttgcaaagatcgatggtacttatcaacgagcatgaattgaatatgtacttagatcaagcaaattcaaaaacagaatttaaaagaggtgttagtcaagctaagctgaatgcaaaattagcagcttgtacactggcggaatatttgtggaaacaagatacagagaaaaatataagaattaaggatatggccatatcagttcgttttgaattatctaaaacagaacacgctgaccaattgcctgaaaaagcagaaagcttggaaaattggataaaagatgtagccgataaatacccccactcgcggcaagctggcagacctaaaaataggtag

SEQ ID NO: 54635 - DNA, 1236 bp, Acinetobacter baumannii; identical to SEQ ID NO: 54178

SEQ ID NO: 54636 - DNA, 1338 bp, Acinetobacter baumannii
atgttggtgtctatgtcggataaagaacttaaacgattgtcagtcttgcaagaaatctgtgatcaacgcattagccagtctcaggctgctcagctgcttcatatttcagagcgtcaaatcagacgcttattgcaaaaatacaaagctcaaggtccagctgctttagcccatgcggcacgtggccaaaccagcaactctaagattcctgaagaactcagattgaagtgcctcaatattgtctctgatcaatttcatggtttcggacccaccttagcccatgaaaagctgaccagcattcatggctttgatatttccgtggaaacattgcgttcctggatgattgcaaccaatttgtggattcctcgctctaaacgcctgaaacgaccctatcagcctcgatataaccgggattgttatggtgaactgatccaaattgatggctcacaccatgactggttcgaaggacgtgctcctaaatgctgtctactggtgtttatcgatgatgccacaggaagcttacagcacctacgtttctgtgaatcagaatcaacctttgactatatgctttcaactagagcttatattgaacaacacggtaaaccattggcattttacagcgataaacattcagtctttagagtgaatcaaagcagtaagaaagacaccaagattacgcaatttgggcgcgtactcaacacgctcaatatcgacatcatcttcgccaactcaccacaggccaaaggtcgtgtagaacgcgccaatagaacactacaggatcgcttgatcaaagagatgcgactggaaggcatctcctcaattgccgaagcaaatatttggttaccccgctttattgagcagttcaatctaaaatttgcgaagatagcctttaatcccaaggatctacaccggagtgtcactgaaacccctgaggaattagatgatatttttacttggcgtgagccacgtagagtcaccaacagcctgaccattacgtatgataaatgcgtatatatactggaaagtacagaagaaaatcaaaagctgatcggcaaatatattgagttcctagaatacccagatgggactgtagccattgaatatcaagggagaaagatcacctatagcatcttcgataaactaagtcagcttaaccagcgagagattgttgagaataaacgtttgggttctgtgctggtacatattcaacagcagcatgaagaattggaacagcataaccaacggaatcgttctcaaaagatgccaagtagacgtgcacagaaaacagctattcaacagcgaaatctaaatcctgtgcttgacttggaaatgcctgtatag

SEQ ID NO: 54637 - DNA, 1272 bp, Acinetobacter baumannii
atgaaacgagttgatagtgtaaatgcacgaccagatatgtttggtaaaggaaagaatgggtttcattcaaatgaagatgtgccgggacaggatgcaacctatcttacccctgactggtgcaatatggttcaagaggaaatagcaaacgtactagagaaacatggcgttgtgttaaacccaaataatcgtcaacaactttatgaacttttagcaacatacccagacttagaaaaactatcagatgcaattgaagcccgctttgtcaaagaggctagttttaataagcaagcacgtgatgaacttcaagcacagattacagctttacttaattatgtttcatatccacgaatcctcgcgtcaggtgttttttattataatggcggcgaaaacggtggcacagttacaatgattggtggctcagatggttgggttgctgataacgataagattaaagcacctgatatttacaatttgacagatcgtaatattgggatttttctaagtcctgaatctggtaatgaggcttcttcatttgatcgtgatgttaattcatttaagccaaaaatatttaaccgctcaggccaaaaccgagttgtatattcaggtcaagtaagtttccaagttcttcagcataaaaatcccaatagcaccacagtagatggagattatccggttggctcatatagttttattcttcaaccgggtgaaacgaaagtattcacgttgattggtgctggcggtggtggtggagcatctcgacgttctaatagttctgattatcccttaagtaatggtcagaatggtgcagatgttctacttaaattaaacggtgaaaacatagctatcgtacatggcggcggcggcggtactcagggtgtatggagtaatggttcctcttatgacaatggtcttgctggtacaattggagatgttgatattattggagccttcgattcaactactattactcaaggtaaagcaggcaacgcaaccagagaagatcatacaggtggaacctctgtaagtcctattgctttgtttggcaaaggtggtgatggtgcacaaggaattggtgacgaaggctggtcttttggtggcggcggagcatctggctctgttttagtagctcaatacactaatagaagtacaactaatcagacaattactctggttgttggtcgtggaggtgttggggggcaaaaaggaggctttgactgggatgttgtaggaagtaaaggaacagatggtttcgctagagtttctagtggttaa

SEQ ID NO: 54638 - DNA, 540 bp, Acinetobacter baumannii
atgacctatgagcaaactgttgagctttatgcatccgtacttcgtcaattactgcctgctggtggctatgacacctcacctaaaggaatcattgcaaaagatgtatacgctcatgcaaaaatacttgcacaagctgatgtcgatgcaaaacgtgttttgaccacattagagaagattccagaagaattattaagtgaatatgaatctgctttgggtttgcctctgaaatgtactgtaaatacaaataaaacaattgaagaacgtcttcagattattcagtggattcaacaaacaaagaatgttttaaaccgtgcttatcttgagggtttactaggtttatttggtattgggttgattgatttagtgcgctacagacctatgcaatgtacagcgacatgtgtttcaccaatcaacattgaaaacctgcggttcaaagtcaaactgatcttaaaagccccagtgcaagctgatatggcatgcatcattgaaaattatttaccagcttatttgcggtacgacatcattgaggaaaaagtatga

SEQ ID NO: 54639 - DNA, 486 bp, Acinetobacter baumannii
atgatgagagctgtagcttcccagataaataaggctcttaagcaaatcagacagccattgttcgccctggtcgcacgtggtggttcaaaagtattgcaattaaagggttttgccgatgagacattgcaagaaattgaactttttcagcaagtcggttttagctcatatgtacccgatggagcacgtgttgtagttattcctcttcacggaaaaacctcgcgctcaattgttgttgcaacgactgggggaaccgtcgtggtcaatgttgatgaaggtgaaacctgcgtttacgaccaatttgggcacagccttttacttaaagaagatggtacgcatatcaccgctggtgacctttttattgatgagggcaatttgcatgtgccgaatggcaatgtcttagatcagaaaggctcaatgcaggaaatgcgcgatatttataacaaacataaacacggtaatacaccgactccaacagaaccaatgtag

SEQ ID NO: 54640 - DNA, 2148 bp, Acinetobacter baumannii
atgagcggaagcaactcaactgtttctcttacattgcagatcaaaggccaacaagcttctcaagagatgaaacgaatctctgaccagcaagtccaagccacaagtaaaatcaatacgcaatggacgaagattggttctgctcaggcaaaattcgttaatacagctagagctggtacacgagaaactttaaatactgcccgtgctggtgatcagttgttacgtactaatcgattgcttgaaggtgtactacgtcaacaatcgattcaaaccaagcttcagagccagcttttaagacagcaagttagttctgcccagcagctagtaaactcagcaaaaaaagtcgagcaatcaactaaacgaacacaccagtcaactcaacagaccgtttcattatggcagaaaggttcgcaagttgctggtggtcttgcaggtggttttatggcagcgaaagccgttgttgctacaccgcttgaacgtaaccgtaactttgcggcaactgtgtttgatgctacagcaagtattacaaatggttttgccggaatgaccacagggcaagcaaaagccgcaaatgctgagcttatgggctataccaaagatgctgtacgcaaaggtcatggtactgtggaaggtgtttctgaagcagcgggaattttatcggcttcaggtaactatgaaaaaatttctgatttaagagaaccattaattgctgtagcgaaatctgcatttgcatcaggtgcttctgaatcagatatggctaaacttgtacaacaaactaagcaatttggtattgccccaaatcgtacacaagctgctttggatcgaatgactgcatcaggttttgcgggtggtttcgagttgagagatatggctcaatttttacctgtaattttaggagcggctacaggtgcaggttttagtggtgagaaaggactaaatactgtaacaacccatttacagcttgccagaaaatatacaggtacaccgggtgaagctgcgactaatattgaagatttatatggacttatggggcaaaaacattttaaagatgctattgctaaaaatattccaattagagatggtgaccctaccaaacttggtaaaaaaggaaaaacggtttttgatttaactcaatatttggtgaacaataaattaaaaggtattgatacaaccgatgccattgcaaatttaatgaaccgtgaattatcgacaaataaggaatataacaagttaaataacgatctgagtgttgctctaaaaaataagaatgctgaacaggcggaaagaattaagcaagctattgaactcgttattaagggacaatttggggacatctttcataataaacaatcactatcgggtatttcctccattgttactggtatgaaaaatggctcttatcaagaaatagataataagtcatggaatggcctaggatcagttgaccgggttgcagatatcaagggtgataatgagtttgctcaagcagctgctttacagcaagaaacgatacttgcacaagtgaaactatatgagtctgtaaacggtaaattaggagaatttgagaaaggtttagttggggtcatgcagaacaatcaagggcttactgctgctacggttgctgccactggagctttaactgttttaacagcaaccgctggtggtgctgctattggaggagtattaggtggtaaaggtgggccagccgttaaagctggaggtgcaggcaaagtttcaggccttggtagtttatttcaaggaattggtataggagcattagcttatgagggggcaaatggtttagttgattatttagatggaaaggtagaaaaatttactggatataagccagagcgtagaagtgcgatagaaatgtatatggattctcataaggataatgaacaatcccagaaagaagttactcaacagcaagaaaaatggttttcacctttgctggataagcaagacaaacaaaatgccttgagtcaggaattgattaataagctcaatacattaatcaatgtgacggggcagaataaacccacatttaattttagtggcggcctactgggagcaatttccgaacatgcagcaactgaagaaaaacgtcatggtgcttctaatgtgcctttttatctacaacggcactaa

SEQ ID NO: 54641 - DNA, 219 bp, Acinetobacter baumannii
atggatattggtgtgccttatgatcaagcggcaaatatgccgcttgatatggctgcggccttactcagtgatgagcggcttaataatactcatcaacaaaactactctaatccaccacaatcaacggtcacaacccatactcaaaacaatggggctaactctacagtaacaaaaacttatgtgacgaacgttcgcaaacattcaaaaccaaaaggctaa

SEQ ID NO: 54642 - DNA, 342 bp, Acinetobacter baumannii
atggaacaacttgaaattgaaggtactttacctgtagcactaaaaaaattagtgggtcaaacagaagttaaaagtcaaaaaatcgtgatgcgtcaaccaaattcaatcgaatatcttgagtctcaaactggcctgaagccggggcaatttcttgcaattgctgatttgtctgcaatgacaaaacttattgatgctcaaggtactgagcatgaaattacttatgacatgttgggttattcatcacgcgcaaacttgaagtacttaatggatttgcgtgatcaacttgatgcaaaggaagcagccgagagttcatcgccagagcaagaatcatcagaaaattga

SEQ ID NO: 54643 - DNA, 378 bp, Acinetobacter baumannii
atgtctgaagaagcagttggagcaattgtcttaagcgttgatggccttgattatgatgtttctcgtgttcatgcagctatcactacagggaatcgtgtgatccccactatgaatcgtaaactacgtgcgaagtataaagccaaaggtatcacgactttccagcttacagcttcagttgtgattccgaacgggaaagattcagtgaaatgggcaagtcttgacgatgcccgaatttctatcgaatcaccagatgggaaataccgtgaaactttcattgactgtaacgtgacaagcgtcggcaatagttatgacgtgaatggtgaaaccatgcgtgatcttgaaatgttctgcttagattatctagatgaaacaatgtag

SEQ ID NO: 54644 - DNA, 810 bp, Acinetobacter baumannii
atgactattcaaacaaccctcgataccattgcaccgctcggccacaccatcattgctgtatcagcacctccagcagttggagctgacacagcagcttggattgatcacttaacttcagttagtgattcaattgaacaacgtccagctattttagttgtacctttttcagacattactgctgctgaaacctttgctgatcaagcacctgtcaaaacaaactaccgtgttgttgttgtttgttataacggtgccactggtcaagaacctgaacttgctggagctatggctgctgcattagctgattcaaatgatccagcactcccattcaatggtgttaatttagagggtcttacacctgtcgatgataagttcaagcttacatttgaacgaatggaagcagcgatgaataaaggcgtatgtatgattgaaactggagccgatggcaaaccagaaattgtacgtgccatttcaacttatcgcatgaacccggactcaggtgaatctgacgatctgatgcttgatatcaatggtgtattggtcgtggattatactcgtaaagttgtgcgtcaggatctgaagaaagaacgtcgtcgtaaaaacacagcagctcaacgtcgtaacgttaaatctgttattgcgcgacgattaattcagcttgaagatgctgaaattctagaaaacgttcgcgataatttagacgagatcattgtgactccggatgcaaaagaccaataccgggtaaatgtcaaaatccctacatactgggtgcgtggtatgcatgtaatagcaaccacattggatatttactga

SEQ ID NO: 54645 - DNA, 651 bp, Acinetobacter baumannii
atggctgcatcgaaatttaaccaacccatcaatttcaattttggcaaagcaatgtttctaaataactttttgaacggggccagagagtttaatcagcccgttgatttcgggaacatgccgctgttaacagaagcatattacttgtttgctggttctaagatgaacagccctataaaattcaatgcaccaaatctgacagatgcttcgggatggttctcagaaaacactgtattcaatagcacgatcacgggcagctttcgttctgtggtgtcgatggcatatatgttttggtatgcatcatctttcaatcaaccgatcaacgattgggatattcgaaatgtgttgaacttcacaggatttttgactgctgcgacatcttttaaccaagatttatcttcgtggccagccaagtttaacgttaatgcgaatattgaaggtgtatcggttgcgccgaactggtctaccgaaaactatgataaatatttgaatgcactgtggctcgatgtcggcacaacgcgacgaaacgaatgggcaaatggtacaagctcgcgtgtggtaattgcttctacaaagcgatcagctgcgagtcaagcagcagccagtgggctgatcggtgcgggatggacaattttagatggaggattagtttaa

SEQ ID NO: 54646 - DNA, 1014 bp, Acinetobacter baumannii
atgaaaattgttcagattatggcgacagatggtgggaaaatcggtgggttagaaaagcatactttccaactctgtgcagaattatcacaaaagcaagaagtccatttatttttagacttaaactatcaaaatacactacctaaaatagagcatcttcattgtcattattttgatttttccaaaggaagaatgaatatcggtcttctctattctctttttaaagaaattagaaaaattgctcctgatgttgtccatgctcaaggtggaaaagcttcaaaaattttgagttttcttctaccgtttttaaaagtaccaagtgtggcaaccattcatggtatgaaaaataatatgcgtagctatcggcattttaatgaggtaataactgtaagtcaggcggttgccgataaagtgagtgagtatcgaccggttcatgttgtttataatggtgtggctcaggaaaaaggattgactgccgatatacctagaacaactctaaaaaaagttatcgcaattggccgattagatccagtaaaaggctttgatcgacttatagaagcatggcaaggtttggatattcagctagaaatattaggtgagggaccagagcaagaacatttaagtcagttaattcaagatctgcatttacaggataaaattaaattagttggttatcagcaagatatttatccctacttggcagcaagtgatttagtgatggtatcttccttgagagaaggaggacctttaattgttgcagaagcattattggtacataaacctgtaattgccactgatgttggtatggtaagagaatttattccagaaaaatatatagcaaaagataataccgtattagaaattaataatttaattaaagttgcgattaaaaactttgagcatattcatcatgactttaagcctgcatttgataaagctgaggctgaattgtctttaaatgcaatggttaataaaacactagatatttataaattagcgttgagacaacaacgctaa

SEQ ID NO: 54647 - DNA, 1785 bp, Acinetobacter baumannii
atgatgcgaactcattactgtggctctttaactgaagcccaaatcgaccaaaccgttacattatgcggttgggtacatcgtcgccgtgaccatggcggtgttattttccttgatatgcgtgaccgtgatggtctcgttcaagtggttattgacccagatactccagaagcatttgcaactgcagataaagcacgttctgaatatgtattaaaaattacaggtcgtgttcgtcgccgttatgaaggtactgaaaacccaaatatggtgagtggtcaaatcgaagttttaggcaaagaaatcgaagttcttgctgcttctgaaactcctccattcccattaaatgatgacacgattaacgtgtcagaagaacaccgtttaaaatatcgtttcttggacattcgccgtcctgaaatgttagagcgtttacgtttccgttctaaagtaactaacttgatccgtaactatttagatgatcacggtttcttagacgttgaaactccgattttaactcgtgcaactcctgaaggtgcacgtgactatttagtaccaagtcgcgtacaaaatggtagcttctacgcacttccacaatcacctcaattgtttaaacaattattgatggttggtggtatcgatcgttactaccaaatcgcgaaatgtttccgtgatgaagacttacgtgctgaccgtcagccagaattcactcaaatcgacattgaaacatcgttcttaaatgacgatgaaatcatggatttgatggaaggcatgactgttaaactatttaatgacttgcttggcgtaaaatttgaaaaattccgccgcatgccatatagcgaagcgatgcgtgactatgcatcagataaaccagatttgcgtattccattgaaactcgttgacgttgcagatttaatgcaagaagttgagttcaaagtatttgctggtcctgcaaaagaccctaaaggccgtattgcagcacttcgtgtacctggtgcaggttcattaactcgtagccaaattgatgaatacactaaatttgttggcatctacggtgcgaaaggtttggcgtatatcaaagtcaatgaaatcgaaaaaggaattgaaggtcttcaatctcctatcgttaaattcattgaaccaatcgtaatgaagttacttgagcgtgttggtgcagagaatggcgatatcgtattcttcggtgctgataaagccaaagttgtaaacgatgctatgggtgcacttcgtgtcaagatcggtcatgacttgaaccttgcaacttgtgagtgggctccactttgggttgttgacttcccaatgtttgaagaaactgacgatggcaaatggacttctgttcaccacccattcacactacctaaatctagcgtagaagacgtgaagagcaatccaggcgaagcactttctgttgcttatgacatggtattgaacggtactgaagttggtggcggttctcttcgtatttacacattagaaatgcaaaaagcgatttttgaagcgcttggtatttctgatgaagaagcagaagagaaattcagcttcttgcttaacgcacttcgttatggcgcccctcctcacggtggtttggcatttggtcttgaccgtttagtaatgcttatgactggcgcgacttcaattcgtgacgttattgcattccctaaaacgaaaactgctgaatgtccacttactcaagcacctgctcctgttgaagcaaaccagcttcgtgacttgggcatccgcttacgtgaaaaaccaaaagctgaagaatctaaataa

SEQ ID NO: 54648 - DNA, 1110 bp, Acinetobacter baumannii; identical to SEQ ID NO: 54204

SEQ ID NO: 54649 - DNA, 2607 bp, Acinetobacter baumannii
atgaatattgcggcgcagcctccagttcaggcagatcaaacagtttatttaaaagattatcaaaaacctgcgttcttggttgaatcaattaatcttgatattcaagtctatgacgataaaacaattgttgattcaacattggtcatgaagcgtcaaactgctggagacttggtgctattgggccgtgatcttgagttgcaatctattcagctcaatggacaagatcttactcctgcacaatatttactcgatagtgaacaactggtgatcactgatgcaccagatgaagtcattttacaaactcaagttattattcaccctgaaaccaatactcagcttgaaggtttatataaagctggtgacttatttgtaacgcaaaatgagcctgaaggtttccgtaaaattaccttctatccagaccgtccagacgtactttcagtttttacgacacgtgtagaagcagacaaaaaatatccagtattacttgctaacggtaacttgcttgaaacaggtgaagttggtgaaaaccgccactttgcgatctggcaagacccgactaaaaagccaagttatttgtttgcttgtgtgattggtgatttagctgttcttaaagaccgatataccacttcagaaggacgtgatgttgctttagaaatctatgcgattgagaaagacattccaaaatgccatatcgcgatggaagcattaaagcattctatgcgttgggatgaagaacactacggtcgtgcttatgatctcgacaactatatgattgtggcggtgagccagttcaacatgggtgcaatggaaaataaaggtttaaatatctttaatacctcatgtgtacttgccgatgaagaatatacaactgacgcagcgattatgcgtgtacagtctgtgattgcccatgaatatttccataactggacagggaaccgtattacttgccgtgactggttccagttgtgcttaaaagaaggtttaactgtattccgtgatcaatctttctcggaagatctgcaatctgctgcggttcaacgtattgacgatgtcgctgtacttaaatcgcatcaattcccggaagatgcaggtcctttgtcgcatccaccacgcccagaccactttgtcgaaattaataacttctatacagcgactgtttatgaaaaaggtgcggaaattaaccgcatgatgtcgacattactgggtaaagaaaaattccgtcagggaacagatgaatatttccgccgtcatgatggacaagccgtaactgtagaagactgggttgcagcattgtcagcaggttcaggtgtcgatttatctgcattcttaacttggtataaccaaccaggtacaccaaagcttgaagcgaaaggtgaatatgatgcagcagcacaaacttaccgtttaagttttaaacaaagcctaaaagcacatcctaaatatccaaacttaaaagctgttccgattcctgtagcgttggcgctatttaatgctaaaacaggtgagcaatatacacttcatagcgacagcctatttgtaaatggtgttaaagatggcgtgtatttgtttgaccaagatgaagctactatcgagtttacaggtgtgactgagcaaccagttgcatcgctattacgtaacttctctgcacccgtaaatctgatattcgattacagtgatgaagaattagcattcttgattcagcatgaaacaaatggttttaaccaatggcaagcaacacaaaccttgcttgaacgtattttgttagaagatcactcagcggatacctatattcaagctattcaaagtacattgcctgatttagttggtcgtgatccacttttaacatcccgtttatttgatgtaccaactgaaggttatttgggtagtcgtattgatcaaaactatgcaccagccgatattcatgtaaaacgtgaagccttgctgaatcgtttagcacaagatttgggttcattctggaaagatacataccttacactggacccagacttgcaaaaagaattttctttagcgatgggtgtacgtgcattaaagaacattatgcttatgatgatggcgcgtcagggcgaccaaagtgcatttgaattggcttacgagcaatatcaaagcacaggcaatatgtctgaacgtttaggtgcgctacgtgtattagtttggcaaaatgcgcctcaagcacaagaagcccttgctgatttctataaccgctttaaagatgaagcattgtctttagaccaatggtttatgattcaggcagcaaacccaaatgccacagttgagacaattgagtacttaactcaacatcctgattatgacttaactacgccaaaccgtattcgcgccgtgagtggtggtttgtcaaataaccctgaaaatacttggggctttggggtaggtcactttattcatcttgcagaatatctggacgagaaaaacccaattttaggttcacgcttattacaagtgttatctcgttggtatacgcttgcagaacctcagcgcactcaagtgcaacaggctttacaagccttgcagcctaaagtgaaatctaaaaatgtttctgaaactttaaatagtatgttgagtatttaa

SEQ ID NO: 54650 - DNA, 2607 bp, Acinetobacter baumannii; identical to SEQ ID NO: 54649

SEQ ID NO: 54651 - DNA, 258 bp, Acinetobacter baumannii
atggaattaaaagcttatttacatcgattagaaaacattaaagcgattcatgatctagatgcagcaggactcgaccatcatgtgattgccgtgttcttgtctgccgaaggtatttcaatgactgctcaggaggtaactactatcgttaatacttatgacgccttaggtaaagtgaaattaccaagtaaaaaagtgcaggcacttatcaatgccaaaaaacttggacaaaatgatgagaccttgccgtgccctgtttaa

SEQ ID NO: 54652 - DNA, 1158 bp, Acinetobacter baumannii
atggccttacaaattctacaaaaacagctagatgaaagtagccattgccctctctgccaagcgtcgatgtattgggtagatgccgaacaatttgagcaagacgttcaatttcatgaatgtagccattgccaacatcgtgtatttaaagacacaaaaatgacgtgccactgtgaccaatgcacaaaacaaagaaagaaacttttacagcaaacccgcctacaagaacaacgccagtttaagtcaaaagatcagtcacaacgcagtctggaacaactgagttttttacataaactttttttactaagcctacttgatgactacgcacgagacgatattgctcatgacgaatacattcactgggaccagataaaatatcagccgattacccccaactggatgttccaaagccatctgattaaacagcttcataaagatgggattttaaatgcacaagatcaaaccgatgaaccacagtgcttttatttaaatattcgtctagatggttatagcgacccaagtttatttagtgtagctcagcaactacgccactggttctatgaaaacctaagtcttggtattccatttcgtagtgccgatgaagtgaaagacgtgctgtttcaggtgctctaccaagaaattattcagttcactcagttctactgccgaacttggggtatccaaattgcaggaagctctaattttcaaactttttgctaccgtttaatggactcattggcaattggacaaatttattatcttattcagactgcacttgaatacctttataaacaaaaggcgctacagccacgaaatgaaaagtttattaacaccaatttattaaagaaaactttagagcaatatcgggaacgggctttggctgaaaagtgggaaacttcaatgttgccacgcccttacaatattccttacagtaaaatgagccacatattgtttaaccgctttttaggttatgacgaacagatttttgtacaacctgtatggaaagcatggcgaaaaatcgaacctcggttaaacttttactcggttaaacgttgtatgtactgtggttcaaatgatctaagtgttgactatgatgcagcagattatgtgtcgttgatttgccaaaactgtaaacatcaagatcactattttactcgttaa

SEQ ID NO: 54653 - DNA, 828 bp, Acinetobacter baumannii
atgacttcgacatccaacctcattgaacaggtgattgaagcttggcaaaacatgcaggcaaaaacgcctcttgtgcaatgtattaccaacagcgttgctgccaactatacagccaatgtgttactcgcttccggtgcttcacctgccatgattgataatccttatgaagcagaaagctttaccaaaatttcatcggctttaagcattaatttgggtacaccgacttcagagcaaatgcaagccatgcaaatctctgctaagaccgcacagcttaatgaagtaccgtgggtacttgatccagtgggctacggaccaattttagcttggcgcagtcaaatgacagacgagcttttgcagtttaagccaaacgttatacgtggtaatgcctcagaaattagcacgcttgcaggcaatcaggttcaatcaaaaggtgtagacagcactttaagcagtgaccaagcttatcaacaagctttttcactcttaacgcatgcgagctgtatcgctatttcaggtgaatcagattacattttgtctaaagaaatagatgctgtgattcaagtaaatggtggaagtccattacagccaaaacttactgcaactggctgcgctttgggtgcattaattgcagcctatagcgctgtgacgacaccaactattgcagctctttcagctcatattcactttgcaattgcaggtaaacttgctgcaaatcaagcacaaacgatgggtagttttagtagcatatttatggattatatccatatgctagatgacaatctgattgagcaatatgcagatatcaaacttttaaataaacaggcataa

SEQ ID NO: 54654 - DNA, 870 bp, Acinetobacter baumannii
atgaacagacatgaatgtatggctgtatatacacaaaagctgcaactggtttgcgattatattcaaagacatctagatgaagacctagatgttgatcgattgagccagatcgcagctttatctaagttccattttcatcgcatttttgccattcatattggtttaaatgtgatgaagtttattcaactttctcgtttaaagcgggcctcttttcaattggcttttgaacctgatctcaagattattgagattgcattacaagcagggtttgatagtccagaggcatttactcgtgcatttaagcgttcatttgatcaaactcctcgagcttttagagataaaccggactgggaatcttggcatcagaagtttgtttttacaattccgaaaagtgagttaaaaatgaatgtaaatattgttgagcgacctgctgaaaagattgcatatttatcgcatttaggaagccctgataaagtctttgaaacggctgcacgttttattgcttggcgcaaagaaacaggtttgtcaccagtgaccaagtctagaacttatggtattccttttgctgatcctgaacagactccatctgatgagtttcgatttgatattgccggttcaattgaaaaggctgtacctgaaaatacttacggtgtacagacaggtgaaattcctgcggggcgttatgcaaccgtaagacatttgggtagccatgatcagattaaagatagcgtctattacatctttagaaactggttacctgagcaaccagaagaggcaggggattatccggttttctttcactatcataactttgtgcatgatgtgaatgaatgtgaccttgtgacagatatctacttacttttaaagtga

SEQ ID NO: 54655 - DNA, 360 bp, Acinetobacter baumannii
atgccgcacgttgtagttgattattcagataacttaactggactaaatgcaaaacaattacttgaagaaattaataccacactgattgaaacagagttgtttagtccagaagacatcaaaagccgtgcacgtaaagatgaagtttttctgattggcttaggggttgatcaagcctatatccatgtaaaagcctatattttgtcgggaagaactgctgaacaaaaacagcttgtgggtgagcagttattagcggcgctcagcaacaaaaaatatctaccacaagagtttaataaagaaattcaattgtgtgttgagcttatcgacatgccaagagacgattattttaagcaagttgtataa

SEQ ID NO: 54656 - DNA, 1713 bp, Acinetobacter baumannii
atgaaacaggaaactgcacttaaactgctcaaagcaggtgaaaatgtttttttaaccggttcggctggtgcagggaaaacctatacactcaatcagtacattcaatatctaaaagcacgtaaagtgcctgtagcgattacagcatcgacaggtattgctgcaacgcatatgaacggtatgaccattcatacgtgggcgggcatcggcattaaagatcagttaactgacgacgatctaaaacgtatgaaagagcgtaaatatctcaaggaacaccttgaaaatgcgcaagttctcgtcattgatgaaatctcgatgctacatgcgaagcagctcaatctggtcaatcaggttttaaaatattttaaagaaagtgatgaagcattcggtggcattcaagtgattgtggctggagatttcttccagttgccgcctgtaggccgtaatggtgaagccaaccgtgataagttctgctttatgtcagatgcatgggtcgaagctaaattccgcgtatgttatttaacagaacagcaccgtcaagacgatgaaattctgaatcagatattaaatgcgattcgtgcgcaaagtattcaaaccgagcatttgcaagctttgcatcaatcccgtactcatgacattggcgaaacctttactcgtctttatacgcataacatggatgtcgacaatatcaattatcagcacttaaatgaaattgataatgaagggcatcaattcaacgctgttttagatggtaatgaaaaattactagaaaccttaaaatcttcagttcgtgcaccagaagaacttactttgaaaaagcatgccaaagtcatgtttgtaaaaaacaactttgatatgggttatatcaacggaagtttaggtgaggtgatcggttttgaagaagatgacgaaaacgggttattgccaaaggtaaaattaaccgatggtacaactttgctggtagcgcctgaaacatggtcaattgaaaatgaagcaggaaaagtcattgcaagttttcagcaaattccacttcgtttggcatgggcgattaccattcataaaagccaaggtatgactttggaagctgctgaaattaacctgatgcatacctttgaaaaagggcaaggttatgttgcgctctcacgtttgaaatctttaacaggattaaaattattaggatttaatgaacaagctttagagttagatagtcttgctgtaaaagctgatcgccgttttcaggaattatcggctgaagccgaagataatttcgctaatgtcgatttaactgcccagcacaaagcctttatccgtcattgtggcggcaccttaaatgaaaaagagatttctcgtaatgagaagaaactcgcaaacggtggtaagcaaaattatgctacggcaacgctagacgagacacgtgtcttgtttgaagaaggttacgaaattgaagatatcgcgcatgaacgtggtctaacaccagcaactattattaatcacttggctcgactgcataaagagcaaaaactagatatttcggttgctcacccaggtgaagaagtggtcgaagaagtgcgtaaaatttataagaagttgaaaaagcgtcaaaatccggatcatttttctgatgatggttcgatcaaactaagaccaattgttgaagcaactagccctcgaatgggatatgatcaagttcgattagctttattatttattgaataa

SEQ ID NO: 54657 - DNA, 1173 bp, Acinetobacter baumannii
atggcttttaaaaatattgcagatcaaacaaacggtttttatattccttgcgtatcactctttggtccaggatgtgccaaagaaattggtacaaaagcacaaaatctcggcgcaaaaaaagcattaattgtgaccgatgaagggctatttaaatttggcgttgcagatcttatcgcaagctatttaaccgaagcaggcgtagcgagccatattttcccgggcgcggaacctaacccaaccgatattaatgttcacaacggtgtgaatgcctataacgacaatggctgtgactttattgtctcgctaggcggtggttcatctcatgactgtgcaaaaggaattggcttagtgactgcaggtggtggtcatattcgtgactacgaaggcatcgataaaagtaaagtaccaatgacaccattgattgcagtgaatacaacggctggtactgcatctgaaatgactcgcttttgtattattaccaatacagacactcatgtaaaaatggcgattgtggactggcgttgtactccacttattgcgatcgatgatccgaaactcatgattgcaaaaccagcgggtttaacggctgcaacaggtatggatgcactaacacatgcagttgaagcatatgtatctacggcggcaaacccaattaccgatgcgtgtgctgaaaaagcaatcaccatgattagtcaatggttacaacccgctgtcgcaaatggcgaaaacatcgaagcgcgtgatgctatgagctatgcacaatacttggctggtatggcatttaacaatgcatctttaggttatgtccatgcaatggcacaccagttgggcggtttctacaacctacctcacggtgtatgtaacgcaatcttgctaccgcatgtttgtgaatttaacttaattgcttgtccagatcgttatgcaaaaatcgcagaattaatgggtgtaaatacgcaaggtctcaccgtaacagaagctgcatatgctgcaattgatgccatccgtaaactgtcttcttcaattggtatcccatctggcttaacagaacttggcgtaaaaaccgaagacctcgcggtgatggccgataacgctcaaaaagacgcatgtatgctgaccaaccctcgcaaagcaaaccatgcacaagttgtggagattttcaaagccgctctttaa

SEQ ID NO: 54658 - DNA, 969 bp, Acinetobacter baumannii
atgaatacatctacagctaaacacaattatgccccagatattttaggtgccggctacgaacagctaacactcaactttccagatgattatgaaggtaaagttatagccaccttagttcgtaaaaagaccactcagccaactcaaaaagccgtactttatattcatggttttttagattatttctttcaaactgaaatggccgagcaattcaatgcgcatggctatgacttctatgcactcgatttaagaaaatatggccgctcaaagttgcctcatcaaattttctataatgtgcttgatttaaatgaatatgatgccgaaattactcaagcattagagatcattggccaagaaaaacatacacaagtattacttgcaggtcattcgactggcggtttgacagcaacgctttatgctactcatcatccagatcatccacttattaaagccctatgggcgaatagtccgttttacgacttcaatttaagtttagttgaaaagaaatttggtattccaatgctcagtcgagtaggaaaatatctgcctaaagttaaatttccaagcaaacttaacaaatggtacaccaccagccttcacaaacaacttaaaggtgaatgggacttcaacctggattggaaaccgacctctgcccctacagttcaacttagctttctacatgcgattcatacagcacaaaaagaaattcaccacggcgttaagctaaacgtccctgcactgattatgcattcgcaccaaactaaaaacccacgtaaatggggaccagatgcaacccaaagtgatgttattttagatgttaaagacattgcgaaattcggtaaaaaaataaagggcgatgtttcggttgtctctattcacaatggcttacacgatttagtcctttcggcccagccagtgcggaatcaagtctatcaacaactattccagtggctggatcaaaaaatcacttaa

SEQ ID NO: 54659 - DNA, 1512 bp, Acinetobacter baumannii
atgcgctatatcgatccaaatcaaccaggctcaaaagttcaatttaaatcacaatatgaaaattttattggcggtgaatgggttgcacctctaaagggtgaatattttgataatgtatcgccagtggatggaaaagctttcacacgcattccacgctctagtgctgaagatattgaacttgctttagatgcagcacacaaagcaaaagcttcatggaataaatcttcaccgactacacgttctaatatacttttaaaaattgctgatcgtttagaagcaaatcttgaaatgcttgcggttgcagaaacttgggataacggtaaagcagttcgtgaaactttggcagccgaccttccacttgcaatcgaccatttccgttatttcgcaggatgtattcgtgctcaagaaggcggcatctctgaaattgatgaagataccattgcctaccatttccatgaaccgctaggtgtggttggtcaaattattccatggaacttcccgattttaatggctgcatggaagctcgctcctgctttggcggctggtaactgtgtggtgattaaaccagctgagcaaactccggtaggtattttgttagttgccgaacttatccaagatatcttaccgccgggcgtactcaatattgtgaatggtttcggtgcagaagttggccgcccattagcgacaagcccacgtattgccaaaatcgcgtttaccggttcaacacaaactgggcaaatggtcatgcaatatgcgaccgaaaatattattccagttacgttagagcttggtggcaagtcaccgaaccttttctttgaagacatcatggataaacaagatgacttcttagaaaaaacacttgaaggttttgccatgttcgccttaaaccaaggtgaagtatgtacttgcccttctcgtgctttagtacaagaaagcattgctgatcaatttttagagttggccgttgaacgtgtaaaacgtattaaaactggtcatcctctcgatactgaaaccatgattggtgctcaagcatctttgcaacaacaagagaaaatcttacgttgtattaatacgggccgtgaagaaggcgcagaactcttactaggtggtagtggccgtaaagaagtaggtgacggtttctatgttgatccgactatctttaaaggccacaacagcatgcaagtcttccaagaagaaatttttggacctgtacttgctgtgacaacatttaaagactttgacgatgcaatcaaaattgccaatgacaccatgtatggtctaggtgctggcgtttggtcacgttcagcccatatttcttaccgtgctggtcgcgctattgaggcgggtcgtgtctggacaaactgctataacatctaccctgcgcatgctgcatttggtggttacaaaaagtctggtattggccgtgaaaaccataagatgatgctagatcactaccaacaaaccaaaaacttgctggtgagttattcaaccaaaccaatgggcttcttctaa

SEQ ID NO: 54660 - DNA, 816 bp, Acinetobacter baumannii
atgaaactgaaccgtgatattcaatatccgtcctctacccatcaggatcagtgggaaaaacttaaagagtttactgatgcccgtattgctttaggtcgtgctggttgcagtatcccaacacgggccttacttgagttccagttgtctcatgcgcaagcaaaagatgctgtttatcaacatatggatgttccctacttgtctgaacagttacagcaaaagcaacttcaaactcttcatgttcaaagtaatgccgctaataaagaaatttatctcaaacgcccagatttgggacgccaactttcaaatctatcaaaagaagccttaattaaagagtatgcaaaaaaaccacagcagtatgatgtttgtattgtggtaggtgacggcctctctgcaagagcgattgaagcaaatgctatcgcatttattgcagtgctaagcgaacatattcaacaagaaaactggagccttgcgccaattatatttgcaacaggaagccgagttgctttaggcgatgaagttgcagaaatttttaaagcctccatgctggttatgcttattggagagcgcccaggtttaagttctcctgacagtatgggagtttactacacatggaatgcatattcaggttgccttgactccaaacgcaactgtatttccaacgtccgttcagcaggcttaagtattccagttgcggtacaacgtttaatggcactcatgaaaaaatcgaagcagcttggcttttcaggagtaaatttaaaagatgaacatcaactttcaaatatcgaccataatgaaaactcaaagcttttattttaa

SEQ ID NO: 54661 - DNA, 1728 bp, Acinetobacter baumannii
atgaagcctaatgatgttgtctcgaacctgccaaacaacccgacaccgaatactcatgcctctgtcgattctgcgcagcaagaacaacaggctggattagattttgttcgccaagtcattactgatgatttagctgccggacgtaccaaacaaatcgtaactcgttttccgccagaaccaaatggttatttacatattggtcacgtaaaagcaatttgtctaaactttggtgttgcagaagagtttgatggactctgtaatttacgttttgacgatacgaatccagatgcagaagaacaagaatatgttgatggtatcgccaatgatgtgaaatggcttggttttaactggaatggtgaacctcgctatgcttctggttattttgatcagctttatgcatgggcaattcaattgattgagcaaggtgatgcatatgttgatttgcagtctccagaagaaattaaattaaaccgtggtagttttgttgaaccaggaaaaaactcgccatatcgtgatgcatctgttgaagaaaaccttgctcgctttgaacaaatgcgcagtggtgaactaaaagaaggtgaagctgttttacgcgctaaaattgatatggcaagcccgaacgtgcatatgcgtgatccaattttgtatcgtgtcttgcattcagagcatcatcaaactggcgacaaatggaaaatctacccaatgtatgattatgctcatccattgtctgatgcaattgaaggaatcacgcattcactttgtacattggagttccaagatcaccgtccattctatgactggattgttgaaaaggttaagtctaaagctgttccgcaccaatacgaatcatctcgtttgaatgtagattacaccattacttctaaacgtaaattacgtaagttggttgaaggtggttatgtaaatggttgggatgacccacgtatgccaacagttgttggtatgcgtcgtcgtggttttacaccagaaggcttacgtgatttctgtaaacgtgtaggtgtgtctaaaactgacggtattgttgatgttgcaatgcttgagttctgtattcgtcaatctttggagaatacagcagcgcgtggtatggctgtgttagatcctttaaaagtgacacttacaaacttaccagaagatttagaccttacacatgcgcgtcatccaaatgtcgatatgggtgagcgtgtcattccattaactaaagaaatctatattgaccgtaaagattttgaagaagtaccgccaaaaggctttaagcgtttaattccggatggtgaagttcgtttacgccatgcatatgtaattaagtgtaatgaagtcattaaagatgcaaatggtgaagttgttgagctgaagtgttcaatcgatccagacactttaggcaagaatcctgaagggcgtaaagtaaaaggcgtgattcactgggtatctgcaagcaagggtattcctgctgaagtacgtatttatgatcgtttatttacagaggctgaccctgaaactggtgatgatttcttagcgaatttaaatccagattctttgaaagtcgttcaggctgtgattgaacctgctttagctcaagcgaaaccagaagaccgtttccaatttgaacgtgaaggttatttcgttgcggaccaacatgatcatactactgaaaaacctgtcttcaaccgcgttcttgatttgaaagacagcttcaaacctgagaaaaagtaa

SEQ ID NO: 54662 - DNA, 705 bp, Acinetobacter baumannii
atgctgctggaaaaaattttgcaatcacaagggtttggttcacgtaaatattgccagcagttaataaaaaatggttctgtaagtattgagggagagattgtcactgatctcaaaaaacagttttctcctgaaaatttagaattttctttgtttggggaaacttatcgatatcgggaaaaagtttacctcgctttaaaaaagccgcaaggttttgagtgctcacacaatcctcagcatcatcaaagtgtttttagtttattgcctgaaatcatgattcaacggggtgtacaagcaattggccgcttagatcaagatacaacgggcttactcttactcactgatgatggtaaatatttacaagctttaactcatcctcgtaaacacgtcccaaaggtttatcatgtgacgactattgattcagtcacacctgagcaaattgaaatgcttactcagggggttaatttacaccaagaaaaagatgtgtttgctgcgacagatgtagcactactagggtctcatcaattaacaatgaccattcatcaaggcgtttatcatcaagtaaaaagaatgattgcagctgttggcaataaagtcgaaaaattacatcgacatcaaatcggtcaattggtcttacctgagattgaggaaggggattgggtatatttgtcggagcaggaaaagcaactcgctcaaaatattatttaa

SEQ ID NO: 54663 - DNA, 219 bp, Acinetobacter baumannii; identical to SEQ ID NO: 51685

SEQ ID NO: 54664 - DNA, 453 bp, Acinetobacter baumannii
atgctcgcccaatttgatgttaatttagttgtcttattagttctacttatctgcggtttactaagtcaaaatgcagctgtaacgattgccgcaggcatcttaatcgtcattaaaatcacaccattaaatcaattttttccttatattcaagctcatggtcttaacctaggaattctcattttaaccattggcgtactgactccaattgccagtggtaagcttagcggagagagtattttaaaatcctttataagttttaaatctttgctggctattgctattggtctacttgtggcttggctaggtggacgtggtgtgaaactcatgtcaagccaacctgatgttgtggcaggcttacttattggtacagttgcgggcgttgctttactccgaggcgtccctgttggtcccctgattgctgcaggcttgctgtccttattcattggtaaataa

SEQ ID NO: 54665 - DNA, 921 bp, Acinetobacter baumannii
atgttagaaattcgtcatcttaaaactttggttgccttacgtgaacatggttcacttgttgcggctgctaatgatctgtgtttaacaccgtctgctatttctcaccaattaaaagaattagatcattggtatggtgtagaagtggtgaatcgtcgaagtagacctgttagtttttcaaatgttggacagcgtttactcaaattggctgatgatgtattaccacaaattcagatcacacaaagcgacattacgcgaattgttcatgggcaaacaggcagaattattttttcctcagaatgtcatagctgttttgactggttaatgcctttattaaatcaatatcgacagcagtatccagacgtagacttagactttgcttcgggctttgaagcaaatccacatgagcttttacaaaatggtgagtttgatttacttattacagccgatccgatcgcattaaaaggaatcgagtattttccaatttttgaatatgagtcgcgtttggttttatcaaatactcatcgattggttcgtgctgaacatattacagttcaagacttagctgaagaggttctcattacttatccggtagataagcaccgtttagatattatgtcgaaactatttataccggcaaatattcaaccaaaacagattcgaactacagatttaactcaaatgttgattcaacttgtagcgagtggtcgaggcattgctgctttaccagactgggtagtgaatgaatatgaacaaaagggttgggtaactagccgccgtttagactgtgtttctgcaacgggtttaagacgtacattatatgcaggctaccgaactgaagaaaaagagaagagctattttgaaggatttttaaagcagttagaaaagttctctttaaaacgtaatgcctattattctggataa

SEQ ID NO: 54666 - DNA, 429 bp, Acinetobacter baumannii
gtgagaaaattaagtattgcctgccttatgggcttggttatgttatctatgtctggttgctcagtctttatggcgggtaatcaaccaagtaaaaaaaatttaaatgttttaaatccgggtagttctcgcaattatgttattgccgagtttggagcacctgtactttccgaatatcgtgatggtacaagagtcgaaatttatactttccagcaaggttatccaaaatgggctaaagtaagccgagcatttggccatggcatagcagatgttgcctcatttgggttatgggaagtatttggaacaccaactgaagcatattttagtgggaaagaaacctcttatgaagtaacgtatgggcaagatgacttggtaaaaagctttaagctcatcgattttgagcaggcatttcctaaagcaaaagcacaatga

SEQ ID NO: 54667 - DNA, 1200 bp, Acinetobacter baumannii
atggcttcaccccaatccccttcatcttctcctcaaaactactcgctcttcttggcaattttttcactcgcaataggcggtttctgtatcggcactacagaatttgtcgcaatggggcttattcaagaaattgcacacaatttaaagatcactgtacctgaagccggacattttattagcgcttatgcattaggtgttgtgattggcgccccgattattgctattttgggcgctaaagttcctagaaagactctattgctttgtctcatgctgttttatgggattgctaatgcctgtacagctttagcacatacgccagaaacagttttaatttctcgttttattgcgggattacctcatggtgcatattttggagtcggtgcccttgtagctgctgaactcgcaggcccttcaagaagagcttcagcagttgcacaaatgatgatgggtttaacagttgctactgttattggcgtacctttagctacatggttaggccaacattttggttggagagcaggttttgaattttcagcaacaattgcattttttactttaattgccgtagcttgctttgtaccgaatattccagttcaagctactgccagcataaaaacagaattggctgggcttaaaaatataaatatgtggttaacccttgcagtcggcgcaattggctttgggggcatgttctcggtatatagctatgtctcaccaattctcactgaatacactaaagttaatatccagattgttcctattgcattagcgctgtggggcatcgggatggtgattggtgggttagccgcgggctggcttgcagataaaaacctcaataaaactattgtgggcgtacttattagctcagcgattgcattcgtagttgcaagctttctgatgagtaatatatatagtgctattgcttctttattcctaatcggacttaccgtgatgggtttaggtggagctttacaaacacgcctcatggacgttgcaggcgatgcccaaaccctagcagcttcacttaaccactccgcctttaatatggccaatgcattaggagcatttttaggtggttgggtactgagccatcagatgggctggattgcaccgatctgggtaggtttcgtactaagccttggtggtcttattatcttgctcatcgcatttgctgtagaaaaagcaactcaaaaagcctga

SEQ ID NO: 54668 - DNA, 984 bp, Acinetobacter baumannii
atgcgaattttagcttggaagagattacgtaaattcttctataacaaccttcatgatcatgattacgaaacaacagtcagtaggtgtataaactactttttggttttcttaattattgggaatgtcattgcggtattgctagaaacagtaaatgatctgtattacagctatcgtatatggtttgactactttgaaaatatttcaattgcaatttttagtgccgaatacctcttacgcctctggagtgtagtagagcgtgatccgacacaagctgcatggaagcagcgtttagcatggatgaaaagcggagaggcactgattgacctcatggcaattttgcctgcgtatctaaatttctttgtacgaatagaccttcgtatgcttagaattttacgattacttcgactattaaaattaactcgctattttatttctttgcaaatattgctatgtgttattaagcgagaaaaaggttcttttcaggcagtgatttttattttaatcattatgattattatgactgcctctggtatttatgtggttgagaataaagcgcaaccagaagcgtttagctctattcctaaagcaatgtggtgggcggtcgttaccttaaccacagttggatacggcgatgtcacacccgtgaccagtttaggaaaactactaggagctttaattacaattttaggggtagggattgctgctttaccggctggtattttagcttccggtttagctaatgaacttaaccaacggaatcagcgccttgaacaagagtttcgtgagttacttcaagtgcgtggtattgacatcatgcatgatgaagctgaaatagaacgtattcgacaaaaagtgggactaccgaaagaacaagcgcataatctgattatccaaatcatgcgcgaaaaagtattagaagagaaagaatctgtgagagagaagaaatgctattgtccacactgtggtgaaaagttaacagattag

SEQ ID NO: 54669 - DNA, 435 bp, Acinetobacter baumannii
atgctaaagacaattgttgaatttaaatttgatgattatcagctatatgatcaaaatttatcagcagaagacggaaatacgttagtacagaaaacggaagatattgcacagtatatttatagtatattgaaaaatagatatcacttaagtattgaattaaatgctgaacgctgggggtgggaaatagaagtaccattacctgagatcacgatgtatatcggtattagtgtttatgaagaatatagtaatggctttgcgatattcatttcaccgaatacgccaattttgagaagatttctttttagaaaattagatattactcaccatattatgctgcttcaaaattatattaacgtcattttgaagtcacatgcgggtatttatgatgtgcaatggtgggaagaaaatgagtttagatatgttgctgctcattaa

SEQ ID NO: 54670 - DNA, 2640 bp, Acinetobacter baumannii
gtgctagaagcttaccgccaacacgttgctgaacgtgccgcactcggagtcccaccgaagccacttgatgatgctcaaactgctcaacttgttgagttattaaaaaacccaccggcaggtgaagaagcattcttggttgatttgcttgaaaaccgtgttcctgcaggtgttgaccaagcagcttacgtaaaagcagctttcttggcagcgattgcaaaaggcgaagcgacatctccgctagtttctaaagaacgtgcagtttatttactaggtacgatgcttggtggctataacgtagcgcctttagttgagcttctagatgatgctgaattagcaagcttggctgctgaagctttgaaaaaaacattacttgtatttgatgcgttccatgacgtagctgataaagctaaagcgggcaatgctaatgcaaaagctgttttacagtcttgggctgatgctgaatggttcactagtcgtaaagatgtaccagaagaaatcaaaatcactgtgttcaaagtaacaggtgaaacaaacactgatgacttgtctccagctcaagatgcatggagccgtccagacatcccattgcatgcaaatgcaatgttgaaaaacgagcgtgatggtatcaaccctgaaaaaccaggtgaagttggtccattaagccaaattaaagaacttattgctaaaggtaatcaagttgcttatgtaggtgacgttgttggtacaggttcatctcgtaaatctgcaacaaactctgttctttggttctttggtgatgaaatcgctcacattccaaacaaaaaagacggtggtgtgtgtttaggcggtaaaattgctccgatcttctttaacacaatggaagatgctggtgcattaccagtagagatcgatgtttctaacatgaacatgggtgacgaagttactcttaaaatcgatcatgctgctgcaaaagttactgcgttcaaaaatggcgaacaaatcgctgagtctgaacttaaaactccagtacttttagatgaagtacgtgctggtggtcgtattaacttgatcattggtcgtggcttaactgctaaagcacgtgaagctttaggtttagctccatctacattattccgtactccagtacaaccagctgacactggcaaaggtttcactttagctcagaagatggttggtcgcgcatgtggtctcccagaaggtcaaggtatccgtccaggtacttactgtgaacctaagatgactacagttggttctcaagatacaactggccctatgactcgtgacgagttaaaagacttagcttgcttgggcttctctgctgacttggtgatgcaatctttctgtcacactgctgcttatccaaagccagttgacgtacaaatgcaacatacacttccagacttcatcatgaaccgcggtggtgtatctttacgtccaggtgacggtattatccactcttggttaaaccgtatgcttcttccagatacagtaggtactggtggtgactcgcatactcgtttcccaattggtatttcgttcccagcaggttctggtcttgtagctttcgctgctgcaactggtgtaatgccacttgatatgcctgaatcagttcttgttaagttcaaaggtaaaatgcagcctggtatcactttacgtgaccttgtacatgcgattccttactatgcaatcaaagaaggcgatcttactgttgagaaaaaaggtaagaagaacatcttctctggtcgtatcttagaaatcgacttaacagaaatggaaactgacttaacagttgagcaagcattcgaactttctgatgcttctgctgaacgttcagctgctggttgtgcaatcacactttctgaagagaaagttgctgagtacttacgttctaacatcacaatgcttaagtggatgatttcacaaggttatggtgatgcacgtactatggctcgccgtgttgaaaacatggaaaaatggttagcaaacccaagcttacttaaagctgatgcagatgctgaatacactaaagtgtatgaaattgacttgtcagaaatcaaagaacctatcctttgctgcccgaacgatccagatgatgcaaaacttctttctgacgttcaaggcgacaaaattgatgaagtattcattggttcttgtatgactaacattggtcacttccgtgctgctggtcagttacttgagaaagtaccaagcggttcattaacaactcgtttatggttggctccaccaacacgtatggacgaacatcagttaatggaagaaggcttctataacacttatggccgtgctggtgcgcgtacagaaatgcctggttgttcattatgtatgggtaaccaagcacgtgttgcgccgaacacaactgttgtttcgacttctacacgtaacttccctaaccgtttaggtcaaggttctaacgtttacttagcatctgctgagcttgcatctgttgctgctgtacttggtaaattaccaactccagaagaataccaacaatatgcagctcaaattgacagtatgtctgctgacatctacaaatatttgaatttcgaccaaatgggcgaatatacaaatgctgctgataaagtagatactaagaaaattgctgctgctcaattgacttaa

SEQ ID NO: 54671 - DNA, 360 bp, Acinetobacter baumannii
atgaaaaaagttttatttgttttgatgggaatgttgttagtcggctgtacagagaaaaaacctttaacacctgaagagcaatggcatggcttttgtaccagtgttgggaatgcagctagaagtattgtatttgaccgtcagcaagcaattgaaaagtctcaagcgattgaacatgcaaataaaatcgaagatgagatcaccaaaaaattcatcttgaatattattgaaaaagtttatgctattccacaagatgaattaaaaactaatccagaagccctgcaagaaaaaattagaaaacaaatggcagatgagtgcttggttacaccacacgacaaaatgccaaactataaaaagttctaa

SEQ ID NO: 54672 - DNA, 1236 bp, Acinetobacter baumannii
gtggaaaaagatacttgtgttgaaattagagatagcaaggttaacgatacaaatattaaatatcgtggactcattcagaaattaacagcaacattatcattgtcctttttgtcacttgggtggggctccacagtgaatgcagcagaacaacaaatcgctttagtcggaacttggacatcgattcctgatgcaccacttgttcaaaaaccggaaaaggccagtgaaggtttatatcaattgcaagttaatgctgacgggactctaactccggttaaagtgttaaaaatgaaaagtccatcttggattgtgaaatctaaagatggtcgttttgcatatacaacaaatgaagaaaatttaggagaagtcactgcactatcggttcaaaacggaaaggtagaggttttgaacacggtgaatagtcatggtggacatccaactcatgcctcaattagtttagatggtaaattcctgtttgtgtcgaattattcggcatttgataaaggtcgtggtggtgtggctgtttttccaattttgccgaatgggcatttgggtgaaatggtacaaaatattgttttttcggaaggttctggtcatgttaaggggcgtcaagagagtggacatgctcattcgacaacttttagtccggatggtaagtatttatatgcaagtgatcttgggaatgacaaagtctatgtctttcgttataacccaaacaaaacgcaaccactcgaagcggataacggtcgagatgtgacgtttaaccatggctctggtccgcgtcatatggtcttttcatcagatggtaagcatgcatatgttaccgccgaaatgcgaagtgaaattgtgacctttaatgtgcaagatggctatttgaagaaaactgctgagttaaagctagttcatgaagacaaaacgcccgaatttaagagtgcaagcggaattattcttagtccagatggcaaatatgtgatcgctgctaatcgtggctcagacaacaaactcctcgtatttaaaattcaagaggatggattgctggctcaaccgactgtttataaagctaatggtattgaaccacgtgctttctcattcgatgcaactggtaaatatctgtatgtaacaaatgtttttactaataatattagtttgttccgctttgatgccaaaaacggtaccttaaaatcagttggagatgctgcaaaaatatcaacacctactgatattaagttttttaattaa

SEQ ID NO: 54673 - DNA, 2727 bp, Acinetobacter baumannii
atgccttctaaaattaagtttaaacagtcaactctttctcactctatgcatttaatcctaaaaatgcagagtatacctaaacttatttgtagcagcctattgttaagtttatgtgttaatccttgttatgctcaaagttcagctgagaccgtaacgccggtagcaaaccagtcagtaactgatccatcattgcaacaaacaaatacaaataaccaaaatgatgttccgattactgatgtcgctactctggtaactcaagcacagcagcaacaagatagcttggctatattgcaacaacaagaacaatttccaaatcagattgaagaatttaagccaattacgctcgataacctcgaagatttacccgtgatgcctgttgaccagaatatggcaaatgagatttatcgggtagcagaagaggcaaaaactgaagctcagaacttccaaaatggcacacaaaaacatccagaaatggtagtgaatgatgcatcacaagcagaattacatgaaattaatcaggcgcctgtaaatattgaccaactcatgcatgagattcaatctgatagtaagattgtagtcgaagctaatgaaactggaaaaactttacctgagcttacagctgctactgaagagccgccggaagaaaaaggtttctttaaacggatatttaataaaattcgtccaccgcgtgtgattccgatggagcaaatacctcgtattactgctgaggttacgggtgctccagacgatttggctaaaaatatcaaaggtaaattatctacatttactcaagaatcatttgaagattttaattcagcattgcctcaacttaggagcctaagcaatcaggccgctcaagcggtggggtattacaatgctgagtttcgttttgaaaaattaagtgcaagccgtgttcgagttaaagttactccaaatgagccggtacgaattaatgaacaaaatattgaattcagtggagcgggtgcaaaacaaccacagtttcaagttattcgtttagttccagaccaagatgttggtgatatctttaatcatggtctgtatgaaacaactaaaagtcgaattgtcgatgccgcaacaaataatggatattttgatgcctactggcgtttacacgatgtaaaagtaagccaacctgaaaacaaagcagatattaacctcaaatatgaaacgggtgagcgatataagctaggtaaggttgagtttcgtatgagtgatccttcaaaacccttgccaatcaaattaaatattcttgagagtatggcaccttggaaagagggcgatgactacacattctggcgtgtaaatgctttagccaacaacctgacgaactctcgctattttaactacacgctggtcgattcaattaaacctgatccaattgagaagccgcttgaattacccccagatttacaagcattagtcgatcagcaaaatgtcaccattgatgaatcaaaattgctttctccagagcaacaacagcttgctaaagcacgacaattagcctcatctagtaaagaggttagtcaaaatgtggtagacgaaaaacaatttgccggaactgaaaatgtacaattagctgcagctccagcttctttgaaaaccgcagcagcagattatgcagagcaagagtcggaacaagaccgtttacaagcccaagcacgtgaagaaaaacggattccggttattgtgactttaaatgcggacaaattgaatagtctggaaactggtgtgggttatggtactgatacgggagctcgtttacgtagtcaatatcgtcgttcgattgtgaacgaatatggccactcctttgatgccaactttgaactttcacaaattcgtcagtctatagatggccgttatagtattccttataagcatccattaaatgattactttaacattgtaggtggttatgagcgcgagactagagataatatcggtcctgatgtgagtttattaactgaatctgccgtattgggtggtgagcgagttattaaaaaacctttaggcaattggcaacatactattggggttcgttaccgtctggaccgattgactcaaaagggaaatgtcgatatttctgaattgccagatgcatttaaaacagctgcatcagagcaagaagcgttattatttggttatgaaacctctaaaacatcaagtaatacaaggttaaatccaacgaaagcatttaaacaaagctataagttagaactgggaagtagcagtttactttccgatgccaatatggcgattgcaactgcgggttggagatttatttattctttaggtgaaaatgataaccatcagtttgtgggacgatctgatcttagttatatttttaccgatgaatttgataaagttccctataatttaagattctttactggtggtgaccagacaattcgcggttttgattataaaagtctttcacccgaagaaaatggatataagattggtggacaggctctagcagtaggctctttagaatataactatcaattcaaagagggttggcgagcagctgttttttctgattttggtaatgcttacgataagaattttagtaacccgactgcctacagtgttggtgtcggtattcgttggaagtccccaattggaccaattcgtttagatgtggcttcaggtatttctgatgataatcatccgattcgtttgcatttctttattggtccacaactttaa

SEQ ID NO: 54674 - DNA, 1323 bp, Acinetobacter baumannii
atgatgaaacaagatgaatccctgatgacatcacgtcggtttgtaccgatgttttttacacagttttttggcgcattaaatgacaatgtttttaagcaagctttattgttagtcattacatatggttggattcaacaacaatctgcccctgtaagtacactcaataatttagcagcattattgtttattttgccatatttctttttttcagcaacagcaggacaaattgctgacaaatacgagcgctcacaacttgtgcgtggcataaaaatattagaaatcataatcatgcttattgggtctgccggtttcttattggggcatttatggctactgcttctggctttattcttaatgggaacacattccacttttttcggacctattaaatatgcaattttgcctgaaattttaaaaccaaacgaacttatgtcgggcaatgccttatttcaatccggtacatcgatggcaattttattcggcatgatcttaggtggtgccgtaattgcatcatccgaaggtaatttactatggattagtctgactgtagtcgctattgcttgcataggctatttatttagccgcttcattttaccacaaaaagttgctgcacccgatttagatattgattggaactttattcgtacaagcttccaaactattacatatgccaaaagtttaccgttagtgttcaccattttattaggtaattcgtggtactggttttatggggcgacttatttaacgcaaattccgcagttgactcagcaaaatctccattcatcagaaaatgtagttagcctattactcaccttcttctctgtcggaattggggtaggttctcttctttgccgtaaaattggtggttcggaaattaatattaaaatggtgccgattggtgcaattggccttactgtttttgcgctttaccttgcagcgagtctagcctttgtaccggagaaaactggagcattactaaccttaaaagatattttcactcaaggttgggtttactaccatgtcatgattgccgtgactttattgggtattagtggcggtttttatattgttcctttgtatgccatgatgcaggcttactcaccgcgctcacatcgtgcccgagtggttgcagcaaataacattttaaatgctgtattcatggtttcgtcagcaattttctcaatcttaatcttaagtgttttaaaaattgatattaaaatactatttattattacagctgtacttagtgcaatctttagtatctggcttcttgcccgactaaaaccaatgcttgccacagcacatctttctttggaggactaa

SEQ ID NO: 54675 - DNA, 636 bp, Acinetobacter baumannii
atgcgccactatacgggaattgatcaacttattaactcctttgatcaggcattacgtagtcttgttccaggtgcaacagcagcacagcgacaaaatccggctgaaacggctgaaacaaaacttggagttgaagatgctcgccatgttgcaggcttaatgcgtgttaaccatagtggtgaagtatgtgctcaagcgctttatcatgggcaagcattaacggcgaaattaccaaatgtacgccgcgaaatgcaacaggcagcaattgaagaacaagaccatctagcttggtgcgaagaccgtttaaaagagctaaacagccatacaagtttattgaacccgatttggtatggcctttcatatggtatgggtgctcttgccggtattgcaggtgataaatatagtttaggttttgttgctgaaactgaacgtcaagttagtctacatttgcaagatcacttaaaccagttacctgctcaagatgaacgctctcgtaaaattctagagcaaatgaatgaagatgaattacatcatcgtcatactgcgcttgaagcaggtggtgttgaattaccttatgcagtaaaaatcagtatgaccgctatttcaaagttaatgactaaaacgagttattacctttaa

SEQ ID NO: 54676 - DNA, 549 bp, Acinetobacter baumannii
atgaaaaatatcggtttagccattttagcaatcagcctttcaggttgtgctgcaatgagcgtagaagaatgtaagactgcgaattggtcattagtgggtgagaaagacggttcaaaaggttcttcgccgcgtttagatcaatattataaagcgtgtgggaaagctaatattgttccagatcaaaagtcatatgaacgtggatataaagagggcttaggatattattgccagccatcaaatattttttataacgccttagaagggagcgggaatattaatgtctgtccaatcgagcagcgtgatcggttaagaccttattatcgtgcagcttccgattactacaatgcaaaaaatgaatacgatcgttatgacgagaagtttaagcaatattctgatagcgcttataacgaaaaattaaagccagaagagcgtgaacgttatcgtaagcttttaagagaattacaaattgatcgtgaccgtattaatagaaactattggaattcaattcgagatatcgaacgtttcaaatatgatcatggtttaaaataa

SEQ ID NO: 54677 - DNA, 1425 bp, Acinetobacter baumannii
atgagtacgcttatttacccaaatttaaacttaaaagattctcactttaaggcatttaaaatatcagatgattttattccacaaacgcacgtacatacgttcaactcagagctttttttaaaagaagttgatgaatatttaaatttatatcctcagactcagcacattgatatttgtctacatgacttaaacgggcatattcgtggtaaacgaattgacgttaaaagcctcaaaaatctctctcatggatgttattttccactttctgtttacgccatgagccttgatggaaaagtaattgaagagacaggattaggaaaatatattggtgaaccagatagactttgcctgcccattttaggcagcttgcaaccaagtgccttatcctcagaattaaatgctcagctttacctatcaatgcaagaagaagatggtacagactgccgctatgaaccacgcaatatattaaaaaaaatattaaatcagttacatgccaataattactttcctgtcatggctgccgaattagaattttatcttttctcacctcagcatcaggctgaaacctgtatagaaaaccaatgttttgatatagatgcacccaataactatcaacaagtcctagatgaggttgaaaaagctgctctactacaatctattgaaattaccgcgattgttgcggaatcatctcctggacaatatgaactaaatcttcaacacagccatgacattttgaagctatgcgatcaaattaatgctttaaaaagaattgtaaagcaagtcgcaagaaagcatgacttaactgcttgtttcatggcgaaacccaacttggcaaaggctggaagcggcatgcattttcatatgagtatgcttaatcaataccatgagaatatatttagttcagttgaagagaaagatgaactttctaccaacttactcagtgcaattagcggacttattgagctaatgcctgcatctatggcgattttagcgcctaatattaattcttatagacgttttaaaattgggcatcatgtgccattagaagccaattgggatactaataatcgtaatgtcgcaattcgtattccgtgctcagatgtacaaaatcaacgcttagaatatcgtgttgctggcgctgactgtaatccctatctggttacagcaactattttagcaggtgtatcttacggcttatctcataaattaccactaccaaaacctgctcatcttttaaaatttccagacgagcatattttattagctaacaatcaaccagaagccttaaaaatatttaaaggaagtcttattttaaaaggatatttaggcactgactttgtcgaacattggtacacggttaagcaggctgaatatcaaaacatttatagtcaaatgactgaagcagaacaacattgggatatataa

SEQ ID NO: 54678 - DNA, 717 bp, Acinetobacter baumannii
atgataagttcagaaacgtcacctgtagaaacacgcattgtgattattgatgatgagcctcaaattcgtaaatttctagacattgctttaagaactcaaaaatataaaaccacgctctgcgaaacgggttacaaaggcctagaagctttagcaacgcaaggtgccgacttagttattctagatctgggcttacccgatttagatggaaaagaagtgcttcaagaattacgtagctggtcgaatgtaccagttattgtgctatctgtacgggctgacgaatacgaaaaagttgctttgctagatgctggcgcaaacgattacatgaccaagccttttagtgtgcaagagcttttggcgcgcatacgtgtcattttaagaaaccaaccgattcagcaagaagctcatatctatgacgatggttatcttaaagttgatgttacgcaacgtttggtttgggtcgagcaacaaccaattacgttaactcgaaaagaatttcaacttttaacgctattaatgcgctatcaaggacagcttttaacccagccacagctcttaaaagaactatggggcccaactcatcaggaagatacgcactatttacgtattttagtgggcaagttacgcagtaaactgggggataacgcaattcagccacgctatattgcaactgaacctggtgttggattgcgttttttagctaaacagaaaaatcattaa

SEQ ID NO: 54679 - DNA, 2655 bp, Acinetobacter baumannii
gtgcaaagcaatcgcgaaaatcaggctgaggccttattaaatcatgtaaatagatatcaagccggtcgactaacagtctttctcggtgcagcgcctggtgtcggcaaaacctatgctatgcttgcccgcgctaaagagttatttcaacaaggtacagatgttgttgttggtattgttgaaacccacggaagaatagaaactctaaaaattttggaaggcttgcctcaaattgctagaaaggaaatgcaatatcaggggcatactttagaagaaatggatttggatgctattttactcaggcatccggaaattgttttagttgatgagttggctcatcgcaatatacccaatagtcgccatgaacgacggtggcaagatgtcaatgaattactagatgcgggtattgatgtatttaccaccatgaatattcagcatttagaaagcttaaatgatgtggtacatcagattacgggcattcgagtaaatgaaactgtgccagatcgggtgtttgaccgtattcgagatattcgtttaattgatttacctgtcagtgaactcattgaaaggctccatcaaggaaaagtctatgtgccagagcaagcgaatctggcattacaaggcttttttagcatttcaaatttaactgcattacgtgaactggcaatgcaatgcgttgctgagcatgtcgatttagatttaaaacagagttatacctctaaaggcttgaagtctatctcgctacaaaatgaattaatgattgcgatagatgggcaaggctcttctgaatatttagtacgggcaggttgtcgattagctgaacgcaatggagcaacatggactgtagtgaatgttgctaaaagtttggattctgggcagagttcagcaaattcatataaaaaagaatatattgaaattgaccgtgcatttgaattggctcgacaacttggtggtcgaaccgaagttttatatgggccacgagttgcttcggtgttaatggatgctgcgcttgatcgaggtatttccaatgtggtcattggcaaaagtatttcaccgtggtggttaaagttatttaagaaaaatttagctcagcaattattaaatcaagaaaactcgattgctttgacgattttacacccagaacagggcactaaaaagacagctcaacttgagaagccatcatttttatcattaaaagaaagtgtttttgttttagcggtaacatgcgcaagtatttttatagctcactttgccgaagttctattgggtattgaagacttctctgtcatttttattatttcagttttaattgtagcaactaaaacccgaatgctcgctgcagtagtcgccgctcttatttgtttcttagcctataactttttctttatagcaccacgttttacatttcaaatttcagcacaccaaggtgtggttaccgttgttgctttttttgcagcagctttaattgctgggcgtttggcttctcaattacgtcagcaggttttatctttaaaagctgccaatgcctacaccacagtaatgcaagacttggcacgtaagctttctagtgcagtaaaccttgaagaagtcatgcaaaccggtcgtatgactttagaaacccagctgcaaactaaagtgtggatttctatccaagatagagttatttcatctgacatagaactaaatgataaagaaaaagtagctgcagaatggtgtttgaaacaccaacagccgtgtggacgttttaccgatacccttagtcaatcaaactggtggtttttaccacttttagagcagaaaaatagcctaggtatagtgggaatttactttaaagatgaagtggtttctctaaattttgagcagaaaaaactaactgaaagtgtaattgagtatattgcacaggcagcacttcgaacccaattggtcaatgaacttgaacaagcaaaagttaccagtgaaacagagcgcttacgttcagctttattatcttcggtatcgcatgatttacgttcaccacttgcttctattattggagccgcagatacgcttgccaattttaaagctgatatgtcagaacaagaccagcaagatttacttgaaacaattcatttagaaggtgagcgtctagaccgttatattcaaaacttgcttgatatgacacgcttaggccacgaaggcttaactttaaaaagagactggattggggtagatgaattaattggttcggcaacccgccgtttaaaacgctataaatcagatacgcaagtggtcgttcagttacctgagcaacaaattagtttatatgttcaccctgcactggtagagcaagctatttttaatgttttagaaaatgccgcaaacttttcacctccagatgaaccagtcatgattcgtgctcaactttcatcagaagatgaagtaaaaattgaaattgaagatagaggtgcgggaattcctgaagatgaaagacatcgtatttttgatatgttttatacgatggagcgtggagaccgtggaaaatttggtacaggtttagggcttacaatcgtaaaagcgattattggtgctcatatgggtacaatagaagcattttcagggcgccaaaataaaggtactttaattcaaatcagattacccattcacccagtaaaagaataa

SEQ ID NO: 54680 - DNA, 606 bp, Acinetobacter baumannii
atgaaaacttatgcacaaaattcagaagcaaatttgggtcagaccttaagagcatctttcggacttctaatttttactcttgtcagttgtggcgctgtttatagtgcgatcgctacaggcgcgggacaggttttatttcacaatcaagcgaatggtagtttgattgaaataaaccataaagttctagggtcaaaattagtcgctcagccatttgttggagaaacttattttcatccacgtccttcagcggttgcttatgacccaatgtctatgggggccacaaacttagcgcttactaatccagagctgcaaaaacaaattgatgcacagattcttgcggtgaaaaaacaagaccatacaggtaataaccctattccaagtgatttagtgactaaatcgggtagtggtatcgatccgcatattagtcctgaatctgctcaaatacaggttgccagagtagctcaagcgcgtcatttagaccctaaagttgtagaagagttacttcaaaagcatattgaaccagttcagtttggtgtactagggcaagctcgtgttaatgtattagagctaaatatcgctttagatcaattacaatctacacattaa

SEQ ID NO: 54681 - DNA, 1710 bp, Acinetobacter baumannii
atgttagaacttattcttgttttatttattgctatttttctagcatggtgcctcagtaaatatctatccaaagtgatggcaaatcagccgatggtgggcgatggattatttcgttggattgaaaatcctgtctatcgcttgttaggtatatctccgcaacaacaaatgaactggaaacaatattctttagcatttgttgttagctgtatttttttagctgtagccgtttttgctatttttatgacgcaagcatggctgccattaaacccaaatcatgcaccaaatatgagctgggatttagcattacacacggttatttcatttttaaccaacaccaaccaacagcattattctggtcaagctcaattatcttatttgtcgcaaatgacaggtattgtaggtttgcaagtcatcacaccaatgatgggactagctttagttgttgcgaccttaagagctttcttttatcaacgtcctagccatattgcggccgatgttgccgaacagccagatcaaattttaattggtaactattgggcagatgtaatacgccctacagtccggttcttgcttccactctgttttgtttggtcattgttgcttaacagccaaggcgtgccagcaacttttcagggtggaccggaagtacagcttattgataaagcgaatacagtacaaacccaaaaaattccattaggtccagttgcaccgatggttgctgttaagcaattgggtagtaacggtggcggctggtatggtccaaatagttctgtgcctttagaaaatccaacgccactatctaatttattagaaatgatagcgattttactcattccaattacagtcgtttttatggtgggacattttactcgacgcaaaaaatttgcctattttgtgtttggtagcatgcttttaatgtcggttatttcaggtgcagcagctgtctggtctgaaagtatgtcatcgaccgcatctcaaattgcagtaatggaaggtaaagagcaacgatttggaccagcagcatcagcagtttgggctgcgctgaccacacaagtgaataatggttcggtcaatatgatgcacgattcttctgcgccacttactgggctggttgaactcattaatatgttgattaatgccatttggggtggtgtgggctgtggtctgcaacagtttatgatttatctgttactcgctgtatttattgcaggcttaatgacaggccgtacacctgaattgtttgggcgcaaaattgaagcagcagagatcaagttacttgcgattattatcttaattcagcctcttattattctggcttttacagccttgagtcttagtattccgggattatcaggtatcacaaaccctggaccacacggtattagccaagtgttctatgaatatgtttctgcgtttgctaataacggttcaggttttgaaggccttggagacaacaccgtatggtggaatgtcacttgtagtcttgctcttcttttaggacgcttcccgacattaattttgccattaatgattgcgacacgtttagcagcaaaaagaaaagcacccgaaacaacaggtagccttcaggttgaaacgccaacctttgccttaacgctgattacgattgttgtattgcttaccttattacaatttatgccagttcttgtccttgggccaattgccgatcaactgttgttggttaaaggctaa

SEQ ID NO: 54682 - DNA, 438 bp, Acinetobacter baumannii
ttgaacgcacccgaaacaatttttgcgctcgccctagcgagtaatttagacgcagatcagcactttacttttgcgtatacgcaattagcaactttggggaaagtgcagttttcatctgtttatcaaattccatgccgagatggtattggagatgattactggaattcagcatgtctgttaagaagtactttatcgtctgaacaaattgaatcttttttaaagaaacttgagtcagattctggacgtgttcgaccatcgcatcatatttctttagatgtagatttgattgcatggggaaatgatctggataatatgcaatttaattctaaaaaattgccgttagcactcgatgtaaaaattcctttatatgaactttggcattgtgagaccttaaaggctgatagaacactttatccagtcgttaattttaaagtttaa

SEQ ID NO: 54683 - DNA, 381 bp, Acinetobacter baumannii
atggatgccattattattgaaggcttgaaggttgatacagtgattggctgtttcaactgggaaagacaaatcattcaacctttaatgttggatttaaccatccataatgatttgagccgagctgcagcgtctgacaagcttgaggatacactcaactatgcgcagatttgtgagttatcggctcaaaccattcaacaagctaaacctgaattaatcgagcacgcagctcatctggttttgcaatgtttatttgaaacctttccaacaattgaaaaaattaccataaccatccgtaagccagccatcattgcagaagcaaacgctgtaggaattcgtcttgaacgcacccgaaacaatttttgcgctcgccctagcgagtaa

SEQ ID NO: 54684 - DNA, 1299 bp, Acinetobacter baumannii
atgaaaaaaaatattttatttgatggattgcgctcagttgcccgtatcggtgaaaccgcagtagttgcggctaaagctggtattaagtacgcaactgataagccaagtaatgccaaactcatgcgtgagacttttgagtcgcttggctcaacatatattaagcttggtcagtttatcgcgagtacaccatcgctatttccgcgtgaatatgtagaagaatttcaaggttgtttggatcagactccaactctgccatttagctatattcaaggcgtacttgcctctgaatttgaagggcgtgatttaagcgagatttttagttatatcgatgaaaaacctttagcttctgcttcaattgctcaggttcacgcagctaaactaacgacaggtgaagatgtcgttatcaaagtacaaaaacctggcgtagaaactattttatacactgacttaaatgtggtgcattgggctgcaaagctgcttgaacgtgcagtccctaaaatcaagtttgctgctctttctgacattgttgatgaaattaaaactcgtatggtgcgtgaagtcgatttcattgaagaagcccagaacttagatgactttgtggaatatttaaatatttcacaaaaccaagctgcgacagcccctaaagtttatcatcagttttctacacgccgtgttttgaccatgcagcgtttatatggtgtgtctttgacagattttagtgtcgtgaaacaatatgctaaagatccgtcacaagtactcattactgccatgaatacatggtttggtagtcttatgctctgtaagagtttccacgctgacttacatgctggaaatctaatgttgcttgaagatggccgaattggttttatcgatttcggtattgtgggtcagttaaaaccagaagtctggacagcatgtatcgcgtttatggatgctttgcaaaagactgattatcaggctatggctgaaaatatgctcaaaatgggtatgacccataacaaggtcgatgttcaggttttagctcaagatttagagcgtttgtttaatggcgtattaatggccgatccacagcagattctgtctactaatcctgccgatttaaacgacattatgatggatatggtgagtgtaggtgagcgccacggtattaaattccctcgagattttgccttattatttaagcaaatgctttatttcgatcgttttatgcgcgtactcgcaccatatactgatatttatgcagaccaacgtttgaaaatggttcaaaatatggaacctacttcgttgttaaagcactaa

SEQ ID NO: 54685 - DNA, 777 bp, Acinetobacter baumannii
gtgaccgagcttcaagatatcgattttgtagagttaagtgatgaagaaatgcatctctatagccgtcagattttacttgatggatgggatattgaagctcaggaaaaactcaaacttgccaatgtgctgattgtgggtgctggtggcataggctgtagcagtgcagaactacttgcacgagcaggagttggaaaaattacactcattgatgtagataccattgagataagtaatttacaacgacaaattgcgtttggtcatgaagatattggtcattataaagctgaagttctagcaaaacggttacagaaaattaacccttatatctgtgttgaatactttaatgaacgtttagacgaacataacattgatagacttgttgaacaccaagacgtcgttttagatggttgtgataactttacaactcgctatttagtgaatagtgcttgtaaaaagcatcaggtcgcattaattagtgcttctgcaattggctttcaggcgcaaatgtttatggttgaaggtgattcagcttgttatgaatgtttatttccaaaagaacagcatgacaatgaaggccttcgctgtgcagagtcaggagtgcttgcaacgactcctgtaatgatagcgtcattacaagcacatcacactttactttatttagggcttaatcgcactcctctgaaacagaaactgttactttgggacggattaaatatgtcacaacgtattgttaattttgataaagatataaattgtccactttgtcaggcaagctaa

SEQ ID NO: 54686 - DNA, 579 bp, Acinetobacter baumannii
atgtcccaatcatatattgcaccagtagagttagaaaaagcttatcgtttattaaatcatggtccaactgtgctggtttctgcacaacatggtgacgaccgcaatgtaatggctgccgcatgggcatgtgcattagagtttaaacctgccaaagtgtctgtagttttagataaaagcactaaaacccgacagcttgtcgagcaaagtggttatttcacactacaagttccttgctatgcacagctcaatatgaccaaacaacttggtaccattagtaagttggatgacccacaaaaacttgagcactgcggagttgaactattttatcaaaaagatctgaccagtccgcttgtatcaggttgtatcgcatggctggtttgtaaacttattcctgaaccgcataatcagtcagctcatgatttatttattggctctgttgtaggtgcgtgggtagatagtcgcgtttttagagatgggcactggcattttcaggatgcaccaaaagaacttcgtagcctgcactatattgctggtggaacgttttatttaattggtgaagaagtgaaagccgacctctaa

SEQ ID NO: 54687 - DNA, 1644 bp, Acinetobacter baumannii
atgaaaactttggcagaagcttatcagcaatttgatcttgcaaaactcattgaagagcaacttgttgggcatccccaagcaataaatgcttatgttgagtgctgtgagccttatgtaggaaaaaataaaacagcgcttatttgggaaggaaaaaacggacagacagagcactatacgttcgaacaacttgctgagctttctggaaaacttgctaacttctttaaagcacaaggaattcaagctggagattgtattgcaggacttctaccaagaacgcctgagttattaattacaattttggcaacgtggcgcataggcgctatttatcagcctttatttactgcctttgaagcaaaatcgattgatcaccgtattacgactgctcaaactaaattgattgtgaccaatgatgaacagcgccctaaactgaataccttgaatgttccggttattgtcactgttcatcagactggtcctttgtctgagtatgacttcgatttttggcaatctttacagcgctattctgagcaatgtgagccagtaaatcgtagctttgaagatgactttttaatgatgtttacctcaggcacaactggacttgctaagtctgtacccgttccactaaaagcaattttggcatttaaaggttatatgactcatgctgtcgatttgcgtgaagaggatatgttctggaatttggcagatccgggctgggcgtatggtttgtattatggcattacaggccctttaagcttggggcatagcattattatggatgagcgttcgtttaatgtagatcaggcaattaagctaattaaaaagtataaagtaagtaatttaaccggttcgccaacagcatttcgtatgttttttggatttaaggaaaaatttgatccttcaattaaacaacatttacgcgtagtcagcagtgcaggtgagccattaactcctgaggttgtgaactggtttaagcaagatttagaggttaatatttttgatcaatatggccaaactgagctagggatggtgattgcgaaccatcatgcgcttgagcacccattaaaagtaggttcagctggttttgcaattcctgggcatcgttttgcggtgttagaccaaaattatcaagaattaccaacaggtggtgttggtattttggcgatggactcggagcaatcgccattaatgtggtttaaaggttatggtggcaataatcgcaaagcctttgttggtaagtattatttaactggtgacacggtcactttaaatgaacatggcggtattgattttgttgggcgtgctgacgatgtcattacaacatcgggctatagagttggaccattcgatgttgaaagtactttattagagtgtgaggcggtattagagtctgcagtaattggtaagccagatctggaacgaaccgaaatagtcaaagcttttgtggtacttaagcctgcttatcaagcgtgtgaaacattaaaagataagttacagcaatatgttcgtaaccgtttatctcgtcatgcttatccaaaagagattgagtttgtggatagcctacctaaaaccacgagcggaaaaattcaaagaggattattgaagcagcaagaaattgcaaaaatgcagcaagcttatgcgagttaa

SEQ ID NO: 54688 - DNA, 1137 bp, Acinetobacter baumannii
atgattctaaatgctgaacaaagcatggttcaggagatgatgcgtaactatgcgcaaaatcagttaaaaccaactgctgcacatcgtgataagacccatgaatttccggctcaggaattaaaagacttaggtgcgctaggcgcaatggggatgactgtgcccgatgaatggggcggtgctggaatggattatgtatctttggtgcttgcaattgaagaaattgctgcaggcgatggtgccatttcgacaatcgtaagtgttcaaaattcattggtttgcggtattacactggcatacggttcagagcagcaaaaacaaacctatttgccaaaatttgcctctggtgaatggctaggatgcttttgtttaactgaaccacatgtcggttccgatgcgagcgcgattttatgtaaagctgagcgagatggcgactattgggtgctcaatggtgtaaagcaatttattaccagtggtaaaaatgctcaagtggctttggtgtttgcggttacagataaacaggctggcaaaaaaggcatttcgtgttttcttgtacctacgaatacacaaggttacttggtcactcgtattgaagacaaaatgggtcaacatgcttcggacaccgcaaccattacgcttgaagactgccggattcctttagaaaatttggtgggacaagaaggtgaaggttataaaattgcgctatctaatttagcggctggtcgtattggtattgcggctcaatctgttggtatggcaagagctgcttttgatgctgctgtccaatacgcaaatgaacgtaaggccttcggtgtagagctggttcagcatcaggcggttggttttcgtttagccgatatggcaacccaaattgaagcggcacatcagctagttttacacgcggcaactttaaaagatgcggggctaccttgtttaaaagaagcctcaatggcgaaactctttgcatcaactatggctgagcgagtatgttcggatgcaatccagatccatggcggttatggctacgtcagtgatttccctgtggagagaatttatcgtgatgttcgtgtaagccagatttatgaaggtgcttcagatattcaacgtttggtgattgctcgtgaagtggctcaagtttag

SEQ ID NO: 54689 - DNA, 771 bp, Acinetobacter baumannii
atgaaaattcaaggaaaacattttgtgattacaggtggcggctctggtttaggcgctgcaactgctgagtatttggtaaagcaaggtgcctcagtcacgttggttgacatgaatgtagaagcaggtgagcagcaggcgaaacaattaggaccagaagctgactttgtaaaacttgatgtaaccgatgaagttgctgctgaacagttctttaaagatgtattggttaaacatggtcatttgcatggtttggtgaactgtgcaggtattggcccttctgcaaaagtagttggccgtgagggtgttcatgacttgggattatttgcaaagactttaaatattaatgtcacaggtacatttaacatgctgcgttttgcagcagatgcaatgagtaaaaacatggttggagaaggtgaagaggaccgtggtgtcattgttaacactgcttctgttgcggcatttgatggtcaaattggacaagcagcttattctgcatcaaaaggcgctattgtggcgatgactttgccgattgctcgcgagcttgcgcgacatgccattcgtattatgaccattgcaccgggaattatggaaactccaatgcttaagggtatgccacaaaatgtacaagatgctttggggcaaatggttccgtatccatctcgtttaggaaaaccagaagagtttgctcgtttggttgcccatattgccgaaaactcatatttaaatggtgaagtcattcgtttagatggtgcaattcgtatggcagcaaaataa

SEQ ID NO: 54690 - DNA, 1026 bp, Acinetobacter baumannii
atggttgtccaatcttctttaagtaaaggaacaatttcgattgcactggtacatgaagcattaagtgcggcttatgccaaagggctaaatactcaaattattttgaataaagctggtattcctactgaattactcatgacatccaaagcgcgtgttccagtagcaacgtatgcacaattatggatagaacttgccaatgccatgaacgacgagttttttggtatggatagccaccctatgcgccgtggcagctataaattacttacaaaactcgtcagtacggctgaaactttagaaaaggctctctacgatattttgaatttttttaattttgtgcttgatgatattcgtggagagttaattcgagaacaagaaaaagcttatttggtcattcgtgatcgtgaacaacctaaacgtatgtttacttacgcaacctttttaatgttagtacatgggcttatgtgttggctggtagatcaacgaattggcttaaaccgtattacggtacgttgtccaaaaccgaacgatattcaagattatttggtacgcttttgtgaagatatacaatttaatgccgagacaaatcagattgaatttgatgcccactatttagatattaaaattaaaaaagataaaaaagcgctttatgattttttagaacaaactccgcaaaatcttttagttcgctttaaaaatgaaaatgccttgagcgttcttattcgtcgtcatttattaaagcttcaccctgctcaatggcccgaactcaaagatgtggcacagcaactcaatatttctgaagctactgttcaacgtcgcctcaaacatgaaggggtgagttatcaacaaattaaaaatgaaattcgttgtgatattgcgattgaacgcttaagcaaaagtaatgattcaatacaagacattagtgaagacctaaatttccacgacccaagtgcttttcaccgtgcttttaaaaaatggacaggtgttagccccggtgcttatcgagataatttaaccacacacaagtaa

SEQ ID NO: 54691 - DNA, 975 bp, Acinetobacter baumannii
atgtctttaaaatcaaaattttctctaccaaagactttattagcatcaacattggggttcgtatttgcttcatctacttttgcagcaattccgactacacttaaacttgattacgcttactacgcaccgaccagtttggtggtaaaagatcaaaaacttctcgaaaaagcactacccaatacccaaattaaatgggtttttagtcaaggtagtaatcgttcattagaatatctcaacagtaatagtatcgattttgcttctactgctggattggctgcggtattaagccgagcgaatggtagtccaattaaaactgtttatgtacaaagccaaccggaatggaccgcccttgttatcgcaaaaaactcaccaattaaaagcctaaaagatttaaaaggtaagaaaattgcagctactaaaggaacagatcctttcttatttacactacaagcattagaaaccgtaggcttaagtaaacgcgatgtacaattggttcatttacaacacccagacggtaaaactgcattagagcgtggtcaagtagatgcttgggctggacttgatccattaatggcttcagctcaaattcaatcgggcgcgaaattactttatcgtaatgtagcttttaatagttatagtgtattgagcgttaaagaagactttgcaaagcaaagtcctgaagcggtagaagctgtgattaaagcctacgaacaagctagaaaatgggcaaaagccaatccagataaagtagcagcacttttagcacaagaatccaaactccctctacctgtggctaaactacaactgagccggaccaactttgatcaaagcatcccatcagcaactcaagcacaagcactaaaacgttctgggaaaattttgactgaagaagacttggtcagaaaaagcaccaatgtcaatcaagtggttgatcagttattagatccacgttttgctcaaaaagtcgtgaaatag

SEQ ID NO: 54692 - DNA, 840 bp, Acinetobacter baumannii
atgagtgattcacgtaacaaagctgagctaaatcatttaatagctcagcaggctttaaaatctcagaaaaagcatctaaacaacaaatttacacggtggtttaaagcgctactcattccactcatttttttagtgggttgtgagtttttagtcagaaatggctatatcaatacttatctgctccctgcaccttcgagtttatggcaatcttttttagatttagctcatagcgacctatttgcccatatttatattagtacatggcgtgttctattcggctttattataggaagtggtttaggtttaatttttgcgatttgggttggattaagtaaagaggcagaagcatatttagaaccaactttttcagcaattaaatcgatcccaagtcttgcttggattccattgttattgctttggttaggaattgacgaaggttcgaaaattacgcttattgcaattggagcattttttccaacctataccaataccgttgcagcaattcataatgtagataaaaagctcattgaagttggaaaagtttatcggctcaatgcttttcaacgtgttttatctattattttaccagcagcatctccgggcattttaacgggtttacgtaacagcttaaacttatcgtggatgtttatgattgcagctgaactgattgcagccactcaagggattggttatttactcagtgatggccgagaaacgtctcggcctgatatcgttatcattgcaattattttattggcactattgggtaaaataaccgatagcttaatgaaacttatagaaaactggttattacgttggcgtgatacgctacaaaaataa

SEQ ID NO: 54693 - DNA, 816 bp, Acinetobacter baumannii
atgaatattgctcaagcgcttgcaattcgtggtgagcctgacagttatgaacgacaagaaaatgcttggttgcttgagcattttctaaaaatcaattcactcgaattaaagttcagacttgagcaagagttaacggctcagcaagagcaagactacttggctggtcttgagcgtattcaaaatggtgaacctttagcctatgtgacaggttcacagccattttggacgcttgatttaaaagtaacgtcagatactttagtaccacgacctgatactgaggttttagttgaaactgttttaaatctaaatttgccaaacaaagcaaacattgttgatttgggaacgggaacaggtgcaattgcacttgcgttagcgagtgaacgtccagactggttcgtcacagcaactgatatttacgcacctactttaaacattgcaaaagaaaatgcacaaacacacggcttatatcatgtgaaatttgcttgtggtgcttggtttgaagcattagagccacaacaatttgatttaattgtttctaatccgccctacattgacccagaagacgaacacatgcaagctttggcaacagaaccacgccgtgcattggttgcagaccatcagggattggctgatattgaaattattattgctcaagggaaaaactggttaaaacctcaagggtggattgtacttgaacatggttatgatcaggggcaagctgttcgaggcattttcacagagcatggttttagtgagataaaaaccattcaagattatggccaaaatgatcgagtcactttggcacgctggatttaa

SEQ ID NO: 54694 - DNA, 1089 bp, Acinetobacter baumannii
atgaaagcgtcactccgtttacgtcttgatcaactctgtgatcgtcatgaagaacttaccgcattgcttgcagatgcagaagtgatttccgataacaaacgtttccgtaaactgtctcgtgaacatagtgatttaactgaaattaccgaagtttggggcaaataccgtcaagcagaagaagatattgaaactgctgaaatgatgaagtcggaccccgactttaaagatatggcagaagaagaaattcaagcaaataaagcattgcttgaagaattagaaagccagctcaatattttgatgattccaaaagatccaaatgactctaatgctgcatatttagaaattcgtgcagggacgggcggtgatgaagctgcaattttctcaggcgatttgttccgcatgtacagcaagtatgccgagacacaaggttggcgtattgaagtcctttctgaaaatgaaggcgagcatggcggctttaaggaagtcatttgccgtgtagatggtgatggcgtatatggacgtttgaagtttgaaagtggcgcgcatcgtgtacaacgtgtgccagcaactgaatcacaaggtcgtgtgcatacatcggcttgtacagtggcaattctgcccgaaattgacgttgatactaacgttgaaattaatccggcagatttacgtattgatacttaccgtgcgtcaggtgcgggtggtcagcacattaacaaaaccgattcggcagtacgtattactcacattccaacgggtacagtcgttgagtgtcaagaagaacgttcacagcataagaacaaagctaaagcgatggcattgttagtatcacgtttagaaaatgctaaacgtgcagcggctgatgcagcgacttctgaaatgcgccgtgatttggtcggttctggtgaccgttctgaacgtatccgtacttataactacccacaagggcgtatgacggatcaccgtattaacctaactttatataagttagatgccattatggaaggtgatttaactgaattgctcgatagcttacatcgtgaatatcaggcagatcagcttgcgatgcttgcacaggaaaatggcggctaa

SEQ ID NO: 54695 - DNA, 840 bp, Acinetobacter baumannii
atgaagatgttgaatcaaataatgtttgcagtgattacagcttcggcagcattaagtgtaaatgcagctcatgtacttgttgtattgtcagatgaagatcagctagagctaaaaaataatcatgtttttaaaacgggattttatcttaacgaattgatgcagcctacaaaaatgcttttagatgcggggcacaccgtaacgtttgccaccccaaaagggaaagctccaacgttagatgaatcttcaaatagtgcaatgtactttaaccaagatgaaaaagtattaaaacaatatgctggtttattacatgatctaaagttaacttcacctaaagactctccagttgtaagtctggcgcgtattgagcaaattggtatagatcaatttgatgccatatatattccgggtgggcatgcgcctatgcaagacctgttaaaagataaacagcttggtaaagttcttaacgcttttcataatgcaggaaagcctacagccttggtttgtcatgggcctatagctctgatgtcaactttacctcatgctgcggaagctgttaagcaacttgaacaaattagaacagtcaaaactggcgaatggatttataaaaactaccggatgacggtaattagcaatcaagaagaagagcaagcgaagggcttattaaaaggcggtgaaatgaagttctatccacaaactgctttagagtcacttggagcaaaatatcaaagcaatacgaaagcttggtcgccaaatgtagtggtggatcgtgagcttattactggacaaaatccagcttcggctgttcttgtcggtaaaactttattagaaaaattaaaataa

SEQ ID NO: 54696 - DNA, 918 bp, Acinetobacter baumannii
atgtctcgacaatttgatcatcttgccgatgtcgaaatctttttaattgtggctgagaagctttcaattagtactgctgcaattgatttatctaccacaccttcggtggttagtagaacaattacaagactcgagaaaaaactcggtatacagctttttagaagaaccacacgccatttaagtctgactgaagctggtcagctttactatgaaaaaatgcaacatgcttttcagttaattgaccatgcagaacgcttggttcaaggtgaacaactacaaatttctggaaaaattaaaataagtgttcctaccacttatgggcattatcgtttaccccctttattagaaaaatttcttctgcaatatcctgatattcagattgaagtcagtatttctaatcgtaacgttgatttaattgctgaaggttttgatttagctattcgtcaaggacaactacctaacagcacccttattgccagacctttagagcacgcacctttaaaacttgttgcctcacctgcttatttgaagcgcatgggtattcccaaaaatttggatgaattaaatcatcatcaatgcattgcctttgagttaccgagtaatggtaaggtcactccgtggttctttaaagatatagatatagatcaagaaattcagtggataccgacaaatcgaattttagtaaaagaagatattctaggagtagtatctcttgctgaaaatggtttaggaatatgccagagttacgaatttatcgttaatgaaaaaattcaacaaggaaaattacaacctctacttgaaacatacgcaggtcatacccgtcccttttctttactgtatgcgcaacataaacatatgtcttctgccacaagagcttttattgattttttatgttcaactcattgtaaatatacttaa

SEQ ID NO: 54697 - DNA, 420 bp, Acinetobacter baumannii
atgaaattaaatgctttattatgtagtgctgttttggctacttctatgatgactgtagcacatgcagacaatacaactcatgtagcagctgcttctgctttaggtagtgttgctggtactgctattggtaaaagcatgggtggtacatctggtgcaacaattggtgctgctttaggtggtgctggtggtgcagcagttgcaagtgatcgtcgtcaccgtacagaatctgcaattggcggtggtttaggcggtggtgctggctatactgttggtaaaagcatgggtggtacaaatggcggttatatcggtgctgcgttaggtgctgcgggtggtggtgctttaggtaataaaattgctaaagaccgtgattatgatcgatcttctaaacactggaagaaaaaacaccgtcatcaccactaa

SEQ ID NO: 54698 - DNA, 498 bp, Acinetobacter baumannii
atgaaaatgaatatttggttagcaagtgcattaatcgcaacaacctctatggtgtcagttgcacatgcagataatggtacccgtgtagcggcaacttctgctctaggtagtgtagtaggtactgcaatcggtaaaagtatcggtggtacatctggcgcaacaattggtgctgctttaggtggtgctggtggtgcggcagctgcaagtgaccgtcgtaaccgtacagaagcggcaattggtggtgctttaggtggcggcgctggttataccgttggtaaaaacatgggtggtacaaatggtggatacatcggtgcagcagtgggtgcagctggtggttctgctttaggtcgtaaagttggccaagatcgtaactatgatgaacgttatgaccgtcgatacgatcgtcgttatgatcgtgatgaccgccgctattacaatgatcgcgcttattatcgtcatgataatggcttacaccgtggttggtataaacaccactaa

SEQ ID NO: 54699 - DNA, 1005 bp, Acinetobacter baumannii
atgcgatcacttcaagacaccaaattttcaattttggaacttgctcccatacgtgatgataaaacaatcgagttttcattacgtcatgcattagagctcgcccaacatgcagaaaaattaggttatgaccgtttttggcttgcagaacatcataatatggatggaattgcgagttcagcaacagctgttttacttggttttatcgcggctcatacccagcgcattcgtttaggttcaggtggtatcatgctaccaaaccatgcaccattagtggttgcagaacaattcggtacgttagcaaccttatatccaaatcgtattgagttaggtttaggtcgtgctccaggcacagatcaagtcactatgcgtgccttacgtcgcgggcatcaggaaacggaagatcagtttcctagagatgttgttgagattttgcaatattttaaagcacctcaacccggccaaagaattattgccactccaggacaaaatactcaagtgcctgtctggttattaggttcaagcttatttagtgcgcaattggctgcgaaactaggattaccctattcatttgcatcgcattttgcaccacgcatgcttggtcaagcgattgagctttatcgtgaaaatttcgaaccttctgaatatttagacaagccttatgtttccatgggtgtacctgttgtggttgcaaatacggatgaagaagctcagttcttggcaacaagtgcctatcaacgtgtattaggattaatccgtggtgaaagtttaaaacttaaaccgccagttacatcgatgcagggtctatggaacacagcagaacagctttctgttgaaaatttctatacgatggcccaaatcggctcaactgaaacagtacgctcaggcttagaaaagcttttagctacttatgaagtcgatgagtttatttttacttgtgatgtctatgatactaataaacgtttagagagctttactcgattaatgcaactaaaatcagccaactag

SEQ ID NO: 54700 - DNA, 564 bp, Acinetobacter baumannii
atgagtattgaacttaaaaataatgttgccaaatcaactacttttcaaaatgcagttcaggattttgacgcctttactggtcaaattcttttatcaaatacaattaaagaaaatgatttttcaaatttaaatgtagcgattattggaacagatcaggaaacggtaacgcacttagaaaaaatctgccaacaagcaaaatttgtaactgtatttcaaattacgccgcattttattttgcctcatagtcaaatcggcatacaccgtctcattacccacccgcttattgctaaaaataggaggttatttaacaatcgtgtaaaaagtatcttagctctacgttttcttgaaactcaagtcaatgaaacatggctcaaacgtcttttgacacctaatacggcaaaagccaataaaacattttttaaatctgatagctactatgctgcgctacaaagaccaaattgcaaactacaaacttggccaattgtaaaagttaccgctacagccatttatagtatggatggtactcaacgccctgtagatatcattattagaactacaccttaa

SEQ ID NO: 54701 - DNA, 465 bp, Acinetobacter baumannii
atgaaaaataaagaaaataatgacatagaagttttagatatcccagaatatattgatcagcctaaatatgtgaaaaataaaaccgcaaactatactttgcaaacagtaggctggttttgtttaatgtggctgtttttcccactggtttcattatttttatggttttatgaagggcatctcatctatgactatgtatgggtagatcatatttctgaagttaatacagtcctccatttacttcttttaatatccttaagtgctttggtcttgattttatgggcgagttataactggcttagatttcatggtgatgatcgccgcagcaaagctccgaatagtcctgttgagttattggcttcacaatttatggtcagtaccgagtcattatcagagttacaaaagtctcagcgcatcatcttacattatgatgatcaggggtatttaactcgatatgatttgaaatga

SEQ ID NO: 54702 - DNA, 1248 bp, Acinetobacter baumannii
atgagagtattactcgatattctatttgcttttgcctttttatatcctctgcttatggcgtggacatggatggtaggtggcctctggtttttctttaaaagagaataccatgaacagcagttacctgagccttcaaatgaagggtgcagcattattattccttgttttaacgaagaagctcaggtaaggcaaactattcgttatgccttacaaacaaaatatccaaattttgaagtgattgctgtcaatgatggtagcagtgatagaactgcagaaattcttgatgagttggcagctcaggatactcgattaagggtcgtgcacttagcggaaaaccaaggtaaggcagtggctttaagatcgggagttttagtaagtaaatacgaatatttagtttgtattgatggagatgctttactacatcctcatgctgtactttggcttatgcagccatttctaaaatttcctcgtattggagccgtcactggaaatcctagaattctcaaccgttcaagtatattaggaaaattacaggttggtgagttttcttcaattattggattgattaagcgggcgcagcgtacgtatggtcgtatttttacagtatcgggtgtaattgttgcatttagaaaaactgctttagtccgtgttggattttggtctgatgacaaaattactgaggatattgatatctcttggaagcttcagatggaccattgggatattcaatatattcctcaagcactttgttatatctatatgcctgaaacttttaaaggcctttggaagcagcgtttacgctgggcacaaggtggggtagaagtcttattggaatatattccaaaaatgttcaaaatccgtttacgccgtatgtggccagttatgcttgaagctttagtcagtattgtctggtcgtatgtgatgatatttattttcttgcttttcttaatcggactttttattgatttacctcagcagtggcagattaattcactcatgccccaatggtatggcgtgatattgggtggaacatgcctcatccaatttttagtaagtttatggatagatcatcgttatgaccgtggacgtctttttagaaattatttttgggtaatttggtatccattatttttctggctactgacgttatttactagtgtagttgcagtccctaaaactatatttaataccaaaaagcgtgctcgttgggtaagtcctgaccgaggctttcgaggagataactcatga

SEQ ID NO: 54703 - DNA, 1830 bp, Acinetobacter baumannii
atgaataatttattttcgaaaatgttgagctgtgctttagcttcaacattgttacctctgcaatttacatatgcccaaatagaaaaagatttaccaaaaaatcatacagtttctttaacttttcatgatgtcagagatgatgttttaaaagaaggcgatcgggatatttatgcaattcaaactaaaaatttagcgcaattctttgactggttgagtcaatctgactggaagccaattcgcctgaaagatattgaagaggctcgtaagcaaggtaaagaactacctcataatgctattttgttaacctttgatgatggtgctttaagtagctacagtcgtatatttccattgctcaagcaatatcggattccggcagtttttgcactcccaaccagttggcttaacggtaatacaaaagctggctatgaagcctatggacaagggaacttagtcaattggaagcaagtacgagaaatgcaggcttctggcttagctgagtttgcgagtcatagtgatgatttgcatcatggtgtgcttgctaaccctcaagggaatgaacaacccgcagcaacttcttatatgtatttaaaatcacaagcgcgttatgaaacggatgtggaatatcagcaacgtattttaaaagatttaaaaaaatctcatgatgttttaaaaaaggaattgggtgtagagccgaaagcaattgtatggccgtatggtgcggtcaatcagcagttagaaaaactagctcaacaggcaggtttcactttttcttttagtttaggacgtgatggggtaaatcagattaatgacgttacctttaaacgtagtcttatggtggataactctacagctgaacagttgtctgagaccttactcaatatcttgaactcggcagagaaagatttatataaacagccaaaacattttgtgagtatggatttaaaacaattagctgcttcaaccaatattcagtcagatgaaaaattaggggcattgttatccaaactttatagcttaaaaaacaatacgctgatattgaagcctttagatgatcaagatggagatgggcaatatgacgttgcttatttcccaacaactcaaatgccagttaaacaagatatcttaaaccgtagtctatggcaggcacagactcgtgcaggacaagcggtcattttagagttacctgtatatcctcaaaaaaataaaccgtttttggtggcagatttagctaaagatatggcacgttttaatagcaatttaagtggtattcaacttaatgctggaactgctttaaattgtgctatgcaaagtgcaacgataaaagaaagtaactgtgttgaagaagtaaagcaattatcacaactgagtcaactgactcaaaaagctgcaaggccttatttgaatatgagtaatcaggcccagtttagtctgctgcttacgcctgacttagagcatatcgatcaattgccagcgcttttaaaatcactattaacccaacatgatttagtgaatctaaaatttaatgttgtgggtaagcagaaacaatttaaacatgtcttagaacttttaaatacacttgatgcgaaatacaagcaacgaattatgctgacattaacattgccagaaaatgaccagagaaatgcttggcaagaagtaaaacaaggcctttttgatattcagcgcataggtattcagaaatttggggttgaaggttattcctttgaaaattcaaaaaatgttcatgagtatttatataacccaatgagcttgaattcgagttcggtcatgtatcaacccttcgctagtttagcaactgaggggaaaaagtaa

SEQ ID NO: 54704 - DNA, 2439 bp, Acinetobacter baumannii
atgctaaaaaaatgtgttttttcattggtatatctcttaccaattcatttatacgcagctcaagttgatgtactgcgtgagcaagctgttcaaaattatagagcaggccaaactcaacaggctgtttctcaactcgatcaattgttaaaacattatccgtatgatctaaaattgcttgctgattatttaattgttatgtcaagtgaaaaaaaggatctgacgaatttttccaattttttagaaaatattaattatgtgaattttcctgaatatgcaaagttacctttaattcgaaattttcgtgattttaaacattttcaaacagcaattgattggtcaaataaacttaatattcaaaaatcagtcgatgggcgtatcttactatcggttttatatgctgaagctcaggactcaacgaatgctaaaactcagttatcaaatatcaacattaaaggtttaaatactgatcagttggtacaggttgcatatgcttaccgtttaataaatttgcccgtagaggccttagctacaattgaacaagcttatcagcaaaattctaagtcttcagctgttttgcaagagtatgtttatgacttggctgctattggggcatataaaaaagcccagcaattacttcaagtaaacgaaaaaaatcagcaaactgagcagttacagcaaactttacaagtcagtgagttttctcagcatgtcaataatgcaattgcccgctataaatacttaaatcgccaaggcttatcagatgcagaaagctatgctgaattagatgctgttttagaacaagggcaaaaaatacaacagcaaatgtcaccaaacaaccctaactatttaaggtttcactacgattatttgtatgcgctagattttagagggcgttcaaaagaggttatagagaatttcacccagttgaatattccactcgaaaaattaccggcatatgtacgtcatgcaattgctgatagttatttggcggagcagaagccaaagcaagctgaacttgcttataagacacttctaaacgaaaaaaattatccggatatgatcgtctataccggattgtattattcctatattgaacaggaaaaatataaggaagctgaacagcttttggcaaaagttgatcaccttattccgacttataaatatagtcaggcgaaaggtgtagataaaacaagccatcctgatcgtgatgattatattgctttaaaagggatgcatttagcctacgctaatcatctggatcaagctgaacagcactttcaaaaaacagtcgagcaagcacctgcgaatgagagcctgattaataatcttgcgcgtgtagaacggtggagagaaaaaccgctagaggcaaaaaaaacaatttcccggttaaatggtatagatccgattgctaaagacactcgcattaatgaaatgcagaatgctcaagctttaggtgatattccgacatggcggaaaaccactcaaaacttagagcaatattatcctgatgatagtggtgtcataaaaagccgcaaagagttggatgatcgtaatagagccacaatttcacactcaactacttggggccaaagtaaggccgacaatagtgatactgtaagtgggcagaatggtttaaaagaccgtgaaatggaaacacgtcttaatagcccttggattaaggataattatcgtttatttgcttggtatcaagatcgttatggcgaatataattttggtgacgtgcataaccagcgctatggtatcggggccgaatggcaagctaatcgtaaggcattgtctgcgatcttgtcgcaaagtacagatggcggacaagcaggtgttcgtcttgattggtctcagtggttaaacgatcactggcagtatcaattgcaatataacagccaggctgacatccctctacaggcaattgatgcgggagaagatggccagtcttaccgagctgctttgacatggcaaaaagatgaatcacgtcaaattggcgcaagttacggtctgactgatatcagtgatggtaataaacaacaagaattttcaactttttggcgtgaaagactatttgcggcgccgcatcacattacttatggcactgttcgtggtttttacggcagtaatagtcaagatcaaactacttattttagcccaagttcgcattacagcgcggagttgaacttaagccatgactgggtgacttggcgtgaatatgagcgttcatttaaacagcatttcgaggctggagtggggctttataaacaagccgattattccactaagccaacctattctttgcaatatcaacatcaatggcaactatcacgtacatggcaactcaattatggaattggttggcaataccatccttacgatggacatgatgaacagcatacctatggtattttcggatttgaagggcgtttttaa

SEQ ID NO: 54705 - DNA, 915 bp, Acinetobacter baumannii
atgattaagtggatcgtattagcgatttttgtaatatctgcattgtatatccaacatcgcggcaaagtgcgtcactcgttttatcgtcaattttttgaccattcaaccttgctcgcaccgattaactttttaatgtacatcttttcaaaggtaccgaatcagccttatatcgacactcaacactttaaagatttaaaagtgttagatgaaaattgggaaatgattcgagacgaagcgaaagctttatatgaccaaggtgggattaaagcatcgagtacctacaatgacttaggttttaactcattctttaaaacaggttggaaacgtttttacctcaagtggtatgaatcaagccatccttcagctgctgagctttgcccgaaaacaacggctttactcaaaacattaccgaccattaaagcggcaatgtttaccgaacttgctcctgatagccgtttggttagacaccgtgacccgtacgcaggttcacttcgttatcatttggggctgattactccgaatgatgaccgttgttttattgatgtagatggtgaaagatactcttggcgtgacggtcaaagtgttgtatttgatgaaacttatattcactatgctgaaaataagaccgatcaaaaccgtattattttcttcgcggacgttgagcgtccaatgaaagtgaaatggatggaacgtttcaaccattggtttggtcgtaatgtgatgactgcggcaagttcaccgaatgaaacaggtgaccaaacagggggcttaaataaagcctttggttatgtttaccaaattcgtattaaagctaaagctttaaaagctaaaaaccgtaagttgtattacttcttgaagtggttcctcatgcttggaattttcttcctgatttttgtacgaccatatgtattttaa

SEQ ID NO: 54706 - DNA, 381 bp, Acinetobacter baumannii
atgaaagattattttctaaaacgaagcttatttattttcctttggttcgcatgtcttgctggtttgttacgtatagaagtttcttggttaactgagactatggctactataattctattcacttttataattctcggttcaattatattaggttatagaaatacatattttgctcctgaatcaaagataaagatgagtttgatcttgcatacaaggtttatcgggctgatgttaattcttgatttattatttggtaaatcggtttggtacttcgacttagcgcgaaactttggttttcttggcttatttttattaggcacatttattttctataaaaagaattttaatttaaacgtagcaaaaataccgccttttcaataa

SEQ ID NO: 54707 - DNA, 414 bp, Acinetobacter baumannii
atgatgaaggcaattgagttatctcaatatattccgtatccacctaagaaagtatgggaagcattgaccacacctgaactcattcaacaatggtgggctaaaggagatattcagcctaaagctggtcatcaatttactttagatatgggtagttttggagtacaacattgcctagttaaggtggctgataaagaaattttatttgaatatgactttgcaattggtgtacttgatacaactctaagatggcaattaattcctcaaggagagggcacacttttgcagcttaaacattcgggatttaatgagaattcttctgtgggacaacaagcttttatgggtatgagaaaaggttggccacaaattttaagtcgaattgagacggtaatttctaattataaaaaaatagggtga

SEQ ID NO: 54708 - DNA, 1194 bp, Acinetobacter baumannii
atgaaacatctcctacgggtttatctactcattagcttagtactttttgcggctttagctttattaagttatggctacggtatgggttacgtctatatctactggcgtcaattgcaactgcaaacaaatgtgtggggcttagtccttacctttgttgtgatgagttttattgctcagttaatatggctttggattaaacgttattcctcgcgtgaacaaaggaaaagagaaaatatttttcaatttaaaaatcttcatccttatgagcaattaggtattgtctggatattagaggcggccgaagaccaacgggtatttatcgaacgcgtttttactcagtcgggccttttaaaaaatattattgatgccaagtttttagttttaagtggagattatcaaaaagcattagatgctttagatcaatccccaccaatggcttttgaattagccgagttgcagcgtattgaaatatttctagctcaaaatgaagctgaacgtgcattaactcatcttgagtttctatatcaacatcaattatcaccttggcttgaagagatcgagactgcatatcaacaacgattaactgcgttatggggggagcttgctttacagcaaccatgggtatatttgcgttcaatgaagtatggattattggatgctgagcatcgtgatttatggttgcaacagcttcttcaacaattcgatcaagcttcggtagacgatttacatgcactgcaacagcgctatctagatttagagtctgaaattcaaaccagaccttatagtagtaaattgctatggctaaaacttttggcacgtatgccagaaatgagtattcagcatgaagcattaaccttgcatttactcaaagagcaatttgatccagacgtattttacttatggtttcagcaacaattgcttaagcaggttcctgactatgcagatgttgaggaaaagattaatcaattcgaatctcaatatatgaatttgccggttttaacatttgcaaaatggcatgtttacaaggcaacggagcgtcaagctgaagcagaaatattattaagtttatacccagataatattttaatgagctatttacgtattaaatcaaccttaaaagaagatgatgagttaatcaaacagttaaacctaatctttgaaaatgatgcgaattttttaaaatttaaaatatga

SEQ ID NO: 54709 - DNA, 708 bp, Acinetobacter baumannii
atgaaaatgaacttgaataaggatggaaaaaaacgtattcactttataattagagagcttgataagactcagaatgaagtaaataaaatttcagcttcagttcagatagacgaggatgatcaatatcagcgtattaatagagcatattttcagttgttccaaacgcattatctttcctttaaattacttatgaaagaagatcatttttcctccgctgtcgtcgtagctcgtacgatgctagaaatatatgttaggtgtttttatttagagtttatagaacagcctaaagggacagatgttgaaatgttaattactcaaccaaaagactttgctagtttttttcagatgagtacagctttagataattttgaagacccagacaatggagattttcataaacacttcaagcaattcacaaagcaaggtaaagctttgtacgagaagtattcaactttcacacatggtcgtggtgagctactgaatgtgctatttaaaggtaaacaacctgtctgtgcctatgaggatattgaaagtatattgctgacccttaatggcatgttacaggtgtttgcaatgcaatttctacatatgaatgctaatgaggcattgaaaaaaagattgcttgatagaatgcttaaaactgaagaaacttttcttaatcatggtataggccaaccagactattattctaatttaacctcttggtga

SEQ ID NO: 54710 - DNA, 462 bp, Acinetobacter baumannii
atgctgaaaatatccattcctactgatatacaaattttactgataaaagccctgttgaagtctggaacccacgaatgtggcggtgttttaatgggtgagcatataggtacaaatcattttagagttagctcattaactgttcaaaagagtggaacgatcgcatcctttgtacgtggaattacggatgctattaaagcaattcgcctttttcataaatcaacaaacaataattatcaaaaatttaactatttaggtgaatggcatagccatcctctctttagtgtacaacccagcagtaaagaccatcacaccatgagggaattggtgtccgatccaaaagttggggcaaattttgtagtcttactgatttttcatttaaaaaacaatcatcttgagggcagtgcccacacctacctaccagatggttcctgttacccatccaccctggatttagagagataa

SEQ ID NO: 54711 - DNA, 1395 bp, Acinetobacter baumannii
atgagtgcaagtctgttagaaaaacaatcaactggtggtgcaattgcacgagtagggtttgattatcaggatgcctttgtattaaagaacctgccactatggctatctgaaagtgcttttagtcacattgtgagtgaatcaataggtgatgttgaggtttgctacttctcttcagagaaagatttccagcgtgtcatgtatgaagctaaaaatcattcgctgacttctacagacttctggaaagaaattaagcgcttcaaggaggcgtttgatattccatcaagtgaatatactcgctttagtttagtatgcccactctatacctctacacttcacccatttcttgcccagattgagagaattagaggcgttggctcttcatacagtgccgattctgtgattttacaaaaaagtcgtcaggatattattcagtggtgtagcgataagggattcgaaacctcacttgctgagtttgcacttgaccatgttgatttcctgtctttcaatgctgaagatagcgactctgtatttataggcgaaatagaagagaaattatccaatatcgaactcactacacgtaaagccaaacagttaagagatcagtttaaaaaattgatttctcgttcttcttttggtccaatacatcgcaaagactttgaaaattttatttgccatgctcttgaagaagatagaagccaatggctatcagatcctatcaaaattaacctttctacttcaaccagtcagtaccaagacttaaacttagatattcgtgatttcaatggtcctgatcgtgcccaaaaaacctccagcgactggaacaacctaatcaaaaaagcggtatcgattggggatttcattcatagcagtggtgaccgtagaaccctccttatagacggtaaacaaagaatgtccaccgcatgtatgcttggctatgtatttagtgccacacgtaatttcctacttgaaatagaacataatggcctcgcttatcgcactgatgaccataaacagaaagagggacaattttttaataaaatcgcccctgttgagctacagggagaaactgaagccatagttactatcggatttcctacagctataggtaaagacattgactctacaataaatgaagtaaagagcttacctagactgaatctagaaagctcttatgcgattgataatatggaaactctaaatcttgctgtgagagaggcaaaatccgctttagtttcattcaaatctgaaaataagttatctaaattacacctctttattaaagcaccctcagtttttgcaatggtcttgggacatcgtttgaatggtgtttgtgatattcagctttacgattgggtagatgggcaatatatccctacggccgagctgagcatataa

SEQ ID NO: 54712 - DNA, 1893 bp, Acinetobacter baumannii
atgaacaatcattctaatgaaaaaaatactgataactctccagataaaacaaaatcaccggcattcaaagttcttgaatccaatgctgaaaagttcttaatggtgtggtggtatggagcgttagcaaaagctgatcgtagaaatgctcaacctaaagttcatgtggcttttagggaacttctggaagattacacacccacagataattttatttttattgatgcaaatataacagatttggtgtcttggcctattggaacagtttggcaccatgaacgattagttgactatcttccctttgaaataagggagtttgatattgaccatacggattttacacatacctatgttcaagcatataagcgagacgaaaagacagggagaatagatcatttcttctcagacaagaataaattttatattaatccaagccaacgtgagaattgcatttctttctccttaacggatcaggaatataaggaactactcgtaccttgttttgagtttctggtgagaggatatggtctctctacagaacttcctagaattctgacaacatatgatgagaccgaaagacatgaacggctctacacccctcatccagaagaagaaaacacctggacgatccttataggtgatagcctcacaacagatgatcatgtatttattgcctactataaatatagcaaatatacccaagatgccgtaagaatcttatttagcagtattgcaaaacatgatgattttatccaaagaaaccatatataccctaaagtaatgccatggcataaggaaacgagaaaaattagggtttcaggtttttgtattcctgacaccaatgcttttttagccttgacaatccttggaatagaactacctgatcaaacacttatcagacgtgttccaaaggtaattcaccgcattaagaaacctgtagatgtcaactcacctaatcctcctcagttgcaactaggtcctggtcagattaacgtatctgaagatcaaggagggcgcaaaccattattacaatcggttattttaggtcatgaatttacatggttaggttcaggccctatcggggaaaaaagtaaaacaaagtatgaaagaaccatcacccagccacagagaaagaaaaatactaaagaaaccaatacagttggtacaggagaacctgatagctctaaggaagttctaaatgtccaaattaacccgaccactaatggagatacagagtttgaagctccagatcatggaagaatcatgggcctatggaatgcatgtttaaaggctcgctcgttaaatcccagtattgtcaatgcagtccactattatacttttgaggaagagtttgattaccgcgataaacccactctcatggcctttttcgttaattcagaaacattaaataataaagatattacagatggagaaaaacaaacttataaaaattggtgttatgcaaactcaaataaaacagcacttcgtggagcattggtcatccgattatctcttgtaaattgccctccagtttatcttttcgatatacaaccagcgacttacgtttcaactgtagatggggaaagtgttctcaaggagcgtgggcatgctggtctaatatttaggtcaagaaccgcagaacaatttgagcagtatatttctgggctcatggagagcctgcctttgtcagagggctcttatacgacaactctcctaggctccaatttggttactcaattatttgtttttagacattcaaaatctgctggcttgtcagagggtgaatcaacgttattgaatgctctaagaaaaattggaatcacgaatatcaagttaaaggaggaaaaggaggaaaaggaggaaaaggaggaaaaggaggaaaaggaggaaaaataa

SEQ ID NO: 54713 - DNA, 1092 bp, Acinetobacter baumannii
atgtcttcgcacaaccatacacaagatcacaaacataaccactctgaacatgatcataaccatgatcattctgggcataagcatagtcatggtaacacccataagcacaaccatgatcactcaggacaccatcatggtcatggtggtcatgatcacgaccacgatcatgaccacagccatatcccaagtaataaaaaaattctgaccataagctttttactgattaccatttttatggtagtggaatttataggtggttttattaccaatagtttggccttgatttcagatgccggtcacatgctgagtgactctgttgcacttggtattgcacttgcagcagtcttcatcggtcaaaaacagattaccaaaaataaaacatacggctatcaacgctttgaaatactggctgctgcattgaatggtattacactggttggtatcgcactgtatatctttattgaggcaattctacggtttcagcaaccacaacatattgaagtacaagggatgttgatcgttgctagtattggattgctgattaatatcattgttgcagtaatgatttttaaaggtagtgataccgaacacgacttgaatatgcgaggtgcttacctgcatgtactcagtgatttgttaggttctattggcgcaattgctgctgcgctatgtatctacttctttggatgggcctgggcagatactttagccagtgttctagttgcaatacttgttcttcgcagtggatattcagttgtagtaaaggcttcgcatgttttaatgcagggtacaccagaaaaatttgacttggcagaaatcaaagaaaccattcttcaaggccagcgaattcagggtgtacatgatttacatatatggagtctgacaagtaaacgttatattttatcctgccatattgttgtgagtgaagaaatgagtatgcaggaagtgcagatactcttacatgatctggagaatgtcatacaaaatctaggtattgagcatgtcactattcaggctgaaacatcactcaacaatcacgatgatattcatcattgcattattgaaaatataccaaaggattcagaacactga

SEQ ID NO: 54714 - DNA, 543 bp, Acinetobacter baumannii
atgatgaacactatttatatcaatcaattgaagcaagatgttgatggtcaagggaaaaaatcaaagccttttttcatgacattcttactcattcttatgacgttaggattagcttcaatttcgcatgcaaaagcaccgatcaatacagctttggaaaccgtggagagctatcttaatatctggaatggtacgcagccagatgacctgactaaagttcttgacacgaatgttgagtatttcaatacaagtaatgaagaaaaccgtaaaggtacagcatctgtaattgaggtacccaagtttttattaacagtcattcctgatcggaagatgacgcttacatccccgccactcattgttggtgataaggttgctgtcgaatggcagcttcagggaaccctcaataaaaaagaccagtctggtaaaaaagacgcaaaagtaatcacttttaaaggtgcttcattttttgaggttaaaaataataagattatatacatcggtgattactacaacaatcatccattgcgtagtcagttagagccataa

SEQ ID NO: 54715 - DNA, 384 bp, Acinetobacter baumannii
atgaaatttattatccatgatatagaaaacttcccatttgttgagtttaagcaagatcaggcagttccaggttattcacctcaatggcagttggaaatgcaggaattcttggaaatgagcagtccgtttgtgattgtttatgatcaattatcaatgcaagaaacacctgaagactttaaacaacgtggtctttggcttaaaaaccataaagatgaacttaatcagttatgtaaggcaattatctgcattgaacctgatcaggaaaaaagagttgccatcagaaagatgacggaaatggctgtaaaggcatttggcattccttatgaaatcgtcaataccagggaagacgccgaacggattgtggatgaacttattcaagtctaa

SEQ ID NO: 54716 - DNA, 1482 bp, Acinetobacter baumannii
atgaaaaatttaacacttcatttaaaccgatacaccttcctcaagaaaatgagtgtactaaccactgccactattcttgcaggatgttcaatggcacccatatatgagcgacctgtctctcctgtgtcggaacactatccaacaggagaggcttatccagggctgcaagtgaacaatggaaagcaaacagtcgcagccgatattggctggcgtgacttttataccgatcctgtcttactccaactcatcgatcatgcattgaaaaacaatcatgattttaaggtgacagctttaaatgttgaggcgatagaagcacagtatcgtattcgtcgtgctgaccgtttaccgcatgtgggtgttaccgcagagtcagccagtcagcgtttaccgtctgatcttgcttataacccccgcatgtatcaggttggtgttacttcggtcgcatgggaagtcgatttatggggccgagtacgcagtctgagtgatcaggctttacagaactatttggcttctaaagaggtccagacagcatcacagttaagtctggtatccgcagttgctaatgcttatctggtctataaggccgatcaggaaacgttaggtttaaccaaggcgactttggcgacacagcagaaatcctatgacttgaccaggaaacttgttgatgttggtaatgcaacccgatttgatttacgtcaagctgaaataggactgcgcaccgcacaaaccaattatgcaaaattcttgcgtattactgcacaggatcgtaatgctctggtgttacttctgggttcaccattaacacaggaattggcggcccaattggaccagtcccccaaaattcctgatcaggttgttatgcaggatataccagttggtttgccatcggatctacttcaacgtcgtccagacattcgtgccgcagaacataagcttcaggctgcgaatgcaaacattggagcagcccgtgcagcattttttccatccattaccctaacgggttcggcgggtacggcaagttccagtctggataatctatttaatgcaggtacaggtgcatggagttttatgcccaagattaacttgcccatatttaatgcaggtttaaatcaggcaaatctggatcgctcacacatcatgaagcagattgaagtcatcaactatgacaaatctattcaaacagcttttcgtgaagttgctgatgggctggctggcaagtccacactagatgaacagatcaaatcgcagcagcaaatgattgcggccagccaggatgcccataagttggcaaccttacgttttgatgctggtgaagataattatctcgcagtcctcgactcacaacgaactctgtatgcatctcagcaggcacttatacagacccgcctggaacgcctgaataatcaggtcaacctctacaaggcattaggtggaggctggaatgaacataccgtacagattgaacgtaaatctttgaaatag

SEQ ID NO: 54717 - DNA, 3165 bp, Acinetobacter baumannii
atgaagaatttccctcatttctttgttaatcggccaatatttgcggtcgtgatctctgtgctgatcgtcattctcggtgctttatcactgtttaaactgccattgagtgaatatccagccattacaccaccgactgtacaggtcatggcaagttatcctggtgccaaccccaaaatcattgccgagacggtttcctcccctctggaacaagccgtgaacggtgttgagaacatgttgtatatgagttctcaaaccgcagccgatggcaagatggtactgaccgtcacctttaaacagggtacagaccctgataaagcacagatacaggtacaaaacagggtttctcgtgcattgccacgcttacctgaagaagttcaacgcattggtgtggtcactgaaaaaacctcacccgatattctcatggtcatcaatttggtgtcatccaacaagaatcatgatccactatatttgtccaactatgcactgttaaatgtgcgtgatgagcttgcacgtttaccaggtgttggaaatatcgagattggtggtgctggtgaatattcgatgcgtgtctggattgatcctgaaaaagtggctgcccgtggtttaaccgccaatgatgtggttgcagccattcgtgaacaaaacatgcaggttgctgcgggttctgttggtcaacaaccaaatacaacatcggcctatcaagttactgttaatacgctgggacgtttaaccactgaagagcaattcagtgaaatcgtggttaaagctggtgacactggacaaatcacacgcctgaaagatgttgcacgaattgaactgggttctgatgcttataccatgcgagctttactggatggtaagccaacatctgccttacaaatctttatgacaccaggtgccaatgcactcgatgtttcaagtgaagtccgtgaaacgatggcagaattgaagaaaagcttccctgacggtgtggattataaaattccttatgatccaaatattttcgtaaaagcttctttgaaatcagtcattaccactctgttagaagccattgcactggttgtgcttgttgtcatcctgttcctgcaaacatggcgtgcatccattattcctttaattgccgttcccgtttcactgattggtacgtttgcaattatgtattatttcggcttctccctaaatacattgaccttatttggactggtactgtcgattggtattgtggtcgatgatgcaattgtggtggtggagaacgtagaacggcatattgcattaggcgaatcaccaaaagaagctgcccgtaaggcaatgtctgaggtgacagggccaattatcgcgattactgcggttttatctgctgtatttattccatcggcatttcttacaggattgcagggtgagttctatcgccaatttgccttgaccattgcgatttcaaccatcttatctgcaatcaactctttaacactttcaccagctttagcaggtatcttgcttaaaccacatcaagctggaaataaaaaacgtgatttaaccgaacgcttatttggttggttctttagaggattcaatcggttctttgataaggcatcggacaaatatgtaggtgcagtccgcaagggggtacgtttaagtgccatcatgctgattttgtatgtaggttttcttggcctaacttggttaggttttaacaaagtgccgcaaggctttgttcctgcacaggacaagtattatctagttggtatcgcccagttacctacaggcgcatctttagaccgcacagaagctgtagttaaacagatgacggaaattgcactgaatgaacctggtgtggaaagcgtcatggcattcccaggctttacaccaagtggtccagtcaatgtaccaaactctgccttgatgtttgccatgcttgatccatttgaggctcgtcaggacccctcattatcagcaggagcaattgctggaaaattaatgggtaaattcagtcagattcctgacggatttgcgggcatctttccaccaccaccagtacctggcttaggttctatgggcggattcaagctacaaattgaagatcgggctggtttaggctttgaaacactggcacgtgtacagggcgagattatggcgaaagcctctcagacgcctgaacttgtcggtatgcttgcgagtttccaggcaaatgctccacagattgaagttgatattgaccgtgtaaaagcgaagtcacaaggtgtaccactgaccgatatttttgaaacactacaaatcaatctggggtcaatctatatcaatgactttaatcggtttggtcgtacttatcgtgtaattgctcaggcagattccccattccgtatgcaaccagagaacattaatctgttaaaggtgagaaatgcagcgggagacatgattccgctttcgacctttgtcacgattaagcgtagttctggccctgatcgtgttatgcactataacagtttcccatcagccgatattagtggtaacgctgcatcaggttattcatctggtcaggcaactgccgcaattgaaaaaattgtgcaggaaacattgccacaaggtatgacctatgaatggaccgatctggtctatcaggaaaagaatacaggcaatactgcggtcatggtttttgctctagcaattattttggcgttccttttccttgcagctcaatacaacagttggtcaatgccttttgcagtattacttattgcaccaatggccttgttatctgcgattgtaggtgtttgggtaactggtagtgataacaacatctttacccagattggctttgttgttctggtgggacttgctgcaaaaaatgccatcttaattgtggagtttgcccgagccaaagaggatgagggtttgaatccttttgatgcagtacttgaagcagcccgattaagattacgcccgattctaatgacctcaattgcatttattgctggtgtgataccactggtattagccacaggtgctggtgcagaaatgcgtcatgccatgggtatcgctgttttctctggaatgctgggcgtgacaatctttggtttgctgtttacacccattttctatgtcgtcattcgtaattttattctgcgtagagaacaggccaaagcactggtacaggagggttcaaaatga

SEQ ID NO: 54718 - DNA, 1182 bp, Acinetobacter baumannii
atgaaaaaacgaatgacagcggttgctgtagcagtagtgattgctatctcaggtggtctgctgtacacagcaaaaaatatatcggatcaacccaagcaacaagctagttcagctcaaatgcctattcctcaggttccagttgcggaagtaattacacaagaacttaatccaactgccgaatatacaggctacttatcggcaccacaaagcgttgaaatcaagtcccgagtcggtggtgtcattaatagtgttagtgttcctgagggcagttatgttcgtaagggacaggtattatttaaaattgatcctgcaccttttcaggttgctctgaagacagcccaggcacgactgaaagcagcagaggttcagtatagccaggctgttctggattttaaccgggcaaataaactggtcgaaagtggtgccgtctccaataaggtttatgacgatgcactggcaaccaaaaataaccgtcaggctcaagtacaggaggctcaggcagccgtcagtgcagcgaagctggatttatcttataccaatattacagcaccgatttcaggacgtattgaccgtgttcttgtcaccagtggtaacttgattgcaggtggaaatacaggcaatgccacagccttaaccaccatcgtttcagtcaatccgctgtatgtttattttgaccttgatgaaaaaacctttctcaatctaaagggacaaaataaatctggacaattcaacttgccaatcgaaatgggattggcaaatacagaaacttatccttatacagggaaattaaactttgtaagtactcaaattgaccagcgtacagggacgctacgggttagggcatctattaccaatgattcaggtgaattagcaccaggtatgtttgccagagttaagctgaccactggaaataaacagtccaccattctgatagatgatcaggcggtgggtacagatcagggcaataattttgttctggttcttggttcgaataatacggttgaatttaggcctgtaacacttggctcggtcgttgatggattgcggattattagcagtggtctgcaaactggcgataaagtcattattaaagggctggttcgcccaggaatgcaggtcaagccaaatatcgttccaatgcaaacgcctactccgactgaaagtgccgcacaggggaaataa

SEQ ID NO: 54719 - DNA, 1005 bp, Acinetobacter baumannii
atgagtaatcaacgcgatcacaatcataaatgtcatgatcattcgcatgaaggtcatgatcattcgcatgaaggtcatgatcattcacatgttcctgatgtgagtaacggaaacgaaagaaaaattctgatttcgttttttatcattttcgggttcatgcttgtagaagccactggaggaatcatctctggttcactcgcacttctggctgatgcagggcatatgcttacagatgccgttgccttaggtttagcttatgctgcctttcgtttcggtcgccgcattgcagataattcaaaaacatttggatacatgcgattcgaagttattgctggcttaatgaattctcttacattattcgcaatcgttggatggattatttatgaggctattgaacgctttcaatcacctcaacctgtcatggcaggaccgatgtttatcgttgctattataggtatgctcgttaacttatttgttttatggtacttaacaagaggcgatacagaacatgtcaatgttaaaggagctattctccatgtaatgggcgatttactcggctctgttggagcaattattgctgccatagtgatttggtacacaggctggactcctatcgatccaattttatctgttctagtttctttacttgtactacgcagcgcatggtctttatttaaacgtactcttcatattttacttgagggtgctcctgagaatgctaatgcccaagagatcactgaatatcttttgaaaaatgtaagtggtattgaaaaaattacccatatacatatttggatgattacatcaggtagatctatggcaacgttgcatgtcaaacccaaagatggagttgacctcgcgacattaactctcaacattgagaatgagctaaaatccaaattttctattgaacatccaactatagccattgattggcaaggcaatagtacttgtagcttagaaaacccaactcaaattgatccacacgctggacataatcactaa

SEQ ID NO: 54720 - DNA, 1689 bp, Acinetobacter baumannii
atgtctgataaatactacaatttaggagattaccagcgtcaaataactacgtcatctcctgatactcaactttggtttgatcgtggcttattatggacatattgtttcaatccgagtgaagccataaattgttttaagaaagctctagaacatgatgcaaaatgcgcaatggcttattggggcatcgcctttgcatctggtccaaattacaataaagcttggcatttatttgatccttcagacttacagaataccattccatatattaatgaaattatggaacaagcaaagttagcagcgactcataatgcgacacaatttgagaaagatttaattgatgcccttgctccacgctttccaaaacacgtgactatagatgaacaagactttcatgagctgaattttgcatatgctcaagctatgagatcattttatgaaaaatattctaatgatcttgatgcagctgcaatgtttgcagatgcactcatgtgcttgagccctcgtaaattgtgggatttagataccggtgaagccataggtttaggtacagttgaagctagaaacgtgcttgaagttgctttcactaaacctggggcaaatcgtcatcctgtaattaatcatctctatatacatttaatggaaatgtcaccttatcctgaagttgcattgccagctgctgataaccttcgtaatttatcacctgatgggtcacatttagcccatatgtccacacatattgataatgcatgcggagattggcgtcgagtggtttattctaatcttgatgcaatcgcagccgatgaaagatatttttctagagaaaagaatccaggtggttggaatatcttgtatcgcgttcataatttaatggtaggtgcttatggtgcaatgatggcaggtaaatcacaggaagcgttatttatggctcatcgtatcaatgacattttaacacccgaagtactacatatcactacaccgccaatggctaatttaactgaaagccattgcacaacactaccacatgttatgattagatttggcatgtgggaagatattctgaaacttgagctacctaaagataaaggtctatatagttccacaaccgcaatgattcactacgcaaaaggcatagcatttgcttcattaagaagagttaaagaggccgaaaaagaaagagagtcttttataaaagcagtagctaatgtatcagaagagcgctttaactctatacctgttaaagaggtcgaagctttaaaaattgctgccaaaatgattcatggcgaaattgagtatcgtaaaggtaatacgaaagaagcattcgcaatcttgcgagaaggcattaaattagaagatgctcttccttattgtgatcctccagcttggttacaaccagttcggcatgcattctgcgcacttaatatggaacaaggaaactttgaagtagcagcccaagaatatcggattgaactggggctagaaggtgaccttggacgtcgccgaattcgccctaacaatgtatggagtcttcatggactttatgagtgtttagcaaaactaggtctagagaaagaagctcgagatatttcgctgcaacgtgatatagcacttgcctcggctgatattaatattgaagcatcctgtttctgccgattaagtgcatttgaagataacactacaagttgctgttaa

SEQ ID NO: 54721 - DNA, 315 bp, Acinetobacter baumannii
atgaattttaataatcacccgataccattatctcaagatgagattatgtctttagctgaaacatttcggctattaggtgatgcttcacgacttaaaattctacttttttgtatgcgggggcctagttcagtaggtgaaatcagtgatgctcttgatttatcccaatctttagtcagtcataatcttcgtttattgcgttcagctcgtttagtcaaaggcgaaagacaatctaaacaagtattttatgagattgatgatttacatgttagtcaggttttattagatatggcaagtcatattagtgaggagcactaa

SEQ ID NO: 54722 - DNA, 2487 bp, Acinetobacter baumannii
atgggaaaggcaacagataagctttctaataatatgaaagttacattaaaaattgaagggatgacatgtgccagctgtgttgggcgtgttgaaacagcactcaaaaaagttgatggtgtacagtctgcctcggtcaatctagcgacagaacgtgcagatattgtacttgatcagcctgtggatcgtcaggtactggttcatgccattgaacaatcaggttatgacgtgcccgcaaataatattgaattatcaattaaaggcatgacctgtgctagttgtgtaggtcgtgtcgaaaaagcccttaaagccgttgcaggtgtaaaagaggccaatgtcaatcttgcgactgagcgtgcaacggtcagtggttcagcaaatgtcgatgacttgattaccgcaattgataaagctggttacgatgccacagaaattcaagcttctattcctgaccagacagagctgcttgagaaaaaagatcaagaacgtgctgaacttaagcgtgatttgattcttgcaaccctattggctttgcctgtatttattttggaaatgggatctcaccttatccctggtgttcatcaactgattgatcaaactattgggatgcagaatagctggtatttacaattcatcctgaccacgttggttttagttattccaggacgaagattctatctaaaaggtttgcctgcattactccgtttagcacctgatatgaactcgctggttgcggttggtacattagcagcttacctattttctattgttgccacattcatacccaacatccttcccacaggaacggtaaatgtatattacgaagctgctgcggtgattgtggcattaatcttactgggtcgttttcttgaagcaaaagccaaagggcgaacatctgaagcaatccagcgtttagtcagcttacaggccaaaactgcccatgttttacgcgatggccaaatggtagatattgcactagaccaagtggttgcagatgacattatcattgtgaaaccaggtgaaagaatccctgtcgatggtcaagtcactgatggaaaaagttttgttgatgaatccatgattacgggtgaaccaatccctgttgagaaaggcatcggcagtgatgtggtaggcggcaccattaaccagaatggcacgttgacctttaccgctgtggcggtgggtggcgaaactatgctggctcaaatcattcgtttggttgagcaagcacagggttctaaaatgccgattcaagctgtggtggataaagttaccttatggtttgtccctgcggtgatgattgccgcagtacttacattcctagtctggcttatttttggtccatcaccagccttaacctttgcgttggttaatgctgtggcagtgctgatcattgcctgcccgtgtgcaatgggattagcgacaccaacctcaattatggtgggtacaggtcgtggtgcagagttaggagtgttgttccgtaaaggtgaagccttacaactattaaaagatgctaaagttgttgcagttgataaaacagggacgttgacagagggtcatcctgtgctgactgactttgaagtaacccaattgtttgagcgtgattatgttctaggcatggttgcggctgtcgaatcccgttctgaacatccgattgctaaagcaattgttgatgcggcaaaaagtgaaaacctagctctacctaaagtcgatacctttgattcagtcactggtatgggtgtctatgcaaccatcaatggtaatgaaaaaatcaatattggtgcagaccgttatatggttcaacttggtattgatgttgctccatttgctgttacagctcagcgtcttggtgatgagggtaaatcccctctttatgttgctgtcgatggcgaactagcaggaattattgcagttgccgacccaatcaaatccacaacgccagcagcgattaaggctctacaccaattagggcttaaggtggcaatggttactggtgacaatgttcgtactgctcaagcgattgccaaacaattgggtattgatgaagtgattgctgaagttttaccagagggtaaagttagtgcggttaaagagctgaaagcaaaatatggccatatcgcttttgtgggtgatggtattaacgatgcgccagctttggctgaagctgatgtgggacttgcgattggtacaggtacagatgttgcaattgaatctgccgatgtcgtgttaatgtcagggaacttacaaggtgttgccaatgcgattgccttgtccaaagcaacgattggtaatattcatcagaacttattctgggcatttgcctataacaccatgttgattcctgttgctgctggtatattgtacccagcctatggaatactgatgtccccaatctttgcagcaggtgcaatggctttgtccagtgtatttgtactcggtaatgcattacgtttacgtcgattccagtcaccatccgtcagtcaaggctaa

SEQ ID NO: 54723 - DNA, 459 bp, Acinetobacter baumannii
atgaacattggtaaagtctctaaagcttcaggagttaccgccaagatgattcgttattacgagcagattggcctgattcccgctgctggacgtaataatgcaggatatcgctcttactcagtaaatgatgttgaacgtttaaagtttatcaaacgaagtcgtgaactcggtttttcagtagcggaaatatcagacctactcgatttatggaataaccgcagtagacagagtgctgatgtcaaacgcctggctcagggtcatattgaaaagctggaagaacgtatcaatgacctacagcaaatggcgaatactctcaaggacttaatcgactgctgtgctggtgataatagacctgattgtccgattcttgaaggtttgcaagagccccacaatgatataaaggacgttcaccatcataatgacctgctttccgtttcacctttaacccgaaagaaatga

SEQ ID NO: 54724 - DNA, 1593 bp, Acinetobacter baumannii
atgtcaaaaagaacaagagataatttcacccaaagaacaattgatgcactacgtcgcagagtatcaaactgttgttcaaaccctgaatgctatgttctaacagtggagcctcaagcgactgatccaacaaaagtaattgatacaggtgtagcagcacatatttgtgctgcatctatcggtggtcctcgctataaggcagagatgacaactgaagaaagaaaagacatcaataatgcaatttggctttgtgcacattgctctataaaaatagatagggaaccagaggcttatccagcccctttattgcaccattggaagaaagaagcagaacatagaataaaaattaattcaaactcaaggctttatacgcagaatgaggcagactacaaagttcatcgtaccttattacaaggtataggagtaaacctatctgatcgaatgcagacttccatctcagaagtagcaagagctgtaaaatcatatattcataaattagacccacggctagatgtggaatactcttttatcaatggttctaaccactttgagatcaatgttaaagaagatacagatgatcctgttatcatcaactttattcctattgctccatctgaatataatgaaaaattttcggacttaatagatcatggccaaactctctcatgtgatattgccaaggtaaccaccaactcattagggctagactcaatatttccccagaacctaaaggatggcatcctgattattgagcccaataataaaagaactgccattgttgagatacaggatgaagagggtgaaacgcttatgagttttgaagatgaattgatattaggaaaagaaaccttttccttttcctccatgaaatataatcatcttctaagttttaaaatcaataaaattccatattctggacaacctataaaggatggttttaatctggatttaaacttccagttatgggataacaaaaacttatctaaattaccttactttgatcaaatttttaaattttataaatcattgtcaaatagtaaagaattcaaagcaatcatatatatagatggtttagaagtattctcttcaagcacctcaattggaaaaacttatttttccagactattacctttactatcatatacttattattgcagactcatttgtaatgttcttcatatcgaattaccattcaaaagtgacattacgtttagtattgaagaataccgcgatgtttttgaaactgccaaggcaataaaagcagttcagatcaataataaattttcttgtacttttaccttgattagggactctctactatctatcagcacctttatgggaagtagtgagattattatccaacagaatataattatagagctcgacaatgtattcaaagagaatataaagaaagatgtttttataagacatacattcactaatccaaatttatctgtaattaataatactaaatccaagaaaaattatacttacaaaatcaaagcagataacaaacaccatcttggtcgatataaaaggatgaccacattaactccaataacacctgcaaatgaaaaagaggttatgtctatatga

SEQ ID NO: 54725 - DNA, 606 bp, Acinetobacter baumannii
ttggatcaacctgatagcgtaaccattagtgtaactccgacgattgctgccaagttgttgatccctcttttaggtaaactacatacatcattgcctgatatcaagctgcatacattagctactgaagctgtatcagattttgatcgggatcaggttgatattgctgtacgccttactaaaaagtcatttccagagaatttggaagcgcagttattgttccgtcaggaactgattgttgtggcaagtccttttcttgtccaagatttaactcttcctttaaagcctgaacaattaatatcaatgccacttctacatgatgctcacgataactggcccaagttcctaaatacaaatgttaagttatctggacttgtttttagtcaaaccactctggcattagacgctgctttgtcagggcaaggcattgcgttagcatgccgagcctttgtagatgaagagattaaatcaggaaaactggtacaggttgtttcggaaataatgaccattgaaccaagttattatcttgtacggaaaaaatcctcacactctaatactactgtgaacaagatttggcagtggtgtatagaatatcttggtactaattaa

SEQ ID NO: 54726 - DNA, 255 bp, Acinetobacter baumannii
atgttatctcgtcggaaactcccatctttaaatgctttgcgtgcttttgaatcggcaggacggaagttgagtttccgtgctgctgcggatgaactgggagttacccaaggtgcgattgctcagcaggtccgggcattggaggaacatctgggggttacactatttcagcgtcttccaagaggactggctttgactccagagggagctaattacttggtcaatatgactcatgcctttgatattcttacagaataa

SEQ ID NO: 54727 - DNA, 591 bp, Acinetobacter baumannii
atggcaaatgatcttattcaaattaatactttggcctggaaagaacttgaattggcaactatcacccctgaatcaggtttccgctatatcaatctatgctcggtagataaagaggatacgccacaggccagaatggtcgtgctaagacatgtaaatcaattaaaacgtattcttgagatccataccgatattcgcagtccaaaatggaatgaactcttggcaaacccatctacgaccattctggggttttgctcaaagacgcgtttgcagcttcgcctaaaaggtattgccacacttcatgcttctggtactgaagttgctcaacaggcatggcaatcattgagtatatggacacagagaacctatacgggtggaccaccaggagatgagtgtgcttttaccactggttgccactcacttctagaaacagacagtgatgaaagacaagatggatattcatgttttggtgttatttctgtccagattgagattttagactggtttcaattgcagcaccaaaacaaccagcgtgcatatttcacttatgacaacgatggaaatttgatgaatagccattggattaacccctaa

SEQ ID NO: 54728 - DNA, 873 bp, Acinetobacter baumannii
atgcttcgcgcttatgtcgcactagttctacttggaatcatttggggaacaaattttatctatatgaaatgggccactatccttatttccccctcacaaaccgtattcctgcgagtcctatttggatttcttcctcttttagtgattgctatttatacaagggcaatcaatcgccagcaattacgttatctccctcatttcaccgtgatgtcagtattggcaacgacactctattattatgggtttgtcgctggaacagctcttcttcccaccagtatcgctggactgcttagtggctctattcccatttttacgttcttggcttccatcatatttcttcgtgaggaacaacctacaaagcggatgacccttggaattatactaggattcctaggcatcatcttaagtgccagaccatgggaaagcacacaggagatccctttgatgggtatcgtatggatgattgttggaacactcagtgttggatgttcttttgtttatgcccgatattttctttctcccttaaacttacctccagtggcattagcaacatggcagtcaggcatcgcaacacttacattgttgcttctaacagactttgaccatattactgcgattacatcggacatccatacactatggggggtgattattggcctagggatgttgggaacgggaggtgctttcttcatttattactacatcattcaaaagcttggaccagtaaaagctgctggggctacatatattgccccaattgtggctgttatcattggcgctatgattggagaaagtataggagtaattgaattattggcattagttttgattcttggaggggtggtgttaattcaacttcccaaaaatacttaa

SEQ ID NO: 54729 - DNA, 189 bp, Acinetobacter baumannii
atggaatttcatgttgaaggtatgacctgtggcggttgtgcccgtggtgtcaccagagcaattcaagcagttgatgctaatgcaaaggtaattactgatcctccaaatcgcagtgtgaaagttgaaacaactgcaactcagcaacaagtggttgaggctttaacagaggctggttttcctcctcgctaa

SEQ ID NO: 54730 - DNA, 1308 bp, Acinetobacter baumannii
atgtttacagtattaaaaaacacaacatatagacatctatttcttgcacaagtgattgcattaattggtactggcttaattacgattgcattggctttacttgcgtatgatatggctggcgaaaaagcggcacaggttctcggtattgcactggcaattaaaatgattgcttatattgccgtcgcacctgttgcctcagcttttgcagaacgtttaccccgaaaaaaggttttggttggattagatattattcgggcattaacagcactttgcttaccatttgtaacccaaatctggcagatttacctgttaatttttattttacaatccgcatcagcagcatttacccctacatttcaggcaacgattccagatgtattgcctgatgaaaaagattataccaacgccttatcattgtcccgtctagcttatgatttagaaaatataattagcccgatgttagcagggctgttattgacagttattagttataacaatttattcttaggtacagtcattggcttcattggttcagcattatttgttgtcagtgcaaaactacctgtagcaaaaattcctgaatttaaaggtatatatagtcgaatcaaacagggggcaaaaatatattttaatactccacgattgaaagccttacttgcattaaatctagccattgcttcggcaagtgctgtagttattgtcaatacagtggtactggttcaatcaacctttaaactgacagaacatgcaacaacttgggcgtttggtctatttggtcttggttctatgctttcagcatttatattgcctaaagttcttgataaatttaatgatagaaccgtgatgttaacaggtacaaccatactgaccattggcttgttctctggctattttattcattcctatgcttggttattggcattgtggtttattttaggtgtgggctattcagtggctcaaacaccaacagggcgattaattcgtaaatcagcatccagtgaaaatagaacagctttatttgcagcacaatttgcgttttctcatgcgtgctggttgattacttatccattagttgggtggttgagtaccaatgtgggaacattacagacttttatacctatggcagtaattgccgttatttcactcatacttgcgatgcgtgtatggtcagctcaggacgaaatgtatttggctcataatcatgatgatttaccaccagaacatgagcatttgcaacaacatctggtcaatggaatccatattcatgaatatgtaattgatgattaccaccagaaatggccaaaataa

SEQ ID NO: 54731 - DNA, 690 bp, Acinetobacter baumannii
atgtacaacactgaaattccaaaaaatattcaacttccatcttccaaaaagttgattaaatcaacagtaattgcagccataagtgcggtagttgtattagtgacatgtgtgatgcccgctgaatatggtatcgacccaacaggtataggaaaagccattggtttggttgagatgggagaaattaaacagtctttagccaaagaagctgaacagggattgggcgaaaacactggcggttttgcagaagagtttgatatttctggacaagatactagtgtttcagaggcaacccaagctctaggacaaacagaagcaaatacaaaggtttcaaatgaaagtgaaccagccaaaatgatacctgctgtgaccaaagaatctatttcgattgacctcaaggctggtcaggcaacagaagtgaaactggcaatgcctaaaggtgcaagtgttaatttcgactggaaaacatcaggtggtggtttgaattttgatacacatggagacccagtgaatgccccgaaagatttttatcatggttatggcaaaggtcgaaatgaaactcagcaatcagggactttaacggctgcatttgacggtaaacatggttggttctggcgaaaccgtaacaaagaatctgtcacagtaactttaacagttgaaggacagtttagtgaaataaaacggattttttaa

SEQ ID NO: 54732 - DNA, 528 bp, Acinetobacter baumannii
  misc_feature (513)..(522): n is a, c, g, or t
atgacaagttctttcttgcagtgggtgaaatcaagaagccgcttaaaactgatagtagtattaagcctattcttgtttagcccaatgttatttgcgcatggtgtttcggaaggtgacaaaggttacattcaggaaatctacggtgtccatatcatcccatttatctatttgggagcgaaacatatgctcacgggatacgaccacctattgtttctcgttggcattattttcttcctatatcgaataaaagatataggcttatatgtcagcctttttgccattggtcactcaatcaccatgctgattggtgtgtactacaacatctcaatgaatgcctacattattgatgcaatcattggtttctctattgtttataaagccttagataatttgggtgcttatcaaagatggtttgggtatcaacccaataccaaaattgcaaccttaatttttggtctgatacatggttttggtttagccgtcaaaattcaggaatatgaagtccctaaagannnnnnnnnnccctaa

SEQ ID NO: 54733 - DNA, 1005 bp, Acinetobacter baumannii
gtgactgacattatcggtggtgtgacgggtggtaaccctcttggcactgtgactgatatcatcggtggtttaactggtggtgttactggtggtaaccctcttggcactgtgactgacattatcggtggtgtgacgggcggtgttactggcggtaatcctcttggtactgtgactgacattatcggtggtttaactggtggcgctactggcggcaacccgcttggtactgtgactgacatcatcggtggtgtaacgggcgggattattggtggtggtacatctcctatttccccagttgttgatgccgttcaaagtggtattgatgttcttcaaggtgtggaaagtttaaaaactagcattattaatacaggcattaatactgttgcggacactgtagttggcgtacttcctcaaactgaacaccctgttactgatattgctcacctcggtacattaacttttgaaacttctcgcgatactgtaaatggtgcgcttgaagttgtatctgatttagtgggcggcaatatccaaggtgcaactgatcatgcgactggtattgtcaacactctcgtttcaaatggcacaactgcggctggcattttaaccgacattcttggtggtgcgactggtgctattggcggtgttactggtggtgtaggcggtgatagtccacttggcactgtgactgacattattgggggtttaactggtggtgctactggaagtaacccacttggcacagttaccgatattattggtggtgtgactgggggtacagctggcagcaaccctatcggtgtcgtaacagatatcgtaggtagcttaactggtggcgtaactggtacaggtggcacagatgttatttctaacttattaggtggagtaactggtaacttaggcggagtatcttatacagtatctaacgtaacagacacggttcatactttagtacctcagtcactgcttactgaccacttcttaaatatctctgtacatactgtttaa

SEQ ID NO: 54734 - DNA, 807 bp, Acinetobacter baumannii
atgagcgctcatctttctacatttaaaaattcaacagcattaataacaggagcatcttcaggaataggtaaagcctatgctaaaaaaattgcatctttaggaatccacctgattttaacggcacgctccgaacaaaaactaaatgatttagccgatgaacttagaaaaaaatatagcgtaaatgttgaggtgatcgttttagatttagctcaacccaattcagctcagaccttatttaatgaagtacaggcaagaaaattatcggtagaaattttaattaataacgctggatttggaaaatggaccaagttccttgatcaatcgatttctacctatcaagaaatgattacacttaacatcagcagtgtaacgtctttatgttatctgtttttgccacatatgctttcgaacaaaaaaggcatcatgattaatatttcgtcgacaggtgccttccaacctctcccttatattgctgtttacggcgcaactaaatcttatgttttgcagtttactgaagcacttgcaggggaatatggcacttcgggtgttaagtttatcgctgtttgcccaggcaatacagaaaccaattttactcaggtcgcaaatgctgataccagtggaatgaaaagctctacagtagatgatgttgtctctgctacagttcgagcattagataaaaataaagcgacggttgtagtgggatgtagcaattatttaacgtctcaattgccacgaattctttcccgcaaaaaaatgattaatttagtcgaaggcatgctcagaacgcgtgttcttgagcagtcataa

SEQ ID NO: 54735 - DNA, 372 bp, Acinetobacter baumannii
atgtatatcggcgaattagcatctttaactggagccactcccaaagccattcgacattatgaaaaattaggcttactaccagtcgcaaaaagaaaaggcaattatcgtatttatgaagagattgatgtcaaatcagttaagatgattcgccttgcacaagcagtaggatttagcctttctgagctttatgaattgtcagctttaaaatataaaaataatcgctttccggtagaaattgcgcagcagcttattcaaaaaaagaatcaacaaattattgaacaaaaagaagcattaaatcgtttgcaactagatttaaaacaactggaagatgagattattgaaacttatattaccagtaaaatttctgcttaa

SEQ ID NO: 54736 - DNA, 303 bp, Acinetobacter baumannii
atggcatatattgataagttagctgaagtaacacttggtaagactacttataagaaatttcctgtaattttaaatatacatcatattctcaatcgtcttgttctaaaatattttctttcacataggatagtgtggagtgaaaatacacttcatacgtatagtaaacacttatgtgattttttctctcaactcgaagttgaaaatccagaagcatcctttgatcatattaatgatgtttggttagaagcatatgcatatcaaatactagagagaaatcagaattcccctgtttatatttcgtaa

SEQ ID NO: 54737 - DNA, 270 bp, Acinetobacter baumannii
atggggttatggggctttattggaacgtcggcacctgttgcatggaacacgtggcttgcccaaacactacatcaagatgccgaaattggtggtggtttgatggttgcgattattcaatttgcaattactctaggcgcaactataggcggattgttatatgactcacatggctatagcgtcacgttctatatgagcgcaactattttgctattaggcgcgctgactgcctatattacatggcggaatgctactcacgtaacacatcaataa

SEQ ID NO: 54738 - DNA, 993 bp, Acinetobacter baumannii
atgaaatatgcttcaaattttgccctaaataccaactggaaattattactgaatgacctaggcataaatgttgaagatgcattacgtttggcatctctaccgtttgatttattcaaccgtaaagatgcaagccttacgcctgttcaatatttcaatttttggcacgcaattgaacaacttgctggaataaatgacttacctttaaaaattggtcaaatgattacagttgaactgtttgacccagcgatttttgcttgtatttgtagccctaactttaatattgcgatacagcgtctatctgaatttaaaagactcgttgggccaatgcagttacaagtagcaattgataacgacaccacaacgctagaactcaaattttataatgtatctacgccaacgccacaaagtcttgccatgtcagaactggtcttttttgctcaattagcaagaatatgtacaaggcatcaggttatacctttgaaagttacactgcccgatttacctaataatctggcagaatacaaaacattttttggcgtacttccacaaaaaagtgaacacatttcgattgtcttttcacgccaagatgctgaacgtccttttttaacagtcaacccaaccatgtggtcttttttcgagccaaacttgcaacgtagtcttatacaacttgatgaagatgcaacagttagtgaaaaagttaaagcaatacttttagaaaacctacctgctggactatgtacgatagaagatgttactcaacgactcgcgatgagcaaacgtacactacaacggctacttttagaagagcgaactaattttaaaacgcttttggatgcgacacgtcaatctcttgcccaacattatttagaaaaatcatcaatgagcacgggtgaaatttcatttctattgggctttcaagagcacaactcattcagccgagcatttaaaaactggacgggtaatactccgcaagaatatagacttatgcattaa

SEQ ID NO: 54739 - DNA, 594 bp, Acinetobacter baumannii
atgttcaacaaaaaagaaatatttttcttaccaatcaaaatagataatgaaacagtctatgctggtttttggaaacgtcttagtgctggcattattgatatgctagtgatgatacctttgatgataataggttattttactcaaaatatatctataattatttcaatgatcactgtagttattgcagctctcttcgcgattacttatataatttactttcactatcgatttggtgcaacgataggaaaaatggtggttggaataaaaattacacgtcccgatggtagtaaaatcactcttatacaagctgtgttaagatcttcagttgatattgttttttgtattattacggttatatccgaattaatcgcattaagctatgctgatcctgaaatatacctaaatgcagggaaaattgatcaagcaaaatatattctacttttttatccagcttggtacagtatagttaactcagcaagtgaattatggacttggagtgagtttattgttttactttttaataagagaaaaagagctattcatgactttattgctggaactattgtaattaaaaaacaatattcaaaaaactaa

SEQ ID NO: 54740 - DNA, 351 bp, Acinetobacter baumannii
atgaaatataacgttatcgcattgcttacaggtttgttattggtctctgctgctcacgccgaggaagcccctatggatgcaactcacttgggcttgagagcttttgtatacaatgcatttacaggtataaaaaaagcagcggatatgcctcaatttcctaaaggacatccgttgacgaaagctgaactttataatggtgtggcggctggtgttcgagttcgtggtaaaaactgcaatagtgtggttgacgctcgtgcactagatgccaatggttcaaaaatatcggtgaagtgtgctggcggggaaagctatcaagtattgcctctaacaggtgaggttaaaggtaaatga

SEQ ID NO: 54741 - DNA, 354 bp, Acinetobacter baumannii
atgaaatcacgcatttgcctatttgggtttgtttcagcaatgctgatgagcaatgttaatgcgcagacccaacaagaattgtctcaagccttacttggtcaattactcggttttacgcaaaatgtttattttaatgccaatcaaatagctgaaatgccaaagatgccaaccgagcgtgctgcaactcagaccgaaatattagaggctgtggctagtgcgctgagactgcaacaacatccatgtagttcggttttaaatgctgactatgttgatgagagtggtaatctgatatcaattaattgtgtggatggcaattatgtcgtggatgcacgacgtggcaagatcaatccttaa

SEQ ID NO: 54742 - DNA, 915 bp, Acinetobacter baumannii
atgaatacagttaaatttcaaaattcaaatggtcaagatattactattgcagcaaatattcactatccatcaaactttgatgaaacacaaaagtacgtagcaattgttgttgctcatccgggtggaggcgtaaaagagcagaccgcaggtttgtatgcgtccaagctcgctgaacaaggttttattgcaattgcatttgatgcaagttttcagggcgaaagtacaggtttacctcgccagttagaaaatccttacattcgtacagaagacattagtgccgtgattgattacttaaccaccttaagttatgtcgatcaaaaccgtattggggcaatgggtatttgtgcgggcggtggatatgccgcaaatgcagcaatcaatgaccgccgtattaaagcagtaggtacggtaagtgcagtgaatattggttcaatgttcagaaatggttgggaaaacacagttaaagatgcagatgctattccatatatccaagcgggttcagatgcgcgtacagcagatgcaaatagtggaaatgttgcaaccattccgcttgcacctttaaaagaagaagatgcaccgaatgaagagcttcgtcaggcgtgggaatattaccatacgccaagagctgagcaccctaactcaccaggggttgcaacagcccgtagcttaactcaaattattacttacgatgcttataacaaagctgaagctttcttaactcaaccattaattgcaattgctggaagtgttgcatgtagtaaatggatgagtgaagacctaattcagcgtgctgcaagtcaggataaaactttacatattattgaaggttcaaaccacatggagttatatgacattcctaaatatgtaaatgaagcttcgaacgtacttgctgatttctttaaaatgaaattataa

SEQ ID NO: 54743 - DNA, 921 bp, Acinetobacter baumannii
atgaaaaacgtaaaaattaaagcaccttattgggaaatcgcagcaaatctctatttcccagaaaattttgatgaaagtattcaatacccagcaattattagtggacacccaatcggaagctgtaaagaacaaacctctggaaatgtatatggtgcagcattagcaaaagctggctttattgtgattgcatttgatgcaagttttcagggtgaaagtggcggtgaaccacgttcaatagaaaatccggtacttcgtgtagaagacttccgtttagtgacggattatttgatgacgctgaactatgtcgatgaaaaccgaattggcgtattaggaatttgcgggggcggtggttacgcactcaatgttgcaatgaccgaaaaacggattaaggcggttgctacagtagacgctataaattttggtcgcttgtcgagagaaggctttagcaactggaatcctttagagaaactagagcttattgcaaaacaacgtactgccgaagctcgcggagaaacaagaagaatcgatgatttgctgccaagttctgttgaagaagccaaatcggctggaataacagatattgatgtactagaagcaacagactattacaaaaccgatcgtggctatcaaccaaatggtgttgctaaaacattattttcacattcggctgtggcaattggttgggatgcatttcacttagctgaagtattacttacacagcctttattgctgattacaggtgataaggtcggtggttttggttcatatcgagacagtttggaaatctatggtcgagcacgttcacaaaataaagagcttgtgattgtagaaggttggtctcactacgatttatatgacaagcctgaacccgtggcacaagcattagcaaaactcatcccattttttcaaaaaaatatctaa

SEQ ID NO: 54744 - DNA, 888 bp, Acinetobacter baumannii
atgaaaattaatctgaatgatttaaaaacattttctgaagtagtaaaaactaaaaattttacgaaagctgcggcatatatgggcgtgacccaatcggctgtaagccagagtattaataatcttgaagcacaattagggataaagctattaaaccgttctacccgtagtctcacccttacagaagcaggttcgcgccttatagagctcgtcggtcaaaacattgaaaatattgacttaggcatagaacaaattagctcgatgaaagacctgccaagtggtcatgtgcgtatttctgccgatgcatttaccattaagtattatttatggccaaagcttaaaaagcttgtaaaacaatatcccgatatatctttggaactgacttcagaaaacagacgaattgatattgcaaaagaaggatatgatgctggagtacgtgttggaaacttggtagaaaaagatttaattgcggttccgattagtaaagaaattcccttccgattggtcgcttcacctgaatatttagaaaagtacggaacaccacaatctgtagacgatctaaaaaagcacaaaggtatttatatccgtcttttaactgataactctttaatggcatgggagtttaaagataaaaataaaagtgtattttttagaggccccgttcaactggtcatgaccagtttagatgaaatgcttgatgctgtacttgatggttgcgcagtagcttatttgccctactttctagtgaaaccagctttagaagaaaaaaaattagtaagtttattagaccaacacgctgttaccttgccacctttttatttgttttatacgagccgtcgcttaatgtcccctgcctttaaaattgttaaagatacgttgagtgagatataa

SEQ ID NO: 54745 - DNA, 951 bp, Acinetobacter baumannii
atgaacaactttataacgagatgtgtaaataatctgaggcagtggcatgaagttgcgctgacaatgactaaagcgatagttgcaataggagtgttgtgcttagttgcataccttttaacaattagctatatcccttcagaaattagctttggcgatacacttatttttttactgatttttgcagctttttctattgtttataccgcattctgcatgatgttatttttctttggtatttctttactgccagtgacttatttcatcttaagtgtggttgatagatatctgccatctcatatcaaaatcggagaaaaacttccatttccaaagattagtattattacattgggcgtatctgtttaccttctctacattattcgtggtttatttttcctagattggaaaattaatgcttatattggcattactataagtctaatttctttctcttattatgctttttatgttaatcagaagagagtcaaagaataccgtttaaagtttgaaaatttaagagaaattattgatgatcctaaagcgagtaaaaatctaaaaaattttgcagaaacaaagttaaagcaattagaaatatggattaaaaattctatacagtcagctctttttcttattctaactccactaatctttatgtctttgattgaagacgtgggcaaaatttttttatattacactatggaaaaaactggtgtaagaatagaaaaggcaaccttatatattaaagaaccgtatgcaaatttaattgaattgccacaaacaacaactaaggagctgaatcagtataaaacctttatttttaaagatgttaaagtgttatttcaaggcattggtaaaagtactttagtttcttacaaagtgaaagatatagaaaagcagttagtgattccaaatgaatatattactgtagagcgaagcaagaaaattgaagagtaa

SEQ ID NO: 54746 - DNA, 906 bp, Acinetobacter baumannii
atggctgctaaattaccgcttcagacattttttaaaacattccagcaacactctttagcagaagttggattaaacgtttttacacttgcagatgctgcacaagataatagtttcttaaagaaatttgagcacctacgtcaaaaatgccttttgttagaagcgagtggtgaggaagcaaaagcggtgtctcctcatttacttcaactccctcaagatttttcatcacaagaatggcaatggatacaacaaaatattgcaggcacgcctcgcatgacaattatagtaagccctttgtccttcaattatttgtttgaccacctacgaaaatttttagaagtaaaatttgaaggtggactcgaaatgtttttggcattttgggaccctgtaatcttagctaccttggttggccataaagaaaataaaactttgtatgtcgaagggcctgtatttaatgctcagcagattgaagacttacttactcctcttcaaagttggtggtattgggataggttaggaaaacttcaagtaatttggggaataaacgaacgggttgaacaattaccttatgtgcaagttcctttacattttaccgttgaacaagaagaaatgatggttgaggcaactttccctgataatcttatttattatttaaaactcaataatgaatttcttattagtgatatgacagataatgaattatatcaatttgttattaaatctattcctgaggctagagcgtataacttatttggtacacgagatattttaaattttatttgtttaaaattgatttataaagaaaactttttaacagataaagggttaaatcaaaaactagaacgcttaaaagataaaaaaatatctatggatgaagtgatggtccaacttgtagcaaatgcgagctaa

SEQ ID NO: 54747 - DNA, 429 bp, Acinetobacter baumannii
atgatgaataaaatgcaacggtcgaatagattatttttaatacttggtttgatatttagtcttgtaggttgtgttagccttggtccaaatgcgacttattatatgggtacaacatcctttaattatgatccttcatataatagttatatggttaagatgaatggttctgaaattggaggtggatttgggaatgcaacccttactagttcaattaaagtaggagaacaagtcattacatggaaaaatgcaagcacaggtgaaaaacatactgctaaaaatcaagtgactatcacaaaagaacagttaaaaggtaaaaagtatttagctgtacatctttatcctgatgataccgtagaaataacgatttcaaataactggcctatgccaactgaaaaaggtcttagcttattagaccaattcagacggtaa

SEQ ID NO: 54748 - DNA, 432 bp, Acinetobacter baumannii
atggttttaaagaaaatattactattgcctatgagcttgatgttaagtatggctggttgcgctagttttggtccaaatgcaacttattatatgggaaccacatcttttaactataatcctgcttatacaagctatgacgtgacattaaatggttatgaaattggagctggttttggtggggggatgagttcagaaccagtaaaattgggaccacaaacaattacatggaaagatgcaaacacaggggaagtacatacttcaaaaaatatagtcattattaccaaagagcagttaaaaggcaaaaaatatttagcagctcacttatatcccgatgatacggttgaaatatcaacttcaaatgattggcctgaacctattcaaaagggattagattggcgaactgaaatctggaagaagattcatataaattaa

SEQ ID NO: 54749 - DNA, 426 bp, Acinetobacter baumannii
atgagtttaaagaaaatattgttattaccagtaagtctaatgttgagtgcagctggttgtgcaggtattggtccaaatgcaacttattatatggcgacaacatcttttaaatatgatcctcgatatacagattatatgatggaagtaaatggctctgaaattggaggaggatttggtaaagcaatatctactaacccaattaaagtgggagagcaaatcattacatggaaagatgcaaatacgggtgaaaaacatgctgctaaaaatcaggtaattattacgaaagaacagttaaaaggaaaaaaatatttagcagctcatatttatcctgatgatactgtagaaataacgacttcaaataattggcctgacccaacagaaaaggggatgaagtggagagaaaaaataaaaagagagggtcaataa

SEQ ID NO: 54750 - DNA, 1677 bp, Acinetobacter baumannii
atgttagccgttcaattaaaacgtacagttaatataaataatgatgttgcaaataatcagccatcttgcaagcaagattgtcgcgatgtcgtgaatatttcagttttttttgatggtactggaaataatgaggatgctgataaaaaagaaaaaaaatggtccaatcctgcccgtttatggcgtaatgctcgaacacatagtgataaaaacgaagcaaaaaatgattatgcaatatatgtctctggtgttggaaccagatttaatgctgagttaaatatctttcaaagagcgatttctgactttcaggatcactatagcctgttaggtatgggcgttggtttaggtggtgcaagacgactagattatggtgaagaccagttaaatgatgctttaaaacaagtcttaatttttaatgcacaaaaggcagaaaaagatgttaaaaaatatgtaggtgaaaaaaagaattatagctttgcagaagtcgacaaaaatttaaaagatcacagactaattaagaaaattaatatttctgtgtttggtttttcgcgtggtgctgcacttgcccgtgcatttacaaatcaatttatagggcagtgtgaatcaaactgcgatgggcttacctatggacaaggcaaatatccaattgagtttaagtttttaggaattttcgatacggttgcttcatttggtttgcctgctacaaatttaagcaatagcttaccttttttagaacgtgatttggtggtagatgagcgggttcaaaactgttcacattatatcgctggtaatgaactgcgctttgctttcccagtagatgttattcataaagacaataagttagcaaaccctaactggaaagaggtggtatatccgggggtacattctgacgtgggtggggggtatgaaccagatagtcagggagtaaatgacaattttgcccgaattccgttaaaacatatgcttgatgacgctgtacaagcaggtgtcagaatgtatagttatgaagaactgcaacagaactttaaggatttattcaaagaacagtttgaaattcaaccagactctcaaaaatattatgatgctgtaaaagcagctacgccgagtcaaggaagtgttcaagagcagattaaagggtgtatgaaactttattacagtgcatatggtaccattgcccgtgctggaaaagaactttctgtgagtgagcgtgtacgtcaggaaaataaatttcgtgaatacataccagttggcccatccgatatggcaactgaaatgcaaaggttgaagaaactaaaagaagcaactgcttctaagaaagatggttttaatatttttagagttttttcacctgtctcaactgcatatgaatatatgattagtatcgaagattggcaatttgagagttggaatacaaatgtcagtgatgatattaaaaaattctatttaaattatgttcatgactctaagtatggttttttaagtaacgtagaaccatttagttatttccgtcaaagaagggtctatgagtcacgtcgtagtgccagtggagaagagcgggataaaaaagctgccgaacagaaagtaacttgtagtgcccctaaacaagagataccgcaaacgcagtttattgatgcttatgaacaagctcaactaacagagaactttttaaatgcatcttag

SEQ ID NO: 54751 - DNA, 375 bp, Acinetobacter baumannii
atgcttacaatcgaagctgaaaattttaatgataaagttaacttgaatgtaaaagaagaggaatatagcttaatagcccaaggaaatagctcagatgtaactctctattttaacaaacccgataaaacggaccttcctatttatggtgaattacagcttttggctgaaagtaataaggcacgttttgcctcacttgcttggataaataaatataatgatatgagtgttttattttgtataaattatgaagactgttcagataatacggaatatagttttgataatgatagtagacaattaaatataagatttaaaaataattttaataaattatggaaaaattatttagttgactggatagaaaaaaagatttaa

SEQ ID NO: 54752 - DNA, 267 bp, Acinetobacter baumannii
atgttattcaaaaaattcgctgttgctgctgctgctgttgccgctactttagctttcgttggttgttctaagaaagaagaagctccagctgctgctgctgcttctgaagctgtagctgctgcttctgaagctactgctgctgcttctgaagctgctactgctgttgacgctgctgcttctgaaactgccgctgctgcttctgacgttgctgctgctgcttctgacgctgctgctgcttctgacgctgctgcttctgctgcacactaa

SEQ ID NO: 54753 - DNA, 270 bp, Acinetobacter baumannii
atgttattgactactgatgaagttgaactaatcaaaacatgtgatgaaagccctgaacaatatattgcagtttttcaaggtcaacagattggatatctccgattaagacatggcgaatttagagttgattatcctgattgtggtgatgagaccattttgtattctcaagagccacaaggcgatgggtgttttgaagaagatgaacgtgagtactttttgatgaaggccaaaaaagcaatcgttaagaagtttaatgaaatggaggggtga

SEQ ID NO: 54754 - DNA, 213 bp, Acinetobacter baumannii
gtgccagagaaaaagatttacttaacctgtgagcaattatatgcagcagcaaactttggtgcaccaaacaaagatccagaacttttagaaactgaattaacaattgcttggtttgatgaagctcatagcggcagtggttactacgtttatataagtgagtatccagaagaaggtgcaatgaagctggaaagcgaatcgggagctgaaaaatga

SEQ ID NO: 54755 - DNA, 834 bp, Acinetobacter baumannii
atgattttatttggtaaaaagaaagttaaaccaagccaaaaagcttatgccgttgtgactggcgcaggcagtggaattgggcggagttttgcacttgaactggcaaaacgtggtggtagcgtagtgtgtgcagatattaatttagaagccgcagaagaaacggtaaagcttcttgaacaagaaggcgcaaaagcttttgccatgcgctgcgatgtgggtaatgcagaacaagtgaaccacctagctgaaactgctgaaattttacttggtcaccctgtgacccttgtcattaataatgcaggtgtgggattaggcggtaagtttgacgaactcagtctagaagactggaactgggtcatgaatattaacctttggggcgttattcatggttgtcatgcatttgtgccaaagttcaaaaaactaggttatggcgcgattattaatgtggcttcggcggcatcgtacacggctgctccagaaatgactgcttataacgtaacgaaagcgggtgttcgtgcgctgtctgaaacactttcggctgaacttcgtaaatttaacattaaagtcaatgtgctctgcccgactttggtacccaccaatatcattaaaaatggtcgtattccgggccgctattccaagcttgcagaccatgcactcatgaactacgcactcaccacaagtgacgatgtcgccaaactcacacttaaccgtcttgatcaggatgagctttataccattcctcaaatcgacgcgaagttgttctggctcatgaaacgtgcatctccaagcttgtataccaaattccttggtacatcgtacaaattatttaaataa

SEQ ID NO: 54756 - DNA, 1524 bp, Acinetobacter baumannii
atgactgctcaaatgaaaacaaatacatcagcaaaaaaagctgtcaattcgcctagccatatttacgatacctttattgtgggtgccggaatttccggtattgccgcagcaattcgtctcgaccaagtgggctataccaactacaaaattattgaaaaagcagcacgtgtaggtggtacttggcgtgaaaacacgtatccgggctgtggctgcgatgtaccttcagctctgtattcatactcgtttgccccaagtgcaaaatggagtcacttatttgcacgccaaccggaaattttaagttacttagaagatgtaagtaacgagtttaatatcacgtctaaaattgagtttaacaacgaactgctcaatgctgcttgggacgaaacacgccatttatgggtacttgatacaactagtggtcaatatctatcgcgaactgttatttttgcaacaggtccaattaccgaagcacaaattccacgtcttgaaggtttagatacctttactggtgaaatgttccattcggcaaaatggaaccatgactatgacttaactggaaaacgcattgctgtaattggtactggtgcatctgctattcagtttgtgccacaaattcaacccaaagcaaaagagctatttgtgttccaacgtacagcaccttgggtactgccaaaaccagataccgacttgggcgagttgagtaaatccgtcattgccaaatatccagcgattcaggcaagctggcgtaaaagtgtagcgctaacgttgaatgcaattaactttggtttacgtaacccacttgcgctaaaaccagtaaatgtactcggcaagcaattacttaaacttcaaattgcagaccctgagttacgtaaaaacgtaacgcctaattttgatattggttgtaaacgtattttgtttgctaacaattactaccctgcactacaagcaccgaataccacgcttattccacatggtttagtgaaggttgaaggaaatacggtgattgctgccaatggtgaacgccacgaagttgatgtgattatttggggcaccgggtttgaagtatctcacccgccaatcggtaaacgtgtgtttaatgaaaaaggacaacgtttaaatgatttatggaaaaacacttcaccagaagcttacttaggaaccaacattgaaaatgtaccaaatgcattcttagttttgggaccaaacgtactggtttatgactcgtttattggcttggcagaagcacagctcgactatattgtagatggcttgctaaaaattaaaaacaaagggattagcaaactaaacgttaagtctgatgtgattaaaaagcacaacgacttggtacaaaagcatctgcaaaccactgtatttaatagtggtggctgtaagagttattaccttgatgctaacggtcgcaactttgcagcatggccgtggtcattgaaaaagctgaaacaacgcttgaaaaaactagatttgaaagattatgacgtcatatatcaaacgtcaaaaacacattaa

SEQ ID NO: 54757 - DNA, 189 bp, Acinetobacter baumannii
atggggcctgctattcttcgcttaaaaccgggaaaatatgtgcccttaaagggtggtaaacgagaaaaatcgttgcagattatgcaaggaaaaatgcaggtgccttatttagttgatccaaatacaggcgttaaaatgtttgaatctgcccaaattgtaaaatacttaaaacaacaatatggtggctaa

SEQ ID NO: 54758 - DNA, 942 bp, Acinetobacter baumannii
atggaatgtatgagaattcaacctgtaacgagtcatcctggagaaaatgcattatttattgtattaggattagctcaaggtgattctgttgtagaaaaagtaaaagattttgcagctaatttttcagcgttaaccagaagtttgtctaatcgttatccagaaagtaaatttaatgccacgttcggttttagctcaaatgcgtgggatatcttatttccagaacaatcaaagcctcaagaattagaaacattccaagaaatcaaaggcccaaagtacacagccgtttcaacaccaggtgatttattctttcatattcgtgctgatcgacaagctctctgctatgaattgggaagtattatcaatgaacagttgggtaaagtgacttatccaattgatgaagtacatggtttccgttatttcgatggtcgtgcaattatcggctttgtagatggaacagaaaatcctgaacctgtaattgcagcgcagtgggctctagtgggcagcgaagatcccgaattcattgggggaagttatgcatttattcaaaaatatacccatgatatggaaaaatggcgtgctttaagtgatgaagaacaagaaaaagtaattggtcgtaagaagtttaatgatattgaactcggtgatgatgaaaagcctttaacagctcataatgtggtaagtaaagcgcatgatgcagaaggtaatgagctaaaaattatgcgtgccaatatgcctttttctaacccttcaaaaaatgaatatgggactttctttattggatactcgcgtaaatttagtacaacccgtcaaatgcttgaaaatatgttcttaggaaatgagcaaggtcatcttgaccgcttacttgactttagcactgcccaaacaggtactttatttttcgtcccgacagtagattttctagatgacttgggtggcgagtag

SEQ ID NO: 54759 - DNA, 219 bp, Acinetobacter baumannii
atgatgagagaaatctcacaccgcgaagtttatgcactggttgatattaacaattgttatgtcagctgtgagcgacttttcaaccctaaactcaatgataaacctgtagttgttttatctaacaacgatggctgtgttgtttcacgtagcgaagaagcaaaacttttaggtatcaagatgggaataccttggtttcaaattgaaaaagatgctttataa

SEQ ID NO: 54760 - DNA, 237 bp, Acinetobacter baumannii
gtgggcttatatacaattagatatggctatcgtaataatagtttttttatagcttcaaatgctgctggacaattcattgtgattgatgcattaggagcagatttccaaataggtcatcaaatttcttatgaaggtaccaaaataataaatgaaactttaaatgatgagacagaagcaacagttcatctagagagtaatgaaaaagaggcttatgaatatttacgtgccatgaaataa

SEQ ID NO: 54761 - DNA, 939 bp, Acinetobacter baumannii
atgatagatcgcaaattaattgaggaaattcgtagatcttcacgaattatggttcgggaacttggatttatgaatgccactcttgctgctacagactattcaccttcagcagttcatacattgttagaggttgaaaattatggtgctataactgctatccagttagcacaaatcttaggattggaaaaatctagtgtaagtcgaatgctcagtaaattaatagaagctgatgaaattaaagaagttcaagcaataaatgatggtagatctaaatcacttcaattgactgataaagggcgtaatacggttaaaaaaataaatgcatatggtgaaatgagggtaattcgcgctatagaaaattcagaaccatttgaacagaaacaaattgctcaaggtcttacatcatatgcaaaagctttagttgcttgtagaactaacccaattgttgaggtaagtaaaaatattgagatagtgtctggatatcgtgctggaatgattggccgcatcgcagaaatgcatggaagatattatgcaaaaaactatggctttggacatttttttgaaggtaaagttgcattaggtcttgctgagttttcggaacgactgcatgacgaaaataataacatttggcttgctatacataatgatcagattattggatctgtagctatagatggccaagatttaggaaataatgaagctcatttacgttggtttattcttgaggatggatatcaaggtagtggtattggaaaaagattattagcagaagctataactttttgcgatcaaaaagaattctctgctgtgcaattatggacatttagtggtcttgacgcagctcgtaaactttatgagtcgttcggttttaaattgacaaaagaatgggaaggaaatcaatgggggaaaaccatgcttgagcagcaatttacccgatag

SEQ ID NO: 54762 - DNA, 918 bp, Acinetobacter baumannii
atgtctgattttaccgttagagaatatgctttcataagtattgcttatgatggatgtcctcagtcaacactcgatcacgcttatattcctaaatctgcatttgaatatttgtgcgaactttcagcttctttttcaaaacatggggcaaaagtatttgaattagctgggcatagaaagcttagactagatcaatatgttggagttatcgaaaccagatgtggtacgcgtattgaaatattgcccaagcatgttgatataattcttagtgagtctaatcaaactgcgattgaaaaagaacgcgagctcttaaaaaagatgctcaaagtatctctacatttaccataccgtgatgctggggaagctagcctaaatcgctttaaacaacctatacatgagtggatcatagaacagtttctttgtaattttgaaaaacttattcaatatggtttgcgttttgattatcaacgtgttcaggaagaacaaaagtacttaagaggacaattactgcatgtcaaacatatgcgacaatccccagcaagaaagcatatttttccgattgaacacgacatctatgaagttgatcgccctgaaaataggttaattaaaactgcattagatgtcgtttgtaaaaaaacacgaagctctaaaaattggaaacttgctcaagagcttcgcttaatgactggagaaattccaaagagtcaaaatatagttcaagatttcaagcagtggcaatcagggcgtttactcgcactatatgtagatataagaccatggactgagctgattttaagtgaatatatgcctgtatctactcatggtggttggcgtgggatgagtttactatttcctatggaaaaactttttgagcattatgaaccgtaccgggtttgtcggagacttttttatttaagttag

SEQ ID NO: 54763 - DNA, 219 bp, Acinetobacter baumannii
atgaacagtgaaaacacacgtacatacttagcctttgcggcaatcttgatgtcattattttgtgtaataggccttttcttcgtggagatgccagagaagaacagagacttaattaatgtggcactaggtgcgattcttggttggtctggaacagtagtggcattctactttggatctagtgacaagcagcggaaagagggtatcccaaatgaccattaa

SEQ ID NO: 54764 - DNA, 351 bp, Acinetobacter baumannii
atgtcagatacagaaagttatggtatccgcttagaaaaaaaggtggatgatattcggcaagaagttaagtcgctatctgaaagtttaattcagataaaaaccattaatgaacaccagaaagcccaaagtgaagaaaacgcaagaaagattgagaagctagagtcaggtgctcaaaaaacagaaggtgctattacttttctcaagttctttggcgggtttgcgctgactgggatgatcaccttttgcacttggattgtttcaaataaccaagctattcaccaacgcatttcagataccaatcaaaaggttgctgtcattgaatcgaaaattgcttttaggggcactccatga

SEQ ID NO: 54765 - DNA, 138 bp, Acinetobacter baumannii
atgtctggccttcaggaagaatatttacagcatcaaacaaaaattgaacagctccggctctcaattcaatatattcgctggtatctgattagcctaatattactttgcctaatttcagcccttattttctcttgttaa

SEQ ID NO: 54766 - DNA, 270 bp, Acinetobacter baumannii
atgttattgactactgatgaagttgagctaatcaaaacatgtgatgaaagccctgaacaatatattgcagtttttcaaggtcaacagattggatatctccgattaagacatggcgaatttagagttgattatcctgattgtggtgatgagaccattttgtattctcaagagccacaaggcgatgggtgttttgaagaagatgaacgtgattattttttgatgaaagctagagaagccatcgttaaaaagtttaatgagatggaggggtga

SEQ ID NO: 54767 - DNA, 312 bp, Acinetobacter baumannii
atgagtgaaccaattccaaaagaagtgattcgtgaagaattgcttgagaactttagaaacttagcaagatactgggcacaaagtaaaggcactgatttagaaaaatgtgaaggtctggttcattcgatcttaacaacttttgatggtctttctgctttcccagctatcgatctggttatgcgccctcatccagatgataagcagtactttataaataatggctgtgactatatcgaggatggaactgtaattaatgatgatgtggtgttgaacgatttgttttatagcaaagcggaaagtaaggaggggtga

SEQ ID NO: 54768 - DNA, 1092 bp, Acinetobacter baumannii
atgataagtgcaacagaaatccattcatggtttattcccacggacttaaagcaagatgaggcattatcttcttggttgatacgtgccgcacttgacagtggttgtgacccattaagtttaactggagtactttgggccaaatggcgaatctggtctgtagatgtagatcgtggtttaagtgcagagcaagtacaggtattgatcaataagacaaaaattgatgaaagccaatttaattctgctacgcttcgcaattttttaattaaatataatctggatcatcaaacttttgatgcatggtacttggtattaggtacaagaaatcgtaagcatcgaggtggctggcaatattgtcctgagtgtctatctgaggataatgttgcctatttccgtctgccttggcgttttgcctggcatacaggttgtataaaacatgatcagcgtttacatgatcaatgtcctcattgccataatgctattcagcctagacgtcttgaagcccctgatcaggttatgacttgctgttcaatatgtaaaaaaagtctattggaagttaataaaagccttgtggattgtcatgccttggcattccaaaaaatctttgatcaattcttgaaacaaggctgtgcaacctatcaagacaagttgatttcagtaactgattggttaacggtgattaagttattttcacaatttattagaaaagctttagctggctcagtaaatggaaaaggatgggcatttcttgaacaactcagaattcaggtgccccatcctgagcttatatcgaatggattggctgttaaccaacttccagttaccgagagagaacgactattttcctgtatttatcaattactcattattcctcaggaaaagtttattgaaacagcaaaatctttaaatatgaacaggtcttcattttgggataagagaaaccagttgccagccatattaaggcctgttgaagaacaattaggctcgatttatcggaactaccctccaaatagagcattggtagatacccttaaacctaaaagtaaggagactgtaatacgaaagtttttaagattaaaaagaaaactagggtaa

SEQ ID NO: 54769 - DNA, 759 bp, Acinetobacter baumannii
atgaaaactataaaaattggttcatatcactggatgcaaactacaaatggtcagctcagctttaaagaaaaaattaaattaattcaaaaaattatggtgcctagtatcctaaattctataaaaataaattaccatcgatttcaaactggtaacgattttgatataggacaaatcgtaataccagatactcaaatgattaaaatcgcacttgaggaactagaatcaaaagcaagtacatctatctacaatcattcgtggcgaacatacttctggggaaccgccctaggtcatttacaaaaccggcagtttgactctgagtcactcttattagcttcactttttcatgatattggcctaactgagcaacatatgcatagtaaaggctgtcaatgttttacatatgagagcgctaaacaatttgagcaaaaggcgaaagaatataattttgatgagaaaaaaagcgaagtgattaaagatgctatatgtctacacatgaatggatatatagaggaatctgatccatctgaggttattctattacagcaaggtgcttcttgtgatgtaattagtgacaatcaatataaaatccccttatcttttagaaatgaaattttagaaaaatatcctagaaatcaatttaataaagaatttattaaacttattaaattagagagaaaaaatgttccgagttcgcgaacaggcttattatatgatcttggattacccctcttgattaaatcaaatttatataaagaataa

SEQ ID NO: 54770 - DNA, 261 bp, Acinetobacter baumannii
gtggtatatacagataaaaccataagacagaaatttggaaaaattaaagactacagtattaagcagtatggatctgatttttatactgatgctgaacggccactttactcttataaagttgaaataactggacagaagcaagatggagtggttgatatagaaatgaggaaagattttaataaaattaaatacttatatactattaaagtcaaagaagaagggcattctatgggatttcgtataagatttggaaaacattaa

SEQ ID NO: 54771 - DNA, 165 bp, Acinetobacter baumannii
atggactccgtttatatttttatccaaatttgtggagctaaccatgtcataaggcatgagggcttttcaatgaaagatacgcaattaacccaattcaatagtgaaagttcctcacaatgccaacaaactgttaccgaacaagaaatggagttacaaaaaagatga

SEQ ID NO: 54772 - DNA, 1197 bp, Acinetobacter baumannii
atgcttacagatgcaaaagtacgaaagcttaaacccctagaaaaaaaagctcgttattccgatgagaaaggtatgtacttagaagtcataccatcgggtggtatgtattggcgaatgaagttccgctttaacggtaaagaaaatattttcagcatcggtacctatcctgaaacctcactggctcaagcaagaagaattcgggacgaagctcggttaaagttaaaagatggaattaatcccaacgaagcgaagaagcaaaagaaacaacaagctgctgaaaatacgcttttcaaagcacttgctatggaatggatggaagaccgtaaagctgttattaaagaaaatacctatttacgtgatttatccgtatttgaaaaagaccttttcccagatttaggcaatatgcctattgatcaaatcaaaggtaaagatgtgcttgcctgtgccaaaaaaatcgaagaacgtggcgcacaggaaatggctaaacgctccatacctttagcaggtcgtattttccgttttgcgattcgtaagggtctcatcgagaatgatccgacacctcatcttcatgaggctttaaaacctcgtaaagtgaagcatatggcacgtttggatatttctgagttcccacccttccttgagcgaatggaccgctatcatggcaatccaatgattaaaacagccattcaactaatgacgctgacttttgtacgcacagctgaactcagaatgatggagtggaatgagattgattttgataatcatttatggcgcatacctgctgagaaaatgaaaatggctcagcctcacattgttccattatccaaacaggcaattgaactcattgaaggattacggcctctcaccggcaataagcagtacgttttctataaccatagcacggcaaagcccatgagtagcaatgcactcctctgtgtgatccgtacgatgggctataacggtaaaatgactggtcatggattccgtggacttgcatcaacgacacttcatgagcagggctatatgcatgatgcaattgaaattcagttagcacatcgagtcggtaatgccgtatctcaagcttataaccatgctcaacacttagaatatcgaatcaagatgatgcaagaatggtctgattttattgatagtttgagaaataaaattgtgccttttccgaagcaaaagatagggtaa

SEQ ID NO: 54773 - DNA, 774 bp, Acinetobacter baumannii
atgaatacagaatcaaaaagccgatataaaacaacgaactggtctgagtacaatcaggctttacgtcaacggggtgctttcaccatttggtttgatccccaaatgcaatggtctgcaacacctagtggaaaaaaaggacgtcaacctacctacactgatatagcaattcaatttgccctgacgatacgaaacctgttccaactggctttacgccaaacacaaggtttcattcaaagcctttttcaaatggctcacctcgactggaatgttccagacttctcaacattgagtcggcgagcagataagctccagccacttctacataaatcagcaaaaaatccacaggaagacttgcatattttagttgatagcacagggatcaaagttacaggcgatggggaatgggtgcgtaaaaaacatggcgtaaaccaacatcgtcaatggctgaaattacatcttgcgacagatgcaaacagtggagaaatacaagcggttgaagtcacgacctgccaatatggtgatgctgaaatgctcccacctcttttagatcaaattgatgaacccattgcatctgtcacgactgatggtgcttatgacacagtgaattgttatgatgcgattttgaaacggcaagcaaatgtaattatccctcctcgttccaatgctgctttatgggtagaaaatgaaattggtaaagcaaggaatcatgcagtacaaggctgttgggacaagggtcaaaagcagtggaaacgagatattggttatcatcgatga

SEQ ID NO: 54774 - DNA, 138 bp, Acinetobacter baumannii
atgtttgccttgaaacgacttggacaaggtgtatctagtcgatgctttaatcgtcaggtggttgacttgcaaataagagtcgatattttgaataaatttactcaacttggtacagctaaaacggtggctgttgcataa

SEQ ID NO: 54775 - DNA, 1872 bp, Acinetobacter baumannii
atgcaaattgatgctcaagtaaaaagtatttcagacattaatcaattctttattgttcctgattatcaaagggaatatgtatggaaagctaatgatcaagtaaaacaattcatcacagatatagataatgcttttgaaacttcaaataatgattcgagctactatctagggtcagtaattattgttaaaaaacatgataattatgatgtcatagatggtcagcaacgtcttactacaattgtactaactctctgtgcattaaaagattttttagaaagtcttacccgtactgaatctgctgaaaacttttataatgcgattaaatcatggttgtcgactttcaatatgaaaacggcatcccatcaaaaccgtgtagagttgcaatacgaagaaagccaaaattatttaggctatcttattcataaaaaagaatataaaggtaaagtcacgccatctattcaaaaaatgcaggctgcctatgatgcgatgtatgaatatgttgcaagtttgaagaatgagggacaagagcatctagttgattttattactttcttctttaataaaattgtcctggtttttattgtttctgcggaccttcatggcgcattgaaaatatttgaaaccagtaatcagcgtggggcaagcctggatgctatggatttggttaaaaatctgatttttagtgaagctaatgaaaaagattttcctgatatcaaatctaaatggaaaatggttgttggaaatattcatgcatgtaaggaaggggagaacccattacgcttcctacgatatttcttaatggcacgttactgtaataatggaattctacgtgaggaagatatttataaatggatcatttctgagggtgagccattaatcaactataaaaataaaccaatcgaatttgtgaatgcattattgagtgcttcagaacgctattcaaaattagttaatgcgacaagtttagctgatcatcatcaaacgtaccctgctgtagttaatataggctacattaataaatatatgtccagacagcacttattactgttgttggccttagatgttaattgtgaagatgaagtgattaattatcttgcaaaacaattagaaactttattttttgtgagtaatacattaggtatacaggcaaaatataatgagaataattttagtatgtgggtgcaatatttccgtggcttaaaaaccattgaacaggtaaaagttgctgttgaaaaaactattgcaaaatatataactaaaaaggcagcagaatttaaacaaaccttcttaacgaaacgtcatgatgcttttaatccgctttatcgtctgcgttatattctaggtactttggaaaataaagcggctgagctttgtaatatgccactgaaggaccatagatttatccaaagtttgcaagttgaacatattttacctcagacgcctaaggctgatgtaattcctgaagagtatggagttgactatttagaatatagtggccaagtttatatgttgggtaatgtgacattattagaaagtcagattaatcaggcggttaataattttaatgacctaagtgcagattggtttaaacaaaagcaatctgagtataaaaattcagcattagtactgagtaaaatgctagataatgagtttagtattggtaaaaatacctcaacgaatcaatttatccatgattataagtatgcttttactgaatggaaaaaggagcagattctacagcgtcagcaagttttactgaatttagctcttttagcttggacaattaatggacaaagaatagaccaatataaattttctgatgaaaatgagcaacgtacaaacatagatcaagttgttacagcggtattataa

SEQ ID NO: 54776 - DNA, 3243 bp, Acinetobacter baumannii
atggatgccacccgcgaaagcattttccagaacgatattattcaacacatgctggctcaaggctggcaacttggtacgccacaaggctacaaccgtgaaaccgccttgtatgagcaggacgtactggattttgtacagcagacgcaaagccaggactggcagaagttccagcgcatctttcccaatgataccgaacggcattttttagatgcggtggttgcccagctaaaaaaagccgacatcaatgccaccgatgaacagtcgcgtagctatggtactttgggtgtactgcgtcacggggtgaaaacccgcagcgcccgttttttcctgtgtcagtttaaacctgaacatgcacttaatccggataccttagccaattacaaaaagaacatctgccgcattgtgccagagttggtctatagcccgtatgctacggctgccgagttacaggacatgggcaaacaggccaagaaatggcgtattgacttggtattgttcattaacggctttcctgttgctactctggaactcaagtcagagtttaaacaggcggtgcagaatgccatgttgcagtacaaacgcacccgcttgccgaaagatccagaaaccaacaagcctgaacccttgctgatgtttaagcgtggcgcattggtacactttgccgtgagtcaatacgaagtctatatggcgacccaactggccggagaagatactttcttcctgccattcaataaaggcacgcatgacggtggcgcaggcaatgatgtgccagaagaccagaatcagtacgctacggcctatctgtggaatgaagttctcaccccagacaatttgctgaatatcattgcacgttttgtccatctgcaaattgaagagaaagaaaactgggaaggccgcaagtacaaaaaagaactgctgatcttcccacgttaccaccagtggaatgtggtcaccaaactgatcaaggccgccttagaggagggcactggacagaaatatctgattcagcacagtgcaggttcaggtaagtccaactcgattgcctggacagcacatcagctgtcgaccctgtacgatcaacacaatcagaaactgtttgattcggtgattgtagtcactgaccgtaccattctggatgcccagctacaagataccatctaccagtttgaacatgccgatggcgtggtcggacgcatcaataacaaagaaggcgatggctccaaatcggaaaaactggccaaggcactggaaacatcacagccgattatcattgtgaccatccagactttcccctttgtgctgcgtgcgattgaaaacagtaccaatcttaaacagcgacgctatgcggtgattgccgatgaagcgcattcttcacaaagcggctctacggcacgacaactgaaagaagtattgatgctagaagagcgcgaagaggatgctgaattgtcttcggaagatattctggatgccgtggttgcagcacgtaagggcagtaataacctcagttactatgcctttaccgcgacaccgaaagacaaaaccctgcaactgtttggccgtgtacccaatcctgagctaccgccatccaagcaaaacaagccagaagccttccatgtttactccatgcgccaagctattgaagaaggctttattctggatgtgctgaaaaactataccaactataaagtggtgtataagctaaaacagaaaattgaacaagccgacaaacaggtcgatgccaaaaaagccaagattagactgaatcagtgggtgcgcctgcatgaccacaatatttctcagaaagtgaaagtcattgtcgagcatttcaaaaataacgtgatgggcttattgggtgggcaggctaaagccatggtggtgaccagttcacgtaaagaagcagtgcgttacaagctcgcttttgataaatacgtgacggatcagggctataagtccattcaggctatggtcgcattctcgggcgaggttgagtttaatgacaaggataccgacagcagtggtttagtcgggcagacctttaatgaacgcaacatgaacccggggctaaaaggacgggaaatgcgcaaggcctttgatagtgatgactatcaggtgatgctggtggccaacaagttccagactggctttgaccaaccgaaactgtgtgccatgtacgtggacaagaaacttggcggtgtggaatgcgtacagaccttatcacgcctgaaccgcacctatccaggtaaggcggaatctggcacctttgtattggatttctttaacgatcctgaagacattcttggggccttccagccttactaccaaaccgcagaactggctgatgtatcgaatccggatcagatctttgacctgtttgaaaaactgaaagccagcaagatttttctgtggacggaagttgaacagtttatagaagccttctttaccaagaacaaatccaatgctgcgatcagtaacatttgcaagcctgcggttgaacgttggcagaaacgctatagccaagccatcgaagcctataacaccacccgagatatgctggaacgctgcaagaaaaccaatgatgcggtgctgattgctaatgccgacaatgcctttaaagaggccaagcttgaaaaagacaagctggaaatctttaaaaaagacttgggaagttttacccgtttctacgagtttatgtcgcagatcgtggactacgatgacaaagaactggagaagctcagtctgtatgcgcgtaacctgcgtccattgctgcgtgaaaccgcaacgaaagacgatgaggtggatctcagtaatgtcagcatgagccattaccgcttgtccaagatccgtcagcaagacatcaagctgaaagaagatgccgaagattttaagctagaaccgggcaatgacttaggagcggccaagccacgtgacaagaaagaagagttcctgtcactgattatagagcgtctgaatgatgtctttatcactgataacctaaccgataaagacatgctgaactatgcctatacggtacgtgacaagctggcggaaaatgagattgtgatgaagcagatcgccaacaatacccgtgaacaagccatgctgggtgatttcccgaaagcgatggatgatgccattcttggcagtagtgcggcacatcaggaacagatgatgcagttgctgtctgatccggcgaaggccagcatatttgcaagggtgatttttgatatgttgagcagtcagtaa

SEQ ID NO: 54777 - DNA, 1050 bp, Acinetobacter baumannii
atgagtgagcattcattaacgagcttagctttgccacaactgacccaagatattgtttcacttgttcataccgccaaacagcgcgcagccgtagccgtcaatgccgaactgaccttgctgtattggtcggtgggacaacgtatccgacaggaaatattaaaaggggagcgggcagaatatgggcaacacatcattggcaatttatccaaagccctgacagcgcaattaggccgaggctggggaaagtcacagctcaactactatgttaaatttgctgaagtttttgatgatatcaacattgtccatgcagtgcgtggacaattaagctggacgcatcttaaaaccctgatgtatatagatgaccacatcaaacgagagttttatctcagcatggccgtgcaggaacgctggtctacacgaacgctggatgaacgcatcggttcaatgctgtttgaacgcaccgccatttccaaaaaaccggacgaaaccattctgcatgaattgcaacagctcaaggaacaaggggttgtacatcagcagctcttgctcaaagatccttatattctggactttctcgatctgaatgaccgctatctggaaaaggatttagaagatgccattttgcgcgatattgagcagtttcttttagagcttggttcaggctttacctttattgcccgccagaagcgtattcagattgatgaagatgatttctacattgacctgttgttttataaccgcaaactcaaacgactggtcgcgattgacctgaaaactgaaaaattccggcattcgcataaaagccagatggaactgtatttacgctggctggctaaatacgaacaggaagaaggtgaaaacccaccgctgggcattattttctgtacttctaaaaaacatgagcaaattgaattactggacttggaaagctcggatattcatgtggctgaatatatgacggttttgccacccaaagaaatcctggaacaacgcttacaccttgctatggaacgtgctaaacaacgcttgctcgccgatggagaatcataa

SEQ ID NO: 54778 - DNA, 1389 bp, Acinetobacter baumannii
atggcgaagtatcagaaatatgctgaatacaaagattcaggtgttgagtggttaagggaaattccgagtcattggaatctatattctttaaaacgatcagttgataaatgcactaatggtttttgggggaatgagcctgatggaagaaatgatctttgtgttttgcgagtagctgattttaatcgtgataattttacgataaatgaggataagctcacattacgatctgttctaccaaaagaagcagaaagtagattgattaaaaaaggtgatttattgattgaaaagtcaggtggcggtgaaaagacattagtcggttgtgttgtacagtttgataaagactttccagctattacatcaaattttgttgccaaaatgacaccgaatgtaataactgacagtaaatatttaacttacgcgtttgctcatttatattcaggacgtgttaattttccctcaattaaacagactacaggtattcagaatttagattctgaagcctacctgatggaaaaatttggattcccttccaaaaatgagcaaatccaaatagccaacttcctcgatcacgaaaccaccaaaatcgatcacctgattgaaaaacaacaacaactgattgaactactaaaagaaaaacgtcaggcggtgattagccatgccgtgaccaaaggacttgattcgaatgtcccgatgaaagattcgggtgtggaatggttaggggaagtgccggagcattgggaaataaaacaaaataaatatcttctagagtttgttacaagtggttctcgtggatgggcgcagtattatgcagatacaggatcattattcttccgtatagctaacttgacgcgtgatactattgagccaaagttggaatcaattcaatatgtagaaccacctaaaggcagtgagggtgagcgttcaaagattaagataaatgatttgctcatatcaattactgcggacttaggttcagtatgtgtcgctgatgcttctattaaagatggttatgtaagtcaacatgtcgcattgtgtagacctattaaaatatgtgtatctagatggttggcttactttattttatctgattgtgcaaaggagcagtttttaggttctggttatggtggaacaaaaattcaactcagtttggaagatataaaagaacttattattgctgtaccaccaaggaatgaacaacttcaaatttcagagtatattgatgagaaactgactcaatatgaacatttgatttgtcaggcagaaaaattaattgggactttacaagagcgccgaaccgctctcatctcagccgcagtcaccggcaaaatcgacgttcgcaattggcaagcgccaacggttgctgaggcagacacggagttaagtgcatga

SEQ ID NO: 54779 - DNA, 2286 bp, Acinetobacter baumannii
atgaccaacaataacttttcacaaatcgcttctttcatctggtcggttgccgacctgctgcgtggtgacttcaaacaatcgcaatatggccgcatcattttgccattcacgctattacgtcgtttggagtgtgtgctagaaagcagtaaagcatctgtgttggcgaaacatgaagaagtcgccaagatgaacctacccgaagaagcacaagaaaagtttttgttgagtgccacccaaggtttggctttctttaatagctcgcccatggatttgagtaaaatggggcagagcgatattaaagcgaacctgagcacttatgtgcaaagcttttccaaagatgcccgcgagatttttgaatactttaattttatcgaatttgtcggtttattggatgatgcaaacctgctgtataaagtggtacagaaatttgcaacaaccgatcttagccctaaaagcatttccaatcatgacatgggcttggtgtttgaagaactgatccgtcgttttgccgaaggctcgaatgaaaccgcaggggaacactttaccccgcgtgacatcgtgcgtttgactacagcattggtctttatggaagatgatgacgtgctgaccaaagacggcattatccgtaccatttacgatcctacagcggggacgggtggcttcctctcttccggtatggaatatctgcatgagctgaacccgaatgcggtgatgcgtgcgtttggtcaggaactcaatccagaatcctacgctatctgtaaagccgacatgctcattaaaggtcaggatgtaagccgaatcaaacttggtaataccttgtcgaatgatcaactcgcattagataaatttgactatatgttatctaacccaccttttggtgtggactggaaaaagatcgaacaagacattaaagatgaacatgaacaaaaaggctttgatggccgtttcggtgcaggcttgccacgggtatcggatggttcactattattcctgatgcacctgatcagcaagatgcgtgatgccagtagtagcgagagcggtagccgcatcgggattatcctgaatggttcacctttatttaccggtagtgcaggcagtggtgaaagcgagatccgtcgctacattttagaagccgatttgctggaagccattattgccttaccgaacgatatgttctacaacaccgggattgccacctatatctgggtactcagcaataaaaaagccgctgaacgtaaaggcaaggtacagctgatcaatgcctcaaacctcagtaccaaaatgcgtaagtcgctgggttcaaaacgtaactatttgactgaagctgaaattgccaccattacccaaaattacggtgactttgtcgcggtagacaccttggcgcaggatggcgaaaccgaacagcaaaaaccatttgccagcaaaatctttgacagccatgaatttggttaccgtcgcgtgaccattgaacgtccattacgtttatcggtacagatcacggatagcgcgattgctgcattacgctttgccccgaaaccgtttaatgccgtgatgcaaagtatcgatgcgcaattgggcacagcctttggtacagcatggacagcagaaacttatggtcagtcgcaggacgtggcgcttgaggtgcgtgccctgattaaagcggaattccctgagctaaaagaaaaagacattaaagaggtgctggacagcaaaatctggttattccagaaagccttgatggaaaaagcccaagcgttacaggccgtgattggcactgagcagtttgatgattttaaccagtttgatgaagtcctgaagaaagccctcaagcagaccgacatcaagctggatgccaaagagaagaaacaactgttagatgccattacctggaaaaatctggaagcggaaccagtgattaacaaggtcgtgaaacaggcagaaaacccattgtatggccagttcagctaccaaggtaaagtggtggagtttgtacaggatggggatttgcgtgatgcggagaacattgcgctgaatccaaaagtcagtaccacggaactgattgaagattacttcaaacgtgaagtccagccacacgtggccgatgcttggatcaatgccgacaagcgcgatgaaaaagatggcgagattggcattgtcggatatgaaattccgtttaaccgtcatttctacgtgtaccagccaccacgtgacctagctgagattgatgcggatttagatgcggtgagccgtgaaattatggcacttctgcaagaggtgcattcataa

SEQ ID NO: 54780 - DNA, 231 bp, Acinetobacter baumannii
atgaatgcatttgttggtcaaactttcccgatgaatcaaatcgttaatattaaagaggtggttcaatttacaagtattagtcgagctaaaatctatgaaatgatcaatgagaaatcaaaatactacgatcctacttttccaaagcctgtgcgactaagtgaatctcgtattggctggtcagcttgggaaataaatcaatggattgaagataagctggaaaatcgtgaataa

SEQ ID NO: 54781 - DNA, 885 bp, Acinetobacter baumannii
atgattaaaggtttagctattactccaccaatactcggacggatcagtattggtcggatggttgaaaagaatggcaaacgcctaccggaaaaggatgaccagttcaccattacttcccagattcaaagcaaagaaggctgggttaaacatccactggatgaacagctccgagcgaatgctccgaatcaaaagctacgctcaatccccgtcagaatgatcttcaatgatcctgatttaaacctgcgtgcagaatacagcctgtttgaccgacagactggaagacctgtctgtgtcggtaatggagaaacctgccaacgtttaaccaatcaaggcgtggagcaacatccctgtccatcccctgatttatgtccattggctcaaggagggaactgcaagccctatggtcgtttgcatgtgaacttagatgaatcggatgagtttggcaccttcatctttagaactacaggctttaacagtattcggactttggctgcacggctgagttattaccatgcggcctcaaatggcttgttgtcatgtctacccttgcaattgatattgcggggcaagagtacgacacaaagttatcgtcagccggtgtattacgtggatctaacgttaagggaggggatcagtttaaatgaagcgattattcaggcgaagcaaattgatgagcagagtaagcaggcggggttttatcaggaggctttagactttaccgcaaggaagggtttggggaatggaaggatggacgtagacatagaggaaggtttggatgtggttgaggagttttatcagcctgttgaaggccagcagattcaggaaacgcagcctgaatttaatattcagcagggattgaaaggatcagtgacggctttgaattaa

SEQ ID NO: 54782 - DNA, 1059 bp, Acinetobacter baumannii
atgaatcaaattgtacctatttcccatcagcctacgactgtaggatcaaagattgtagtcaatccaaccatcactaccaaacgctcaacagcagtcaagcgactggtcaacaccaaagggatggaatatcaggactggctcgaagttcgtaaacaaggcattggcagcagtgatgccgcgactgcctgtggtctcaatccctacatgtcgatgctggagctctggctgatcaaaaccggacggcaggttcaatccattgaagatgaaagctcaggtgtagcaccgctgtattggggcaagcaactggaacctttggtggcagagttctatagcatgcacacccataataaggtgcgacggatcaatgcggtacttcagcatcctgatcccgataaacactttatgctagccaatctggattacagcgtagtcggcagcgatgaagtccaaattttggaatgcaaaacagcaggtgagcatggagcaaaattgtggcgtgatggtgtgcctttatatgtgctttgtcaggtacaacatcaactggcggtgactggtaaacaggcagcgcatgtttgtgtcttgatctgtgggcatgaaaccaagatcttcaaagtgacacgatcagaatccgtgattgaacatattgttcaagcagaacgatatttctgggagtgtgtagaaaaggatacaccaccatccgtggatgcaagtgaatccgcagctaaagcgattcagcaactctatccagcgcatgtacctttaacggtagaggatctttcgcaaaatgaaaatgccaatttgatgtttgatcagctcatcaaaatgaaggaagagattcagcatcagcaggaacgctttgaccagcttaaacatgaaatccagatgatgatgcaagacaaggaaagggcagtctttgcaaatggctcggtagtttggaagaaagccaaggattctatcagcctcaataccaaagcattgcttcagcaccagcctgaactcatcgagctttatccacttcaaaagcaaggcagtcgtcgatttaacatctataccgactaa

SEQ ID NO: 54783 - DNA, 279 bp, Acinetobacter baumannii
atgagtttaaattgtccttattgcttatcggatcaagtcattcaggtagtgaatcagcaggtgagtggatctgattctacaggtttagccgcatctgcatcgttcgcaactatcggtgcaaccatttcaaagggtttacctttgcctgtatcaccactgcttggcgggcttgcaggtgcagtcattggtggcctattcagtagtgtgtttgatgagccgaaaaagccgatcaccctgacctactatcactgcaattactgtcagcagaattttcgttga

SEQ ID NO: 54784 - DNA, 870 bp, Acinetobacter baumannii
atgagtaagtcaattaatgaatctaaattaaccattcaacttgaagtcgtcactgagctatggattagagctcatcgtagaccgcatgatttctatttagaatttgctgagcttctgacggaattagatcaagtgtacatacggtcttacgactacttcggatatatcaatgcatggtgtaattggttggaacagaatgatattcgtggtctaaagttaaatgaacttattgaagaacttaaaagaaaatcatttgttgagtatcagcgatattttaagaattatcaatctgaacatcgaagagctttaagacgtcatcgtgaaaatgagacacggaatattcgatcactagaaaggaaagctaggaatgctgtagagcgttattcaaagaccgaggttgttcgtattgatttaggctacattaaaaaatatcaacacttgatcaatattgctgatttttatgaggatatgaaggagttaagagtgcagatgagcaagcgggaaaagccatttaacgccctgatagattttggttgggcgttagagcaaggagtggataagggctatcactgtcatttggtactgttttttaatgggcacgttaagcaggatggatggggtattgctcatcaagtcggaaaggaatggcagaaaatcacaggcaagctaggatacttttttaactgtcatgatcctgagcagatccaagagtacacagaattgggtattttaggtattggtcgaattcacagaaataatcctactgaagtggaaaggatgattaatgctgtacgctatttagtacgacctgaaaaagatgcgcaacatctgcgtgtgaaatgtaaaaccaagatgcgtacctttcaatga

SEQ ID NO: 54785 - DNA, 981 bp, Acinetobacter baumannii
atgtatttagccttattgggtaacggaattgatattaatttttctatatgggcatctaattggactctctacaatactttttcgcttccggtaagtttaaataattcatcattaacgtatgacttacacgatataaatctggcggaagtaataaatctaatagcgccagagctaaagctaatcaaacagcgtcatatctcaattccccgaagcagattagcttatatggaaatgctagtgcaaaaaaacacgagatcagcacagtgttatttagagacaagttttaaagagagcacgattttactacgctttaaaattgataatagccagagtcgattagatatcagtaccttaaagacaattgttactcaattttttaagaaagcgaaacgtgcacccaagagtataggagcatatttagacgcttatatcggatattttgtttttaaagatggctgctattctattgactgtacagctatttgttaccttcgttcagatgttgttgctgatgaggtaaatttaaaatttaaggattattgggggaaatttactaagaggtatactgctaagcaaaaagatatcccagaattcccggacttgagagtaattcctagtttgtggtttaaggaaggcggatctcagtattttgttgtaaataaaagagacaagctcattccacagctgataaatgatcttgtgaatttctatactgcatatgaatatttcaatggatataaaaatacaggacatcgcaatcataaaagaccagagctatttttgaggggtagaattaaagaagctatacctaaaaaaacggatgaaaagaatactccacaagatgaagtgagtgcgcctgaaaatgaaaaaagcgtaaatgcaatcaatgaaaattcatctcaagagggggcgaataagcaggctgatttttatgagagaagggcagaaagattaatacgattactactacctctatcgtaa

SEQ ID NO: 54786 - DNA, 126 bp, Acinetobacter baumannii
atgaaagattgggtctacttttatatcgagtacacaattaaatatggagaaccattctataaagagatcggctggtcattaggtttgaaaaataactatatagttatgagcatgatacaaagctaa

SEQ ID NO: 54787 - DNA, 555 bp, Acinetobacter baumannii
atgccaaattttattctcccaacacgtgctttagaagttgtaaaaaaaggaataaatctgttccatcacggtgggtttcacatggtcggtgtcgacaaaattgtgaaagaaaccgaagtgaataaaatgacgttttataactattttcactctaaagaacgcttcatcgaaatctgtttaatcgtacaaaaagaacgcctccaagaccaagtggttgcactgatcgagtatgaccatgacacaagcacaatcgataaactcaagaagttgtatgttctacataccgacttagaaggcccgtactacttattatttaaggctatttttgaaactaaaaatagttatccaaaagcttataaaaccgcggtgagatacagaacatggctgaccaatgaaatttatagtcagcttagattacttaaaaccgatgcttcttttaccgatgccaaactctttttatatatgattgagggcgccattattcagcttttaagttcagataagacaactcaaaaagagaagatgctggaatattttctgcgaggactgatttaa

SEQ ID NO: 54788 - DNA, 258 bp, Acinetobacter baumannii
atggtggcagaacggaagaaggttgacagactagtattatctcaaactagcacacccgtaggtgtccctctcccgtcctaccgctacgggaaagagacgagtggcacaccacacaagactattcctcagaaggaaaactctgatgcgggagataatattcagcctgtcaaagccggctggcaatgtggccagcaggcaaagaatagtgcccaacccttttgcagtcaagcacacaaaatgacatttgctttaatttag

SEQ ID NO: 54789 - DNA, 516 bp, Acinetobacter baumannii
ttggcgacaccctatatcaccataggttgcccaactacgggcggcggcaaagtaattagtggaaattcattatttctcattgatgggaaagctgtagcttgcacaggcgataaagctacctgccctacgcataaattagtagccactattgtatcgggtgatccgtacatgaatatttttggcaaactggcggcacgtgttggtgactctctgtcttgtggttgtaagctacttccgcaacagaatttagttgttcaggataatgggggtaataattcaacctcctcaaaaagtaatactgagagcttattacctattgagaattttgggcatagatttttattaaaagatcaactaacagatgtaccactggcaggtgtttgctatgaaataataaaaaatggtgaaacgatacatggcaaaactgataaacaaggcttcactgaattaatcacaaatactaatagtgaagaaataacaattaatattatttatgaggaacatacacatggataa

SEQ ID NO: 54790 - DNA, 690 bp, Acinetobacter baumannii
atggataaaaatccagtgaagcaatcggctaaaatcattgtagcaaatgcgaaagcaaaacttactaaattgaaaaataaccagcctcacccaacgactgaaataaaaattgaaactaaaagaaaattaacttctggcgaaattaaaatgtgccaattagtttttaaggatgctattgattactcaaaagtatggattcatatcggaggatatattcacaatgcgacaggtaatgcgatgacacctgccggtgaaatcatgcttcctagatcagaatatatggcaacatcagattttagtaaggcttctggggacaatcgtcattggtttattcatgaaatggttcatgtttggcaatatcaaatggggacaccaaatggatggttaggtttgaagcagctttgtaaaggcggttacacctcaatggttacctccgtagattctggtggtgaactaaaagcttacgatacggatattttgggacgggactttggaaagaaatttaatgaattcaactttgaacaacaaggccgtttaattgaattttggtttgatgcatgctatttacaaaatgttgaccctgaaagagtacatcatagacagagtctaaaacttttaggatatgtagaaagaattttaagggattttattctcaacccacatgacaagacgttattaccaaggtcttaa

SEQ ID NO: 54791 - DNA, 414 bp, Acinetobacter baumannii
atgataaagcaaaacttaactttaatctttattatcataataagtattacgatcagtgcttgtagccaagggccacgtccattggaagcagttatcaaaaaaaataacttatgtgtatttacgaacaatcctaaaacttatgccagttttgacaactctgttctagtttatttgggtaagattgactatacaaaagagtttaaaagtacttataaaaagttgtatacaaaagctccactcccaatagaagaaactaattgtgtggcaataccattagaagtaattgataagaatgttccttatgaaatagttttagaaactaataagagttttcatgccagaatttgtgtaatagataaaggaaatcgcttggaagtcaaacatattgaagcaggtaaatctgcatgtaattaa

SEQ ID NO: 54792 - DNA, 1173 bp, Acinetobacter baumannii
atggctactttaaatccacgtgacgttgtgattgttgatggcgttcgttctgccatgggcaaatctaaaaacggtatgttccgtaatgtacgtgccgacagtttatctgctgaacttgtacgcgcgctcgttgcccgtaaccagtttgatgtaaatgaagttgaagacctgatctggggctgtgtaaaccagactctagaacaaggtatgaacattggccgtaacatcggtttattggctgacttgcctaaaactgttgctggtcaaacagtgaaccgtctttgtggttcgtctatgcaggcaatccacactgccgcagcacaaattgcgactaaccaaggtgacatcttcattattggtggtgtagagcacatgggccatgtaggtatgatgcacggcatcgaccttaacccagaagcatctaaacactatgctaaagcatctaacatgatgggcttaactgctgaaatgttaggtcgtatgaacggcattactcgtgaagaacaagatgcgttcggtgttgaatctcaccgccgtgcttgggctgcaactcaggaaggtcgtttcaaaaatgaaatcgttggtgttgaaggccacgatgcaaatggtttcaaaatcctttgcgacatcgacgaagtgattcgtccagatgcaaaccttgaagcattcaaagcattaaaacctgtatttgaccctaaaggtggttcagtaacagcagcaacttcttctgctctttctgacggtgcttctgcaatgttgcttatgtctgctgaacgtgcacaagcattaggtttaaaaccacgtgctgtaattcgctctatggcagtagcaggctgtgacgcagcaatcatgggttacggtccagttccagcgactcaaaaagcgcttaagcgtgctggcttatcaattgctgatattcagactgttgagttaaatgaagcatttgctgcacaaggcttgtctgttcttaagggcttaggcctttatgacaaacaagacatcgtgaacttaaatggtggtgcaattgcacttggtcacccactaggctgttcaggtgctcgtatcaccactacgttgttaaacgtaatggaacaacaagatactcaaatcggtcttgcgaccatgtgtatcggccttggtcaaggtatcgcaacgattatcgaacgtgtttaa

SEQ ID NO: 54793 - DNA, 366 bp, Acinetobacter baumannii
atgaacctagctaaagtcgccgaacttacaaaagttagtccgcgtatgctgcgttattatgaaagtttagggctaatacaaccgcatcgcgcaagtaataactatcgcagttatactcaaaaagacattgaaaatattaagaaaattaaaatattaaatgatgctggtatgacgctaaaagatatccaagtgttattaccgtgttttgatttagatgaaagggtatttacgctctgccctattgttcaagaaaagctacaaaccgaactgatgcatgtatgtgagcagttaaacaaactacagacttctcaaagtttattacaatctttcttgataaaaggcaaagctgagagcaccaatacatag

SEQ ID NO: 54794 - DNA, 264 bp, Acinetobacter baumannii
atgaaattgggaactcagcaaaaggctgatcaggatcatacgatttttatgattgagctacaaattttagatgacgcagaggaaatgtttaaacttctaaaaaattattcgtggcaaaagaaagatcatatgattctttttcatgaaaatgcccaagttaaaaaatttaacgagctttaccagcatgttttaaagcttaatgcaaaaattgaaagtattaagaaaaagaacgtggctgctttagaaaatgagctagaagaataa

SEQ ID NO: 54795 - DNA, 708 bp, Acinetobacter baumannii
atgacaacaacagcttatgatactcatttcatggcttccgacatagcctttacagtgaatcgtacagaagttactctaaatattccttttaggaaagtgaaacgtttgggcgatattgtatttggtatggctggatgtttattttgtatgagagattttagtgaggctcttattgattttatcttacaaaataaaacacaatttgagcttccgagatctatactagaaaaaactagcagcgattttattgcattgatctacttaagtggttcttgccttaaagtttcaaaaatggtaaaccatgcagagtttacaatagaaaacattactaatgttcctactgtaatcggttctgggagtttacatactcaacatattattcaagattgccctaatgccatagctgttgttctagaagctattaaatatgatcaatatactgcaggggaagttaaatattgcagtattaaacgagaagaagttcataatttggaagcgcctatcatgtctacaactcttaataatcaaatacaaatgttgcaaacagagattgctgaaacaaatcaacttgttggaaatggcaatacttatcacgctaatactgaaacatatcatcatggtgaaccagtcaaaatttctacagaattaggtttacaaatgtttcaacacagtttaacgaacgtccgaaataaattaactacaaattaa

SEQ ID NO: 54796 - DNA, 270 bp, Acinetobacter baumannii
atgtcatctaatcgtattactgcaaatgaagcaactaaacttgcttctcaaactgcaaagcctacacctgattcaatactagaccaggtgtacgaattcatttctactaatccaggctcaggcgctttaaccaaattatatgatcccaatttagtcccattaaatgtgttagaaactgtagctgtcgccttaagagcagatggttatcaagttgtggctgctattcatactcaaagcacactgaaattagaagttagatggcctgtctga

SEQ ID NO: 54797 - DNA, 267 bp, Acinetobacter baumannii
atgcaagaagatgacggttttccatggtggggctgggtgacgggagcgatcattgttgctttctatttttatttattaatgcctgaagtttcgaaactttcatattcatttgcagagaatgttgcggcaccaatatctttagcaacaaatagttctatagttgatatctttttagctgttattctttttgcgattgtgattgggtccgttattgctccgttttgtgcaaattactacttagttaaaaatttacaaaaagaaatttag

SEQ ID NO: 54798 - DNA, 189 bp, Acinetobacter baumannii
gtgatttattcgaccaattatgctgttttcattgaaaaactatgtagaatggagatgcttttaaacgataacaaacaagatcaacaagatcaacaagatcaacaagatcaacaagatcaacaagatcaacaagatcaacaagatcaacaagatcaacaagatcaacaagataagcatgattggatataa

SEQ ID NO: 54799 - DNA, 1308 bp, Acinetobacter baumannii
atgaactttaataaagaaaagctgtccctaaaatggggtggatggtcaataaccgcagtttgctttctcttgagttatggtcatgcttatgccgaaccactaactttggatacagccttaaaacttgcggagcaatatgcacctacccttagagcaaatagtgctcgaattgaaggggctgagaatgtagtttcagcttctggcattttacccaaccctaaattatttttcggtttggagaattatcctatagctggtgatgcgtcatggtcagtcacacaagatggcatgaccatgcagaaaattggtgttatgcaagattttccaaaccgcgccaaaagacaagccgaggtcgagttagcaaaagctgaattgggttcagctactgctcaaactgagattctacgtattgagttacgtcagaaagtcgcatctgcttggcttaaacgcttttatcttgagcgtaaattggcgctatatgatgaactgttttcagaaaatcgattactttctcaaatcacacagacacaggtcacatccggtcggacaattgttgctgatgcacttgatccaaaacaagaagccactgtattacttgaccggaaggatgatttacttcgtgatttaaataaagccaaactagaattacatcggttggtcagtgtagagcaaactggaaatccctctcaaattgaaaccttacctgaccaagctccatccatccatcttgatacatcaaagctgtatcataacttgcatcagcatcctgaattaaaagcttttcaggctgaaaagctaactgctgaagcaaaattgaaacaagctcaggctttacaaaaacctgattggggtattgagcttgcatacctgcatcgtgccccagagtttggcgatatgatcggtgtacaactgacaactgagcttcctgtattttcaaaaaaacgtagtggtcccctcattcaggcagccctagacgagcaaaacaggattactgcggatcaagaagcccaataccgtgaacatctcacgaagttagatgacgggctatccgatctcgatgcgcttgatcagcaaattagacgtgcaatgcaaataagtattccactcgctaaacaaaaagtgggtttacagttggcaagctaccaagctggtaaaagcaatttgtctgatgttattactgcccgacaatctcttttagaacaacgtttgcgtctcattgatctccaacaacaacaggctgtgactaaagcccaactttattttgcctttgaagagccgaccttaaaccatgctgaggagcagccataa

SEQ ID NO: 54800 - DNA, 3147 bp, Acinetobacter baumannii
atgatcgcccgtattattcgtttttcaattttgaatcgtgtatttgtcttattggcagctttaattctggcagcttggggtgtttgggctgtaaaaaatactccggttgatgctttaccagatttatctgatgtgcaagtgattgtcagaactaattacccaggtcaggcaccacaaattgttgaaaatcaggtgacgtaccctttaacaacaacgatgttatcagtacctggtgttaaaactgttcgtggttattctttttttggtgattcatttgtatatgtcatttttgatgaacataccgatctttattgggcccgttcgcgtgtattggaatatctaaatcagattcagggaagaattcctgcaaatgcgaaatcttcattagggccagatgccacaggcgttggctgggtttatgaatatgcgttagttgatccaacaggacaacatgacctttcacaactgagaagcatacaagactggtttttaaagtatgaactaaagacattacccaatgtggctgaagttgccacgattgggggaatggtgaagcaatatcaggttgttttagatccaagtaaaatggccgccttaggaattactcaaaacaatgtcattgaagcgattcaaaaggctaatcaggaaactggtggttcagtccttgaaatggctgaaactgaatatatggtacgagcttctggttatttaaagacattagatgattttcgccagattccactacgaacaaatagtttgggtgttcctgtttctttaggtgatgttgcaactattcaactcggaccggaaatgcgtcgtggtatcactgagctgaatggacaaggtgaaactgttggcggtgttgtgattttacgggccggtaagaatgcacgtgaaacgattactgctgtgaaagcaaaactggctgaattgcaacaaagtttacctaaaggtgtgcaggtggttcccgtatatgatcgtagtcaattgatcgatcgggctatagagaatctcagccataaattgattgaagagttcattgtggtggctttagtctgcggactgtttctatggcatttacgttcagcaatggtggctattgtttctctaccacttgggattttatcggctttcctggtcatgtattatcaggggttaaatgccaatattatgtctctgggtggtattgccattgcgattggggccatggtcgatgctgcggttgtgatggttgaaaatgcacacaaacatatagaagcttggcagcatgagcatcctgatcaaatcttagcaccacaagaacgttgggatattattgctcggtcagccagtgaggttggtcctgctttatttttctgcttacttatcattaccttatcttttattcctatttttactctacaggcacaagaaggacgcttgttctcgccattggcgtttaccaaaacctatgccatggcagcggcagctggtttatccattaccctgattcctgttttgatgggttattggatccgcgggaaattaccctcagaacagcgtaatccattgaaccgtttcctcatcaaaatataccgacctatgttggatcaggttttagctcatccaaagaccactttatttggtgcgttgctaattttccttattagtcttttacctttaactcgattaggtggagaatttctaccgaatatggatgaaggtgatttactgtatatgccttcagctttaccaggattgtccgcagctaaggcctcagaactgttacagcaaacagatcgaatgattaaaacggttccagaagttgcgacagtatttggtaaagcagggagagctgagtcagcaacagaccctgcgcctttagaaatgtttgaaaccacgattcagttcaaaccacggtctgaatggcgctcaggtatgacacctgacaaattagtaaaagaactggataaagcagttcaagtaccgggtttaacgaatatttgggtgccacctattcgtaaccggattgatatgttggcaactggggtgaaaagtccaatcgggattaagatttcagcaaatgatctgcaagatattgatcgggtagcacagcaaattgaacaagtggctaaacaggtgcccggagttagctcggctttggctgaacgactcacaggtggtcgatatgttgatgtcgatattaaccgtatgcaggctgcacgatatggcctcaatatcaacgatgtgcagcaaattgtatcatctgcgattggcggggaaaatattggtgaaactgttgagggattagcaagatatcctattaatgtacgttatccacgagagattcgagactcattggaagctttgagaaatttaccgattgtaactgaatctggacaacaaattgtattaagtagtgttgccaatattcaaattacagatggccctccaatgctgaagagcgaaaattcccgccctagtggttgggtttatgtagacgtacaaggacgtgacttagcttcggttgtgcaagatttgaagcagtctattgatcaaaaagtaaaacgctcctctgccatgagcattagctattcagggcaatttgagtttatggaacgtgctaatgcgcgtttaaaagtcatcattccaattacattgatgattatttttctactgctctatttgatttttagacaagtacaagatgcagttctgattatggcaacgctaccttttgctttgattggtggtatatgggccatgtatttgagcggttttcacttttcagttgcgattgcagttggttttatcgcacttgcaggtgttgctgctgagtttggtgtagtcatgttgttctatttgaagcaagcagttgaacatgcacagcaaaacctatcttcttcaacgacatccttaacgaagcaacaactcaatgatgcaatccgaacaggagctgtactacgcgttcgtcctaaagccatgacggttgccgtcattttggcaggcttaattcctatacttttagggactgggacaggttctgaattgatgagccgtattgctttacctatggttgggggcatgatttcagctcctctactgtcaatgtttgttatcccggctgtatatcagcttttaatcaaaagaaaactatcaacacattga

SEQ ID NO: 54801 - DNA, 348 bp, Acinetobacter baumannii
atgagtattcctgctggtattaaaacaccgggcgtttatacagacgtcaatatcaataccctccgcacagggcttccagccaatgagcaaaaagtactttttgtgacgctagacgttttgtccggacaattcattcccgttgatgtttatgacacagctggagctgattctaaatttggtaagaactcacaagctggtcgaatgattaaagctgcggttaaaaccaatcgacttgtgaatgctcaagctattgcacttgccattgatggtgttcggacacagaaagcattacataccgaatcgggtgacgctgtgttagctgaagacggtgctttaattgaaccataa

SEQ ID NO: 54802 - DNA, 618 bp, Acinetobacter baumannii
atggtaaatcttgacctcggtgtagttgtgcaaggcatgaaagatgtcatggcaaaacagattgaaacgaaagcatggccttggatacgtgaaatcaaaacctatggcggtgaatttgatgatgaaaccttggcttttatcgatacatttcctgctatctgggtgacttttaaaagttcaggtgcacctcgcaaaattagtgagaacaagactgtttatcccattaatttagttgttttagttggcgcaagatcggtacgtaatgaagaagctcaacgcttaggcggtggccgcgatatcggaacttttaagatgttgagcctcgttcataacttgctcactggcaatgatttatcaagtgtcaatgtgaaaggtttagcaccattagagctaggccataccagaacaatttttaatacaaccacacgtagacagtctgtcagcgtgctttctcaagaattcaatacccaatacacaattactgcttcagatcgtgaccgtgaagaggcagatgaatctatcggtgaaatccaccgtatcaatgtcgattatttctttgagccgggtgatgacgttaaagacgcttctgatctggttgaactgaaggaaaataaataa

SEQ ID NO: 54803 - DNA, 429 bp, Acinetobacter baumannii
atgtatgcaacggcagacgtgatgattgcaaagtttggtgagcgtgaacttattcagctcactgacaatgaagctccatatttggaagtcattaactatgacaagctaaataaggctttacagcatgctaactctcaaattgagggctatcttgttggtcgctataagctgccgttgcaaacagttcctccatttttagaatccattgcttgtgacatggctcgttaccatgcatgcactggagcattctctgaaaatgatccaatccgcactcgttatgacgacgcgattaaaacattaaaggaaatcgcaaaaggcacagtcagtcttggtaacgcgccagctggtgagtctgagcctgttaaaacttcctcaaataatgtgatgtttcaggtcggacgcaatgatttcggaggtcgcggatggtaa

SEQ ID NO: 54804 - DNA, 909 bp, Acinetobacter baumannii
atgaatgtaaacgctgcaaatttaaatgcgattttcttaaatcttagtaaggtttttaaccagacatttaatgatgttcaggttgaatttccatctattgctatggttgttccaagtaatggtgcttatgttgattatcgctggttagcgaacttccctcaaatgaaggaatggatcggtaaaaaacacattaccaagcttgctgaatacgactatgtcattcgcaacaaagactatgctgcaacaattgaagtgcgtcgtaacgatattgaagatgaccaaatgggaatctacaagccacaagctgaatcagcggcatggtctgcaaaacagcatcccgatgaattagtttttgaagcagtaaataaagcatttacggctaaatgttatgacggtcaaccgatgatttcaggaagtcataaagttggcaaattaacctttagcaataaaggaactaagaaactttcgattgcttcattagcagcagctcaagcctcatacggtgtagcacgcacaactatgatgaaattcaaagacgaatcaggtcgtcctttgaatgttaagccgaacattttacttgtgcctccagcacaggaagatgtggcaaatgccttgatgactgttgaccgtttggaagatggtaaaccaaacccttacaaggggtcagcaaaggtacaagtgtcaacacgtttaactgatgacgatgcatggttcttgttggacaacacaaagccagtaaaacctttcgtatatcaggtgcgtaaaaaaccagtgtttgtttcacaaaccaatatggattctccatctgtatttatggaaggtgttttcttctttggtgctgaagcacgtggtgctgcgggttatggcttctggcaaactatttacggctcaactggtaaggaggcgtaa

SEQ ID NO: 54805 - DNA, 411 bp, Acinetobacter baumannii
atgagcagtattttaaatcaagaagaacgacaaactgagcgtcgtgaagtcggtttgattcatgtgccagtcaaagctggtgcaacggtgattgctggatatattgccgtagttgatgccactggttatgcagttacagcaactgctgcaacaggtttgacttacctaggtcgttatgaagacagcgttgataacactgacggtggcaatggtgatgcacaagttttagtacgcacccatgatgctttcttttttgcaaatagtgctacagatccagtgactcaagcatcgtttggcaagccttgctatatcgaaaataacgaaacagtcgcagaaacagatgctggtggaaccctgtcagtagctggtcgtgtagttggtattgatgaaaatggagtatggatcgaatga

SEQ ID NO: 54806 - DNA, 1068 bp, Acinetobacter baumannii
atgaacaaattactcgtagccctttgcgctttcgacataaagttatctgctgataagttggtgcttattcctgaaggaatttttaaaggcattgatggtcgtccgtttgatgcaccttactggcgtttaacaccagaaaatggtcgcgcattagcagctcaacttaatactcgaactattgatatgctcgttgattatgagcattcaattattgctgcaaaacaagaaggcaaagaagctccagcttcaggttggctgcgagctggtggctttgaatatgtggatggcgtaggtctatgttctaacaattggtcatggactaaaaaagccaaagactatattgaagctgaagaatacaaatacctttcaccattcattttatacgacgcaactggggatgttcatggcctcattaacgttgcgctaaccaacaccccaaatatcgactctttaccgcctgcaaaacttgcagcagcggcacaggattttttgtctcaaaaccgtgaggattcaacaatgaatgagtttctaaagctcatgcttaaaaaaatcggtttgtctgaaactgcaactgagcaggaagcgattgctgctgcaaatagtgcttttggcaaatttgatactgcgtttggaactagtgtctctggcgaacaaacactggatgttgcttttaccaaagcgattgaagttaaggcggctgcaaataatcaagcagtcgttgacccaactcaatatgtacctatggctgtatatcaagaagctgtaaatcaagctggtgcagctgaagcagccaacaaggctaaggaaattaaggaccttattgatgctgcatgtagtgatggtcgtttgacaggtcaagtgacaattgcttggtacaagcaacaggcagaaaccaatcctgattttgtgaaagcacaacttgctgctttgccaaaaattgcagctttaactcaaaaacaaaccactactcaccaacaaagccagtccaatcaacagcaggtttctgctgaaaccttggctgtcggtaatttgatgggtgttgactggaatgagggcaaacaagcatga

SEQ ID NO: 54807 - DNA, 477 bp, Acinetobacter baumannii
atgactatagaactaagtaatagagaattaaggactcgtcttactcgtgttgctgaagcaatgcaagacacatctcatttaggtcatgcgattgcaaacagctttttgactgttacagaggataactttgattctgaaggccgaccagcgtgggcaggtttaagtctagtcacaatagcccgacgtaagtcagggaaaatactttttgtatctggtcaattgcgccgaagtattacaacacgtgtttcagataatgaagtcgagattgggactaatgatcctaaagctccaacacagcattttggagctaaaaaaggtcaatatggtaaatcttcaaggaatgggcctttgccttggggtgacatacccgctagaccatttttaccaatggatgttaatggtaatttacaacatgaggcagagcttgccatatttgatgatgtagaccattactggcatcaattatttaatttctaa

SEQ ID NO: 54808 - DNA, 1260 bp, Acinetobacter baumannii
atgcctacagcacaacggccagagttgaatgctctattcacattaccccctgaagatgccatttcatatttggagaagaagggtttcaagatcggctgggactggcatgaaacacttgataatgcacacagcaaagcattcactgttgcaaaagttgcacgcatggatctgcttcaagatattcgccagtcgttaattacggctatgcagcaaggccagtcacttgagcaatggaaagctagtatcacgcctgtccttcaggacaagggatggtggggaaagaaacaagttattaatcctgaaggtcgtgaacaagaagtacagcttggcagcccacgtcgattacgaacgatttacgataccaatatgcagtctgcatttgcggctggtcgttataaagcaatgcgtgcagggtctgatacgcggcctttttgggaatggagacatattacgatccgtaatcctcgtaagcagcatcttgctttagatggcaaaatttttagttatgacgatccattttggtctgtagcatttccgccttccgaatggggatgcaaatgtcgtgttattgcccgatccagacgtgaggttgaaggcaaagagatattaactggtgaaggatatgacagcacaattactgaaaatgttggcactgatcgcaatactggtatgagtgtttttgccaaacgtacccagttcaatattccaaccaaagacggcacactgacatttgctccagctgctggttttaatggatcaccagccacaagttacttgattgatagtgtaatggcacaacgggcaacagatttaatgggttcgttcaaaggtttaaaacaaacacaggaattattgaataccccaatacggacaaaagtccacgaaaaatttattcagaatgccttgcgtctagctgagcctatgaatgagacaagcacaattggctcccttcaggatgctgccgtgaaggtgctatttagtaaaggcgtacagcttgaatcaccagttttatttttaagtgatgcgattattgttaataaagaatattcaagtgtagcggttagtcgtttgatggcattgcctcagttactaactgaagctaagcaactgttttgggatcctaaaagcgagctattgatttatgtccttgaaaaagatgtggttcaattttcaatgaatgaaataacaggcacttttggtgtgtctaagattgtgcgtaaaaaagactggcaatctgatggcttggagctaattcaatga

SEQ ID NO: 54809 - DNA, 1614 bp, Acinetobacter baumannii
atggtgcagaatcctcaaactgtatttgcatttatcatggctaaaaaagaccgttctccaaaaaaacaagatcgcactgcgcttgaaacaaatcaaactgctgaaattgcatggctcacgaatcaagtgcaagaacaccctgtcgttggcatgagtccgcaacagatgtatcggttactcacagatgcagaacacggcaatttgcaggctcaagccgacttgttttctgatatggaagaacgtgacggccacatctttagcgaaatggataaacgcaagaaaggcatcaatggactggactggggtgttaagccgccaaaaaatgcatctgagcaagaaaagaaaattgctgaagaggttcgtgagtggattgaggaaattcaagactttgagatgtttttatttgatgcaatggatgctattggtcatggctacagctgccaagaaattgaatggcatcaagttggtaacttgtggctaccgaaaagctttgagcaccagctggcacgtaatttcatgacgccatttaatcaaccaaatgaattgcgacttaatgatggaactcctaccggtgcagagttttgggactttggctggtttattcatcgccataaagcaaagtcaggatatattgcccgatctggtttacaccgaattttgtgctggccgtttatctttaagaattacgggattcgagatgtgatgcagttccttgaagtatatggcttgccaattcgccttggtaaatatccttcaggtgcaactgatcaggaaaagatgactttactgcgcgctgttatgtcgattggacgtaatgctgggggtattattccagttggtatgagtttggattttgaatcagcggctgatggtgacactaaaaaccacatgtcactaattgattggtgtgagaaaacagcttcaaaaattattgttggcggaaccttgctgtctcaggctgacggtaagactagtaccaatgcacagtctcgtacacatcaaatccagtttgaaaaaatcattaaatctgatgctaaacaattagctcgctcattaactgactatcttgtcagtgctttaatgcgattaaattatccgaatatccatcctgaccgtttcccaagttttttctttgatgtatctgatactgaagacatgcaagtctttggtgaatcacttgaaaagttggttggtgggggaatgagaatcccactgtcatgggcacatgagaaactagggattccgcagcctgctgacgacaaagagccaatattgggaactcaaaaagagtctacgcctaatttggcaatgaatacttaccagcctcaactgttaggcggtattattgctgcaaactcagcccagctccctattgaagaacaagccttacagttattgctgaatgatcagagcagtattgcacaagacacagctgagtcatggactaagcagctactggcaaaaattcagacaggcaatgaagaagacatccttgctcttttacaagatgcatatccagccgatgacgaaccagcattacaggaaaaactgacacgcttgatatttgcgagtgaagtgttgggccgtctgagtgttcaagcggagcaaagctaa

SEQ ID NO: 54810 - DNA, 768 bp, Acinetobacter baumannii
atgaaaaccaagccaatcgtaccgtggatgggtggtaagcgtcgtctggtgtcgcaattgattgaaaaaatgccagaacaccaatgttatgtagaattatttgctggtggtgcagcattattttttatgcgtgaagaacagtcaaaagttgaagtgattaacgatttaaatggtgagctggtgaatttatatcgggttgttcagcatcaccttgaagagttcgttcgtcaatttaaatgggcgctggttagtcgccagatgtttgaatggcttaaatctgccagtgttgacttgatgactgatattcaacgtgcagcacgtttctattatttgcaacacacagcttttggagccaaggtgtctggtcaaacttttggtacagcaaccacagcccgaccagtaaacttactcagaatagaagaacaattgagtgaagcacatttgcgtctttctggagtaacagttgagcatttaagctgggatgcatgtctagtgaagtatgaccgttctcatagttttatgtatgccgatccaccgtactggaagttggctggctacggtgtaggttttggtttggatcaatatgaaaaaatggctgagctaatgaagacttgcaaaagtaaagtcatgctatcaataaatgatcatgaagatatgcgtgccacatttgatggactgaatattgcgaccacgaaaattaaatattctgttggtaattctggttcgggtcgtgatgaaaaacaggaactcatcatcacaaattactga

SEQ ID NO: 54811 - DNA, 1644 bp, Acinetobacter baumannii
atgatgaacactccgaaacctcggcaagatactgtccgcatcattgaatgggatgagcttccagaacgtgcgcgtaatattccaaacaatttaaatccatttgaagaaggtgttttaatgaagcaccagatcgaatggctcaaaattagaacggatattaaagtctgccctaaaggtcgtcgaacaggtattacttttgccgagagttttgatgctgtattaacggctgctgcaagcaaagaagctggtggcatgagtgtttattatattggtgataccaaagaaaaaggtcttgagtttattggttactgtgccaagttttcacgtgtcattgctgaagcccaaggccaaggtatttctcaaattgaagagtttctttttgaagaccaaaacgataaaggtgaaacgcgccagatcactgcttaccgtgtccgttactccagtggttttcaaatcgttgcattatctagccgacctgaaaacatccgtggtctacaaggtaaagtaattattgatgaggctgcattccatccgaatgttcagggcgtaattgaggccgcaacggccttgcttatttggggggggcgtattgcaattattagttctcataatggtaaaaacaacgccttcaaccagttcgtaaaagatattgaagctggcgtatttggtgaagatgccaaatcccttgtcgtcacttttgatgatgcagttgcaaatggattgtatgagcgtgtttgtttcatgcaaggtaaagagccaaccattgaaggcaagcaaaaatggtacacaaaaatccgtaaagcttatggtagtcgtaaggctgctatgcgtgaagaattagacgccattccacgagatggttcatctgtatgtttacctactttgtgggtagaacgtgcaatgacggaagtcaggactgtattgcgtctacaattgggtgatgactttacagagctaacccctgatgagcgtgatgcctatattgaggactggattcaacgctatttagagccagaattacaaaagctagataagactaagcagcactgcgctggacaagactacgcacgtcaccgtgactttagttttattttaccgttctatattgcccaagatttacgtcgtattgcaccgtttgtcattgagatgcacaaagttccttctcggttacagcaaaaaatcttgtggtacatgttggatcgtctaccacgttttggtggcatcgctatggatgctacaggtaacggtgagaccattgcagaaaatactgctgaaaaatatggtgcacacatggtgcatcaaatcaaattgagccgagcttggtatggcttatggacacctaaactggtcactgcttttgaagaagatatggttgatttgccaattgatgccgatttaaaaaatgactgttcagccattgaagaagttgacggcatatacatggtgtcaaaagcacgcgccaaggatattaaagaccctgaactttatcgccacggtgatggtgcagttgcaatgattttagcttggtttgcaagtttgcatctggcgactgctattgaatttactccattaccgtcaaaagaagagatggagttgaatcccgatgattatgatgactggtttagctcggctggttgttattga

SEQ ID NO: 54812 - DNA, 294 bp, Acinetobacter baumannii
atgagttttgaagcccatttaaaagaagaaatgcgacttgtcatccttcgtttgcttaatgaattaccaagttatcgtggtaatagctcaaccttgcatagtgggcttaatcattggggcttaagtttcagccgtgatcaggtcaaaactgagctgtattggctgaaggaacaaggttgtattgaagttgaaatggataaccctgctgtgatggttgtaaaactcgctgaacgtggtcaagacgtagttgaaggtcgagcacgtattcatggcatcaaacgtccttctgcatag

SEQ ID NO: 54813 - DNA, 282 bp, Acinetobacter baumannii
atgtttgattttttaaaacttggctttgctgaagtgcaatggattgtagtcacagctttaggcatttatgcatggatcattcaaaaacatagtgcatcagctaaagaaatgctcgaccttcatttgcgcgtggttgagctagaaaacgctattaaagacatgccttctaaagttgatattgctcagcttcagggtcaactcaatacattaaataaacagcttgataccgttcatagtggtgtcaagcgtattgaagattatttgctaactaataacaagtga

SEQ ID NO: 54814 - DNA, 336 bp, Acinetobacter baumannii
atgagtcaaaatcaaaaacaaaatgacttggaaaatcaaaataaatctgctgagccacaatatattcaaggtgttcatggctcatccatgcagttcggaatcttggtacacaattggcgtactggttggaaatggtttagtaacgttgcctttgctggcatcgtagctattcaaactttttatgacacattgccacccgaattgattgaaaccctcccaacggatgcgcggtcaaaaatcacaattactttggccgtattggggttgattggtcgtttcatcaatcagactaaaccaaagcctttaccaccagtaaaggagaatgccgatgtttga

SEQ ID NO: 54815 - DNA, 585 bp, Acinetobacter baumannii
atgaaaaaattaattttagctgtgagtttattagcattggtagcatgctccaaagagcctgctcaaaataaagtagagagcactaaatctcaaatagtcaatgagccagtcaataatgaaaatttaaatgacactaaatatgagaaacggcttaatgaagctactcaggcaatgcaggattcagaagaagaacatatacagaaagaaaataatccacctgtatatgcacaaataagtaatgaacaaacggctgacttcattaaacgtatagaaaatactagaattttagactctaaaatcaatctcactagtactccagaagttactcgtcatagtagagaatataatgctttgattgatgaggccaaggcgatttatggggatgtaaatattactaatgaccttagctattgcactaattttgctgaaactgcaaaagaactttggaggttaaaatattcaccaactagtgatgttgaatttaacaaacattcaatacactcacttcaaggctctattaaaattgcaaagcaggattgtcttgacgctgttcaggaaaaactaagcggaagtccttccgcctga

SEQ ID NO: 54816 - DNA, 648 bp, Acinetobacter baumannii
gtgactattggagcaagacttaaagaagagcgtgagcgactgggttatacgcaaccagtttttgctgaattagcaggcactaccaagaaaagtcagatagattacgagaaggatttaacgcagcctaaagctggttatttagccgcaattgcagaagtaggtgctgatattggctatattgtgactggcagaaaagccaatcagtcactaaatggtgactttgcttttgagtttgatttagtcaacgtttatgacgtttctgtctctgctggcgatggtgcagtttgtttgggtgaaacagaacctgctagtcgattggcatttagaaaggactggctttctagacatgggctttatgcaaaggacttagtcatcgtttatgccaagggcgattctatggagcctactattcatgacaaagagcctttattaatcaatacgattgataaagaacttacagatggatttatttatgttgtgagaaatcaagagaacttttgggttaaacgtgtacaacgacagtttaatgaattgttattgttgtcagataatgaaaaatatctaccaatgaaactcgatttaaacgaatcgacagatattgaaattattggcagatggatacctccaagtcgcgggactttttattga

SEQ ID NO: 54817 - DNA, 207 bp, Acinetobacter baumannii
atgcacctaaaaactgccgaagaagtaaaacaggaatttatccagcaaggcattcctgtttcatcatgggctgaaagtaaaggtttcaccccacaagaagtttacaaagtactcaacggtcaatctaaaggaaactttggacgtgcccataagattgccgttgccctcggactaaaaccagaacctaaacagaaagtcactgtttag

SEQ ID NO: 54818 - DNA, 168 bp, Acinetobacter baumannii
atgagacaaaaacaatcaggaagtattgcatttcgttacctaatcgtcttcgtaacgtcattcggatatgtccaatggttcttcgctgaacaagacaatgaagtgcttaaacagcaactaatgtcgatcaagtctactcaaggagatgggcatgagttcaacaaataa

SEQ ID NO: 54819 - DNA, 297 bp, Acinetobacter baumannii
atgagttcaacaaataaatcagcagcaaaagttttaagtgtcttattcgcattacgtggtcactacattgctggtgttagcaacaaacaactttctgaaagcctaaatgaaacacctgtgtttatcacacgtgccttacaaacacttgaagcaaatggctgggcagaaaaacgtgacaacggcaattatgcgccaagcatgaaagcagttcggtttggtgcggcatgcaaagaagaatgcgaacgcgttcaagctcgtattgatgaatacaagcaacgtctaaacacacaattttaa

SEQ ID NO: 54820 - DNA, 885 bp, Acinetobacter baumannii
atgagtaatgaagtaatcactgaagttgaaattcaaaatcatacaaaggctgttgcaggtttagcaacccaacttggttatgaaggagctttaactgtaggcgcattggaagatgaaattcgctttttccaacaacgtactgttgaagcagtcatggagcttggcaagcgcttattaatcttaaaagaaataacacctcatggtgagtttaataagcgcgttgagatgttgaacttcactccacgtatggcacaaaaattcatgtcagcggttttgaaattctcaaaaacgaattcgagttcgcttttgcagaaagctggaaatcaaacaaaattgcttgagcttgtgacattggatgaagatgaaatacaagtcatcgatcaaggcggaagtattggcgagctttcgttagacacaatcgaaactatgtcagtgcgtgaactaaaagatgaacttcgcaaaattaaagctgacaaggaagctagtgacttacttcttcagaagaaagaccaaaagctcaacgaactcgacgcaaaattaactaagcttcaaagcccagttgaaatcaaaaaacgtgctgaaactgaggaacaagctttagaaaaggcagctctagaaactctaaacacagccagcatcactttcctaaatgcacttatgcgctatcagaatgatgtgaatagcgtactagacacggctgaaaagaaagggattccacaattatttgaacgtgtcgatgaggctgttattgcgacatatcaacgcattgctcaatacagccgaagcctgaatgtacaaattgattttacaagtatggtcacacctgaatggatgtctcttcaagcagctgacttaccacctatcgaagttgatggtgaggcttaa

SEQ ID NO: 54821 - DNA, 1746 bp, Acinetobacter baumannii
atgtctaatccaaatctagcaaaaatcgactatttgcgtgaagtagcagcaaagctcaccaatgctgggtttggtgagaaagctgagattgtaaaaactgcttgtgaatatttatgcataagcaatgcacaactttatcgtgaacttgaagcagtcggctataaatctggtcgcaaacaacgcagcgacaaaggtaaatccattgtcagtgtagaaactgctgaactggttggtggcatggtcattagtgccatgagtaaaactggcaaaaaacgtatgccaattaacttagctttggaagttgcacaggatagtggcaaagcgccaaaagtttcagcagctacgatttccagagttatgaaacagaatatgtgtcacccatctcaactggttacaccaactgcacaccagcaacaacgctcattacacccgaatcatgtatgggaagctgatgcatcaatttgtgtggttttttacctcaacaaaaaatctggtatgcacgttatggatgagcgtgagttctacaaaaataaaccagcgaatttaaagaaaatcgaaaaagaccgtgtgatccgttatgtcatcacagaccacacttctggctggatttactttgaatatgtgtggggagctgaaagctctgagaacttaaccaatgtgtttttaaacgctatccaaaaacgtagcaatcaagaaccaatgcacggtgtgccatttattttttatgttgataaaggctcagcaaacaccagtggtttattccgcaatttacttgaacgtcttaacgttgagtttattgcacatgcaacacacaacagtcgtgccaaaggtcaagttgaacaagccaacaacctgattgaaacccaatttgagtcactactcagttttaaaacggtagatagcattgctgagttaaacgcctttgcaactcaatggcgtgtcatgttcaacgaaacgaaagtacacagccgtactaaacgtacacgtaaccaagtatggcagatgatccgccctgaacagttacgcattgcaccaccaattgagttatgccgagagttggtaagcacattacctgtatcgcgtaccgtaaaaggtgacttaacgattcaacatacgatcaaaggttatggtgagcagttctatagcgttcgtcatattgatgggatttatgtaggtgccaaagttgatgtggttgttaacccatatcgcgcaccagatatcgatatcttgatgaccagggagcatggcgaacaagtcatccataccgttcaaccagatcaatacgacatctttggtcagttagctgaatcgccagcaatcggtgaagaaattcacgctatgccagacagcaaaattgatcagtctcgtaagcgcattatgaaacaggcttacaacgctgaaacacaagctgaagttgataaggctatcaaaaaacgtacccctgcataccaaggtcaaatcgacccaactgcacacattaccaaacatgaagtacctgaatatttaccacgtgctggcgaacaaatgcagacagaaattagccgtcgtcaggttgcaccagtcaacttgatccaagctgcaaaacaaattcgtggccttgtaggtgatttgtggacacctgaatgcatgtcagcacttaaaaaatctttccctaacggagaggttccgcaagacgttatttccgaaattgcagagggcatcaaagctgcaacccaaaaaccgaaattacgagtggttggagagtaa

SEQ ID NO: 54822 - DNA, 1188 bp, Acinetobacter baumannii
atgagcgcacttaaacaattgcttaaacaacatgacatgacgcaaagctcgctctgcaaaccgctgggagtaagtactgcaactgtcaatttatttattaatcacgggttatcaccgaagaaacgcgctgctgagtttaaagcccaattcattgagcttttaaagaacaaaggcattgcacatgaagacattcaaaacgcattagatgctgatcaatcccacaccgttgacgaccaagccttggattgtggaactgacagcactactcaaccagaggaagagcaactcatgctactacgcaaacaaacattaacaccagaagcaaaaagaaaatttgcacttttcaaaaacatctttacagaaaatatccgcactgctggggaacttttcaataacagcgacattaattatgttcgcgaagcgatgtggcaagcagccaaaggcaatagcagttttattgctgtggttggtcaatctggctcaggtaaatcaacattacgtcgtgaattgattgatcgtatcgaacgtgaacgagaagcagccattgtcattgaaccttatattttggcaactgaagacaacgactttaagggtaaaaccctcaagtcactgcatattgctgaggcaattttgtcggcattagctccaagcactaatgcaaaacgctctcctgaagcacgctttcgccaagtgcatcagctactcaaagagtcgagtcgtgctgggcatcaccatgttcttgttattgaagaagctcaaagcttaccgattactacactcaagcatctcaagcgttttcttgaacttgaaaatggatttacacctttaatgtcaatcatcttgattggtcaagatgaactaaaaatcaaactggctgaaaacaatcaagaagttcgtgaagtcgtgcaacgctgtgaaattgtgacccttgaaccatttacacaaaccacgcttgttgactatttacagcatcgttgcaaagcagctggccgtcaactttcagactttattgatgagtctggcattgatgccatttgcagaaaactttctcgaaatgttggtcgtaagaaccatagcgaaagccttttataccctctggcagtaggcaaccttttaacgggcgccttaaacgtggctgctgacttgggtgtcgatgttgtcactggcgacttggtgatggaggtttaa

SEQ ID NO: 54823 - DNA, 219 bp, Acinetobacter baumannii
atggttgattttgcagatgtagctgaaggcatcgccgaagaaactattcagcaaacactttcaaatcgccaaacctttgacggtgaaagtgaacatgaatgtgaagaatgtggtgcagaaattcctgagcgtcgtcgcgctctaggtaacgtaaagctttgcattgactgtcaaacagcagttgaaagcaaagttaagcatttccgaggtggtctatga

SEQ ID NO: 54824 - DNA, 195 bp, Acinetobacter baumannii
atgaacatcaaacaaaagcgcgctcaatttgccaaagatatcgacaaattagtcagtggtgactatgtgcttgttcccaaacagcctactgaagaaatggaacgagctggtatggaagctggagctggttttttagcaaaggctgtttatcaagcaatggttaagtcagcactaggagtgaaagcaaatgggtga

SEQ ID NO: 54825 - DNA, 225 bp, Acinetobacter baumannii
atgggtgaagcgaagcgtcgtggcacaaaagaagaacgtgttgctcaggcaattgaacgtaatgaagcaaccaaggcagcagccaaacaagctgtaattgcaagacgccaaaagcttcaatctagaggcaaaacaatcggcattggacgtttgccttttggtctagcaatcgcattggctgctgtggtttcaagtgcatttgaggttcataaacatgaaaactag

SEQ ID NO: 54826 - DNA, 684 bp, Acinetobacter baumannii
atgaaaactagatgtccagcatgcggagcgacaaacagcctagatgccctattagggcatggtgaagcaagcaaagctttcgttgcttcactaaatctggttggtgatttagctacgccactggtcaagtacttgggaatgttccgctctcaaaatcgtgaacttacttttgaacgtacagcaaagttacttggtgaaattgctggggatattaatgctcaacagattaaacgtggtcatcacagttacccagctcctaaagcagcgtggatctgggcaattaacacaatgcttgagcgtcgtgaccaaggcaaattgcagttgcctctgaaaaaccacggctatctgtatgaagtgatcagctcattcaagccagaaaatgcaccagctccaagcgaacgtgcagcagctgcaccaagagccaaaacagaagctgaacgtgcgactgagcaagctgaacatgaacgtcaaaaaaatgcccgcccaaactacagctttaaagaaatgatgggctttacacaattgaatgagaagcagcctgagcgcgggctgaagaacatccccaaagaacaacttatggcgcatgtcgctcagcacaagcagccagatgaaactttagaacagtgttaccaacgccttaaggctgcggaaattgaatcagaacaaggagcaacacatgaataa

SEQ ID NO: 54827 - DNA, 615 bp, Acinetobacter baumannii
atgaataagtctattccagaaggttattgggaaaacgcttcaggtgcatttgtgccagaggccaatgtcaaagaaattgacaaattgcgtgatcaaacagttcgtaagcttcatgagaaagcaaaagaaatccatgacctcttaaaagagttcaaggttgaaggctttgctgatattgccagctttatccaaatttctaccgaccaatatggtgcaaaagttggaggcaataaaggcaacgttacgctcatgacttatgacggacgtttgaaaattcaacgcaatatcgcagaaaacatcaactttgatgaacgtctgcaagctgcaaaacaactcattgatgagtgccttgaagaatggactgaaggcagccgtgacgaaatcaaagtcatcattaacaacgcatttcatgtggataaaaagggagatatcagcactacaaaagttcttggattaaaacgcattgaaatcaatcacccgaaatggaaagaagctatgcaggccatttcagacagcatcaacattgtaggtagcaaagcatacctccgcttttatacccgcgatgatgcaactggtggctacttaccactgtcacttgatatcgcatctatttga

SEQ ID NO: 54828 - DNA, 180 bp, Acinetobacter baumannii
atgtattcagtcaaagcactagaaccacaattaaacgacgatccgcaagccctatttgcaatcgcccgtgaagacgatgctttagtcggtcaattctaccgccatgaacatgcagaaattgcatgtgcagcacttaaccaagctcaacaaactactgaaggaagaacttctcatgaataa

SEQ ID NO: 54829 - DNA, 285 bp, Acinetobacter baumannii
atggataaccaagaccgcaaaatcacaggctatcgtgaattatcccaagaagaaattgatttgatgaatgaaatcaaatctcaagggcaagctctaaaagaacttattgggaaagttgactactttttattgggattggcgaaagaaggacttgaaggtaatgcagaactgcaacaacacctatgggatacggaaccgaattactggtcaagtattgcaaaaagaaacctacaacaagggcttatggctttaacccgtgcagtagcacgaccaacaaccttttaa

SEQ ID NO: 54830 - DNA, 180 bp, Acinetobacter baumannii
atggcaacgaaaattaaaggcttggatgttcttgaacagaacggattaaaagttgtccgtaaatacaacatttgcggatggttcgagtatcacgttttgaatgaggctggtcagagaatttcacgccatacagttcaacaacgtgcggtcgatatggctcttcacactcttcaagcataa

SEQ ID NO: 54831 - DNA, 210 bp, Acinetobacter baumannii
atgaaatttaaagttgaagtttcaaatatctatgtcaaagaacacattgttgaggctgacgaccttgctcatgctctcgaaattgcttctgaaatatcagacacgatggaagcaaatcagcaaactttttttgaaagcacatgggaagctaaaccagtttctaacgatgaaaaagctacatacgaacctgaacagaaatatttgaaataa

SEQ ID NO: 54832 - DNA, 318 bp, Acinetobacter baumannii
atgggtattaaaaaattagtaactatcactgtagaggctcaaattgaaattgagctaccagaggaatttaaggagttatcacaacaagatattgatggcatcaaagcctgtggatatgaagatttcaagattcaggatgacctctataaatatgctgctgaattagttttaaacggtggtgaaaatggaaattgggatgttttcggctatgtagtagctgactggaaaaaaggtatgacaggcattccagctaattccactttctttaatagacaagatttacatattacagattgtgaagttgaggaaattaaatga

SEQ ID NO: 54833 - DNA, 225 bp, Acinetobacter baumannii
atgagtgtaatcatgaattgggcaacggttctagcttattttgcggtctttttaatggggcttatttcatgttttaaagaggccaaattagcttgggctatcaaaaataatactggactgactgtttttgaaaaacggtcatataaatttaaagctggtgcatcaatcacgttggcttttctagcgattattggactgtttcgagcttttcaaggggtggtatga

SEQ ID NO: 54834 - DNA, 213 bp, Acinetobacter baumannii
atgaacttaaaaaagattgtagtttttattgtcgtaattttactgttatcaactctattgttctggcaaatacagtctagctatcacaaagcgattttattaattgttttgactatttcagctgcttatttaggcaagagaaatatagataaagttattttgtttattccaacacttatcggttttttgattgtgtattttcttaaacgatga

SEQ ID NO: 54835 - DNA, 390 bp, Acinetobacter baumannii
atgccaaatttaattctcccaacacgtgcttttgaggttgtaaaaaaagggatcgacttatttcactacggtggctttcatatggtcggcgtcgacaaaattgtgaaagaaaccgaagtgaataaaatgacgttttataattattttcactctaaagaacgcttcattgatatctgtttaattgtgcaaaaagaacggctccaagaccaagtggttgcaatagtggagtacgaccatgagacaagcacaatcgataaacttaaaaaactttatgtattacataccgacttagaaggtccgtactacttattatttaaggctatttttgaaactaaaaacagttatccaaacgcttaccaaactgcggtcagatacagaactgatacctaa

SEQ ID NO: 54836 - DNA, 744 bp, Acinetobacter baumannii
atggagtatagcgacttcatagtttatgtggatgagagtggcagcattgacatgcttaacaacgatccagacttccctgtttttgtcttgtctttttgtgtgttccataaaaggtattacacagaaacggtagttaaagcagtggaacaattaaagtttaagcatttcggtcacgatataataattctgcatgagcgagacattagaaaaagaacatcacattttgctgggttcgataaagctcggatggagtctttaatgggtgacctaaatggattaatgaatgataataattttatcttaattagctctgttatacgcaaagataaattaattaaacgcgatgcaaacccatatgaagtagcaatgaagttttgtcttgagcgactttatttttttcttagagagaagaatcaaaacaatcgtttaacacatattgttgttgaatcaagaggaaaaaacgaagattcacaacttgagcttggctttagaagaatatgtgatccctttggaaactatcacaacaaaattcttccttttgaaataatttttgcttcaaaaaaaaccaattcatcgggcttgcaatttgctgatttagtagctagaccaatcggaagacatgttattaacccttctcaatcaaatagagcatttgacatattaaaagctaagttttattgcaaaggtggtagaggtgcagttggaagcaactataatggatacggcttaaaaatatacccttaa

SEQ ID NO: 54837 - DNA, 273 bp, Acinetobacter baumannii
atgagtcttgagaaaaaatccatccatattcgaattgaccaagacatgcatagccgcttggtggtattggctgaactggagggaaatgacattgctgctcaaggtagcgttctcctagaaaaaatgatcatgggtgaatggcataccgtaactgtagcagcagagaaaatgaatcgcttgggattaacagggaatacaggacgtaacaatggaaacattgtgaagcttagggaagtcgaggattttagcggaataggcaataaaaaagcctga

SEQ ID NO: 54838 - DNA, 1059 bp, Acinetobacter baumannii
atgaaaacaaatttagcacaagagccaccaattccacaaggtgagttggttcactttccgaagaaagagcgtaatgctatgtcggatcaactttcaaaaggcttcatcatgaaaagccgtctttaccattatgaggtagagccgttcatttctgatgcagctaagaacgtatattcagcgattatggggtttactaacggatttaataaaccttctgaccatatctcacatcgtcaattacagggtggaaagcttaaaggatctaacaagcttagctctggcacagtaaccaatggtctaaaagaattaacttggtttgaggttattacagttgttgaacgtaataacaaattaggcaacaaataccagattaatgaagtgtctttagtaaaggcttttgagaaatttagtgcttcagaaattaaagcactccgcatcaataaccgatgcgcttcgattagtgaagcgcttcagttagtggtgcagtccgcttcagttagtggtgcggaaggtgcttcgactagtggtgcatcaatagagtttctttttatagattcttttagaaatatatttattaactcgcttcgctcaaacaaaccacttgaagctagtttttatgtttatcaagaaactcaaaaacagatcattcttgaacaacaaaaattggaagctgaggcaaaagctaaagctgaaaaagaacgcaaagacaaagtacgcaagttaagttttgatgaagttatcaaacttactaaaaacacttttgcaaacctttgtgatcttgaactttgggaacagtatgtagcaaaccgttctcaacaagctaaaaccaaattaactaagaatgctcttaacgcaatctacaaagacttcattgagtggggttatgaaggttctaaccaatctttaaaaacatcaatcactggtaactatcaaggtttattcgctccaaaacaacagaatcatggttttgttaatcaaagccaagcttcaactcgcatgtctgaaattcaagagctaatcgcaaaagaggaggcaggcaatgaacagtatggtttctaa

SEQ ID NO: 54839 - DNA, 201 bp, Acinetobacter baumannii
atgaattacaaagaaatgatggcactacgctgcgcgtacaaccatgggttaaaaacaactgagacaagagcagctgcatgcttgtatatcaaacttagacgtgcagggaagattgaagagttcaaagctgaaagcatgactaaacgttacaagcaagcaatggcagaccacgaatcaatatacggaggcggggatgattaa

SEQ ID NO: 54840 - DNA, 198 bp, Acinetobacter baumannii
atgattaagtttattaccgtatgggttctcactgtgacccaacaccagatggttggtagtgccaccgagtcaacataccagcttcaatatgcaactcagtcaatttgtgaaaagcaaaaactacgtcacgaaacagatcgaacagatgtgcggtgcgattttcaacaagtgccagtttatgtggggagccagccatga

SEQ ID NO: 54841 - DNA, 276 bp, Acinetobacter baumannii
atgagtgagtttaaagtcggggattacgtagtacatcctaagttttcaaacaaagggttgtacaaaatctatgagatatcaggatcaataacaaaagttcagcttatgccaaatggacggaaaagctactcatttaaatctgacattcgccacgccaccccagaagaaatcgcagcaggtcaccgcattgataaaccctcgaattcgggggaattagaaaccctagacaaaccagaaaaccacatttcgccgaattgcaaagtggaggatgtttga

SEQ ID NO: 54842 - DNA, 453 bp, Acinetobacter baumannii
atggataagtgtagagaagagtttcaaaaggcctttccgatccctgcacattggattgagtttgatgaaaaagcaaataggtactattgcccatatgttgcagatgccacagcttctacgtatcagtctaagtgggttgtatggcagcaccagcaagcgaaagtggaggagcttaaagcatctcatcacggtgaagtgattggtcatgaagttcactttaaaaagatcaagcaagagcgcgacgagctgcaaaccttatacacccaacaaggcataaacatgctgaagctgcaaaagcaggtggatgcggcactgaaaaaattagacaaaagacgtgatgaattgtggtcaaagtggaaatggcaagcagatatgcaggatcagggagcggctaatgcttttgaagaagcatattggattttagagcaagcgctcaagggggaaggacagtga

SEQ ID NO: 54843 - DNA, 453 bp, Acinetobacter baumannii
atgaccacattcaaagaggctcaaatcatcattggcatcgatcctgacttggaaaagtcgggagttgtcattctagggaatgatcttcaactcaaaaatctaacttttcctgaaactgttgagctattcagaaatgaacaggacagcatcaaaaaggttgtgatcgaagcaggctgggaaaataagaaagcaaacttcagagtaggtggtggtcactcaaaacaagtgaacgagcagattgctagacgcgttgggatgaaccatgcaacaggcatcttgttagcagaaatagcacaggctttaggcttagcagtcttactggtgaagcctactaaatcaaaactcaatgcagagcagtttaacaagattacaggttggcaagggcgtacgaatcaagagcagcgtgacgcaggcatgttgatctggggaatgcaagggaagaaggtggcgtga

SEQ ID NO: 54844 - DNA, 366 bp, Acinetobacter baumannii
atgtcagacgaacaaaaacttgaaaaagaacttcaggataaaggcttgaatgctccacgattaacacctgaacatatagattcaaaaattaaagctgtccgctttatcaatggtgatgtggtgccagactattttgcagatgattataaaaatgattgtggagcaagttgtttaactatttgtattctgtctttagaaaatggttttactgttacaggcgagagcgcatgtgtaagtcctgaaaactttgatgagaaaattggacgggaggtggcttataaaaatgcctatgaaaaaatttggcaattagaaggctatctattgaaagaaaagctctatcaggccaagttggataaaaatttctaa

SEQ ID NO: 54845 - DNA, 201 bp, Acinetobacter baumannii
atgactctgtcgcttgaagaacacattaggttgtttggttcgcctattcctcaaggtattaatttaagagttgtggagagcggaacaatagtagaagaaaaggcagttacagataccaatgttgtacttaaagattctgatttatttcttactcaaaagatctttgaaaagataaaagaaagatgcaaggaaattttatag

SEQ ID NO: 54846 - DNA, 468 bp, Acinetobacter baumannii
atggcattaaccgagaaaatgaaaaagtttgctcgcgccattgttgatggtgccacaaacaaagaagctgctatttcagcaggttacgaagaaaagacagcttcacagcaaggttcaaaattaagaaataattctgaaattattatctacatcgaaaagttaaaggctgaaaaagaaggccgaactttaactcctgagaaaccaaaagttaaaactgaaaatagtggtgaatatgacaatcctttgaatgacgacgactatgcaaaggatgacccacttcaatttctaatcgatgtcatgaacaaaagtgacgacatgttcttgcgcttcaatgcagcgaaagcagcccttccatacgtccacggcaaagtggccgaaaagggcaagaaagaaaccaaagcagaaactgcaagagaaggtagtaaatcaggaaagtttgcaactttagataatcaattgatgagctaa

SEQ ID NO: 54847 - DNA, 525 bp, Acinetobacter baumannii
atgaacatgatgacgacattgaatttacgagctttggttaccaatgataatggcgaagccaaaaccacgagctatgcagtagctgaggcatttgaaaaacgacattctgatgtacttagatcaataaaaaatatgaagtgctcacagaagttccgtgaacgcaattttgcgctttgctttgaaaacaacaagttacagaatggaaagcctagaaagttctatcaaatgactaaagatggatggatgtttttagttatgggcttcaatggtgaaaaagccgatgcgattaaagagcagtttattgaagcctttaactggatgacaaagcaacttacacaggtatttcaatcaaattgggctagatacaaccatgtagttggttatcgcgcaaagagaaaacaggaggtgagttgttcagctaaagatatgaatgcatggaagcaagaaaagcaatttttagataacgagatcaaagagctggaaatggtatttcaacccgaaatgacaaacttccagctccaatag

SEQ ID NO: 54848 - DNA, 285 bp, Acinetobacter baumannii
atgaaaaagatatttatttttttagttttgatcaatttagttgggtgctctaatgataaaccaaaagaatattttgagggaggtttcgattcaatggagaattgtatccgtgatgttaagattagatcaaaacacacaccagtcgttgaactaatgaatgatacaaaggttagtggtagctttgatggactaaaaaggtcacaaggaatctggacatgcgagataaagcagaataagacagactatcctttttatggtttttttagtattgaaaaggatttatag

SEQ ID NO: 54849 - DNA, 330 bp, Acinetobacter baumannii
gtgaaaaagtacattatgacttttctgcttgctttaatgattgctgtagttttctacataagtgcaaatttaattgattttaatctaattgaatatgcaacgggtttcgtctttggattgtcattcaccctcatttttaaaaaacaatctaagagttctaaagcagcagagctactaaacaaacatgtaaaagaatgggcagttcgtgaaagtaggcgtggggggttatttgctccagatcaaaatacgcaggatctagaaagttgcaaaaaacgttttaaagatagtccggtaagtatgaaagttgagtggtcaaaaaaacatgagtaa

SEQ ID NO: 54850 - DNA, 705 bp, Acinetobacter baumannii
gtgtctattataaaacttaacgatattttgaaattgaatgacttggataacgtgaaagttagattcaatttaatgtttgatggtaattggaatccaattgagatattcaaaaatggtgaagaagatgtcttattgcaagggcattattggaattacaataaaaataaatcttataaagatggtcaaataacaatcggttttataaaaataaaaagaaatgaagatctatggcttttatttcatataggaaagattactaaagacttgaatatttttaatggtattggctatgagtatgaagtcattgaagaataccgcaaattttttggtcgagtggtaattagatttaaaaatacttcacagaatatggttagacgggcggcatctgtacttgatgattgtgaagtcgtacaaatgcttccagatatattcgataatgatatttttcctggctatgaaaatgtaaacatctcttggaatgaattatcaagagttataagcaaggattcatggaagacagctttacggaatcaaaagggtgtttatctgattactgatattaataatggaaagatgtatgtagggtctgcatatggtgaagatatgcttttaaatcgttggcaagcttatgttcgtactaagcatggtgggaataaaggctttgaaccgtaccgggtttgtcggagacttttttatttaagttag

SEQ ID NO: 54851 - DNA, 771 bp, Acinetobacter baumannii
atgaagaatactatgaaacaaattgaaaaatatgttggttattactttctagcatatctttttgttcttattctttgtggtttttttcagtactttacagtatgccaaggaaagtcattagagtgcaattttagtatagaaggaataaataagattcttacaacaactgcaacagtactaactcctattattgcaatcataggttacttatcttggcgaaatcaagagacatataagaagtcgcaagagcttattgatttatgtattgataaaattcgtgatttacaaattagttggcatgaaagtagagaatatggagaagttagtcgatttcaatactatcttgcaagagggattttaggtactgaaaatctagacgatgttaaattatttcataatgaattagaaaaaaataataagaatattaaattattagatgacttagtttttattatagataagttatatcatgaaattaaaaatgattttacagctttggaaaatgcaattgataatgttgaatatatgttaaataaaaatttagaagacttattagactttcatcaacaattagtaataataaaatacggtgataactttacactaaaatcagaaaatgaaatgcgagaaatatgcaaaagactagatagatattgtgaccagtttatgggaggaaataaagatgatattaaatatgactatatgaatgatattaatgaatcgttattaaaaataagtaaagaaattttaaaaataaagaaagaaatctag

SEQ ID NO: 54852 - DNA, 279 bp, Acinetobacter baumannii
atgtctgatcatcagacacttgaaataacaatcactagttttgcaaataaaacaacaattcttagtggtgtaacaagtgctttagcatctttagcatcttttaattggttgagctattcgggtgcaattgtagctgtagcgggcctattcataagctttatttttcagtttagacgtgatcgccgtgaacgtagagagagcgaattgcgtgaaaaagaaagcaagctacgtattaaagctttagagcaagatactgaacgagagaggaaggatgaatga

SEQ ID NO: 54853 - DNA, 438 bp, Acinetobacter baumannii
atgaactttgaaaatattaaatctttgcttgaaaaaaatgactggcatcaagttaacggggagcgtcgatatatttctaaagatgacgtttatttaagtttttggttaggtgaagaaaccgtaattgaatactttaatttacctaaaaatttacattcttttgatggttatttatcccagcttgctcaaatcactaaaattgaggagatgagcggtgcatttgaatacaactcagtaaaacttgagaattttaaattatataagttctcaggtcatgtgcaccgccatggttctatgaagcctatctctgtttattttacagtccatcctagcattaatgatgataagacagagattgatatgtttagtaaagctttaatacatgctttaaatgataagtatgcattgaatttaattattcgatgcacagatgattaa

SEQ ID NO: 54854 - DNA, 795 bp, Acinetobacter baumannii
atgagaaaaattttaggtttagcttcacttattatgtctactagcgttttacatgcggaacaattaaaagaacaagaaaaaacttctccttatagcgcgaatgtgacttttgctagtcaatatatttcacgtggtttccaacaaacttggggtaaaccagccttacaaggtggactggattatgccaatcctagtggtttttttgtaggaacttgggcatcaagtgtaagttccaactatctgcgagatgcttcagttgaatgggatttttatacaggttatttaaaaacaatcgataaattctcgattggtatgtctattttttattattactatccaggcgcgaaaagtacaccagaaacgggaaatacgagttataactatggtgaaatcgtacctcaaattggctatggtcctttaagcctcaaatactttgtgacttacacgccagattatgctggttataactctaaaaccatgggtggacctgctggtaaaaggtcaagaggatcaagttatttagatgttaactttacccagccgatcagtgaaacttggacttttggtgcccactatggctatgaaagaatcaaaaacttttcagagtcgaactttcaagatgttaaagccgaagtaattaaagatttaggtgatggttggagtacaggattagcctataccaaggcatgggataaaaatgcttattataaaaagtatagcaatggtgagccgggcgcacctatttcaaatccaattgattcaacttttacagtctctgtaaaaaaggtgttctaa

SEQ ID NO: 54855 - DNA, 831 bp, Acinetobacter baumannii
atgggatacgtaacgacaaaagacggtgtagagattttttataaagattggggaccacgtgatgcccaagttctattttttcatcatggttggcctttgagttcagatgattgggatacacaattgctttttttccttaaagaaggttttcgtgtagttgctcatgaccgccgtggacatgggcgttcgagtcaggtatgggatggtcacgatatggaccattacgcagatgatgttgcagaagtggttaaacatctgaacattaaaaatgcaattcatattggccattcaacaggtggtggtgaagtggctcactatattgcacgtcatggtcaagaaaacgttaagaaagctgttcttgtcagtgcagtaccaccgcttatggttaaaactgaaaataatcctgaaggtttaccaaaagaagtttttgatgaccttcaaaatcaggttctcacaaaccgtgcacaatttttccgagaccttccatctggcccattctatggttttaaccgaccagatgcgaaaccatctgaaggtattattgctaactggtggcgtcagggtatgacgggcagtgcaaaagcacattacgatggtattgttgcattctcacaaactgactttactgaagatttaaagaaaatcactattcctgttttggtattacatggtgacgacgaccagatcgtgccttataaaacgtctggtgtgaaatctgctgagttacttcaaaatagccaactcaaaatctacccaggtttttctcacggtatgttaaccgtaaaccatgaagtaattaatgcggacttattagcgtttattcgcgaataa

SEQ ID NO: 54856 - DNA, 459 bp, Acinetobacter baumannii
ttgttagcaaatacttttaagccttccgatattcattggcaagattatgacgtgatctattacacgggtggtcacggtgtgatgtgggactttttagataatcctgaactgcaagaaatcaccaaaaatatttatgaaaaaggtggcattgtttcgagtgtatgccacggttattgcggtttgcttcacgtcagactttcaaatggcaagcgactcatagaaggtaaaaagttaactggctttgcatggagtgaagaggttctggcaggggtagcgaaaaaagtgccgtacaatgccgaagagctcgctaaagaatatggcgctcgttatgaaaaggcttttattccttttgcgccgtatgtcgttcaagatggcaatttgattactggtcaaaacccgttttcagctaagaagacggctttagcgattatagaaacgcttgaaaagagtgctttgtga

SEQ ID NO: 54857 - DNA, 330 bp, Acinetobacter baumannii
atgacaggatacttaaaattcgataatggttggtctttttatgagtattctttatctgataaaaagtttaaagagacaatagctcatgagactggccatgcaattgttgaaacatatgcaggtttcaatgaatcagttacacatcatggatcatcaggctatgatcagaatcctaaagctggaaccatatatccaaaaactggtgaaatcgatctaatgaaatatgcaaagggtaatctacttaccatatctggttgggatacacgcatggtagcgaacgaaaaagatacgatgggattgttatttatttcagggatttctaaaaaatga

SEQ ID NO: 54858 - DNA, 3216 bp, Acinetobacter baumannii
atgtcctcactcaataaacgaactaagcaagctcgaccactatatgcagaaaatcgtagaaaacaaattcgtcttgagaaagagaaatctcctcgatcggatgtagaaaaggaattaattcaatatttccaagaaatagaactagaacaaaaagaacatcttgaatccttatatcccgcaatttatgagtttattaaacgcaaagctccaagcttggcctggaaaaaatatgcacatgagttttttcggtcatatatcaagcaaatcaatttaaatcgtcgtgagactttgcccctaccgaatctgacatttgagataaagcgtgatcaaccagtttttaccatggactggatcgagaagggacagcaggttgatgaagttcttgataagctttgggactactggattctagcaaaagatagcaagacattttctgatgatgaaatcattggaaatattgttatttctgccctgctctattccggcttaaatcaaaaagcctctttagaagctttgcttgaacacttaaaagatccggcaaaaatcagaaagatcgaagatctgaatattatatttttagaaccgctctctccctcttatggagatctatttattgatgaaaaaaccattcgtaaatcgcgtaattttattcctgatcaaatcacccgcttatggttaattcattttaatagcagaaatattcgtacagtaaaccagaatgtagaagattatctacagcttatttttaataagattaagttaccatttaatcttaaaacttataaattattacgcgactacgccaactttaactggatgcaactcccgaaagttgacattgatcctgctctctcacaatgtcttatagaaaatactgcaacctgtggcttatcagaaatagaatttgaaagatttcttcatccaaaatttaaatatcagcaggacacgcttactgattcagatgtagaaaaatcaccatctattgtgggtaaatcttactccaatgatgacattcagcaagctttggatgatgttataaagattcacaaagaccttttacaactgattcgtacatcacaaactgatcaagccattgatgtattaatcattaaatattgtcttgaaaatactgataaatttaatgagtacagtaaacgtgtcgcattatggctcatcagcctttataaaccagaattagaacagattcagcaactggctgaacattttaatttttgcgctaaccaatttcaaaaatcgtttcagcagaatagaccattagcagatagttcgatttacacttattactcccggattgccgagccttggctaacacattctttacaatatctagatagcgaagatgatctgaatacgaatctggcaaatatctacacacaaattattacgaacacccgtctcgcagatgaagcaggccaacctgaatttaaaaaatccagaggtcaaaccagcaggatgttgaagcgcttccatagctttcaacgaacagttttcgaagctgaatctctcgaattagaatcactcgccatacaaaataggcctagagcccgtattattggccctttgacttatcaagctttcatgaacaaattagataccttattttcaggtgctaatagtcaagaaaacacttataagacattaaaaatcatctatatcttagcttaccgtaccggtatgcgtattaatgaaattctaggcttacgtgtgcgggatatcgagggcttgagctgtctatcagtatggattcagccctacggctcaaaaaagaaaggaaacttacatcaacttaaaacagatagtgctgaacgcaaagttcctgtgtattgcttattaaaaaccgatgaatatcaactatttcataatcatgtagtcgagcaacgtttactcaatcagcaaaacttatacttattccgtaattggaatgaaaatagcaagctgaacaaacatacggtgacaacaccttttagaatgattatgaacgagctttttaaaactcatgattattcttttcactcatttcgacacacggctgccaatcacttatccgttctgctcaactgcgattatgctcccctagtcaagaatctgacggattatactgaagaacaatatcagtccattcggacagagttactccgtcatacacatggtcaaaatcattggtttatgattgcccatttactgggtcacattgaccctacagaaacttttaaaagttatattcatctaagctacctgattgctgggcataaaatactgaaatatcacccagacatcgatactcaactggcaaaaaagatgatgggctacctaccttctttcaaatttttaaacacagtaaaagattctgctccattcaatttcgaaaagcatgctgttcatttaagtcagcagttactcaacgatcaaactgactggttaaaaagtaacgtagaagacattctagatgaggtttcatttaactcaaagcatcatgacttttttaaatatttcgcgggaacaaaagaatccaaagtttcatttgcatggttttttaagtgcctaaatttactggaaattcatcatgatccagatcgggtatcacaagaaatgagtttacctgtcgaactggttaactactggtatgaaaatgccaaacaactgggccaactcaagtctcaaaaaaacaacccaaggttatttgatctcaacaacacaaatcatctggataaacctttgaaaccctcgatgatagataccgttgaagagcgcaaagcaaggaactatttctttgaaaatattcaaaatatctttgaaaaaaagccagatcaaataaaagcggtgcttgagacatttttaagtcgtgttacagtttcgcataccggcattcattatcgctggaataaaattgatcaattggaatcattttattgcaaggtaaaagacctgtttccccatcaattttggcatttgcttggacaagacttggtacaattgctagataaaaagaaacaacctttattactgaagctggctaaatcgagcacaacagagcatcctacgactcaagaagattatgttcgtctccagctttactcgacaaaagatgccaaagcactggccgcatttaaattttgcttgcatctagcatgtatcggcagacctcgatctcttgaacttaaagctgaaggtctaaaaataaccacatgctgttaa

SEQ ID NO: 54859 - DNA, 672 bp, Acinetobacter baumannii
atggaaacggcttttgatttcaatgaaaaatttggcgcacctaaaaaattattgtgcaaaaattttaataaaatccaaatcagtatacaccctgatttttctggaatttatctttgctatcaagaggctttcaaagctttaaaaacagatctaggtatcttgaatccacgtcccgaaattcacgtctggaaagatactaatctatccggttataccatcgccagtaatatccaatggttcctatactggactcagaatgcacccaaagaaattaatctaattatccattctcttcccaaagataacaaaaaaatcgaactattaaaaaatgtggctagttccgaatttctaaaatttctatcatctacttattatgatcttaatcgattaaatcccaaaaggttacataacttaataaatgaatacatttctgccgaggctatttacaagttaaacaaagaaaattctttcaaacctcaccgtactatgagcttagacctgctagcaaaacgactctcatacacacgaaatcagctgaattatcgcaataaagttataaaccgaaaaagacaaagtgtgcttgatcaactagaacaaactagtgaagttgtacaacagcttttaaataatgtggacttcgttctcacgccagatcagctatggaaagcataa

SEQ ID NO: 54860 - DNA, 1425 bp, Acinetobacter baumannii
atgccaattgacacggtgatagtgatgagtattgcgaatctgaaacgtcgtcttgaagaaaaaataagtgtattttctgaaccaactcatatacagactaaatttgttagacctcagcgtttaatgaaaacattgtctattattgagcataaactcgatgatcttgaaaatgaacaaccattagaagaaaaaattatcaaagcagttctaaaacttgaacaacacgggtttgatgggctgactaaacgagattggaaaaatttggcttggtctctcagtaaaaaactgcccaattatgaagaaaaacttttattcacacctgtaggtgtaagattaattgattatttcaaccaattgggaattgaccaactccagtttgtttattttccattgttatatagctatttttcctttcaagcaaaggaattagaaaaacaacctgatagctgggttcagttaagaaatatattaaatacgaacaaatctttggtatttaaaaattcgactcgactaaaaaaatggatgacgactcttatagataattcagaggttttaaccacagaacctacgaaaaaatttgtacgtgaatttttacaagataatgatgaaaacagagttgctaatcaattagaaagtttaagaatagcttcgggtagttggttttgggatgatttgattcgatctgcaattaagtcgatcaagacaatgaaagaggatgagtattttcaaattatcccacgctttttagtattgcttgaaaaaaataaaatatatacgacggatattttagctgcgcttctagaacgttatgcaggtacttctcaacgtgagaaagtacatgaggtactaaaacatctagcattggatcagtggggaaatcctcaatatgaatcatcagctggatggaataacgtgaatgcagacaccaaaaaaatggtgatacagtggtttgttcgtgcggatctagaggctttctttagattgtttagccgtacagctgatgtagatcgtttcaattactggattaagtttattgataagatatcattttcccagatttttctaggaccagcagcatctagatctagtttaaacgaacatcgaaaatttagagaagccaatagagggagattaaaaaggcttgttggatctacccaaacaaataatgcctttatgttaaaaatagataatatatatgtgtttgatttttctgatactggtaatgcttgttatattttaaataaaattccctatgatcagagacttttagatattcatattcagacacttaaaccttgggggcagtcattgacactaattcacagacctggttggcaaagacgatttgatgagaaacttgctgaattgggcatcttctccagtcaagcaaataattctatttcaggatatagaaagcgatattaa

SEQ ID NO: 54861 - DNA, 3204 bp, Acinetobacter baumannii
atgaaattagcattctggaaaaagaaaaaaaatactgaatctgttgcggaagataacttagtggcgagtataaagcctttacaatatgatgaggtgggattgatttatccttatcaacagaatgctaaaaatgatgctgatttttattgggaaagtctagaagaagaagatatcgcgtatctcttggatgagcagtatatattgccatgggaggagatgtttcagcttcagcaagatcccgaacatagtaacgtacttaatttactcaacttacccagtccaacgaatttacatccagtgattcgtagtgagggaggattaagtgatcctgattttaaaatcattctagatggatggtgtgatcaaaataggattaagtctaaaggtctaattaaacgaataggtgccgtactgaatgttgatggtcaagaatatttactgaatgatacgacttggcagcttgtagaaaaagttaaagaatttgctcgtgtttcaaataaagataataagctgaatcaaaagtattgggctcaaatacgaagtttagctaatcgaagccaggcaaatttagatgagtttcttcgtaagaccgttgtacttgcacctgaaaaattacaattaaatctacgtaagaatttgattagtcaggaatcagttgtagaagtacagcccgactttgatgaggcaccgtcaaattggttgcaaacttttgatcactataatcaggtacaagatcaatatagcattagcctaccagatggtggagtcgctcatgtagtcattgatcctcaagtcaaaaatgtactgagtgaaattaaaaagatgccgaataggcgtgtatctggtgaacgcgctcaaacatttttgcataaccccttcgcgcaattaggagatgatgccacagaggtcatctctcctgaaggttttgaaaaatcaaagcaagatgcagaaatctttagttacagcttacagatagataaattttataatgagttaggacattatgtttctgctcaattaactctcaacgaaaattcgggccgtgaacaacaaccgattctgttagaactttctaatttagagcaaacaaaatattttattactgcctatgaaaagccatcaccaattttcatgtgggcgggttatacaattgataaaacaagttatttagatcatcaggttcaagaattaaaaagtgatctaacagaaatccaaaaatatgaagatgagttacaagcacagcaagttttagatctatccaattacagtgatcgggttattggtattggtgaggcacaaaaactaaactctgagtttattcaaagagacagtggtgaatcagagtggttgccacagcatctcattgagttggagcaacaattccaggatcgcttctccgatgaggcaatagaattgcttgaacagcgtatcaaacaggctgagcaagaaggtaaagatcaggttctaattcctaatgcaaatactgaagtctcagtagatgacgctaaaaaattattaaatagtctgagtgattcaaatagaaaagaacctattgaaacattagaagaatctacggttaatttacagaaaaaaaagaaagatacattactcattgcgaataacattgataaagctgagtttactaaacaacgagcagatcaattggtttttgatgagaagaaccatcccccagctagattgccttcaagtttcagaagtcaggaattcggtttaaaaccgcatcaggagtacggagttgcatggttgcagaatctacatcaatatgcaccggaacaggtaagtggctgccttttagcagacgatatgggattggggaagaccctgcaattgttgtgctttattggtgaatacttagaaaatgcaaaagataaaaaaccagttttagtggttgctccagtttcattgttagaaaattgggaggcagaagcaaatcggttcttcagtgctaaatttgctaagatcctaagtctatatggtgaaaatttaaaagatcgaaaaattcccaagcatttaatatctgctcaattaagagatgatcatggtattacgcatttgcttgaagaagattggcgaggtgatgcggatattgtcctcacaacctatgaaacgatgcgtgatctagagttttctttagcgcgagttgattgggggattatggtttgcgatgaagcacaaaaaattaaagtacctacggctatggtgacaaaagcggctaaagctcaaaaggcagactttaaaatagcatgtactggtactccagtggaaaattcactcactgacttatggtgcttatttgattttatacaagaaaatttgctaggttcattgaatgaatttggaaaaacttatcgtcgtcctatagaaaatattgagaatgtggataatgaagtattggaacaattacggaacttgattgcaccacaagttttaagacggatgaaacatgatgttgctgacttaccagaaaaaattgaagtagatcattgtaaaaatattacgatttcttcacttcaacgtcacttatatgccgatgtaattaatcgctacaggaggttgtcagaagaaggtaatcaaggtgcgatgttggcatcactgcacagtatgcgaatgatttgtgcacatccattccaattgcaaccgaatgcttcaattcatgaatcacctaaagtagattggttgattaaaacattagaagcaattaaggcaaagaatgaaaaagttattatttttactgaatttagagatattcaagtattcctgaaacggattcttctagaacggttcggcttaaatgttacaaccgttaatggggattcaaatacaagtagtaaaaaaggtttaacacggcaaaaccttattgatagattccaagcaactagtggttttaatgtaattattttatcaaccactgctgtcggttttggcgttaatatccaaaaagctaatcatgtcattcattatacgcgcagttggaatcctgccaaggaagatcaggcaactgaccgtgcgtatcgtataggacaagataaagaagtttttgtttactacccctcaatagcagcaaatgattttgatacttttgagataaaattagaccgacttttatcaagtaagcgggctctggcggatgatatgttgaaaccaaatactgatctaggtaaggaattgatccgcttaatttaa

SEQ ID NO: 54862 - DNA, 189 bp, Acinetobacter baumannii
atggaatatacacgtgtaaatgagaatatatccgatttatttcaggagttaagcatatataaaaagtatcttataaaatttcctaagtgctctgaactgattaatcgatttatagatcaaaaagaatcagaaattcaccttttaagctatgagctaaaagctttgaggaatttattagaagctcaatag

SEQ ID NO: 54863 - DNA, 1221 bp, Acinetobacter baumannii
atgtttggtaaagatgagaatggaaatgaaaatgacgtagtccatattaaaattggtgatgaagaacaatttccaatttataaattaggagatggtttacaacaagctatcattatgacctatgaggcttttattaaaaaagataagactcatgctttttttatagaagaacctgaactacacatgcacgcaggaatggtgcgtcagttaatgaatttctacttaaatgaaacacagcattactatttttttaccacacattctaaccacttgttagatatggtagatgaatcagatcaagtcacaattcaaaaaattatcaaagtattagatgatgataagacgttttctttcaaaatttataattgtgacaaagaccatgaattattaacatctttaggagttcgcccctcatctgtttatctagctaattgtacaatttgggttgaaggcgttactgacagaatgtatttatctaaattaatggataaatatttaaaggaaatcgaattttcaaaacctgaaaagtataaaaaatacaaaagctttatgcctaacttccattatacttttattgaatatgctggtggaaacataacacattggagttttattgatgattatccatcaaaagaagaggcactaaaatttcttgaaaatagcaaaggcctgactgccaaagctatttctaaaaatatattattattagcggacggggataatgaaggaaaagcaaaaagattacaagaatgggaatctgaattaaaaccagagaatgtttatattctaccttgtaaagaaatagaaaatacattggattcatcgataattcataaggcatgtttgataaagtttcaaggaataaataaaacaaaggatcaaatcacattaaacgatgaaaccattatcaatctaaatcatagaggatttactaaagatacttctaattttgatatcgatcaattgaattcttctactaattttataagtagtgaaggtatcggaaaaattattgatgagattattatcaaagataagaacttattacttcaatcaaatccacctcgcttattttcagatgcttctggtacaattgatgacaaagtcagtttttgtgaaatatgcaaaattttaatgacttacgaagattgggtgcttaccgaacctgcaaaagaactttgcgaaaagatctttaaacatattgaagcctgcaatacttaa

SEQ ID NO: 54864 - DNA, 357 bp, Acinetobacter baumannii
  misc_feature (322)..(331): n is a, c, g, or t
atgttaattaacgatttttctcaacatcgtgaaaaattaatagaaatgaaaggatattatgatgcttttttcacaaactctaaaataggtaatttcaaccaacttatatattatatttcaaaaatagatcaaatgttttccagattaccaacgaattatcgctcggaagccaattatcaagatattaattttagtcaagatgatatagaaaagataaatgatctttttcaagataaattttatatccctactttaagaggtatgcgacctgtaacagatataaataataaacaaccttatctggaacgtgcccaaaaggatnnnnnnnnnngtctaggtttaatgctgaaaatataa

SEQ ID NO: 54865 - DNA, 999 bp, Acinetobacter baumannii
atggctatatcattaaagaaaattaagaattttgaggaacatgacaaatctttttttcctctttcagcaccagctaaacgttacccaaaagattttgcggtctttcaaaatattttctggcaattaaaacatgagcggtctcctaaagatgatattttaaaattactgttcttattcagtccaaaagttcgactagcatcggacccaaatgaaacaactgaatttactgtgacagctaaggaatatgcggaattaacaggattaaagctaaacagtgcttatgtagcattagagagagtcgtagatgctctttatgaacatagtgttattttttatcatcctgaaaaagatagagaaattcgtacaagactcattagtacatgctcatataaggatggatgcttttatattggtttcacgcactttgccctatacattatgtatgtttttaacaagcaaaattcgtatacaaaattcaaagtgaaatcagcagttgccttacatggccatggcttaaaactctatccatttctaatacaaaatgaatttcgctctaattttgatgtttcaattagggaactaaaaagtgctttaggacttgctgaaaattcctaccctgagtaccgagattttaaaactactattcttaaacctcacattgatgcaattaacgcgaaaacagaacttactgtggaatttaaagctcttaaaaaagagggacgtaaagctagtcatgttaattttatagtgagaaaaaagaagactataaaaacagaacaacaagatgaaatcggtaataaccaaatacgatctaaagtcactgcaaaaatggtttacttaacgataattcaaagtgaagaattaagtttacggcttaaacaatccaatgagacaacagatgaattagtcgaacgagtaaaaaatgattttaagaataatgaaggcagtagatggatagaaaaattagcggaatttaatgtgcggtttgaaactcactaa

SEQ ID NO: 54866 - DNA, 537 bp, Acinetobacter baumannii
atgaaaacccttacagttcttgaactttccaagctttacaatatcaatagacaaacgatttataacaatataaagaaaggaattttaagcaaaaattctgaaaataagattgatatagcagaggctatccgtgtttttggggagccagttaaaaaacaggatgtaaaagaacctgtaaaaatagacagtccaaattcggcagaagttttactgcttagacagcagatagacatgctgaaaaatcagcttttggatgccaaagaccgggaatccttttatcaaaaccagattgaaacgatgcagcgcttattggaagccccaaaaaccaatatgactacgtttaccgatcaagaaccgcctcaatcgaatgcagctccagcacaaccagaaccagaaccagacacaactgagcctaaacatgacggattgactactccagagcagagggaaaataagcggattccagtaccggagcacattgaacaggaaccggaaaaaaggggcttttggagccgtttttttagaccctatgattaa

SEQ ID NO: 54867 - DNA, 315 bp, Acinetobacter baumannii
atgaaaaaaatattatttatcaacattttaacttttattttaacatcattatctttattttatcaaagatatattcctgttaaccgtatagttgtagataaattggaagaggtgaataggcttgcaggaggctttccctttgtatttttaattgatggggattctacctcccctggtaatcatataagtgcgttatttattttttgggatttagacgaatttcttcttaagtactttattttggattacctgttttggcttagtttcattttggtctgctatttatattttaaaaagagaaaaaatcgagcctaa

SEQ ID NO: 54868 - DNA, 1338 bp, Acinetobacter baumannii
atgttggtgtctatgtcggataaagaacttaaacgattgtcggtcttgcaggaaatctgtgatcaacgcataacccagtcccaagctgctcagctacttcatatttcagagcgtcagatcaggcgtttattgcaaaaatacaaagctcaaggcccagctgcattagcccatgccggtcgtggtcaaatcagcaattccaggcttcctgaagagctcagactcaagtgcctcaatattgtttctgatcaactgcatggtttcggacccactttagcgcatgaaaagctcaccaccgttcatggctttgatatttcagtggaaacactgcgttcctggatgattgcagccgatttatggactcctcgtgccaagcgtctgaaacgcccgtatcagcctcgttataaccgggactgttatggtgaactgatccaaatcgatggctcacaccatgactggtttgaaggtcgagcccctaaatgctgtctgctggtatttatcgatgatgccacaggcaaattacagcatttacgcttctgtaagtcagaatcaacctttgactatatgatttcaacacgtttgtatgttgagcagcatggtaagcctttagccttctacagcgataaacattcagtcttcagggtgaatcaaagcagtaagaaagacaccaagattacccagtttgggcgcgtactcagcaccctgaatatcgatattatcttcgctaattcaccacaggccaaaggccgtgtagaacgagccaatagaacgcttcaggaccgtctgatcaaagaaatgcgtctggaaggcatcagttcgattgccgaagccaatgcctggctaccctgcttcattgagcagttcaatcagaagtttgccaagatggcctttaatcccaaggatctacaccggactgtcactgaaacagccgaagaattagatgatatttttacctggcgtgaaccccgcagagtcacgaatagcctgacgatcacttatgataagtgcgtatatctcttggaaaacacggaagaaaaccaaagattgattggcaagtatcttgagtttctggaatacccgaatagtacagtcgcgattgaatatcagggaagaaaaatcaattacagcatcttcgataaattaagtcagctcaaccagcgagagattgttgaaaataaacgtttgggttctgtattagcccatattcaacagcagcatgaagaactagaacaacaaaataaacgcaatcgttctcaaaagatgccaagcagacgtgcacagaaaacagtaatcaaagaacgaaatctgaatcctgtgcttgacttggaaatgtcggtatag

SEQ ID NO: 54869 - DNA, 528 bp, Acinetobacter baumannii
atgacgttacttctgaaaggcacgcatggaacaacttcttatcatgcagaaaatattaaagaacatggatttaaagttcttaatagtggtgatgatgtaggtaaagctggttatggtgtctacttttggaactatatcaatactaataccaatgctctcaagctttctgaagcttggtgggaatttgctcgtaaaaagaaattctatgatgaatcaaaagattgtactctcaatatttttgatgtagaagtagaagtagaggaaactttacttctagattttgtgactcaccctgaactacatgaagctttcattgaagcttatccactaggggaaaaagaacaatactatggagcaaaattagacttatttataaaaatgctagaaaagcaattgaatcatatttatgaaattgtacgtttaaatttatcagttccagaactgagaaaagtcccattcgctaacagttttccagcttttgttctgaaaacacaaaaaaatgttataataaacaacataataatataa

SEQ ID NO: 54870 - DNA, 294 bp, Acinetobacter baumannii
atggctttagactcattgcttcaacaagctttaaaagctgttgtagaagaaattaaagggttctctcctgaagagttagaacgtagattacaagattctaaagagtctacttttgctcaaactatagattctattatggaattctattcttctaatcctatttgctttgaaaatcttattatttctaattctcataatctattacagttttggcaacttggtcatgaattcttagaaatggattacagccagtttcaaccagcaaatgatgatgaatatctactagcagcttaa

SEQ ID NO: 54871 - DNA, 399 bp, Acinetobacter baumannii
atgaaacaccacccaatacagttaattgatctacaaatcagagaattaagaattcttgtaaatgatcctgctgaatgtcaaaaagagaatttagaagctaaagttgcgtaccaagttggttctcatacttttaaagatgatcaagatattttaatggctggttttagatgcttgattaatgtagatcaagaaaatgctccttttgaattacttgtagatattgtcggtgtttttaccgttggagatgaatttccaagagataaagtagaacattttgctaaacataatgctccaataattttaatgccttatattcgagaaaatgtatattctctagctatacgggcaggagtaaatgttcatttacctctcgttcaagtgccaacaaaaaatagctaa

SEQ ID NO: 54872 - DNA, 804 bp, Acinetobacter baumannii
atgtcaaaaattcccttaagcctcatagcacttcttactgaaattctttctgaatatgaaactcatgcaacgttagataatttgtttttatatgcagatgttaattcagaaattccagatgtaagtaagcaagcaaaagttcagcaagtattaatggcggtgaataaatctaatgttgaaccattaaaagttttagggcgaatattagaaaaatatttagagggaggggttctttatgttagagatcaagaacggtttgataaacaaattgaaagcataaaaaaaactttatctgataactccttgctttacatcaaagggggaacaattagtggttcactcacaactcctacaaaaagtttagagaacgttataaaggagttagaaataccagcattagatcaagaatttatcagagccttaacacatgtagatgctagtccaagagaagcagtatctgcagctagtaatattctagagtcgatttgcaaggtttatatatctgaaaataatttagcaatgcctaataaaaaagatttaaagaatctatttgatgttgtaagaaaatctttaaacattcagagggaatcaattgaagatcaggatttattaagaattatctctgggattatttcagttgttgatggaattgctagtttaagaacacatactagttctgcacatggtgcaggagtaagacaatataatttaaagccacgtcatgcacgattagcgattcattctgcacatacaatcggactttatattctagaaagttggaatgaggcaaagattaatagctaa

SEQ ID NO: 54873 - DNA, 321 bp, Acinetobacter baumannii
atgctattcattgaaactagtattttcaccaagcaaatcaaagagcttgtctctgatgatgaatacagagaactccaacaggaacttttagttcagccagataaaggagatctcataaaaaatggtggtggaattcgtaaagtacgttgtgctcaaggcagtaaaggaaaaagtggtggcatccgagtaatttattactggatcactgaagatgatcagatctttatgctacttgcttaccctaaatctgttaaagaaaacctaacagataaagagaccgctatcctacgtcaacttgtgaaggagcaatttcatggataa

SEQ ID NO: 54874 - DNA, 273 bp, Acinetobacter baumannii
atggataataacttatttgatgacctcgttgcttcgatcaaagaagcaggagctattaaacgtaatgaagttcaagcaagtcgagtgactgaactaactcttcctgatattaaagaagttcgtgagaaaacaggcttaacccaggctgaatttgctgcacgtttgcatatcagcgcgagaaccctgcaaaactgggaacaaggccgtcgctatccgactggtcctgcagcgactttaattcgtattttagatgctcatccaactttaatttaa

SEQ ID NO: 54875 - DNA, 225 bp, Acinetobacter baumannii
atgccatatactgaatttcaacgtcttatcggtaaagcagggctttcaattaaggaatttgctgcattattggatatgaaacccaattcgataacgaattacagtaaacaaggtgtggttcctacacatatcgctgtaatcgttgcgttgatttctacgatgaaagatgagggattagatttctatccaatttttgaaaaaattaagtcgtattcacaagaataa

SEQ ID NO: 54876 - DNA, 246 bp, Acinetobacter baumannii
atgtactcataccctaattcaaacgctgaaaagaaaattgcactcatgatcatcaatgactttttcattcaaaaagcacatgaactctggatttttttgcaactcgacccgagctttaacgactatgaagcaacattcatttggactcgacgttatctagaggaacatccagagggtgaatacagcgacattcaaaaagccttcctttcttgtttccccgaacacttcttcaactttgactattga

SEQ ID NO: 54877 - DNA, 492 bp, Acinetobacter baumannii
atgcgaacaaaacgcaaagatttcaggctcacccagctacagctagagcagcttgagaaacacctagaactagaaaacaccactttcaccgacttcattcattccctcattcagcacgaggtgatgaaaaattccgtgaccgttcaacatcctcatgatcaacaagaagattcacctagaatcaaaaccaaaactgtgcttgaggtcgtcaaacgctatcaaaaaacagaccctgctttattgctcgaactcgccaaaatcggcaacaacattaatcaaattgcacgcgcattaaacatcatcaaaaacgctgatccgcaggaacagcgcaaactcgatattttcagtattcttttagttttaaaagccattcaaacagagctagaacaggtatttccggctcttccaaaaatcagccgacaaaacccggaaagacttaaaaaacagctgtcttcacttcaacttgcggaggaagacgaaagtgcatattaa

SEQ ID NO: 54878 - DNA, 2532 bp, Acinetobacter baumannii
gtgcatattaaatttttagagcacggcaaaggtagtccagtaaaagcatccgcatacgtactcgacaagctggatcacatggggaatgttcgtgcaggcgtgcaagttctaagaggggatgcaaccacctttaacgcgatttgtgattccagtccgcatctatggaaatataccagtggcatcattgcatggtccaaagaagatgcaccgacagacgagcagattaaagaagtcctaaacgactttgaacaacatgccttcgcaggactggagcaatcgcagtaccacctttttgcagtcctacacaccgatgatgacggctcaaaacacatccacattttaacccctcgactcgacatacaaagcgggaagtcactgaatattgcaccgccagggcatgagaaacatttcgactcattacgagactacttcaacacgaaatatcaatggtcccgccccgacgatctacttttgatgcgtacaacacaagagccgaatcacatcgtaaagctaaacaaacaagcaaaaaagattctttcaagccaggagcttgagaacctgccaaaaaaacagttttgccaggcgatggataactacgttcaaacactcttaaagacccaaacggcagcgaatagggccgatatcgtcgcttgtctcaaacaactagatggcattgattcgataaaacccagcaaagattttttaacagtcactctctccagtggaaaaaaacatcgactcaaaggcgatttctacaatgaaaaatttgaaattggatcttattcagagcatctccgagcagcagcagaaaacagagcaactgcaaatgagcttgcagcaactctcacagacgctgatcaacttcgagcaacttatcgagcaaagcgagaagcctatcatcaacagcaccacgcttttacacaacgtacagcagatgacaatagccctagagctgcatctacgctcgattttgatagagataaagaatctatcaccccaagcaatacaaacgctcacaacgagctatacggagcaaatacaagtattaaaagcacagctatcgaatatcgatatatcgagcatcaaaaccgtcacaaccagcatcgattcgttttcaacatccatgcaggcactacaggaagaaatcaacagccaagtccagagcctcaatatcgatcaaaagagcttacagaacagtatccaagaccaggtccgacaagcaatagcaaaccaaagcgaacaaatccagagcgacatccagaccttaatcacggaaaaattgagtactcagagagcaacctacctcctatacggaatgatggcttttggagtgctgattcttttaatgaatttcttactcagctatcaagcaagttcaaacttaaaaacgatcaaagcgcaacgcgcagagattcaacagaactcacaaactattaccggccaaaccaactacttgaacagcctacggaagtaaaacatgcagaccgaaatcgacctttttttgaaagagcaaaacggcttattgattcaacaaatcaacttgttaacagagcaaaacaacgcattgaatcaacaagtgagttcattaaaaaacatcttgagcaaatacagcgaagtcgagcagagcttacaaaacaaaatcacccatttgaaaaccgagaacgaaaccctacaagccttgatcctggccatgaaatcagaactttcaaagctcgagcagggcaacttttcggagcagttacagcaagcatttcaaaacaatgtgctgatccaattacagacgcaattaacacaagctttgaagcagctggatttaaacagcattgtcagcaacttagtaaaaacagcattgaaacccattcaatcgaatatcagctcacagcaagcagacctcgagaacgcactcttgaaaatctcgcaactgaaagtacccgacaacttttacgaagatttagagatgcagagcaagcaaatcgacatgctcgtggagacagtagaaagattaatcgaattaatcaacaacttggtcaactagaaaaaatagcagcggagattcgactgatgccaaagccagccacagattttcaatttagttcattgcgcaatgacaattattaccccgactgtgttctctatcacaaagaactatgtgataaacagcaacaagcctatgacagcaaaaaactatctctattaattgattacacaaagaaaaaggcagaaaacctagaaacctacatgagccgagcaagtcgaaaattgaataagtctgactataacaaaattgagcagatcatccaaaacgaccaacgcatgctgaaatatagacaatgtgaaaaaattttagagccacaaaattcccactttgaacagcaaagagagacataccaaacatgtttaaagcatttcgagaatatcaaaagtgatattgagcaaattaaaaacccgtcctctcaacataatgtttctcagaatagctatgaacctgaatacaaagcaaagccccaaaatgacttagattttaacttttag

SEQ ID NO: 54879 - DNA, 993 bp, Acinetobacter baumannii
atgcctgatgattgtggggagtttcatcatggagatgacatagcaaacaatgttgcggatgaatatggtcatgaaagtaaagtaacggatgttatcaatgaaaaatctagtcatgaaaatgacttaacagataacgttaccgaaaaatcctctaatgaggatgaagaagcagatgaagctactgaggaaaccaaaaccaactctattccagataatttattaaaacttagagatgtcggtacaagtattctcaatcaacatgaagaagatgagcaattcattgagcagcttgtagctcaatatgatgtcccctctcatgcaaccactgttgaaattttactgcaaattgcacaactgtctaaggtgattggaaatctaaatgatatccatgcaattattgagaaaaaacaatttaacactgtcatgggtgttgctagagcttataaatcaaatattgtcgtgcattatttcattaagcggttttatcgatataacccagagcgttacctagacgacggatttcaattaactcctgacgatgcagccgactggctgttaaaaggttttaaacaggttcaaaaggaaactgctattcctttcaagagagtacttaaggataaacttgtatctgggattaaagtagatcctaaaactaaagaagtcagtatcaatccaagtaaagctgcaaacttcttcgctaaatatttttctgtgaatgatcgtaatgcgaaaaaacctgcatcacgatatttagaatttacaggaatcgcttacggaaattatcaattccttgcaatagccaagtatcaacagccctttttagagctatcaaatgagttcaaattaggagaacgtacctttaatcctgttacaggtgctgtgatctcaggacctgattcacctttagagatgattactcattctgatcaaccagattatttcgatgaaggtgagatcgagaatgaaggtaaaggattaggtcaggtggcttga

SEQ ID NO: 54880 - DNA, 327 bp, Acinetobacter baumannii
atgtcgagtttatttgtttatggcactttaggccctggtcgccctaatgcgcatatacttgaaaatattggcggccagtgggcagaaggttgggtaaacggaaccctacgtcatgaaggttggggagcagatttaggctatccgggaattgtactcgatgatagtgctaaccaagtgcaaggttttgtttttagctcggaacatctagatgcaaactggaaattactggatgactttgaaggcgaagagtacgaaagagtacctgttcgcgtcactttaaatagtggtgaacatgttgattcttttatttatatgttgaagccttag

SEQ ID NO: 54881 - DNA, 822 bp, Acinetobacter baumannii
atgtctaataatactaaatatgatattgaagccgaagcgacccaaattagacaaaattataattttagagattgtgaaatagacctttttaaactgggtgaagatttaggaatagaaataaaaacagaatctaaaaaaacttctggtatttcgggtgcacttattcgatatggtaataattttctaatctactatgcatcttcaataaataatattgcatatcaaagatttagcatagctcatgaatttgggcactattttttgcctgcacatccagaaaatatttttaaggatggttttcattactctcatgcaggtacaggaagtaaagatcgatatgagagagaagctgattatttctctacatgcttattaatgcctaaatttctctttcaacaagaaatgtataaatataatgatggtatggaagctattaaaaatctagccaatatttttaatacttctttaacgtcaactgctatacgatatattgagcttatagaaataccagctatgttagtaataagcaaaaataatattattgatgcagtttttatgacaaaagaattgcgaaaatttggaaaaaatatatacgtaaagaataatattctacccactagagatatatgttctaccgaacaaactaaaagagaaattttgcttaattcttggattcatactaaccaccaaataaaagcaattgaagaaagtatattcttaggttcttatgaaaaaacattaactgttattacgacacctatactctataaagaaattgaggaaaaaactaactcaagcttttgggttcccccttatttctga

SEQ ID NO: 54882 - DNA, 330 bp, Acinetobacter baumannii
atgaatacgatatctaatgaaacctatgtgtttcctgagcgcttgaaagagatccgtgagttgcgtaaattgactcaggctcaattagctgaaaaatctaaaattccttctacctcaatttcacatttggaatctgggtcaaggaaaccttcatttgataatttaagaaaattaggaatagctttagatgtatcaactgattatttattaggaagagtagatagatttgatgaaactcacagtgataccttatttcgagatcttcaaaatttaactgaaagtgacagagaaactattcgtcgatttgcagaatcactaagaaataaataa

SEQ ID NO: 54883 - DNA, 780 bp, Acinetobacter baumannii
  misc_feature (740)..(774): n is a, c, g, or t
atgagtaaacaacaaactgtaacttatacggctttagacttaaaaatttttaaagagaatgtaacagacgaaacgtatgttgatctttttaaaggcttacaaactaatcaccgtgaaattcctttgattcgtgacaattacttacatatatggaatctcaaaccaattaatgaagataagccattaaatggttttgtcgggactatatttaagcgtaatggattaccaggtgattggtttaatactgaaaaagaaacaagaaatatcaaagaaaatgttgaggagaaatatattccatcgaatttaaaagccaatgttcgattctttagatttgttttttatcctcttcaaaaaaagatagtttgtgaaatcaagaatggaaataacaaaatcagcgaaagtgtgattaaggccttttttgaaaaattgttaggaacagatcgtttaaaagaaagattcaatcgtattgatgtaagtttagtaaaggataatttttctgctgaaagaattatcaatactccacaattgacccagttagaattaatatttttgaattattcagaaacgcctaagaagcaaaattctgatttggaaaaagaaatttttggtgagatggaagaaagtaatattcgtacttactctagaatgctgacagcagaaaagacaaaatttttagaactaactccaaaaaataaagatttaatcaggctagcggttgagcatggttatgtaaattttannnnnnnnnnnnnnnnnnnnnnnnnnnnnnnnnnnatttaa

SEQ ID NO: 54884 - DNA, 1110 bp, Acinetobacter baumannii
atgaaatcacgtgcagctgtagccttcgggccaggaaaacctctggaaatagtcgaaattgacgtcgagccgccgcgcaagggcgaggtgctggtcaagatcacccacactggcgtttgccataccgatgcattcaccctctctggtgacgatcccgaaggcctcttcccggtcgttctgggccatgaaggcgcaggcatcgtcgtcgaagttggtgaaggtgtaactagcgtgaaacctggcgatcatgtcattccactatacaccgccgaatgtggcgagtgcctgttttgcaagtcaggaaaaaccaacctttgtgtggcagtgcgcgctacccagggcaagggcctgatgcccgacggcacgacccgtttctcatacaacggtcagccactgttccactacatgggttgctcgaccttcagcgaatacaccgtcgttgcagaggtatctctggccaagatcaacccggacgccaatccggaacatgtctgcctgctcggttgtggcgtgaccaccggtatcggtgccgtgcacaacacggctaaggtgcagcctggtgactcggtggcagtgttcggcctcggcggtatcggtcttgctgcgattcagggtgcacgccaagccaaggctggccgcatcatcgccatcgataccaacccgaccaagttcgaactggcacgcagttttggtgccaccgagtgcatcaaccctaaggactacgagaagccgattcacgaggttcttatcgagatgactggctggggtgtcgaccataccttcgagtgcattggcaacgtcaatgtgatgcgttcggcgctggaagcagcccaccgaggctggggtcaatcgatcatcatcggcgttgctggcgccggtaaggaaatctctacccgtccgttccaattagtcactggccggacctggaagggctctgccttcggcggtgtcaagggacgtacccaacttccaggcatggtagaagacgcgatgaaaggtgaaatcgacctcgctccattcgtcacccacaccatgggactcgataaaatcaacgacgcgttcgatctgatgcacgaaggtaagtcgattcgcactgtcattcactattga

SEQ ID NO: 54885 - DNA, 1308 bp, Acinetobacter baumannii
atgataaaaatgacctctgacaaacggcatcatgttgttgttgtcggcgcgggcttcggtgggttagacgttgtcaattgcttatccagcgctgatgtcaatataacgatcatcgatcgacgcaactatcacctattccagcccttgctttaccaggtggccggcgcatcgctctcgacaactgaaatcgcttggccgattcgccacttgttccgcaaccgtcagaatgtgcagacgctaatggcggaagtgcagggtgtcgatgtcgacgcgcggcaaatcattctcgataacggatcaaccgtcggttacgacacgcttgttcttgcgacaggggcgacgcatgcctactttggtcacgacgattgggagccccatgctcctggcctaaagactctggaggacgccaccacaattcgagggaggattctttgcgcgttcgagcaggctgagcgttccactagctcggcggaacgtgccgcactgcagacattcgtgatcattggtggtggccctacgggtgtcgagttggctggcaccatcgctgaactggcgaaggatacgttggcgcatgattttcgctccatcgatccccgtaccacacgcgttgtactgattgaggcaggcaatcgcttgctttctgtatttcccgagaccctttcggaatataccaggcaagcgcttgaaaaactcggagtggaagtggtactggggtctcctgtaaccgattgctccgcggagggtgtaatagtcgctggcaaacagcttgcggctaaaaccattgtctgggcagctggggtgcaggcttcaccggcagcccgttggttaaacgttaagtctgatcgcgcggggcgtgtgctggtcgggccggaccttaccgtgccgggtcattccgagatcttcgtgatcggagacaccgcagcagcgatgatgcctgatgggaagtatgtgccaggtatcgcacctgcagctaagcagcaaggcaagtacgtggccaatctggtaatgcagcgactgaagggcaaaagccttgatgagccgttcatgtacaaacatcagggcaacctcgccaccatcggtcgcggcctggcggtcatcgatatggggcacgtcaagttgcgcggggcgatcgcctggtggatatggaagctggcgcacatctactttttgattggtgtgcgtaatcgcctaagcgttgcactgagttgggtatggaaccacagtgtcggttatcgtggctcacgtctaatcatgcagcccagtgaacccgcggagcacccccctcgcaagccaacctcgacggattga

SEQ ID NO: 54886 - DNA, 609 bp, Acinetobacter baumannii
gtgataagtataaaatttctaaatgggcaaggggaaagatcgtcaaacctcgattttttttatcaactgtctgagcaaatatttgtaatcttagatggttatgaagagacaactgaaaaagatattactcagttctgtgaacaattagcattaatctcttataaagatttagaaagccttatagctacaataaaagaattagatcctagctttaagtctagtattaccttgctcgagataagagcaaatgagattagatatatatatttgggtgatattcggatatatgtgaactctaaattagtaactaaagatcatagttatgcttggaaaattctagaaagaacaaattgtttttcatcagaaataatagcaagcagatgcctaacccataagtatagaaaccaaatctacaaaagtatccaaaatattcgtacagatgggtatgaaattacggagatgaaaattgaaattccatcgcacatacttgtctgtacagatggttattggatgttagaacataagcaaataatagcttcggataattattctttaaaagagctaccttcaaaggacaactattcagcaatctcaatttctattacatag

SEQ ID NO: 54887 - DNA, 891 bp, Acinetobacter baumannii
atggaacaaccaatagccaactgggtaaatgaagggacttcagatagagtttctattaagcaaagaatacatattatcttggaagcaattgcttatgacgatgatctatcccaagttatggtgcttaaaggtggcatattaatgtctatgaaatttggtaatgatagacatactaaagatgtagatttttcatttctcgaagatttttctaaaatcagtgatgatcctgatagttttattgaagagatacgtaatagtttaaatgatgctttaaaagttagttgtacaactctctctcaatatggactgattgctaaagtacaaaaaatagagaaaaagcctcaaaaggactttgagctaaagacattccctgctttacaaataaaaattggatttgctgaaaaatctaattcacgacaagtacggaaattagaagaaagtagtgccagcgatacaattagtattgattactctttaaatgaatatactgcagagacaagtcaaattgatattaatttagaagatgatactactattcacgcatattccttggtagaaatggtggccgaaaaatatcgatcttgcttagagcagaaggttcgaaataggaaaagataccaagatatctatgatctttttttcttgattggaaagtatcaagaggagattacagattcgctagaagaaattcgtcaaattctattagataaatccgtagggaaaggtttagacgatttactaaatgcagatgctttcttagatcctgagattaagcaacgttcagctgatggatataatgatttaaagtatgacgtaaaggacctgcctgactttgaagaggcatatcaagtagttgctgacttttatgtgaaaatttggaatggaaagtga

SEQ ID NO: 54888 - DNA, 942 bp, Acinetobacter baumannii
atgaaaatagatttatcagtagctatgcaattatggctcttcgaagaatacccttatggagcaataaatattgcagacttgtatgatcagttctgcatctttttcttcactcagagatatggaaatacgcagattaaggtgcggaaaggtgcaaatttcgtaaatactttttatcgagtcttagatgatcttgccaatttcgataaagtaaaacctatgcgttaccattcaaccgggtacggatatttcgtcaaaaagaaacataataatagtccgcaggaactcttaaatattatttatccttatggatatctttcacatcttagtgctatgcagtattacgacttaacagataagttgccgattactgtttttatgacgttcttatcaaacgcagaatggaaattcgctggaaccgaagaacatttagagaaagtttctgacttttttgaaaatgatgaagttactttctatatacctagatatccggtggaagatgaacattttgggaaaaatttggtatttaaacgtgttaaaaaattagagctatactctgaattcgataacaagctaaaagttattaatattggagagttattcattcagatgttacaggagccggatttatgtggaggatttgaccatgtacttgatacttataaagagtatgggaaaatttttctcagaaaaattctgaaaagtttagataccgcctcaaagatcgatcaaacacgagtcggttttatcttagataagattcttgggcttaaaaatccaaaaatcgattctataaaggaatctatgcaaggacaaaggggaagcagccgtaaaatgattagtaaagagcctttttctccatatttttgtttagaatggaacatatcattaaatcattatttattagagtcttatggaacaaccaatagccaactgggtaaatga

SEQ ID NO: 54889 - DNA, 234 bp, Acinetobacter baumannii
atgccttacgaagaatttcaaagacttataggtaagtctggcctttctattaaagaatttgcagcacttttagatatgaatgcgaattcaattaccaactataaaaagaacggtaaagtgcccactagcattgcagtgattgcaatcgtaatttcagatatgaaggatgatggtctggacttttatccgatttttgagagagttcgggctttccgtgatcaagatagtatttga

SEQ ID NO: 54890 - DNA, 243 bp, Acinetobacter baumannii
atgaaccatttcgtacagcccaagcttcttatttcttctcaagcaaaaaagattggattgacattaattaatgatcttgaactttgcataacagcacgattggctttttatctggatgtaaatccttgctatgacggccatgaagcaacattcatttggaccgaatattttttacaagatcaccctcaagccgaattttctgaagttagagcagcctttctacaacttatcccaggatgttaa

SEQ ID NO: 54891 - DNA, 1146 bp, Acinetobacter baumannii
atgtctattcaagaattcgcatttcaattatctaaaaaaattcaggaacagcattctgtaaagattagccgttcacatatttatgaattaattgctttagatcaggactataggacctatagctcttttgttgctcaaaatcttttacttgatgctcaatatgatgattctgaagaatattatcagcatgaattaattgatgccctaactctagaaatattgaaaaatccgcctgaaacagattatctaaattatagtgaagatgaccttcattgggatgattatgaaggtaatgctttactggaaaagattaaaaaaatcaccataagacttaaggatttactaaaattcgatgcgtcagaggaattatatttatcgatttctaaaacggtctatcgagaacttttatggcttaacttagaagttattaactttaatgtcgtaagaaaagcactaagttatatcgattttgaaaatgggatggtagatcacctagaacttgatggtgaatatttcgagttttcagaaattggggaggcttttgaaaagattttatcttatgcgaaagaccgtaagaatgctgatgcatatgctctattaggtgcttattatcgttatttagcaaatcaaatagctccttatggtcgacatgaatcaaattttgggagtcgttgggacaatcataaacaaaaatatatcaattctgatgagactaagaaaaataaagaaaagtatgaagaatacataaagcaagctgaacactttgaatcttatattaaaaattcacctatgaatcttcatgaaattaatttggatgcagacaaggaaacagtttacaaccagattctgtacttgtgtaatcgaggtgatacgagtgctattgaatacttcctgtatgaagaaattttcaaaaatcatggagaagcatggttatacatctacttagctcaaatgtgtggagttgatttcacgcaggatgattttagagcctacaatgcttatacaggtgaggattatgatgactatggacctatggaaatcgcaggtcgtgaggcaattcaatatgctatagatttatcagaactagatgttgataaagataatttagctaggaagattgctgcagagttatttgagaaaatttaa

SEQ ID NO: 54892 - DNA, 777 bp, Acinetobacter baumannii
atgacactagaaaaagcaaaaaagcgtggtagaccttctcaacttttacaaatggcagagttacatgctttcgttgagtttttattagaaaaagatcctcgttcggaacttcaaaatcaggttattgatgcactacaagctgaagactttaactttgaaatgttgtctgaagctcagcagattcttgtgaaagaagcgttaaaaccgtaccgtgagcatttgaagcttcagttgttgtttgatgagttggtgagaactccgggaaggactaagtatgaagaaaaatttttggagctgtaccaagattataaaaaagatgatctagatccagctgaaatgaatatcctgaaaacaatgtgtacgcgctatctgaattttaaagcgcaaaagcttgaatacagtgacttggagctgtatttgagtcagattcagaaaaaggatgccgggaaaaaacgtaaagctgaaaatcaacgtaagtttgaagtgggcggtggggttttaagtctttataaagtaaaagatgatgaaaatttagacagtaaaaagtttctaaaaggaatcgaaattgaccgttttcttgccgggaaatttcgtcaatctcaactttataaaaaggtttgggcactagagcgaccaaatacagaaaagtatcaactactttttgaggttctccatcagctgtctggatatagcctaaaagggcagactttaacgcttctcgatttagcgattatagatgctcaaaaaaagataaaaagtaggtctgaaaaagaatga

SEQ ID NO: 54893 - DNA, 1170 bp, Acinetobacter baumannii
atggccagttatcacttcagcgtcaaaagtaaaaataaaggctacgccattcagcattacctctatattgcccgattgatgcaatacgaaaacgtccgcaaaaaaagtgatgaaattttagaatacgttgaacctggcaaatgcatgccgtcctgggtgaaagatcccattgagttttggaaagccgctgatacttttgagcgagccaatgccaaagtctacatggagtatgaaattgccctccccaacgaattcacgccagaacagcgtaaaacgctcatagagacgtttttagacaaacatatagttccacagcaatatccgcattcatacgccatacataacgttaaatcgcgcctcagtggcgaagatcagcctcattgtcacatcatgttctcgctaaaagccgatgacagtattgaacggacagccgaacaatatttcaaacgctataaccccaaagatccaagcaaaggcggtgcaaagaaaatccagctgcaggatggccacgcagactattccacttttttaatctatatccgaaaacaatgggaaaaccatctgaatgatgcccttgcacagcactgccctaccgtcacctacacattggatggccaagacatcaccatcaaaaatcaggtttcagcagacagctatgaaaaatataacgagatccacagcactttgtatcttcctgagcctaagctaggcgttggtcaacaaaacgcgacagcggaatatctcgcccagatccaaaaaattcgagaacacaatcaaaaagaacgagaactcgaagaacgccaaaagcaattagatcaacaacatgaatatttttatagtgctgaaaaccatccattttcatcattggaggtgatgtattacctgaattatttagtgaagaatcagaaaaataaggaaaaactgcaaaaagattttagtgaaattatcaagacccaagagcctatattgcatcaagaagactggaatattcataacatgaatcaaaaattgaaggattcacaacgtaactcaacaccatgctttgagtttgacgtgtattcaccaccaaagaatccattacccacgcagaataagccccctaaaccgattcaatcagaaccagtacaacctaaaactgatgattatgattacggtggtccaggtttttaa

SEQ ID NO: 54894 - DNA, 900 bp, Acinetobacter baumannii
atgatgagtacatctaaaaaagaattagtagttaaatcaaatcaagtaattgaggcttcatatcaactcagctcaacagaacaacggattgtcttagcagctattagtaagattagtcgggctgaagatattacagatgatgaaatttatcgcgtaactattgatgatttaaaaaaacttggggttcatgaaaaaacagcttatagagatctaaaagatggtgtaaaccgcttatatgacagatcaattaatttagctattgatgatgagtcaatcaaaatgagatggattcaatccatacgctttttagaaagtaaaagcgttgtaggaattcggttttctaaagaaattttgccgttcatttctaatctaagccgtgaattcactaagtattcgctatctgacattgctggtatgagtagcgcatatgctattcgtatttatgagctactaagccaatatcgttccataggaaaacgagagatttccatcgaatctctaagaagtatgttggagttagggaaaagatatccattgtctgctgatttaaagagatgggttattgatactgctgtagttcaaatcaatgaacatagccctttaaatgtatcttacgagcaaataaagacaggtcgaaaagtcacacacattcacttcacgtttaaagaaaaatcaaaaagtattgagcataaatccgaacagaataatttttataaattgacagattcacaaattaatatgttcggtaatcagctttcacgcttacatgaagtatctcacctagcacaacaaggtgaaagttatgacgacttagctattaaaattaaagatatgctgcgagatccaataaaacaaaaacaacttattcctcatcttaaaaatttaggctttaaggcataa

SEQ ID NO: 54895 - DNA, 639 bp, Acinetobacter baumannii
atggacaaccaaaattacaagatgaaatcactatctgttattgagctttcaaacctctatggaataactcgtcaagccatttataagcaagttaataaaggtaatttaagtaaaaatagtgacggtaaaattgatctttccgaagctattcgagtctttggtgaaccttctagaaatgtaaacagttcacagacaaccgaaacacgaaagttgtcagaagttcacctattagaacagcaagtttacatgcttcaaaaacagcttgaacaggctcatgagcgtgagcagttccaacgtgaggaactaaaagctaagaatgatcagttacacgttaaagatgagcaaattgaagcaatacaacgcctactagaagctccaaaagcttatacaactagttctatcgacccaaaattagatatagcaacagatactaggtcaaaaagtgagtcgaactatgatgtattgactactcaaccaagagaaactcctgtagaagtagagatccaaactcagccgaaagatgacggattgactactccggagcaggtggaaaataagcggattccagtaccggagcacattgaccaggaaccggagaaaaggggcttttggagccgtttttttagaccctatgattaa

SEQ ID NO: 54896 - DNA, 492 bp, Acinetobacter baumannii
atgaataatttaaagttagcatttttcgggtttttgtctggttatatatattgctttttaacagttacacttcaagcagctttcacacatttgggctatccagtttcttttatctctacgatggtatttgccttactgccttattcttttaaatttttatggagtggctttgccgattcagttgataaatcatctatcaaatttttaatatccatatttataattttaatcagctttagcttctttttattaatcctcttttcggatttatatagtattgtttttattataatgttaatcaatttggcattcttaggagcatgttttgatatcttgacagatgcaaacttaattaaaaattttacagatgaagagcgtagctctttattgtcttattacatttttgggtggagaattgcttctatttttgcaggtggggcagttctatttatttttaataaaatcttccaaggaagtttaagccacttatag

SEQ ID NO: 54897 - DNA, 729 bp, Acinetobacter baumannii
atgctacaagctaaaccttatttacgttcggtacaaattaaagcaaatatgcaggcagactggtcaatttatccattttcgataccagccgttaatgatattgaacaattaaccttccatccagacgttactttttttgttggcgaaaatggttctggtaagtcgactattatggaagccatcgctttggcacttggcttttccgaagaaggcggcactctaaacgtgcggcttaattcagccagtagttcatcaaatttatttcagtatttaagaatgattaaaagctttaaaaagccgaaagactattattttttaagagctgagagttattacaatattggcacatatatgaatgaattgaactatgtaaaaagttatggtggcaatatccatgcttgttctcatggtgaaagttttttaaagttgctcactcataaattacaaggtgaggggctttatttattagatgaacctgaagctgctctttcacctaccatgcaatttgtagctttgtcggctattcatgaattatgcaaaagccagtcacaactcattattgcaacgcattccccaattttactagcttaccctaacgctaaaatctatcaattttctgacacagggattcgtgaaatccagtatgaacaaacggaacatttccgtgtgacacatgattttttaaataattaccaaaagcgtatccagcaaatcatagatgaaggatag

SEQ ID NO: 54898 - DNA, 363 bp, Acinetobacter baumannii
gtgaatcaattcagtacagatgtcattaatttaggacgaacacccgagcgctttgatggtctagtcaacacacctgtttttcgtggttctactattgttgtaaatagctttagtgagtgggaagaatttaagcgaaatggtggggtatatcgacattatggccgtttcggcgccgcaacagctaaatcttttgaaagtgcaatcagtgcgcttgaaggcggtgcgggtagtatggtatttccatctgggttgtcggcttgtacacatgcacttatggcttgtgtagaggcaaatagtcatgtcttgattgccgataatatctatggtccaacacgaaattttgctgacaatatattggtctaa

SEQ ID NO: 54899 - DNA, 192 bp, Acinetobacter baumannii
atgagtgatatcagcgtaaaaaaagtcaataaattaattgaagagtttgaacaagaaggaaataaggtagaccgattggagataggttacaaaacatatgcagccttgatgttagataagaaatttgctgataaagtcacaaaatcaaatgaagaccctaaagagcgtctttataaacaaataaaaatttag

SEQ ID NO: 54900 - DNA, 1713 bp, Acinetobacter baumannii
ttgtctttacccatatctttgaccgcttgtggcagtgatgaggatgcttcagatcaagctcaggcacatcctaaagtcgcttttaaacatggggtggccagtggtgatcccttacaggatcggataattctatggacacgcttaagtccggaagatgaaaacctgcgttatcaggtgcagtgggaaattgctgccgatcaggattttcgccagataatcaatacaggacaagttgaaaccagtcggtcgcaagatttcacggttaaagtcgatgcggatcgtctatcggcagggcaaacttatttttaccgttttaagtgtgcatcggtatattcatctgtcggtcaaaccaaaactttagccacgcaaagcaagctggtgcaatttgccgtttgttcatgttccaattatccagccggatattttcatatctatcaggaaattgcccagcaagacctagatgtggtgattcatttaggggattacatttatgagtacgggatgggtggttatgcgactgaacaggctgcagcattaggccgaagtctggctgcagataatgctgaggaaatcattaaactggaagactaccgcaagcgttatgccttgtatcgaactgatgcggacttacaagcagcacatcagcgtcatccatttattgtggtctgggatgatcatgagctgaccaatgatacctgggagcagggtgcggaaaatcatgatgtttcagaaggtgatttttttgcacgtaagctggctgctttgcaggcctattttgaatggatgccgattcgtccagtgtctgaaacagatcatttgaatatttatcgccagtttaattttggtgatctggttcagctgaatatgctggatactcgtattttggcgcgtaacaagcaattgcaatatgctgactatcttaccgcgacaggactagatgccaataaatttcagacagatttgctcaatccgacgcgtaccttgttaggacatacacaacgtgaatggatactgaaacaactcagccaatcgaatgccgtctggaatgtgctgggtcagcaggtgctgatgagcaagatgctaattccggccgaaattctggctgttttggggcagatcaccagtggtcaggccactgcagatgtgttgctacaagtgcgtcagatgctgacagaactggtaggcctaaaaatacgctatctgcaaaatgatccaactttgacaaaggcagaattagccagaatactgactgttgtgccttataatcttgatgcctgggatgggtacgtcgtggagcgtgaggtgatttatacggcttgtaaacagctgaataaaaaactgattgtacttgcaggagatacccataatgcctggaactccactttgagagatcaagccggcagtacagtcggggtagaactagcgaccagttcagtttcatcaccgggtatggagaagtatttgcagattcccttagcccagttacaggaatttgaaatggcatttactacgctaattgatgagctgaattattgtaatttgaatcaacgcggatacttgagtgttgcatttaccccggatcaggtacaggcgaactggatttttatcgatagcatccagaatcgtagttatcaggttgatcaaagccgtgcgtatcagcttcaattagatcatgaattaaatgaaatcaaaccgttaaagcaaactgcctaa

SEQ ID NO: 54901 - DNA, 2079 bp, Acinetobacter baumannii
atgactaccttaaatgtgtcttcaaactcttcatcacatccgttaaaaaagtatataaatagagagctctcactatttgagtttcataagcgggtgttggcacaggcgaaagatactgaataccctttacttgaacgattaaattttttaattattttttcaagtaatctggatgagttttttgaaatacgagttgccagtttaatgcaacaaattgaactttcagatcatgctagagctcgtccagataactcactcctctcagatatagtcaccaccatttccaaacttgcacacgaagctgtcgaagaacagtataaaatacttaattataatctcttaccacaactgcaaggacatggtgttcatttcattcagtatggtgacatcctcgaaaaacataaagaatggattaaggactatttccataatgaagttcgacctgtggtcacacctatcagtttagatccagcccacccctttcctcggctagtgaataaaagtctaaatttcattgtaaccctagaaggtaaagatgcatttggacgaaaaattgatttggcgattgttcccgcaccacgatcattacctagattagtaaagttacctaatagtatttctggcgaggatgaacactacattctactttcagccattattcagcaacatcttcatgagttatttccaggggtaaccaccactggatgttatcaatttcgggtcacacgtaatgcagatttaactatctcagaagatgttgaagacttagcaattgccttaaaagatgaactatcctcacggcgctttggtcgggctgtaagacttgaggtgactaaaaattgccctgaaaatattattgattatttacttggacaatttgatcttaagcaagagcaactctatcgtattgacggcccgcttaatctggcgcgctttatatcgaacttcaatttgccagagttacgttttcctccccatgtacaaaaattaccgaaagtgttgtatgggaaaaaatccatatttgaggtattaaaaaccggagatgttttattacatcacccttttcactctttcgctccggtcattaagctactgaaagaggcagcccatgatccacatgtgttagccataaaacaaaccctttatcggagtggtgtacattctgaaattgtgcaagtccttgctgaagcggcacgaaatggtaaggaagtcacagcagtgattgaattacgtgctcgctttgatgaagagtcaaatatcgaagttgccaatctattacaagaagctggggcggttgttgtatatgggatcgttggctataaaacccacgccaaaatgattctgatcgtgcgtcgtgaaatagacaaaattaaacgttatgttcatttaggcacaggtaactatcatgcaatgaatgccaaaatctatactgattatggactactgaccagtgatgctgatatttgtgaagatgtccataaagtctttcaggagctcacaggcatggggaaaatggtcaaattgaaaaaactttttcatgcaccatttactctgcattctcaattgattgaactcatcgaaactgaaactgaaaatagcaaagcaggcaaaaaagcgcagattattattaaagtaaatgccttaactgaacctcaactaattgatgccctatatagggcatctaaagcgggcgttcaaatcgatttgattgtccgttcaatttgctgcttacgcccacaagtgaaagggctttctgaaaatattcgagtccgctcaattgtgggacgttttttagaacatacccgggtttattatttttaccatcagggcgaaaacaagctttattgcgccagtgcagattggatggggcgtaatttattctctcgcatcgagacctgtttcccaatcgaagataaaaaacttcgtaaacaaattctgcaagatggcttaatgaattatcttcaagataaccgccatgcatgggagcttcaagcagatggaacatggattcaatgtacaccaagtttggataagcccatgtatatcgcacaacagcacttattaaaccatacatcttaa

SEQ ID NO: 54902 - DNA, 2418 bp, Acinetobacter baumannii
atggggtgctcgttttctgcacatgcacaattaatgtttagtcagtatatagatggtacatctaataaaaagggtttggaaatctataaccctgacagtttaacagtgaacttagctgattatgagattcaacaatttactaatggttcaaccacgaaatctgcgacttttcaattagaaggttcattggcaagtaaagcaaaatacattattggtcgaacagagttgcaggcagtaattggtaataaagtcaatcaagtggcaggacttgcatttaatggagatgataccttggtcctgttttataaaggtactccaatagaccgttttggtcgtgtgggagaggatccaggtactggttggggagtgggttttagtagttatcaaaatagtttgtcacgtactaaaacttcaaataatgtaacttcaattgatcctgcaacagcatttgagttagaaagcgaatggtctaaatggtctgatcgaaatgagttttcccagtatttagatacaagcgcgcctataacctcccccgttactcctatcagttgtaatacagcagatacggcgattgcggacctacaatctgccgcagaaaatcaaccatatgttgttcgtggtgttattaccgcagactaccgttatgacaatggtttttctggtttttatatacaaacgcccgatagtaaagccaaatccaatttaagtaatgctatttttgtctatcttcctgcaagtagtaaaatcactggaggaaaagtaggtgaagaggttattttaaaaggtcgtttaacctcatatcaaaaccaactccaaatagatcaacttgatcaaaatattcaaacctgtcatacacaagcatccaatacagtcacggcacaggcacttaatttaccgtttaccagtttgacggagatagcaggaaatgtacctaaacgctatcaagggatgctggttaaaatcccacaaactttaacgataagtgaaaattacaattacggtcgttatggtgagctatctttaagtttaggtcgcttgtatattccaactaatctatatcctgcaaaatctgctgaagcagttgcattagcccagcaaaatctgctttctaaaattatcttggatgatggctataataatcaaaatagaacaccattacttccgcaaaacttcaatgccataaatacattaagaacaggttctgaactgaaaaatgttgaggggattttagaatatcgttttaatgcatggcgaattcaaccgatacaggggaaggtacaacctgaaattatcaaggatactaatttacgtccttcaacggtgattccaaaagatgttaaacaaattcgcgctgcggcttttaatgtcttaaattatgataatggttcagaaaaaggtttcccaacagaacgtggtgcaagctcagaaactgagtttaagaagcaacatcaaaaaattgtcagtgctttaaaaacaattgatgccgatgtgtatgggttaatggaaatcgcaaataatggttttgatgataaaagtgcagtggcatacttatcgcaagccttaggtgcagactggaaatatgtcattccaacccaaatgacaaaattaggtacagatgcaattgcagttgcgattatctataacagtaagcgcgtaaaacctgtaggtgagcctgcagtttatgatgatcagactgaaaagaaccgtgtcaccatggcgcaaagtttccaatctgtaaatggtggaaaaatatttacgatagtacccaatcacttaaagtcgaaaggcagttgtcctaccgataaaactctggccgatgctgatcagggtgatggtcaaggttgctggaatgcaacacgtttaactgcagtacaagaacttatgcagtggattgcaaaaaatccaacacaagtggctaaaccaaattatttgctggtcggtgatatgaatagttatgctaaagaagatccgattttagcattagaaaaagccaattataaagtcttgctcaatgacgaaaaaattggacaaggtaaaacagcctatagttatgtatttggtgttgcaagtgatgccaatggcaatgggggcgcaggaaacctagaccatgcaattgctgatgcagacttatatccaatggtgaaacgcgcttttgcttggcacatcaatgctgatgagccgacggccttagactataacgaagaatataaaacagatgagcaaattgcagcattctatagcgatgatgcattccgttcttccgatcatgatcctgtaattgttgatatggatttaaacgaaaatatatcgagtaatcctgatacaggaaaaataagcggtggcagcatggggatctggtcaatgttaaccttaacgggcctcgttttagtttccatgatacgcagacgtaaattttga

SEQ ID NO: 54903 - DNA, 1911 bp, Acinetobacter baumannii
atgtcttttaataataaactaactaggtattcgggttttacatgcagtttattagtttctagtatgtttttaactgggtgtaataatgatagtaaagaaaatacgaatataacgcctgttattcctcctaaaccgctggaagtcaatttagtacatattaatgacagtcattcacatttggatgaggaaagtactatattaatgcttgaaacttcgatgggtaaacgtgaagaaatacaagtctctaatggtggttttgcacgcgttgctgcgttgatgaatactttggcaagcactgagaagaatccaataaaaattcattcaggtgatgccattactggggacctctattttactttgaaagaaggtgaagcagaggcagatctcatgaatagtgtttgtttcgatacgttaacgctaggtaatcatgaattcgataatacggatgatggcttaaaaaaatttattggattcttaaatgataaaggtaattgtgaaaataaaacccaagtcttgagtgcaaatgtcgagtttggaaaaacttcagcactataccaaactaaccttgttaaaccttatacagttatggaaaaagaagggcagaaaattgctttaattggtttaacgattgccaataaaactaaaaatgcttctcgaccaaatcaagatactgtatttaatgatgaagtagttactgcacaaaaatatattgatgagctaaaacagcaaggcatcaataaaattattgttcaatctcatttagggtacgggttagaaaaagatttagccactaaattgtcaggcgttgatgtcattgttggcggagattctcataccttgctggcagatgcgaaacttaaaagttacggtataagcccagagggtgactatcccactgtattaaaaaataaagatggtgatcaggtctgtgttgtacaggcatggcaatatagttatgtcgtcggacaactcaaagtcaactttgatgccgatggtaaaattgaagcatgtgcaggaaaagccaatgtattgattggcgatgattttaaacgtacagctaaagatgctccagcattgatgagtacggaactagattctattaagcgagatattgaaaatagtaactccttacgtattgtacagcctgatgctatagctttaagtattttagaaccgtataaagtcgctaaaaacttattaggcaaagaaaaagttgccattgctaatgataatttatgcttacgtcgtgttccaggaatgaccaaagatacatcacgttctagtttaggtgatgtctgcaataaagcagattttattaatcagcatgggggtgatgtacagcagctggttgccgaagcatttctacagcaaggtaaaaaatattttaatgcagatatttcaatccaaaacggaggaggggtaagggtagatctgcctcaaggtgatattacggtagagaaaatttatacagtgctgccattcaaaaataccttagtacaattaaatgcaactggccaagaaattaaagcagtgctggaagatgccatggatgctgttacgagtaataacacaggcagttatccatatgcgggtggactacaatgggatgtagatttaactaaggcaaagggtcagcgtttatccaatttaaaggttcgaaatgcacaaggtcaatatcagccattaaatatgaatcagacctatcaagtaattaccatcaactttctggctgatggtcaggacttttacacaagctttaaagacattactggtgagcgtcgtatagatgtgggattagattatgcagaagcatttttgcagtatgtagaagggttacctggtgaaaaagggcaaaaggccttgtcccgattgccagttgagcaatacagcacgcaaaattataaagaataa

SEQ ID NO: 54904 - DNA, 474 bp, Acinetobacter baumannii
atgaataccgttcaaccagcaaagccgataaatatgatgcggcaattaatgagtaaattaggtgtaattggcctaatggtatgtgtaacaggtgtatcttcagctcaagaaataaaatcaggagagtctgtcatgggttatcaaaatcaagcagcttggcaacaaattgaacaattccttcctcaagaatttcatattcctaaagaccagttacccaaagaagaatggtggtcttggaatggtcataacatccatttggatacttaccgtaatcccaatgccaaaattaaagtgattttatttcacggtgtggggaccaatggtcgacaaatgtcgatgattttaggaaaacccttggctgatcgaggttatgaaacaattgctgtagacatgcccggctatggtgtcactcaagttaaaaagagtaagccgattagttataacgattgggtacacaggcaggtagcgatttaa

SEQ ID NO: 54905 - DNA, 2829 bp, Acinetobacter baumannii
atgagtttgaaaaaagtcatcatcgttcctgatgtttatgatcgttctacatggtcagtagctgaggtggatgatgttttaggcttcatctaccaacaatttgaggtatggccagagaatgcaaaaatctatcacaatcagattgctgaagcttgcgatgtcactccaaaccacccaaagaaaattaatgcgcagattgagtatattcaaactcttgaaggtacattttttgtagtgattgagccagcatggtggcagatcatttactatgcagttgtagctattatggcggcatatagtatttatactgttttaacaatgccaaaacctcagtcgccaactgttggctcatctaataatgaattatcgcaacgctctaaccaggcacggttaaatgctcgtatacccgatatttttggtcgcgttcgttcttatccggatttaatcgcacaaacttacactatttataaagatggcatcgagattgaagagtgcttgatgtgtattggtcgtggatattttcaaatattggatatgcgagatggtgatactgatgtagctaatatcgctgggacgtcagtttcagtttatgatccatttacttcgattattggctcaccgatttaccaagttggtgaggcttttactgagctaccaaagtttgtaagaacctcaacatcaatcaatgggcagacaattgaacagccaaaccgagcagtacttgagacaagtaatatctggttccagagccctaatttaattaaagctacaggtttggactttacacaacactttgcagcaaatgacagaattgctttaagtggtgctgtatatggggttcaagatgtaaacctgactggatcaattatggttaatgaagccaagatggtaatcatcgagtcatcaacaaatattgataatccgaatttttttaaaggattgcagctcactggtgctttagttgatattaaaactgttacagggacaccacctaatcaggttactgaaacaaatactcgcgatttgtctggacaatttattgtatctggtgtgaataaaaccgttatttcaggcgtatttcactatgaaattaccttatctaatcccgaaaaaattaatgcgaactggaactatgtaaatgacagttacaccataacatctggcgcaattctaaatcgaaacacgaattcaattaccctagatgatacttatacgattaacagtgtttcagcagatacgattgctttggtcaatccttccgcgataaataatgaatgggataagctccttactttacctaatcaaagtacacaaggtcaggttgtttcagttcgttttgatgctgttagtaacaagtatgttggatggtttaactttgatatgccagaggctaaacaggctgtctttaacttcttctttcctaatggtctattttatcaagacagtaagggcggagtgtgggaagagggcattacagtggttattgaattgcagtctatcgatgcgaatggtgatccagttggctcaatcacaacgattaaccaagagattcgagctgaaaacaagtctcaatttggtagaacgatttacatagatttgcctacaccgggttctttccgtttccgtataagtcgtacaacagcaactcaagcaggtaaaactcaagacacatgcaaaattaagtccgtatatgggatggctgattcatcgatcagtgattacgggaatgtcacagtagtacgttctcgtactgttgcaacagatggtgcgttatccatcaaagaacgtaaactcaattgtttagttaatcgtaaacttccgcttgatggaactgggcctttacaagttacacggtcagcggggcaagcacttattaatttagcgctggatcaatacattggccgtagatctagtgctgaggtggatatcgtacaaattaatgctgagattgagaaagttaatggttatttcggttcagatcttatgtctgagttcaattacaccattgatgacgacaatcttagctttgaagaaatcgcaggcatggttgctagttcagcattctgtgagccttaccggttcggaagtcttacaaggattaaatttgagcagccgcaagaaaatgctgtcttactttttaatcaccgaaacaaagttcctttaacagaaaaacgttcctatacattcggtgtgcagaaagactatgacggtgtagagcttgaatacacttcagatgaagatgatgctcgaatcaagtacaccattcctgaagacatcacaccaaagaatcctttgaagattacgacaacaggtattcggaatgaagcacaagcgaaagttcgggcgtggcgtgaatggaataagcttcgctacaaatacatgtcttgtgaggttgaggttctagatgagtcggaattactgattcgcaatgaccggatattgattgctgataacacggtaatcgatacccaagatggtgaaattgaggggatagatggtttaaccattacaacatcgcagccttgcacatttgaagaggggcagagctactatgtccatcttcaaatatctaatgcaactgtagacgtggtgccatgtttagctggtctagatgaatattcgattgtactttcgaggcctccggttcagccgctcgttgttgatcctgatcgctatgtaaaaacgctctattcgttagttcgcgctgatcaagcagaggctcatgcatttatgcttgaagaacttaccccacaaacacaaatgaccaacacgctgaaagcatctaactacgatgccatattctatgagcgtgatcaccactacatttaa

SEQ ID NO: 54906 - DNA, 321 bp, Acinetobacter baumannii
atgaacctagatgacttacataaccgtacatggtccaaaaattacacctgtaatgagtttttatgcgaggcgtgggaacgtattacaggtaaggatttaaagaaacgactggaccgatttctaaatggtaaaggtcgctttaaaaagctaactgaaccaatttcaccatgtattgtttttttcacaaatggcaaaagaagctcaacacatgttgggcttttttattgtgacaaggttttgcatttaacagggcgtggtgttcagtacgtgccacttgagattatttcaatgaactttcgggaaacgaggttttacaaatga

SEQ ID NO: 54907 - DNA, 477 bp, Acinetobacter baumannii
atgaacaccttaatgtattgctcaactcaagaaggctattcggctagcttaaagagtggagttaggtcgcaagaacttgatggtggtgcgccacggtaccggaagggacttaaaaatgcttatcacattgtaaatgtccaatggaaagtattagatgttggttttcaatatcttgatgcattctataacgagtggtgtgatacaccaggtcagaagtttattgcttcacttcgggttaatggtccagagtttaaaccatatgaatgttatttcgttgaagatagcttccagctttcgagtatggacggtccagtttatacagtgactgctcaatttcgggttaaacctattgttgactcagaattgaataagatcattgtagaggcaggtaatgatagacaagacctagcttctttgactaatccactggaagaactggtaaatgatgacctaccaaatgccatggaggggatttag

SEQ ID NO: 54908 - DNA, 399 bp, Acinetobacter baumannii
atgaaaaagattattttaattagcttggcaatagctgtaacaggttgtgcagcaacttctgacatgacaaataatcagtacatggcaacaactcctacaccaactgaattaaatggattctggactggtgtaaatggtccatacacagttacttatgcatttaaaaaagatggtactggattgatgtgttcaagctggagtgggaatgactcacttgaaaagcttaaaattaatggttcagaagttattctccaatcaggtttaaaacagacaataaaaacccaaacagatacaaagcttgagttgagagctaattattatggtggagcaacttattcttatatcccagacccatctttaagtaatgcatctccatactgtgaaaagaacctaagataa

SEQ ID NO: 54909 - DNA, 333 bp, Acinetobacter baumannii
atgaactatatacttctactttttctaattgtttttcttgcggggtgtgagaaatcttctgaggttgaatcaaagattgattacagatctcaatttaaaaaatcagatgctctcataggtacatatttagataaactggattcaactaatatgccactaaaggaaaaagaaaagatcttatgtgaaagttatccagctgagtacaagctaaattacatgcctgccttaatggcactggctcctaaagatcatacagaaacaaaacttttgattgatttgaaagcagcgattgattattacaaagaaaagttaggtatcaagtgtgaaagctaa

SEQ ID NO: 54910 - DNA, 525 bp, Acinetobacter baumannii
atggctcttgaagttaatattcaaagaaacaaagacgtcagtttatggcgcgaatataaagataaggaaggtaatattcttgctgagtttaaaatccgtggcattggatataagccttaccaagtagccttagaacgtgcaaacaatcaaatttccgcaaaaggatttgatgtggcaaaggcaacggctgaagataaactctatcatgaacttgttctagaagcagtagcttcgcatctcatagaagactggaaaggggttatttttgttgaagaaggtcctaaaggtgagttaattaaaactgagcctacattcaatgccgagaatgcttttaagttacttaatatgggcgatttaggtattactctctggtcttatattcggacagaatctgaaaagatccaagcagaagcaaatcaatatcgggatactgttgtgggaaagtcacaaacctctacacctacgcgaacaaatacgcggggctcacggagcacgaaaaaaagcaaagagaagcccttggcgtaa

SEQ ID NO: 54911 - DNA, 414 bp, Acinetobacter baumannii
atgcaagttttaatggctttggcataccactttacagggcatgatatgggcttacgtgacgaaattcaggcagatattaccgaagcatttaatgatgatttagcggacgccgttcattcttttacatgtgaccgggttgttagcacaaagtggaatcctaaaacgaattcttctgaaaatgtaattgagcattacgaaggccgtggtgttttatttgcttcttataaccaatatgaagttttaactcttggagttcttgcaactgataagaaggctattgtgctgcaaaatgaagtcactaaagagccaaacattgatgatgaatggaacacggcgcaaggcacttttcgcgtcatccatatcaaacaggacccaattagtgcaagttggaaatgtcagttgagaaaagtttaa

SEQ ID NO: 54912 - DNA, 222 bp, Acinetobacter baumannii
atgtttcatagcgtgaatgatggtaaaggtaatcgcagaatatatgtgaataacaatgaaattaaacatgttctttgggcgaatgaggaacagggtttggtttgttgtttcaagtatccatacaagattaataagcgcaaagatgggctttgcacaagaatattgcgtggcaaagttaaagtggagatgatctatggggtggacgggagtaaagccgactag

SEQ ID NO: 54913 - DNA, 369 bp, Acinetobacter baumannii
atggggtggacgggagtaaagccgactagctttagttttgaagttgagaaacaggcagatgagcttgtaaagaaaatcacaatggatacagttcaatcacttgttgtttcaagtccagttgatactggagcttatcgagcatcgcatattatttctgttggatctggtgattacggtgtgcgagagcccactacaaacgctgtgcaagatgctgcgattcaagctgtgaaatttaaacttggtagtttgatctatattcaaaacaataagccttatgcagagcgcttagaggatggttggtccgatcaagcgccgttgggtatctacagcacaacgtttacttacattactcaaaagtatggtggctaa

SEQ ID NO: 54914 - DNA, 393 bp, Acinetobacter baumannii
atgactttagagcaggcgcggcaagcaatagtcgaccgtatgatgagcttcacaggtatttctcaagatagaatccaatatccaaatgctccaggcttcatagtgcctacaaaaggcttatggtgccgtttagctatctcaggaggaccaagctttattgctggactttctgataagccaactacacgtcgcacaggtaatattttaatccaatgctttgctcggccagatacaggtgataaagaaatcacagatctaagtgatgcattacttgatcattttgaatatttcggaatcgaacatttagaatgtatacaggggcaatccgtttatacaggaaaagatgctgacttcattcagtataatgtgacgattggatttagggtgaattga

SEQ ID NO: 54915 - DNA, 213 bp, Acinetobacter baumannii
atgtcctgcatgcttacgcaagaagaaattgaaattaaacggctagaactagaacgacatttggaagctgtaatggctgaagagcttaataaatggcaattggccaataaactatgtgtttctgatgtgaatatacgtttggccgatgttagttgccttggcagcgcaaagcataatgtagtaactggagtaagtgtcgatctagatgattga

SEQ ID NO: 54916 - DNA, 936 bp, Acinetobacter baumannii
atgtcgagtggtgcacgtcagctaacacaaatcgcaagagaaacaacggtaggtgtaacaccgacaccgtttgctcgaacaacttttgaatttacagataatggtttagatgccacagtttctaaagaagagtcaaagtctatcactagcgggcgcattgctcgctcttcaatgattacaggcgcagaatatgctggtgaattaaagtgtgaggcaaaatatagccaacttgtacaagacttaatggcttctgcagcttttaatagttggtcatccagtgtccttacttttggtggggcactccgccaaacattttcagtacttcgcggctttgaagacgtaaatgattaccacgttttccgaggttgtcatgtaaatacctttagtattgaaatccctgaagcgggcttaatatcgatggcgtttggcctaatggctttaggtcgaactaactattcaacaccacctgctggagctataactccagctgataacagtcctaagctatctaatgtatctgttggtgaaatcttacttgatggggtgtctcaagcaggaatttcttgcttaacccaattctcattcaaatgggataatacaatgaagttgcagaaatgtctgggggaaggaatcaatgcccgagcgattttagaaacacttgcagctgggacaggttcattcacagctgcatggtcacgtaatacttcagacatgtacgaaaaacagttcaccaatactacaatttctttgaaggtcccaattacagacacactgggtaattcttacgaaatttttattcctaaagcggaaattacagcacctttaccaggcggcgggaacagcgatattttaaacgcttcatttgaatataaagttgtagaagaagcaccgactattacccgtattccagcgccagcacctaatccaaatccttaa

SEQ ID NO: 54917 - DNA, 534 bp, Acinetobacter baumannii
atggctttaaaagtaactattcaaacaagcaaaactgtaagcaagtggcgagaatacacagacacggcaggaaatgtactagctgaatttaaaatacgcggatctggatataaaccgtatcaagtggcactagagcgtgcgaataatcagattacctcaaaaggttttgatgtcagtaaggctggtaaagatgacaagctttatcatgaattgcttctcgaagctgctgcatgtcatctaatagaagactggaaaggcgtagtttttgaagaaaagattgacggcggtgaagtggttgaaaccgaaccggagtattcatctgaaaatgcgacgaagcttcttaacatgggcgacataggcatttcaatttggctatacgtaaagcaagaagctgaagacattcaaaaagaagcggatgcgtataaggatgaagttgtgggaaagtcctgcagctctacaactggtgcaagttcaactcagaagaagaagcgagcgactacaacgcgaagcagacagcgatcgcaaaagccttaa

SEQ ID NO: 54918 - DNA, 405 bp, Acinetobacter baumannii
atgttgtatccaattgctattgagagaggtatcgacactgaagcctttggtgtcaccgttccagatattccaggatgttttagcgcaggcgatacattaggcgaagctatcgagaacgttaaagaggcaatttctggccacttagaaattcttgctgaagatggagaagaaattccattagcatcggatgtcagtaagtttattgaccaagaagattatagaggtatgatctgggcagttactgaagttgatgtcagccgttatttaggtaagccggaaaaaatcaatgtaactttacctagccgtttaattcggaagattgatgataacgtaggtaaagataaaagatttaaaactcgatcagcatttttggccgctggtgctgaaaagctattacatgcttaa

SEQ ID NO: 54919 - DNA, 348 bp, Acinetobacter baumannii
atgttagcaaaacttttatatacattggggtgctctattttattagtggttttaattagctgcactaaacaagttgaaatacaaccactccctccttcagttgaagaggaatatctaacttcaaaacaagaaatagataagatgcttgatgcattaaataatcatgatgtaccaaatgatgagaagcgagagatattgtgtaagacatatcctgaagtctacaaaaatcactatatgccagcactactgaagctttctccacatcaatattcagaagaagtgcttttgagagattttgaggcggtgattaagttttataaacaagcttggtctattaaatgtatctaa

SEQ ID NO: 54920 - DNA, 531 bp, Acinetobacter baumannii
atgagaaaaatattattaataattttaagcttaatagtttctactcaaattcttgcaaaagacaagtatgatcctgaatgtaaggttagtggctttgataataggactacatgtagcgttaaagaatatggtgtttacgtatatgataagccaacagttttaagttcagttgcatttggtggggtgtggacaagcgcagatccggaaaatattggattaacatttagccttggcgacatatcttctttaattgaaagtatttcctttaatgtagatggtgaaattcagaattttaaagtttcagttgattcaactaaaacagtgcatatgggtggatcattatggaaatctgtcagcgtagtagttttgccgaagtcttacatagataaaattctaaatactaaaaatgtaaaattcagaattgttacagtttctaaaggttatcgagaaggttcattttattctgagaaaggacaagcaagtgaaccagttaaaactttaactgctttgatgaaaaagattaaggaataa

SEQ ID NO: 54921 - DNA, 4059 bp, Acinetobacter baumannii
atggcacaagaatctcgtttagtaattgtcatagattcaaaaaatgctgaacgtaatgcacgaaatctaggcaatgagctcgatagcatagaacgtaaaggggagttcgcttctaagtccatggacggtttgtcagtagcaacgcggtcacttgcaggttatatggctgggttagttacggcgggtgaagctgtttcaaaaatggatgcttatactggccttcaaaaccgtctaaagcttgttaccaaaaatcaaactgaactaaataaagcaactgaagatactttcaatattgctcaaaaaacttattcagcttgggattcagttttacaggtttaccagcgctttagtgacaatgctaaaacgttgaatttgactatggatgacaccgctcgcttaactgaaactgtctccaaagcagtagcgattagtggtgccagtgctcaagctgcagatgctgctttagtacagtttggacaagctttagcaagtggtactttgcgtggcgaagaattaaattctgtcatggagcaaacaccagctttagcaaaagcaattgcgcagggtatgggtattactgttggtgaattgcgttccgttgcggctgaagggaaaattacttcacaagaaattgttaaagcacttaaaaatgttcagaatgatgttgatgcattatttgctaaaacagatgtcactattgggcagtcattgacccttctgaataatcaaattacaaaatttgtaggtgaggcaggcaaaggatctggagcagcacaaactttagctggtggcattcagttacttggcaataatttaaatgtcatcattgatggtgcaatagttgttggaattggcttaataacaaagtctatcttaactaaaacagtcgccgttcaagctagtatcgttgcatctgctcaacaaagagcagccaattttgcagaggcacaatctcaagtacagttgctcggtgtagaagcaatgcgagcaagacaatccgctgcattaactctcacagaggtaggtttggctcgagcagaatataatgcagcattgagtgcaaatgcacgtgcagcagcgatccaaagactaaccgctgctgaagttgcccataatattgctgtaaaagaagcaaccattgcgacaacagcttattcggtagctcaatctcgattaactacagtagccactttaggtagtagagctttaggtctagtgggtggaccgataggtgcaattacacttggaattacggctttggcggctggctatatgtatttccaagataaggctgcaaaagctacccagaaacttgaagaacaggcaaaagttgctgaaagaacagatgaagctttaaaaaaattatctggcaatgataaggcaaaagccgttaatgatttaactacagcgttcaaggctcaaaatgaagcactacaaaaatcctcattcgcggttggtgcagctttaattgatatcgaaaactatgcacgaggaaataaagaggttgaaaagatttcacaagatgcaagaactggaacaatcagttattcggaagccattgaacgtttaaataaaattaaactgcctaccgatctgtatgaaaatcttaaaaagcaagctgcccaatatgatgaaaactcatctaaagcaagtttgtctgcagaaaagctcaaaatattcggtgttgaagttagtcttgctggcaataaggcacaaaatgcagcagtacaagtaaagagtaatacggatgagctacatggtaatgctaacgcagccgatcgtgcagctaaagcgcaaaaaggttatttcgaaagtcttcgttcagaagtacttaaatcgaatgaagagctggcgttattaaatcttggctacagtgaagaaactgttaaaaagattattgaacttcaaaaggcaaaacaagccgttgctcctccaggtactactgcaattgtaaccaaagaggagatggatttagttgcacaagctcaaaaggccctcgatgtactgaaagacaaaaaggatgagctaactgctgctgagcgaaaacatacgagtgaacttgagaaacaacaaaaagttttacaagtgaatgagaaagttaaagctaatgcggctaaatataattttgccgatattgaagctaaatataacttgccagctggcaccttatctgcaatccatatgattgagtcacgtggtaatgctagagcttacaacaagtctacaggcgcaacaggtgggttccagtttctagagggtacagcaaagcaatatggagtaaaagaccgttatgacttagctcagtctgctgaaggtgcaggtaagtacatgtcgtaccttttaaaacttttcaagggagatttagaaaaagctgtcagagcctaccacgcaggcgaaggcaatgtccaaaagggtaaaggtattggtaaaaataataaccagtactggaaagattaccaaggctatatggcaggcgttaatggttatacagcgggagatatatcttcgaaagattttgataaattacttcaggacaacaccaagctagctgaagaacaagctaagttacgtcttcagcttgaaaatgaagttgccaatcaagttactaagatccgaaatgatcttgctaaaaaacttgaagatgttgataaagctaattttagtcctgagcgtaaagagcaaattaagactgagctacgagctcgtgcagataatgatattgcaattgcagagcaagccacaaagtctaagctagattcttaccgtgactttttaaaaacagaagaacagcttttaacagacagttttgcaaaacgtcagtttgaagctgctcatgatctagaattaacaaaggaacaaagaaaagcggcagtagatttacttgcaaaacaactgcaacaagaattagcactaattcagatagctcgagagcaacgtttatttcaggccagacagttcttatattcagaagttgatgctattaaggaaaggtatcgtattgaacgggaacagattgcattaactactaaagatgaggaagagcgacgggaacgtctgtctttatctaaggcgcaagaacgtctagagattctagataaggcttttcaatctagtaaaaattgggatcagactaaagctgatatgacgggtaatagtcaacaataccagctaaaccaatcacgtaatgatcggagggctcaatctttaaatttagcaaatactcaagtagctgcactcgatattcaagctaaagatccaaatgcaaatttggaagctctgaatgcacaacgtgaacaaatcatgaaagaacactttgagcgcctgaaactgattgagtcgacatatcaaaatgattcaatgagtcttcaattgggttatggagctaatgttacaggggctttggctggcatgtttaaaaatatgcttggtgagtcatcaagtgcataccgcattctttatgaaagtcagcgcgcatttgctttggcgcaagctggtatgaacatgtggaaagcagcatcagatgcttatgcaaatgaacccggtacttggtatcagaaagctgctgcagcagcgatcgcaacaattaaatcaggtacatttgtatctcttatccaagctgcgacaccgcaaggatttgcggatggtggttatacaggaaacggccttaaacatactccagctggcattgtgcataaaggtgaggttgtttggtctcaagaagatatcaaacgctggggaggagtaagtgttgttgagaacatgaggcaaagtaatccaaatgggtatgctaacggtggctatgtatcaaacaatcaaacggatgcaattgcaacagttagagagcatagacaatttgatgcgattaattctggaagaactgagaagtctcaacctactgttaccattatcaataaaacatcagaaaaagtggatgctacctctgaatgggatggtaaggagttaacagttatcttaaaagagtatcagaaacaaaatgaggcaatggtggatgcaaagattgaaaaacgattccgaatgtccaaacgacagggatggtaa

SEQ ID NO: 54922 - DNA, 1011 bp, Acinetobacter baumannii
atgaaagcttggttacttaaagattttggcttagaaaatttaaaattagaggaagtagagactccaacacctcaggcaggtgaattactgattaaagtcggtgcggtgtctttaaactatcgtgataaagcgattgtcgatggtttttatgaacctcatctagtgccaaagccacttattcctgtatctgatgctgtgggtacggtcgttgctgtaggtgaaggtgttacacgctttaagcttggtgatcgtgtaaatacaacactttattcacgttggattgatgaggaaccaggaccaaacgagcctgactattgcttaggaatgccattgcctggcgggcttgctgaatacatgattttgcatgaagaaagtgcggttaaagcacctgacaatatgtcggatgctgaagcagcaacgttgccgattgcagcactaactgcttggtattcgatgatggatgtcggtaacttaaagccgggacaaaatgtgttggtacaaggtacaggcggtgtttctatttttgcgatccaacttgctaaagcctatggtgctcgagtcattgccacatcaagcaaagatgagaatctagaaagagttcgcttattaggtgcggatgaaggcattaactataaaacttacccaaattgggaagaacgtgttcttgaattaaccgatggaaagggtgccgatgtcacgattgaagtggcaggtggtaatggtctaaatcaatctattgcagcaacaaaagtgacaggaacgattgctcaagtggggttcttaacaggtcagacaacacagctaaatttgatgcccttgattttccgtcaaaccaaacttcgtggtattgcggtagcgcctcgagtggcttttgaaagaatgaatgatttcttaaatgccaatcaaattaaacctgtgattgatcacatttataaatttgaagaagcgattgctgcttttgaacatttatcaaaaggtgcttttggtaagattgtgattaatcttttctaa

SEQ ID NO: 54923 - DNA, 912 bp, Acinetobacter baumannii
atggatcatcagtttgccggcattatcgagttcattacagtggtcgaccaagggagttttacaaacgctgccgaggtattgggtttgacaggatctgctgttggtaaaagtatgaataagttagaaaaaagactcggtattcagctttttcaccgtactacgagacgtcttgcattaacccctgaaggagaaatatggctgcgaagctgtagacgccttgtagaagaactagaagcgacccagtcgttattgtctcaagaaaataattcacctacaggaagaatcagaattgatttaccaacaacctttggtcgtcgctatatctttccaacgttattagaaatcattcatcgttacccccaacttgatcttacagttacatttcaagatagagcagttgatctgattcaggaggggatcgatttggtcgtaagaattggtgaattaaaagattctacagatatcatcgccaagtctttaggtcatcaaacgctattgatttgcgcttctcctgattatttaaaaaaatacggcacaccgcaaagtaaagaagatttaaaacatcaccaatgtttgattggttggcgaagtcatagtaaaggctattggtttttaagaaataccctcaatgaaacggaattacatgaaataaattacaatcatgaaattccagatggagatgccattctaagtgcatgtatgtcaggcttaggattggcacagcttccgagctggcttgcttttgaagcaataagagatggtaaattgatccccattcttcctgaaatctcaggcgtaaagattccgattaatattctttggcagaaacgttggcatctacagcctaaaattcgagtcgttgttgatgaaattatgacttttataaagaccaatccaaagttatttaattaa

SEQ ID NO: 54924 - DNA, 507 bp, Acinetobacter baumannii
atgaaaacccttacagttcttgaactttccaagctgtacaatatcaatagacaaacaatttacaacaatataaagaaaggaattttaagtaaaaattctgataataagattgatctagccgaagctatcagagtctttggagaacctatcaaaaaacaggatgtaaaagaacctgtaaaagtagacagtccaaattcggcagaagttttactccttagacagcaaatagacatgctaaaaaatcagcttgatgatgccaaagagcgtgagtctttttatcaaaatcaaattgagacaatgcaacgtctactggaagctccaaaacctccaaaggtagaagatccaacaccagttgcaacaccccaagagactgttgaaccaaaagaagaagctgagattcagactgagatccaagagcctaagaagcgaattccagtaccagagcatattgaacctgaacctgaaaaaaggggcttttggagccgtttttttagaccctatgattaa

SEQ ID NO: 54925 - DNA, 864 bp, Acinetobacter baumannii
atgatacttgcaattattgttgcaagaaaaagtggcgatttaagctggagtattgatcattggaacgggaaaccagttcagattccagctgaaagttatgaagtaacttttaatgttacgagacaggcatcttatctagcactaaaagaagctgctaaaaatctttttgaaagacgtttcagttatcaagaagaacgtgctaaaggtattgctcacaaaactagccgatgggtttctgatattgcttatattgattcgacggcaacagttgaaatcacattttcgcctgttgttttaccgctcattactaatctagagaaacatttcactagttatgaaatagagcaagtcagtaatttgaatagtccatatgcggttcgtctatatgaattaataatttcgtggcgtagtataagaaaaaccccaatgattgatttaaaggattttagaaatcgtataggtgtgttggaaaacgaatatcagcgcatggaattatttaaaagacgcgttttagaacccgctatcagtcaaatcaacacacatacagatattattgccaaatatgaacaacataaacgtgggcgttcaatcataggattctctttttcttttaaacagaaagaagatacttctacaaaggtaattaatacaaagaatccatcttatttcttctcaaaaatgacagattctcaacgtcatttttttgctaataaactatctgaactacctgaaatgggaagctactctcaaggtacagagagctatcaacaatttgctattcgcattgttgagatgctaaaagatgcccaaaaatttgaagaattattcccttatcttcagaaagtcggctttaaaactgcctaa

SEQ ID NO: 54926 - DNA, 1173 bp, Acinetobacter baumannii
atggccagctaccatttcagcgtcaaaagtaaaaacaaaggctatgcgactggccactacctctacatcagccgactcatgcaatatgaagggattcgcaagaccagcaacgaaaccgtagaacatatcgaaccaggcagaaacatgccatcctgggtgaaagatccgattgaattttggcaggcagcagacagttttgaacgagccaatgccaaagtatacatggagtatgaaattgccctgccaaacgagttcacgccagaacagcgtaaaacgctcatagagacgtttttagaaaaacatatagcaaccttgaactacccccactcctacgccatacacaacgtaaaatcgcgcatcagtggcgaagatcaaccccactgtcacctgatgttctcattgaaagccgatgacggtattgaacgaacagccgaacagtatttcaaacgctataacgcaaaagacccctccaaaggcggtgcgaagaaaatccaactccaagaaggccatgaagactattctgcttttctgatctatatccgcaaacaatgggaaaatcacctcaacgatgcccttgctcaatactgcccgactgtcacttacagactagatggacaagacatcaccatcaaaaaccaagtgtcagcagatagctatgaaaaatacaatcagatccacggcaccttgtaccttccagaacctaaactgggtgtcggcaaccaaaatgcgacccctgaatacctcgcagagatccaaaagatccgagaacacaatcaccaagaacgagaactagaagaacgccagaagaaaatcgaccagaaacatgaatatttttacagttgtagcaatgaaccctactcaacacctgaggtgatgtactacgtcaattacttattcaaaaaagcaaagaataggaaagaactcgaaaacgatatcgtggcaatcgtcaaagcacagaacccgatcattgaaagtgaaatgtggaatacacaggaaatgaaccgaaaactcaagcatgcccagcattacccaactccatctgttgaatttaaggttcattcaaaacctaaacagccgatccccccacagatcaatccacggcctcaacctgttcagcatgaattgaagaagccaaaacctgatgattatgattttggaggtcctggtttttaa

SEQ ID NO: 54927 - DNA, 774 bp, Acinetobacter baumannii
atgacttttgaaaaagcaaaaaaacgtggaagaccggctcaattactccaggtggcagagttgcatggctttgttgaatttttaagacgtcaggaacgctcggaactgcaagatgaagtaatgatgtttcttctaaagaaagattttaactttgagttattgtctgaaccgcagcagattttggtgaaagaagcgttaaaaccgtaccgtgaacacactaggctcgtgctattagctgaccaattggagtctgaaaagaataagtctgaatatgagaaaaaatttttaaaattatatgatgattatgaatgcggtttgttagagaaggcagatgtaaatcttctcaaaaccatgtgtactcgttatttaaattttaaggcacaaaagcttgatgtcagtgatttagagttatatctgagtcagatccaaaagaacgaagctaagaagaaaagaactgctgaaaaccgacgtaaatttgaagttggtggtgctgtgcttgcagcctgtaaagagttgcaaattggttcaaatagttcaagtgaaagcataaaagatatgtttattgaatatcatagatattttcatcgtatgagagcgactcggttttttgctgaagcttctagattaacgagtagctatagattagaagacgatgttatcgttatagctttaaataatttatcaaagtacacccacgatgggaaaagcattacgacgattgagattgaaaaagctattttagaagtaaatgaattaagaaataaaaaatattga

SEQ ID NO: 54928 - DNA, 1338 bp, Acinetobacter baumannii
atgttggtgtctatgtcggataaagaacttaaacgattgtcggtcttgcaggaaatctgcgatcaacgcataactcaatcccaggctgctcagctacttcatatttcagaacgtcagatcagacgcttactgcagaaatacaaagctcaaggtccatctgcattagcccatgccggtcgtggccaaatcagcaattctaaacttcctgaagaactcagactcaagtgcctcaatattgtttctgaccaactgcatggtttcggacccactttagcgcatgaaaagcttaccaccgtacatggattcgatctttcagtagaaaccctgcgttcttggatgattgcagctgacttatggatgcctagatccaagcgcctgaaacgaccgtatcagcctcgttacaaccgggattgctttggtgaactgatccaaattgatggctcacaccatgactggtttgaaggacgcgctgctaaatgctgtctgctggtgtttatcgatgatgctacaggaaaattgcagcatttacgcttctgtgagtcagaatcaacctttgactatatgatttcaacacgcttatatgtcgaacagcacggtaagcctttagcgttttacagcgacaaacattcagtctttagagtgaatcaaagcagcaagaaagacaccaagattacccagtttggacgtgtactcagcaccctgaatatcgatatcatcttcgctaattcaccgcaggccaaaggccgtgtggaacgggccaacagaacccttcaggaccgtctgatcaaggagatgcgcctgaaaggcatctgttcgattgagcaagctaatgtctggctaccctgcttcattgaggagttcaatcagaagttcgccaagatggcttttaatcctaagaatctacatcggtctatcactgaaacagccgaagaattagatgatatttttacttggcgtgaaccccgcagagtcacgaatagtctgacgattacttatgataaatgcgtatatctcctggaaaacaccgaagaaaatcaaaggttgatcggtaagtatcttgagttccttgaatacccggatggtactgtagccatcatgcataatagccgaaagatcaattacagcctcttcgataaattaagtcagctgaatcagcgagagattgttgagaataaacggttgggtgctgttctgaatcatatccaacaacagcatgaagaactggaacagcaaaacaaacgtaatcgttctcaaaagatgccaagcagacgtgcacagaaaacagcaattcaagaacgaaatctaaatcctgtgcttgacttggaaatgtccatatag

SEQ ID NO: 54929 - DNA, 894 bp, Acinetobacter baumannii
gtgacaagatcaaataacaatggaagagctttagaggcaagattagtagatattatttgccaacagaattctcagattgttttacttggtaccactcaacaggatcaagtaagagatttagcttattttggtgccttaccagtctatcagcaacagctattttcagaattctcagaaaaatattcagatgaactctgtgtacaaaatattgcaacaattgaaaggttaaaagatagtgctgctgtagcgggtgatgtaacggatattagaattatttatactgatggaactattagaaatatttcactaaaacataatcatgatgcttgtaaacatcaaagacctggagcacttattagtaatcaattaggtatcaataatcctgtgttggacactcaatatagaaatgaattaaccgctatagaacgtaatttcaagtcttttgtattgcctactgatcgaaatgaaaatggggattatttatttaaccttgtgaaagcaagagcaccttatctaatcacgaacttatatgaagatgtttgtaacttggttctaaaatatcttactaattatgctgatgcgcatgctattcaaagatattttagattcttagtgggtaatactaactttgaaaaagttatgctagacccatcatctagaaccatttggataaaagatttttctaatatccaagatgctcataggatagatgaagcttatattgatccagaaagtggttatttgatcgtaaagtttgataataattttattttgaacatgcgcttacatacagccagttctagatttaacttaaattcatctctaagtttaaaatttgactcatctgtagatatgaataatgctccagtgcctgtaaaaattattcaattttaa

SEQ ID NO: 54930 - DNA, 1005 bp, Acinetobacter baumannii
atgcctcttaatatagcttcttttttctctggtgcaggcggtctagatcttggcttcaaacaagcaggttttgacatcatttttgccaatgaatttgataaagatatttgggctacctatgagcataatcatcctgaaacaactttagataagcgtagtatcaccttaatcaatgaatctgacgttccagattgtgatggcattatcggtggtccaccatgccaaagttggagcgaagcaggttcacgaagaggcattgaagataaaagagggcaactcttttttgattttattcgtattcttgaagctaaaaaaccatcatttttcttagctgagaatgttagtggaatgctagctcctagacataaagatgctctcgagaacatcaaaaatacctttcttgaagctggttatgatcttcattttaaacttctaaatgcagcagattttgggattgctcaagatcgaaaacgagttatttttattggttttagatctgatctcaatgtcgattactcatttccagagccaacacaagaacctaagcatctagaagatatcattaaagatctagaacataatgctgtaccagcactgaataaatcaaaaccgaacccagatgttgaaattgccaatcatgaatatatgacaggtggcttttcatctatgtatatgtcaagaaaccgtgttagagcatgggatgaaccatcttttactattcaagctggtggacgacatgcccctattcatccaagcgcaccgaaaatgataaaactagaacaagataaatttatgttttcaccgaaaggtgaatatagacgtttaagtgtgagagagtgtgccagaatccaaagcttcccagatgactttatttttaaatattcagatgtaaatcatggatataaaatgattggaaatgctgtaaatgttgactttgctaggattttagcaaaaagtatcatggaagcattgaaccaagctacttcgctatccaaagcaagttaa

SEQ ID NO: 54931 - DNA, 1083 bp, Acinetobacter baumannii
atggaaaatataatgaaagcaatggtttattatggtgatcatgatattagattcgaggaacgcaaaaaaccagaactaattgatccgacagatgccattattaaaatgacaaaaacgacaatttgtggaacggatcttggtatttataaaggtaaaaatcctgaaattgaacaaaaagaacaagaaaaaaatggttcattcaatggtcgtattttaggtcatgaaggtattggtattgttgaacaaattggttcatcagtaaaaaatatcaaagttggcgataaagtaattgtttcatgcgtaagtcgttgtggtacatgtgaaaactgtgcaaaacagttatattctcattgtcgcaatgatggtggttggatcatgggatacatgatcgatggaactcaagctgagtatgtacgtactccttttgctgatacttcattatatgtgctacctgaaggcttaaatgaagatgtagctgttttactttctgatgctctacctacagctcatgaaattggtgttcaaaatggggatattaagcctggtgatacagtggctattgttggtgccggccctgttggtatgagtgcactattaacagctcaattttactctccaagtcaaatcattatgattgatatggatgaaaaccgcttagctatggcaaaagagttaggagcaacggatacaattaattcgggaacagaagatgctattgcacgcgtaatggagttaactaatcaacgtggtgttgattgtgctattgaagctgtaggaattgagcctacttgggatatttgtcaaaacattgtcaaagaaggcggacatttagctaacgttggtgtgcatggtaagtctgtgaacttttctcttgaaaaattatggattaaaaatttaacaatcactactggcttagtgaatgcaaatactacaggaatgctattaaaatcttgttgttctggaaaacttccaatggaaaagttagcaacgcatcattttaaatttaatgaaattgaaaaagcatatgatgtattcattaatgcagcaaaagaaaaagcaatgaaagtaattattgatttttaa

SEQ ID NO: 54932 - DNA, 1812 bp, Acinetobacter baumannii
gtgttgaagaatttatggaccatccaagactggaaaacagcatatcaaaacgggcaaatccatcttaaggatctgcttggctatgtggcagaagttaaaaatgatgatcatacgtggattgaaattgcatcgaaggagcagattcaatcgcaaattgatattttaaaagaccagaatattgctgacttacctctatacggtgtgccatttgcagttaaagacaacattgatgtcgctgactttcacaccactgctgcctgtaaagaagttgaatatttagcgacacaagatgctgccgtagtagccaagctaaaaaaagcaggggcgattgtggttggtaaaactaacctcgatcagtttgcaacgggactagttggcgttcgctctccatacggtgcagtaaaaaatagttttaaccctgaatatatcagcggtggatcaagctctggttcttcggtagtggttgccaacggcattgtgccttttagtttagggacagatacggcgggctcaggacgtgttcctgcgggtcataacaatattgtgggccttaaaccaacaaagggctggttttctaccacaggtttaattcctgcatgtcgaaccattgatgtcatttctatttttgcgctgtatattgatgatgcttgggcagtcgccagtttaatgcagggctacgatgaaacagatgaatattcacgagcacatccagccaatgtaccaaatcaattttctaaacgaaaaattgctattcctgctcagcttgagttttatggtgatattgaatctgaaaaggcctttttaattgcaattgagcgcttaaaaaaactgggctatgacgttgagagtattgatttcagcgcgtttaatgagcttgctgccgcactgtataacgatgcttgggtagcagaaagaacagtcgccgttgaacgcatgacaacacgtgaaaaggctcatccagtcattgctcaaattattgcgcaggtagataaattcaaggcaacagatgcacttcaagccgaatataaccgcgccgtacttgctcgaaaaattaatttggctttacaaccttttgatgccttgatggttccgacagcgccaaccatttacaccattgctgaagttgaagccgacccattgactaaaaatgcgcacatgggagcgtataccaactttgttaattttgctgatctttcggctttagctttgccaaatgtacttcgtgaagacggcctaccaagcggggtaacctttattgcaccagcttggcatgatcaggcactcgccaattttgcgcagctttggcaaaccgaaacatcgctgagtttaggtaaatcaactcaacattatcaaaaaagtctagagatccagtcaaatcattcagtacagctagctgtagtcggagcgcatttaacaggcatgccacttaattttcagctcactagccgtaatgccactttgctcaagaaaacacagaccgcagagacttataaactttttgccttaaaaaataccacgccaccaaaaccagggctgcaattcgatgaagcagggacatctattgaagtcgaagtgtgggatgttcctttagcaaattttggagccattgtggctgaagtacctgcaccacttggtattgggaacctgaaactaaaagatggaacatgggtcaaaggctttatttgcgaagcgtatgccattcaagatgcaaccgatattagtcattttggaggctggcgagcttacatacagtcactcaatcaaaccgctcaaagtgttgttagtaaaaatgttggggaagtttctatatga

SEQ ID NO: 54933 - DNA, 276 bp, Acinetobacter baumannii
gtggatttaggtattgaagactgcaacgatgttatggcaattagccaaaccacccttgattttataatgagttcaaaaattagtgaactagaaaattttgaactcattattaataataatgacttgaaatataatctaaatttagaactttttaaaagtttagacttaaataaattaaacaaagtttctatatctggaagctttcaaaaagatttagaagttgaaatctataatttattgagtagcaaagttaaaaatatacggattaataaatga

SEQ ID NO: 54934 - DNA, 753 bp, Acinetobacter baumannii
atgggctctaggatgaatacgctgccagagaaaaagttaagcattgtatatggtgatgaagttatcgattttgaggtgcttgaaagttctagtcgtactcaaaagatactcattaaagtctatgctgattgtcgggtagtggtctcaacaccgttaaatacagatgataaaattatcattgaagcggtaaagcagcgtagtcgttgggtctataaacaattacgagagttccgtgaacaaagcagatttattacgcctcgccaatataaaagtggtgaaagccacttttatttgggtaaacagtatcaattgaaagtgattcatgatgataccaagccaacaggtgtaaaacttctgaggggaagattggaggtaaacaccttagatacggatattgaaagtattaaatcttatttaaatgaatggtatagaacccgagcaaaagtcatattcgaagcacgtttgcaacatattctagaacaagctttatgggttgaaaattaccctgatattcgtttgatgaccatgcgaacacagtggggaaactgctccccatcaggtgtacttacgctcaatcctcatctagttaaagcgcctacaatctgcattgattatgtgattctgcatgaactttgtcatttggttgaacataatcatagtgagcgtttctaccaactattgaatcaagttatgcctgattgggcgaaaataaaaaatcaattagatatgatggcgaataagttaataaattga

SEQ ID NO: 54935 - DNA, 3282 bp, Acinetobacter baumannii
atgaactcttatttgcccaagtttcaagaagaatatagtgcaaaaattcctgctttagccttgttgactaacttgggctggtcattcttatccccatcacaggcactcgctgcccgtgatggaaaacaagaccaagtagtattacgccaaattttacgtcaagagctttctaaacgtacttttccatttgcgggcaaagaatatccactatcgccaaaatcagttgataacttaattgcagaaatctgtagtcctgctttgaatgaaggcctactgactgccaacgaaaaaatgtataaccacttattctatggcattcctgtcaccgaatttgtgaatggaaaaaaggttagccctacgattccattgattgattggcataacattcataacaacgaattttcatatactgaagaatttcctgttacacgctcaggcggtgtagatacacgtagacccgatatcatttgctttgtaaatggtatccctttagttgtgattgaagcaaaacgccccgatagtcaggcaaagaaaggtccaacgatcaatgaaggcatttctcagacgcttcgtaatcagcgacctgatgaaattccacatctgtttgcatatagccaactgctactctcactaaacggacatgaagggcgctacggcacatgtaatacccctgctaagttttgggcagcgtggcgagaagaagatatttctgatgcagagatgtatgcgcttaaaaataagaaattaactatttcacaaaaacagagcctattttcttatcgtccagtcgatgacttaacttggtatgaaaatttaatttcaggtggagacttagctgttacaggtcaagatcaactgctgatcagtctattaaagcctgaacgactactcgaaattgttcgcctatatacgctttttgataagaaagcaggaaaaattgttgctcgttatcagcaaatctttggtatcaaacgactcattgagcgtattagtactaaaaacttaaaaggtggtcgtgaaggtggtgtcatttggcatacaaccggctcaggtaagtcttttactatggtctttctcagtaaagcattgatcttgcatgaagctttaaaacaatgccgtatcttggttgtcactgaccgtgtcgatttagaagatcaacttagtaaaacctttgtatcaggtggtgaactggcaggaaaaaaagacaagcaaaatgccatggcgacttcaggcaaacgcttggctgaacaaattggcaagggtacagagcgaatcatgttctctttgattcagaagtttaactctgcaaccaaacttcctgaatgtgttaatacaagttcagacttcattgtcttgattgatgaagggcatcgaagccaaggtggtgaaaaccatgtgcgtatgaaacttgcactgccaaatgcggcattcgtggcatttacaggtacaccattgcttaaagatgaaaagacagttaacaagtttggtcctattgttcatgcgtatacgatgcaaagagcggtagaagataaaaccgtaacgcctttgctctatgaagaacgaattcctgatttagatgtcaatgaacgagcgattgatacgtggtttgaacggataacagaaggtttaaatgatcagcaaaaagcagatttaaaacgtaaatttgcgagaaaaggtgagatttatactgcggatgatcgtattcgcctgattgcgttagatattgccaatcactttgtgaaaaatattgatgatggtttaaaaggacagcttgcttgcgatagcaaggcttcagcgattaaatataaaaagtacttggatgaagcaggcttgtttgagtctgctgtggtgatgagcccacctgatagtcgtgaagggaatactgatgttgatgaatcaactaccccagaagtgactcaatggtggaaggagaatgtaggaactcaggatgagcaagcctatactaaacaagtaattgagcgttttgaaaaagatgattcgcttaaattgctgatagtggtggataagctcttaacaggttttgatgaacctaaaaatgctgttctttatattgataaaaatttaaaacagcacaatctgatccaagcaattgcgcgtgtaaaccgacttcatccaatgaaaaagtttggtttattgattgactatcgaggtattttaaaagaattagattccacaattcttgattaccaagatctcgctgctcgtacccaaggcggctatgatattaatgatcttacaggtttatatacgcaaatgagctctgaatacaaacgtttacctcgtttgtataaagcgctatgggcgatttttgatggtgtaaaaaataaaaatgatccagagcagttgcgccaagttttagtcccacgcattgaagaacgtgagggtgagttagtcgatattcacttaaaagttcgtgatgatttttatgaagcacttacagaatttgccagttgtttaaaagttgcattgcagtcagcaaccttctttgaagataaaagcttttctgatgcagatcgtcagcactacaaagaaacagtcaaactatttacaagcttgcgtcagattgtgaaacgagatgctggagagactattgactatgatcagtatgctgagcaagtcaaaaaacttcttgataaacatgttgtgggtattgaggtaaaagaccctgatggagtctatgaagtcggcaaaatgggcaaagtggcgcaacctgaagattggagtgaagagaaaacacgtaacgaaacggatatcatcaaaactcgtgtaacgaagatgattgagcagcaattgcgtgatgatccttatgctcaggaggctttctctaagctgttacgtcaagtaattgaggatgcagagaaagaattcgatcacccattgaagcaacacatgctgtttagagagtttgaagagcaactagaagctcgtcgtttagatgaaattcctgatgtgttcagtggtaataagcatgctcaagcttattatggtgtcttcaagaaactattacctgaagcattctcgataacagatcaacagaatcaagataagtggattgagcttgctttcgaggttgaccgttctgtcatgagctctgtagctgaaaactcaattaatccacaaaatattgaagcggatatccgtaaaaaactattacctcagatgttccgtgaatgtaaatccattgggagtggtatggatcaagccaaaaaaattgtggaaatgatcgtacaaattactcgggtcggtttgaatgggctctag

SEQ ID NO: 54936 - DNA, 1515 bp, Acinetobacter baumannii
atgaaagtaggattattctttggtgctggtgcagaaattagttatggccttccaagtggtggaaagtttgcaatcgatttatttcgaaaagatccaacaccttataaaaaagcattcagagcaaaattactaaaaattaattctcgtagtccttacgcaaatacatggttgccaaaaggctatgaaaagaagagtatttttgctttcggtaaaaatgaatttactagcatcatcgagtcatcaatccaatataaaagaaacgaaattatcagaaaattgaatgactttgataatgagtttacttgggcttgcagtcagctagaaattgaagaaggcttacttaaagataagttttctgatgaaatgggaaaggatgttggagaaactctatatgaccaagatatcaaaattaatgaaaagttaacgaatgatgtaaaactctttggaacggaatattactcagctgccttagaaattattcgttcaaaaccaaactgcgatgatttgagaagatatgtaatcgctttcttacaattattagttggtgcatatggtcaagactttgttcaaaatttgaatgaggagttgtttgaatctgcacctgatgacttgccaatttttgatgatatttttggtatgtttcgtttggagtttgaacgagttggttcgacagctctcgagctattgttgaatgaagaaagaacattcgacacaactgcaagtgctacagtaattgatttattttctgcgataactcagcaaattttagagaatatattttgtagcgttttggattatcaaaaattaatagatgatcattttagatatttattttcgccttcaacagagtgggctaaatttacacgaatggccatttttatggaaattgctcatgattatattattgagcaaaagccaacggatctacctgatgatggttactatcatgatgtaaaaagtttagtggattctggtgtagaggtgggagtggttggtacatctaattacaataacctatttaaggaaatatcagatgatttagatataccacctattgaagtatttcatttaaatggcagtacgaaggatttttataatccctataaaaacgaagttattcaggttgatgataaggacgcacatgagagtgagcaaattctagttccatttatgctaacccaaagtgggttgaagcctttaacctcggtagaaatgtcgagacgttatgtagagttatttgatgcttataaagatacggatgcgattatctcaataggtttcggttttaataaagatgatagccatattaatggattatttagagagcttgttgaaaagcataataaaaagctttttatcattacggtggatcctaaagagacagctagagaaattaagaaaaagcttcggctagatagtaatatggatagtgtaaaagtgattttggtagatcgaatgacaagggctacaaatgaaaatctgtggtttgacgaagtctttaaacaattaggataa

SEQ ID NO: 54937 - DNA, 1236 bp, Acinetobacter baumannii
atggagattaatttaaatattagggatcggttagggcaatcatttgatttagcgacgttagaagagattaaaactttttttgacgctgaaaaaaaatattggctggaacagaaaagcaatttagggaaaaatttatcatccccttttaactcttactcacaacaaattgagaattttttagttgcattagaaagttttgaagagttagtttcgcaaagtccccaacccaataatattcaacaacataaacaaaattttaatcatactaaagaccaatttctcagttggatgaatcagcattggctatacagaggtaattcgtgcactgaatcattattaaatgcatataggtattctgaagaatctggaatagcattttggaatgcgataacgaccaaagtaattacatttcagaatagtagaacttctttgccaacttttattggcaatataatggcttatgaatttttattacaagatcaaagtcaaatagttaaacgacgatatgctgagaaaaaagcattttctactctcagacatgatcttgaagaggaacgtaataaacaagtttctaattttgaagaatttcgaaaggactatttgacttggaataaaaactctcagagcgagttcaatgattggtttgctgagtgcagaaatcgttctgattcaaccattgcagatcattctaccttttttaatcaaatgacagatcatgcgataaatcgtcataaagagttagaagaactttatgttgaaaaactgagattggagaaaccagcaaaatactgggaagatcgggcaaagagcttaagatgtcagggaataatttggtcaataattcttgctgtagtattgggcggaggagttggatatttcacatatctgtttacacactggctcaatggacaagaaatgacagtttcattacatagccttcaaggcacagtacttttggctgtcattatttctgcatttgtgttcttgatcagaatgttgtctcgcttagcatttagttcatttcatcttcaacgtgatgccgaagagcgacaacaattgacatatgtctatttagcattaagtaatgaaactcatgctgatgaagagtcgagaaagattattttacaagccttatttagccgcgcagaaacaggattgcttgcttcggagtcaggacctactatgccaggattagatggggttgctggcttaattacaaaaactggaaaaaattaa

SEQ ID NO: 54938 - DNA, 1182 bp, Acinetobacter baumannii
atggtgcctaatggatggggtgaaaactctcttgctgatattgtaaaagaaaagatttcatacggaattgtacaagctggtcctcatatagagggtggtattccatatatcaagagttctgatgtgaagggaatcattattcctaaaacattgcaatgtacaagcgaggaaatacattataagtatcgtagatcagcagtccatcctggagatatagtattttcgcttcgagggaatatcggagagtctgctattgtgcctgaaactttaccagaggctaacctaactcaaggaactgctcgtatttcggtggggcataatcattgtaatctattttattattaccaactgcaatcagacagtctccttaatcgaattaatgctctgagcaagggtagtacttttaaagaaatttctcttgaagaattgagaaaagttaaagtattaagtcctccgtatacagagcaaaataagattgcccaaattctttctacttgggatcaagcgatttcagcaactgaaaaactgattgaaagtagccaaaagcagaaaaaagcgttgatgcagcagttgttaacgggtaaaaagcgtttgcttgatgagaatggtgtcaggtttgttggtgaatgggaaaaagtacatattaaggattgtgcagaatgtttagataataagagagtgccattaaactcagaacagcgttcattaatgtcaggtagcattccatattggggtgctaatggaatagttgattacatatctgattttatctttgatgaaacgatagtattactagcggaagatggaggatattttgatgaatatcaaacaagacctatttcaaatatttcatatggtaaatgttgggtaaacaatcatgctcacattctaagagcgaagaaaaatagcttgaatgaatggatttattattgtttggtacataaaaatattttggcatttgttaatggtggaacaagagcaaaactgaacaaaagtgacatgcttatgattcctttgcttttaccatcgctacaagagcagaagaaaatagtgtcattattatcactagccgatcaagaaattgaaaatttgcagaaaaaacttgattgcttaaagcaagagaaaaaatcactgatgcaacaacttttgacaggcaaaaaacgtgtcaaggtggtggcttga

SEQ ID NO: 54939 - DNA, 1524 bp, Acinetobacter baumannii
gtgagtcctcaaatcaaccaagatactgtcaataaagccctgtggtcagcatgtgatgtattccgtggcacggtgagtgcagatacctataaagactatattttgacaatgctgttcttaaagtacatctctgatgtatggcaagaccactacgacaattataaaaacgaatatggtgatgaacctgaactgattgaagaaatgatgaaaaacgagcgttttgtactgcctcgtgaatctaatttctataccttgcttgagcatcgttttgagcccgggaatggtgaacgtatagatatggctttacatgcacttgaagaagccaatggtacaaagcttaaagatgtaggcaaaagcgttttccaagatatctcatttaataccgataaattgggtgaagaaaagcaaaaaaatacgattctaaaagatcttttagaagtatttgctgtgcctgaattgaatttaaaaccaagccgtgtaggttcacttgatgtgattggtaacggttacgaatttttaattaaaaacttcgctgcgagtggtggtcaaaaggcaggtgaattctatacgccacctgaagtatcggacttaattgcggagttacttgatccacaaaaaggcgacagcatttgtgaccctgcctgtggttctggttcactgttgatgaagtgtggtcgtaaagttgtagcgaatcacgatagcaaagaatatgcactttatgggcaagaagcgattggttcaacttggtcattagccaagatgaacatgttcttgcatggtgaagataaccacaaaattgagtggggagataccattcgtaatccaaagttattggataaaaatggcgacttgatgttatttgatattgtgactgcaaacccgccattctcattagataaatggggttatgagcaagctgaaaatgataagtttgatcgtttccgtcgtggtttgccgccaaagaccaaaggtgattatgcctttatctctcacatgattgagacgctaaagcctgttacaggtcgtatgggtgttgtggttccacatggcgtgttattccgtggttcgtctgaagggaagattcgtgagaaactgattaacgaaaacttattagatgcggtgattggtttacctgagaagctgttctacggtacgggtattcctgctgcaattttaattttcaaaaagcaaaagtctgatgattcggttttgtttattgatgcaagccgtgagtttaagtcaggtaaaaatcaaaacaacttaacagaagagaatattgccaagattattgcaacctatcgtgctcgtgcaagcgtggataagtatgcttatttggcgactttgcaggaagtgaaagacaacgactacaacctgaatattcctcgatatgtggatacctttgaagaagaaacagagattgatttagttgctgtacgtgctgagcgtgagcagttaaagactcaacttgctgagcttgaagtgcaaatggcgaagtatttagaggagttgggttatggtgcctaa

SEQ ID NO: 54940 - DNA, 579 bp, Acinetobacter baumannii
atgcgactgaaagatagtgcatcaataagcgcaggctatccatttcgaggaaaaattcctgaagtacaagactcatcaattattgttgtacaaatgaaagatgcttctataaatacaggaattaaatgggatgaatgtctgaaaacagaactcacaggtaaaaaaaaacctgaatggctaaaccctacagatatcctcgtagctgctcgtggtaatcattactatgcagtacaagtaggtgaaagaggaagtaacgttcaggcaatcgctgcgccacatttttttgtagtgcgtatcaatcgatttgatgtattacccgagtatttgacatggctgctaaatcaaagtccttgtcaaaaatatttagagcaaaatgctgaaggctcaatgagtaaaagcattcggcgtagtgtattagaagaaactccaattgctataccacctttagttaaacaaaaagcgattgtagaaatggtacgagctttaaatcgagagcaaaaaattatagagcagttattaagaaatggtgagcaaatgatgtctctcattgctaatgatctcttgaatcaaacattttaa

SEQ ID NO: 54941 - DNA, 288 bp, Acinetobacter baumannii
atggaacagtatttcgaatgggatgaggcaaagaatcgaaagaatcagaaaaagcacgatgtctctttcgaaacagcaagccttgtttttgaagatccactgaggatctcaatccaggacagacataccgatggtgaagaacgttggcaaaccattggaaaagtaaaaggcgtactaatgctcttagtagctcacaccatctttgatgaagatgactgtgaaatcatacgaatcattagtgcaagacaagtaactaaggcggagcgagatagatatgagcatggttag

SEQ ID NO: 54942 - DNA, 951 bp, Acinetobacter baumannii
atgagtcttttttatgaaaactttagagattttgaagatgctggtaaagccattttagagtatttacataatcacttagtttttaatttatggatgattacttgtacagaaggtaatgattggatagttcttcaagctaaagacagtggatatggagtaaaagcaggacaagtttttaattgggctgattcatattgttctaagatggtactaggcaaagggccacgtatagcacatgattcaaaaaaaattccattatatgaagaggctggaattaataaggtagtggatataaatgcatatataggtcaacctttattgaatgaagatggctctgttttcggtacattatgtgctattgatccatcagtacagcctaaaagtatagaacaatatagtgatttattagaattatttagtttattactcagtcgaattttacagaacgaaattaaaataaatgaacaaaaaagaattagcgaaaaacttgaaatggagtcgctaacagatcacttaacaggagctttcaatcgtcgtgcttgggataaatttttagatttagaagaaagtcggtgtaaaatttacggacactcaacaacaattattgtcatagatttaaatgatttaaaatatataaatgataaatttggtcatttaaaaggtgatcagatgattcaagaaacagtccaaattatcaaaagaactgtgcgctctaatgatttagttgcacgtttaggaggagatgagtttggtattttaaatattgaaactaacttagaaaatactcaaaaactagcaaatcgaatttcagaatccttaaaacaggctggaattaatgctgctattggtgttgcagcacgtcaaccagggacggatttacaacaaacagtagttgaagcagataagcaaatgtatagacataaacgtcaaatcaaagatatgtctcaataa

SEQ ID NO: 54943 - DNA, 279 bp, Acinetobacter baumannii
ttggtatactttgacttaggtaacgatttccaagatttagccaatgccatttatcgagatgatagaaatgtcgatattggttatgattttattagaggcgctgatatcaactttgatattcatgaacagctctattcttattatttccttcttagatcaatacttaagggtatttttccaatacaaaatcttctgaattacgatgacattctaaatgttactactaagttagatctgcaagaaatgtcagacagttatgttaatattttacaagtttaa

SEQ ID NO: 54944 - DNA, 549 bp, Acinetobacter baumannii
atgatgaaagcactatctgttattgagttatcacaactttatgggatgaatcgacaaagtatttataagcgtataaataaaggagatttatcaaaaaatagtgatgggaaaatagatttatctgaagccatacgagtatttggcgaaccatctaataaaaataataatgtaactacgttacagtctactacggtacaaaaagatacagaagtagacatgctaaaacagcaagtagacatacttaaaaaacagctagaacttgcacatgagcgagaagttttccaaagagaacagctagaagcaaaagacaatcaaatagaagcaatacaacgactgctagaagccccaaagactaatatgactacgtttaccgatcagaaacctagccaagatatagtaactaatcctcggccagaatctgagccaaaacatgatgtattgactacgccggggcagactgaaaataagcggattccagtaccggagcacattgaacaggaaccggaaaaaagaggcttttggagccgtttttttagaccctatgattaa

SEQ ID NO: 54945 - DNA, 936 bp, Acinetobacter baumannii
atgcctaccagtgaattaatagtaaaagataacgctttaattaatgcgagttataatttagataccgtagaacaacggttaattctactggctatcttacaagcaagagaaacaagaacagggattgatgcaaacactaggctacggatccatgccagtgactatatgagcagatttaatgttaataagcatgccgcctacaaagccctaaaaacagcagttactaacctttttggtagacagtttagctatcaaacaattgatgaaaaaacaggaaaatcaaagaaagtaatttctcgatgggttcaaaatatttcttatattgatgatgctgcaaccttagaggttacttttacaatggatgtagtacccttaattacacgtttagaaaaacaatttacgagttatcagttaaaacaagttacccaattaacaggaaaatatgccatccgactctatgagttgcttatagcatggcgtgaagtcggtaagactcctatatttgaagtttctgactttcgttcgaagcttggcttaacttcagatgattacccaagactagatacatttaaacgacgtgtacttgaatcagcagtcaaacagataaatgaacatacagatatcatcgttaaagttgaacagcataaagaaggtcgctctatttctgggttctcttttagcttcaaacaaaaaagaaatccgaacaaagtaatagaacgcaagaaagatcccaatacattagatattttttccagaataacagatgctcaacgtcacctatttgctaacaagctttcagaattacctgaaatggggaaatactctcagggcactgaaagctatcaacagtttgcaataagaattgctgaaatgcttcaagatcctgctaagtttcaagaattacatccttatcttgaaaaagttggctatcgttaa

SEQ ID NO: 54946 - DNA, 1176 bp, Acinetobacter baumannii
atggccagctaccatttcagtgttaaaagcaaaaataaaggttatgccatgggccattacctctacattgcccgattgatgcaatacgaaaacgtccgcaaaaaaagtgatgaacttttagaatccgttgaacttggcaaatgcatgccgtcctgggtgaaagatccgattgagttttggcaagccgctgatacttatgagcgagcgaatgccaaagtctatatggagtatgaaattgccctccccaacgaattcacgccagaccagcgtaaaacgctcatagagacgtttttagacaaacatatagctccacagcaatatccgcattcatacgccatacacaacgttaaatcgcgtctcagtggcgaagaacagccccattgccacctcatgttctccctcaaagctgatgacggcattgaacgcacagccgaacaatacttcaaacgctacaatcctcaagatccggctaaaggcggtgccaaaaaaatccagctgcaggatggccacgcagactattccacattcttactgcacatccgcaaagcctgggaaaatcacctcaatgatgctttggccgagcactgccctactgtgacctaccagatcaacggccaagatatcaccatcaagaaccaagtatcagccgacaactatgagaaatacaatgagatccacggcaccttgtatctcccggaacccaaattaggtgctggaaaacagaatgaaactgtggaatacctggttgagatccagaaaattcggcagcacaatgccaacgagcgagaaatggaacaaaagcagcaggtactaaaacatgaacctttctattcatgcttgaatgagccctataactcactcgaagtcatgtattaccttaaccatttagccaaaaaggccaaaaacaaaaaagaactcgaacaagactttaacgaaattattaaaacacaaaagccaaaacttcaggatgagcactggaacctgagcagaatggataaccagcttcaaaactcactttgttacccagatccacaagttgatttcaagccattaataggcttaaaactacagatggaagcgaagccggttattcaagagaacaaagtatctgaaactattagaccatcgacacaaccaaaaccaaaaaataatgattatgattttggtggtccttaa

SEQ ID NO: 54947 - DNA, 762 bp, Acinetobacter baumannii
atgactcaggaaaaagcaaaaaagcgtggtagaccttctcaacttttacaaatggcagagttacatgctttcgttgagtttctattagagaaggatcctcgctcggaacttcaaaatcaggtcattgatgcactacaagctgaagattttaattttgaaatgttgtctgaagctcagcagattttggtgaaagaagcgctaaaaccatatcgggaacatttgaagcttcagttgttgtttgatgagctttctcaaaattttcagcacacagagtatgaagagaaattcatggagctgtaccaaggttataaacaggatgggctagatccagttgagatgaatattctgaaaatgatgtgtacgcgttatttgaattttaaagcacaaaagcttgaatatagtgacttagagctgtatttgggtcagattcagaagaagaatgctagtgaaaaacgtaaagctgaaaataaacggaagtttgaactcggaggtgctgttttagctgcatttaagaaacttaatcttgatattagcaaagagactcctgagcaaattaccaatcgaattgtgaataataaggtatttcatgatgaggtcaaaaaatctaaaattttttccgaggtgagtaagtataaaaaagaatattttgagaggaataaactctttattgacgtgcttgaaggcttgcatacctggaaaaaagagggaatgaccttaacccaaattgaaattgagaaagtactgcgtaaaaataatgaataa

SEQ ID NO: 54948 - DNA, 243 bp, Acinetobacter baumannii
atgaattacttcacccaacctcaattatttatttcagcgaaagcaaaaaaacttggattacagttgattcaggaactttatattcaacgtagtacccgcttggctttttatttagatgtgaatccttcttttgatggacatgaagctgttttattttggactgaacattatttagctgaatacccagatgcaaatttctcagatattcagcagcaatttatacaggctgtcccacaatcctaa

SEQ ID NO: 54949 - DNA, 246 bp, Acinetobacter baumannii
atgccttacgaagaattccatagacttatcggtaaagcaggtctttcaattaaagaatttgctgaactacttggaatgagacctaactcgattacgaattataataaagttggatttgtaccctctcatttggctgtgattgtatcgctcatatcaacgatgaaggatgaaggttttgatttttatccgatcttagaaaaagtacaggcgtatgagaaagcacgtatagaaagtcagtctaaatag

SEQ ID NO: 54950 - DNA, 699 bp, Acinetobacter baumannii
atggaaagaaatctaaatttagcaaattcaattttcgaaggctttaatgataaaaacggattaatgatttgtggctatgaatggggatggtcaaaagaagatcaaaaactggatgaaagcgatagccgtcccacagtagatatgagcattgaatgtacatttagtaataaatccctaaggtatggtccttcttccaatacttggccttatgataaaaatatcaaaaaatggtttaatttttggggacacccattaaacgatgaaaatttaggttcagactttgataaatgtattattcaaactaattgggcctatacgagtaatgcagatatagaaagctataatcgtttcttagaaaaagaagcagttgataattttattcatcatattgaagttttgagacccaaagtaattttatttatgggtagtaagcttattaattttctgagaaatatagatgtttgggataggtttactgctattgttggtccagaaatagaacccttaaaaatggtacaaaaaacagattttgatggtactcgatttaaagtttactttgataattttgaacaatgccaagttgtgtgcttaccacatccatctagtagtagaggtctatctgatgaatatatcaaattatttgaaccagaattaggaacaatcattactgaatataagaaacaaaagggtattctataa

SEQ ID NO: 54951 - DNA, 552 bp, Acinetobacter baumannii
atgaaaaaagtccatctcatccaagcagatataacagcttttgctgtacatgccatcgttaactcagcaaataaatctttgcttggtggtgggggacttgattatgtaattcataaaaaagctggaccattgatgaaagaagaatgtgttcgtctaaatcaagaaaaaggtggatgccctacaggtcaagcagaagtaacaacagcaggtaatctgcctgctaaataccttattcatgcggttggaccacgatggttagatggcgaacacaatgagccacaattgctttgtgatgcttatagtaatgcactattcaaagctaatgaaattcatgcactcactgtttcttttccatgtattagtacaggtgtttatggttttccacctcaaaaggctgctgaaattgcgattggcactatactctctatgttgcctcaatatgatcatgttgcagaagtattttttatctgccgagaggatgaaaattatttaatttataagaatcttttatcgaatatcgatgatccaaatattcagattctgatttcttag

SEQ ID NO: 54952 - DNA, 387 bp, Acinetobacter baumannii
atgagtttgattagctcaacattcgtcattgctgtgcatgatgagatcctattacaaactggcgtagggcgaataggctgtcatattgaaaagctagaaagcgtattaagccgtatagatcagcagatgtattacagtaatgtaagcgacatttttgagatcgcagcatggtttggtatagctatctcaaaaggtcatgcttttgttgatggtaataaaagaactggtttagctgtaatgctgacttatctcgaaattcaaggtgttaccattcaggaacaaacaggtttagatgatttgatggtcgatattgttgaatcacaagaagaacatgaattattagccaaaattgtggctgaattcttatacgagctttcgataatttaa

SEQ ID NO: 54953 - DNA, 180 bp, Acinetobacter baumannii
atgagaaagcgtttaaaagactatagccttgatcaaatttcaaatcgtgaaaaggtttcgggtcaagtattaccaatccaatttagcaatgacgaagcgactaaacgtgttgtgatgcatagtgcaaaacgagtcattaatcagcataaagctgaaatccaagagcttgcttataaatga

SEQ ID NO: 54954 - DNA, 312 bp, Acinetobacter baumannii
ttgcaaaagcaagttatcggcatagctcatccattcaatttaaatgatgcagattcaataggcttaattgatagtccatatacacatgtcgattattggaaaaatatgcaaagtgtatacccagaactacgtcattatgaatatgaacagattccaaggggtagggtagttttcgacgcaaataaagaaaaagcaatcgtgtatatggacaaaaaattatttaacacagtaacagccactaaaatttatgatttctttgatatagattcagaaaatgctattccaagaaaagatcctcactatcgtacttaa

SEQ ID NO: 54955 - DNA, 240 bp, Acinetobacter baumannii
ttgcttgctaagggaacggttcctgacgatcagctagatctctcagatatgcctgaaattaccgactggagcaatgctgtacgccataatcaattctatcgcccagtgaagcaacagacttccattcgtttagatgctgatgtacttgcatggtttaaagctcaaggcaaaggctatcaaacacgaatgaatgaaattttgcgggatgctatgctcaaagaattaaaaaatcatcagtaa

SEQ ID NO: 54956 - DNA, 1059 bp, Acinetobacter baumannii
atgaaagcagctcgtttttatgaccgaggggatattcgaattgaagatatccctgaaccgaaagtacttccaggcacagttggaattcaagttgcgtggtgtggtatttgcggtacagatttacatgaattcatggaaggtcctatttttattccaccttgtggtcacccacacccaatttcgggagaatctgcacctgtaacaatgggacatgaattttcaggcgtggtttatgcagttggagagggtgtagatgatatccaaattgggcaacatgtcgtagttgaaccctacatcattgctgacgatgtgccgactggccccaatgataagtatcatttatcaaaaaatatgaactttattggtttaggcggacgcggtggtggtctttctgaaaaaattgcagttcagcggcgttgggtacatcctatttcaaatgatattcctttagaccaagcagcattgatagaacctttatctgtcggtcatcatgcctatgtcagaagtggcgcaaaagctggcgatatcgcactggttggtggagcaggcccaataggcttacttttatctgctattttaaaggctaaaggtctcacggtcatcattactgaactgagtgcaaaacgtaaagaaaaagcgatagaagcgggtgttgccgattatgtactagacccatctaaggttgatgtagttgctgaggtaatgaaaattacagaagaccgcggtgtagatgtcgcttttgaatgtagtagtgtcaataaagtcatggatacactcgttgcagcaatgaaaccaactggtgtagtcgttatcgtttctatttggagccatcctgccacaattaatgtgcatagtgtggtgatgaaagagctagatattcgtggcacgattgcttatgtaaatgatcatcaggaaactatccgtttggttgagcaaggtaagattaatctagaaccttttattacccaacggattgcattagatgatcttgtttctaaaggctttgaaacattgattcataataatgagtctgctgtaaaaattattgttcatccgtag

SEQ ID NO: 54957 - DNA, 1620 bp, Acinetobacter baumannii
atgcaaaagaagaagcgcaccccattagacgcacaacagtcccatctttggattattggtggtggtatcgcaggtatggctgctgctgcatttgcaatccgtgatgccaaagtccctgccaaaaatatccatattttagaagaactcgatatttcaggtggttcgatggatggtggacatacaccgcatgccgcgcaagcttgggtaacacgtggtgggcgaatgctgaccgatgaaacttatttgtgcctatgggacttattttccagtattccatctttggaaaatccagacatttcggtgcgtgaagaatgtcgtgagtttaatgaaaaagtgaaaacccacgccaatgcacggttgattgatgccgaacatgtcattgcggatgcagcaaagcttggtctgaatacgctacaccgtgcacagatgctgcgcctattagcttcaaaagaagaaaaaattggcagtcgccgcattgatgagttttttgatgaaaccttttttgaaaccaatttctggcgcatgtggcgcacgactttcgcttttcaaaaatggcacagtgcagcagagttaagacgctatttcttgcgttttattcaagaattgccacgcattcataccttagcgggtgtgaaacgtaccaagtacaaccaatatgactcgatgattctgcccctacagcgttggttagtcgcacaaggcgtcgatgtgcgttttggacactatgtcacagatgcagacttcattaccaatgctgaaactcaagaacgctacgcttcacgcctatatgtacaattgcctgaaggctcagagcaaattaatctgaaagccaatgatttagctattttcactttaggctctattacagcagactcacgttatggcggtaatcatgacgtgcctgcccttattcgtcatcgagaagatcatggctggacgctttgggaaacgctggcacaaaaagccccagactttggccgtccaatgactttttatggcaatgtcgatgaacataagtgggagtctttcactctgaccatgaaagatgacgtgctacttaaacgtattattgactatacaggcaatgaaccaggcacaggcgcactcatgacttggtatgagtcgggttggcatttatccatcgtggttcctgcacagccacactttgccgacttacctgaaggtttatataccttatggggctacggtttccaaattgaccatataggcgattacatcaaaaaaccaatgtccgaagccacggggcaagaaatcctaacagaactgattaaacagctcggttttgacgacattttagatcatgttttggcaacgactgatgttactaccgccatgatgccatacgcctctgccctattcgcctgccgtaaaccgggggatcgtccacaggtaattccacaaggctcacaaaactttgctttccttggacagtttgtggaaattgaagatgacgtggtctttactgtggaatattcagttcgtggggcgatgcttgccatttatgaattttttggggtggaacgtgaaatccctgaaatttacaacggtctacttgatcccaaagtgggtttaaaagctttagaaacagtgttccactaa

SEQ ID NO: 54958 - DNA, 747 bp, Acinetobacter baumannii
atgaataccatgcttaaaacgctccagtttcgcacagaaacaacggaaacactttgccctacccatcatatacccctgatggaaatcgctggtcacaagctatgtaaattgtgtgccaaagaaaccgtccatcactcacatgcagcctatgcagatgagttgcaacagcgattgctacaacagaaaatcaaaaactcagggctcaataaacgttacctggatcgtggcttcaagaattatgtagttgcatgtcctgcacaagacaatgccatcaaactatgtcaggcttttgcacagcagattatttctgaccattatccaaacctactgctcattggtacaccgggtacaggaaagactcatctgagtgcgtcaatcattcgcaacattctgcataacagtacaaaatctgcacgctactataccagcgcagaaattgctcaaaaaatgatggatacctggtcagatgcttcacgctctgagaaagaagtcatcgaccatttctccagttttgatttattggtgattgatgaatatggcctgcatgaccggcatgaaaaacgcctggagatggtgcataaggtcttatatagccgttatgacaacatgaaatctactctgctgatttccaatttcacagtccaaaatatgcagcgagatttaggtgtccgattatggtcacgattacatgaaaacaatttgattgtagtaccgtgttattgggatgatagacgcatcaccggataa

SEQ ID NO: 54959 - DNA, 1209 bp, Acinetobacter baumannii
atgaaaattttttggtttataccgacacatggcgacagtcgttatttaggcacgagtaaaggggcaagaaccgttgaccatacctatatgaagcaaattgcagtggcagccgataaccttggctatgagggcgtgttgattccgacaggtcgctcatgtgaagacccttggttggtcgccgctagtctcattgatgcgaccactcgcttaaagtttttggtggcattacgccctggggtgacgacacccgcgcttgctgctcgcatgacaggcacctttgatcgattatcaaatggtcgattgctgcttaatctggtcacaggcggcgatgaacaagagcttaaaggcgatggcatctttgaagaccacgcgacgcgttatcagacagccagtgaatacaccacgatttggcgagagattttgactcgctcgcacacaggcgaatcctttactttcaacggtgaacgcttgcaagtagaagatgctaaattgctgtacccccctctacaacagccatatccgcccttgtggtttggcggttcatctgaggcggcgcaaacactggctgccgaacaagttgacagttatttgacgtggggtgagccgcctgccgccgtcaaagagaagattgagcagcttaaaaccaaagccgctgccaaaggtcgtacattaagctatggtattcgtctgcacgtgattgtgcgtgaaaccaatgaagccgcttggcaagccgctgatgaattattgagtcatgtgaatgacgacaccattgccgctgcccaagccaaatttgcccaaatggactcggtgggacaacaacgtatgacagccttgcatggcggtcgccgtgataacttagaaatttcgcccaacttatgggcagggattggactggtacgtggtggcgcaggcaccgcactggtgggcgacccacaaactgttgccgcgcgtattcaagagtatgccgatttgggcattgataactttattttttcaggctatccacacttagaagaggcgtatcggtttgctgaattggttttcccattattaccgatagacacccaaaacaccttggtcaagccaaatttgacaggaccgtttggtgagattgtcgctaataactatgcaccaccgcaacaaacccgtgacactgcaaccccaaaaacacataccactgctgcacctaaacacgccatcgcctcttaa

SEQ ID NO: 54960 - DNA, 570 bp, Acinetobacter baumannii
atgacaactgaaaacaatgaaaaactttctttattagacgatgtggcattaaaagcccaaatgctcatggcaaatctaaaagagggcgctaatgatggctatgaccattctgtcaccagtgccggtgaaaagggcttaaaatcaggcaaagtgtctgaactcaccgccatcgcccccttgaccaaagatggggcagctcgtatcaagcgaattttggaaattaccaaaggcaatcttgcaggggcgaccaatgtaggcaccttgcatgatttgcggttggtgtttttagacaatgatactaagctactgttttgtaccgcctatgatggcgattgggatgcttacatcaacgactttgctaccaaaattccagaactcatggatttgctttttggcaatgtagagggttggcctgggattaaaagcccgactgtcaagcaattcatccttgaccatcagattaccgctaccggttggtatgtaggtgtaccgcatctgacggttcgtgatattgcgcgtaatgacaaaatcgtgcgtggcattaataaagccattgaacaagcccaataa

SEQ ID NO: 54961 - DNA, 1590 bp, Acinetobacter baumannii
atgaataacgacaacccagcgaatgaaagcctacttggcaaattaaaaacccatctacaagatggtatcgagcatggcatagaggccgttaaagacaaacttgaacacagcgatacacccgctgaaaaacgcagtgtcaaagaacgggtacacgaagcgaaacaaaaaatcggcacgcagctgcacagcgtcatgacacgggcaacgaacgctatttatccgaatatcgctacgatggaacttgaggatattcaagccatcattttgcatgaccgccctgcgccttactacggcacgcttgtcgcgctaaaagtcaatgacagcaacgcgggtcgtgaattattaaaagcggtattaccaaacgtcaaaggctcaaaaaatttccaaaaagatatggatgccaatttgaccattgtgatgacgtataaggggctaaaagctttaggcttaccgcaaagctcgcttgattctttcccagaaaatttcaaaacaggtatggcaggtcgctccgatatcttgggtgacaaaggtgataatgaccctagcaactggcttgcgccatttggtgataaaggcgatattcatatttgcggcgcggtgattgccaatagccaagaaaaatggcaagccaaacttgccgaacttaaacaggcgtttgccccttatctagataccagccgtaacgccatcgaaatcttagtggaacatgattttggcacagatggtgacgtcaaaaacgtgtttggttatcgcgatggcatcagtaacccagaagttgatggcagtggtatcagccttgaaaataacaccgaacgtccgattgcggcgggtgaatttgtgttaggttataaaggtgaagcgggcgtggtacctcccatgccacagcctgaagtattgggaaaaaacggttcgtttatggtactgcgaaaataccgcagtaatgtcgctgactttcaccgctattgccttgaacaaagcgacaatgacccagctaaagccgataaattgggggcaaaaatgtttggtcgctggcgttcgggtgcccccatcaccctaagcccagaccatgatgatgaagccctcggcaaagacaatgtagcaaacaataaatttgactacacggacgatccctatggcaaaggctgcccgtttggtgcccatgctcgccgtatgaacccccgcaataccaaagactttattctaagcgatgtgcgtcttcaccgtatcatccgccgtagtgtatcgtatggcgatatcgtgccgcccaacgtgacccaagacgatggtcaagagcgggggttattttttatcggtatcaacgcccatgccatggacacgcttgagtttttgcaaagccaatggattaatgacggcaactttatgaaccttggggaagaacgtgacccaatgctaggcgtacacgcaggtagtgacgctgatagcgatgtgttcaccgtacccgatgagccaattcgtaagcgtcataccaatattttgcaatttaataccctacaaggcggtgaatatctttttgtaccgagcttgtcggcactcaaatggattagtgagcttaacgaaaattcatattag

SEQ ID NO: 54962 - DNA, 1155 bp, Acinetobacter baumannii
atgttaaataaattattcggtcgtcgttatgccaagtttgacccagccatcgaccagcttactagcgacgatgaaaaagccatcgaccaaatcaccgcagatattcgtgactatatcggcaaatcagacacggttagcaaaatcaattatcacacccgagatgcccacgctaaaggctactgtgcattaaaagccaactttgagattttaccaaaactgcccaaagaatatgcccaaggtatctatgccaaacccgctcgtcatgaagcagtgattcgtttttctaacggctcatctcgtgtggctgccgacaacaagttggggctttctcaagggttggcgattaaagtctttggtgtcaaaggcgacaaattactgccagatgagccagatagcccaaactttgactacaatctgattaattttcctattttcttttgtaatactatccaagactatagttatatttcacggctatttttacaattaaatgattattttgccaaaggcgcgaaagggcaagccaaatttgcctttgactggattacccaatatggcaaaaaactgccatccaaagaatccctcaagacttttagggcttttagtaagtttaaaaccatcaaaccgcaaaataccttgttatacagtttttactcacaaggggcggtgcgtcatggcgactatatggcgaaaatccgtgtcgccccgaccaaagcgtcacaagccaaaatcaaacgccgagatctcgatgtcaatgccaccagcgaggcgattcgtcctctgattttacaagaaatccgtgagcacgattatgagtttgatgtgcaaatccagctgtgccgtaacttaaaagaccaacccattaatgacttgaccaaagaatgggatgaaaaagacgccccgtttgtgacagtggcaaaactcaccatcccttgccaagatgtgccggatgacggtaattttgacattatggaacacttgtcatttaccccgtttcgctgtattgaagccaaccgtccgattggtaatttgcaacatgcgcgactgcgtgcctatcagaccgcctcgaccactcgccatcgtttaaatcataaaaaacgtgccgagccaatcaatctaaaacaggcatttgataaagatttttataacctttaa

SEQ ID NO: 54963 - DNA, 1836 bp, Acinetobacter baumannii
atgtcagagtcgaatcctcttgttaattttacccatatcacagtcgcaggcagtggtgttttgggctatcaaatcgccgtacaagcggcgtttcatggttttaaagtcgttgtgtatgatatcaatgacgaggtgctcaataaagccaaaaccaaatttgccaatatcgccaaacgtcatcaggatgatttaagtgaaacaagcgaacaagccaaacaggctgaacaaaacttgagctatacatcagatttaaccgccgccttaaaagacgccgacttgttgattgaagcggtgcccgaagatgtcgccatcaaaaaagatttttatcaaaaagcctcagcagccgcacccgaaaaaaccgtatttgtcagtaactcatctaccatgttgcccagtgatttggtcaaatttaccgaccgtcctgctaagtttttgatgatgcattttgccaatgagatttggaagcgcaatcttgccgaaattatgtcgcatgccgatactgaccctaatgtatttgatgcggtgaccgcgtttgccaaacaaatcggcatggtgcctattatcgtcaacaaagaaacctcgggctatgtactaaattcattactcaatccttggttaaatgcagggatgcagctgtatatccaaggcattgctgacattcaaaccatcgacaaaacttggatgcttggcacaggctcgccgatgggaccatttgctttttatgatatgctggggctgactaccccttacaatatttacaagcttgctgtggctaagggcaaacaacaagaccaagcggtcgtcgatatgctcaaaaaagattacattgagaaaaataaactgggcgtaccaacgggcgaaggattttatcaataccccaatcccgcctttaaaaatcctgattttttaaaaccacccaaagcggatttatccaaagtaccctataaaaatattaccgtggcaggcagtggcgtattgggcaaccaaattgcggtgcaatgtgcgtttcatgggtttaacgtgacgatttatgacattaacgatgacgcgattgctaaggcgaaaacccgctttaccgaccttgccaatcagcatcagcatgacctaggtgaaaccgatgcccaagtggcagcagccagcaacaatttggcttacaccacggacttgaatgaggcgttaaaagatgcagacctattgattgaagcggtgccagaaagcttagacatcaaaaaagatttttatagcaaagcctcagccgccgcccctgccaaaaccgtgtttgccagtaactcatcgacgttattgccaagcgtgttatcaacctttactaaccgtccagaaaaattcttgatgctgcattttgccaatcatatccatatccgtaatacggtggagttgatggcggccccaagttgcgacccacaagtctatgctgacgtcatcgaatttgccaaagccattgctatgctaccgatagcggtgaaaaaagaacaatcgggctatgtgcttgatagcttattgattccgttattggtagcggggttaaaactgtgggcaaacggcgttgccaacgccgcaaccattgataaaacgtggatgatagccacgggttcaccctttggaccgatggcgattttggataaaaatggcatgacaaccaactacaatatctttaatgaactggcaaaaacggacccttctttgcagcagcccgctgaaaagctcaaagcagaactggtcgataccaacaaattgggtgaagccacgggtgaagggttctatcaatatcctaacccagcttatttagcgaaagattttttaagcttaattcactaa

SEQ ID NO: 54964 - DNA, 294 bp, Acinetobacter baumannii
atgtgggtcattgccaattttaaagaaacccaaattgataaaatgaaaaacgggcaaaaagcgtggtttactgtcgatgccctaggcaaacaaaaatttacgggggtagtcaaaagcatctcccccgcaacagggtcagaatttagtgtcattaaaaccgacaatgccaccgggaattttaccaaagtggtacagcgcatttctgtacgcattgacatcgatggcaatcaaagtcgtctgaatgaattgatacccggcatgtcggtagtggcaacagtagatacgtcaagttag

SEQ ID NO: 54965 - DNA, 702 bp, Acinetobacter baumannii
ttgattaagcattttgctaagaaaaagtctccacttaagcttgcacctaaagaagagtggattagtaaagtattagcagtaaatcatttcaaatctaataggctcgaaactcgttttagtttaatggtggattgggcgctaaaggctggactacgtgctcacgagatttgtgctttaaacattgatcaaatccccactagagagagaatcgaaagaagtaagatagataaggaaaatctttatattgatttaattgtgacgaagggggggaagcgagattcaattcctgttaattctgatttattgaaaagaacccgagactatatagattttgaaagacaggaggttattaaaaaatttagacaaaaagcatctttagaaaaagaaatatacgatccagctaaagaaatatttctttccttaaaaactggtcaagcgcttcatccacgaacgctttcaaatcaaattaagtcagcttggcatcaggtcgtgaagagtggagagctcgcagaagaccaacatgtatggacacatggattaagacatcgttttgttaccaaccaatcaaaaggtttttcaaaagcagatcatattcgtaatcctcagcaagtcgtgaaattacttacgagacataagcatgaatctactctcgatatttacacagctcgtcttcatttagagggagagggtatcgatgagtaa

SEQ ID NO: 54966 - DNA, 2067 bp, Acinetobacter baumannii
atgagtaagttacaacgtagccctatttttctaaaaaaatctaaaagtgacccaattgtagattttccaaaagcagaaataaaaattggaaataaatactatgatcttagtggcttgagtacattagataatttttatgaaatagtttcgggaattaagtcgtatcttcagggcaggcgtagacctagccagcagttcctaatattaaaatattttttgatgattgtttctaaattttccacaaaaattgataagaaaacaatgaccttttataagaatcaattggatgctaatcctgatattactttatctactaagtggcaaaaatattcaatagcatgtaattttgttaactatttaatttcaaaaaatattattgatgattttattgttcccccaaattttgagaacgtagaaaacaagccaatactttcatttgctgatatagcgcggaattatatagagaatgatgataatttcgataaattagatattgaagagattagtaattttttttcgttagcttctttagaagctaagactttaagttattgcttaacttcaattgatttaatacctgctaaagctatcgaggatatacataaatgggagaaagattgggataaagtacaagaaattattgataatataaataaatttaacttggataaaataagtaaggtatatgattttaataaggattttcagattcctgagcgaacattaagtgaagctcttcaaatattatattccaaatttgggaacaatattccagcagtcaaatactggcctaaaggtatggaagacttctttcgttctataaattggaaaactagcagagttaaaaatttatttaagggtgctgaaaaatatactggagatttagaacttttaaataaagcaattagtaatctgtctttagctgaacagaataaatttaaggaagttaaagattattattttaattctgaagagagagacccacgaagtatcgagttagctctatcggttctttttgtacattatggacgtattctacctgattcaactcaatggccaaaaggtatagtggattaccttaaatatagagtatggacacctaatcgagttagagctgcatttttccctcatcctgatactttagctccttttatagtagggttgctgtctcattcagaattagctccaaatgttgattctgtagcattttattgttatctaaatagttttaaattaagtacaaacaaagagaaagttaacgtttatctaggaaaatttagaggaaacgctttatatagagatgtaaatgaatctgatccactaatttcttgttgtaggagtcatgctcaaagaatgttggatgttctaaagactttggatgatagagaggagattaaagttattttgactgaaaaaaatatccccctattcttacaatttactcctaataataataaatatattcgaacattagacccatcaactgtgactaatgttattaagagatttttagcagatttagcaactgaagcaccttcaatttttcctttagtacaagggaattgcacggggaaaaactttagaccaacgatagctttgattgaaagattaagtggaactagtctactttcaattcaaaaattattgaatcatgctcattctactactacggcaatttatactgaacgtgtccataccaattcaatcctatttaataaatcaaaagagttccagcgttacttagttgataacgctttaaatggagatagggagcataagaataaaacaaagaataaagaatttgatgagcctgctgatcagtggctcaactgtgaagcaaaaagaatatggtttaaagatcatgaagtaattgcagaatggattgcgtgggaacaggcaattctagaagctgaagatgagttaaaatttgacaatcttctaagatgggaaaattattggttaccaagattagtaaagtttcaaagcttaatagccatggtgctagaggtagataaaaaacatgctttggaattagctaagcaaattaaacttccaccactatcttaa

SEQ ID NO: 54967 - DNA, 1788 bp, Acinetobacter baumannii
atggaacagtctagagatcacattttttctataaaaaataataatgctgttgaaagggatgaagaactagtccaaagacatacaccctggttattaaataactatgaagatgatgtttggaagttaaaacctcatattcattcggatgataattcaaaatatacggttaattggaacatttttgatactaatcaatacattgggatttttaataggtgggattattggaaaagtgctgctaaggaattagcttattggataatgaatgcccctaccaataaatgtaagaccactacttccttagctaattttagtcgttctattcgagaattatatgagtggttatgttttgaaagaaaatgtttttctttatctgaagtaaaacaagaagatataacatcttttatagagtatattgcctcaaaaaatctgactgaaggtacagtcttgaataaattaattgtaatttcacatgcttatactcatcgagaatatttgagtgaatcttttacatttaatccatttaaatcaaaaaaagtaacagctttagctaaagcttattcaattgaaaatggtcatacgccgacattgtatcctcaagaaatatttggattactaaaccatgctttaaaattagtaaaagagtctaaaaatatattacatctttttgataaatatatggaaatgcattctgatacttctgtagctcatacatcattgaatgtacggtttcataagttaatgggggttaaaactagtgaagtacaaatgcaggtgcgtgccttatatggagcagcaataacaataatactaatcttacttgctgaaagaaaacatgaattgtctcttacaagagaggatgatgttatcaatatgctgaataatgatcttgatattcttgttggtttagaaatgaaaacagcaaaaacaatcacagggaaaaaaacagaaagagcagtcattcaagaagttaaagatgctttaaacgtgatcttagaattaactaaatacacaagagtaaagtctggattagaaactattttattaaaattgccttttggtcattctgcaaatggacaaggaaaaaagagtttctatctctcgacaaatggtttgtatgtggttttaagatattttgcagattctgcgaaatttaatagagttgagataagaccacatatgtttaggcgagcatattcgatgctgtggacttggaggtatgaaattggtgaccttgaagaattaagattaatgttaaaacataatagttcaaattttactcagaaatatactgatgatgaagaagtttgggaatttatggggaaaaatgagcaagatttagcttttgatttgttgaatagagcttttcaaaagaaaattgttgtagcaggaaaaatgggtaagactttggaaagatacagtcgcattattcaagcgaaatctaccttacttgatgttatgagtattgcggatcatatagatgaaatcataatagatactggtttacgtgtggtagctcatgctgatggattttgttttataaatcatacaagtttgcaaaatgctttatgtcgaactgaagggataggtttagatcctgttaaaagaaaagactcaatatgtatgaattgcccgaactttgctacagataattctcgtaaaccatattgggaaaaaagaattgaattacatcaagaagttgttgaattaagcaaaaatgtacagcttgttgagagttcaaaaatttttttaaaaaaagccgaaaaaatattagagagcatatcttaa

SEQ ID NO: 54968 - DNA, 606 bp, Acinetobacter baumannii
gtgaatagtaaggatagattccaaaaagcagtaagagaatcattgaaccaattagttgctaatggtgaaaaaaaaattactcacgctaaaattattgccaatgctaaatatgaagatgggtctccagtaggaaaaactacgttatatgcaaaaaatgctgttactaaagaacccatccatggaactttgatagatgagataaatacaaagattactaatctgccgaaaaatgacttcagtaaaaaaaagacatcaattgaaacaaataaagagcttaaattgaggatcacagagcttgaagagaaaaataatcaacttttgattcaaatggttgaaatagaaaatagttttgaaaatacagctcatcggaatgatgaaaatcaaatacaagatttagagttaaatttgtatatattagctttcttattgaattcaccacttttagggagagggcatccagagttgtataaaacaataaagagttttgaagcaaagcatcatggaaaaccgaaaatggagtttgcaaaacaacaaattcaaaaaatgaaaaatgagatagaatgttctaaagtcatttccatgaaaggaagttttaaggaagactga

SEQ ID NO: 54969 - DNA, 582 bp, Acinetobacter baumannii
atggctagaggttcggttaacaaggtcattctgattggcagcttaggaaaagaccctgagaccaaaagtttcccaaatggtggttcacttacacagttttcaatagctactagtgagtcttgggtagataaaaatactggtgagcgtaaagaacaaacggaatggcatcgtattgtgttgcacaaccgtttaggcgaaatcgctcagcaatttttacgtaaaggttctaaagtttacattgagggatcattgcgtacccgtcaatggacggatcaaaatggtcaagagcgttacactacagaaattcgtggcgaacaaatgcaaatgctagattcagctcgtcaacaaggtgagcaaggtcaaggtggtggtgaatttaatcaaccacgttttaacaacaatcaaggtggttataataataaccaaaaccaaggcggctacggcaaccaaggtggttatggtaataatcaaccggctcaaggcaatagctacggcaacaataacccgggtggttttgcgccgaaacaacagcctgcaccgacaccagcaccagcagacttagatgacgatctaccgttctag

SEQ ID NO: 54970 - DNA, 327 bp, Acinetobacter baumannii
ttggaacaaaggattaaaaataaagattttttaaaattagatgaaatcgaagctatagcaaatttagccagtttcagtcgtagtcgcttagatggaatggcctcaaataaaaagattataagttttccaaaaagtagtaacaaagagcgatctagaacaaaagtggttactactcaagattatatttctaaagaattaatttataggcgtttgactaactttgctgaatatattggatgttttcataaaaaatctccttcaacaggattattcgattttctacttttgagttcaattattttgaggggggattaccatagcaaataa

SEQ ID NO: 54971 - DNA, 252 bp, Acinetobacter baumannii
atgtttaaagggccgggtgagggtataaacattgtacctatggataaaaactttaatggttcaggtggtgagtggtatgcattagaacgtacttggaaaaaagcgttagaaagtaatcaaacggttaaagtaattattaagcctatatattcaggtaatagtagacgaccaacgtcattttctgtggaacaacagattaatggaattaattttaaaccacaaattctaaaaaatactgcaacaggaaaatag

SEQ ID NO: 54972 - DNA, 222 bp, Acinetobacter baumannii
atgaaagatcaggaaatatatcaaaaaattggtgagcttttatggtcaataatgccaaaggaagcaacagaaatatattttattggtgatatatattcagaacattattctggtggagcggaatggcttttgaaaaatggaaatatagagtcatttccatttggcgagcgtgcagatgaaattgaggaaaacattcgtgaattgatgggctttgttgcataa

SEQ ID NO: 54973 - DNA, 213 bp, Acinetobacter baumannii
atgtttgtagaaaaatggacaaactataaaatcactctaacagaagagggcaagtttaatgcagaatttgcttatatacctgaagaagatcattggccgactttatacatgcgaagagtaagtgaccttaaggaagaagagctagatcaatattatattcctgtagaagaatggaaaaaacgagttgcgttaagagaacagaataaattatag

SEQ ID NO: 54974 - DNA, 621 bp, Acinetobacter baumannii
atgtctaaaaagctattagctttatcaatggttgcttatattggcaccaaatcagttctagcaatgcctatgtcacgtggtgaatacaatgaataccaagggtggcaaattcctgaaaatgaaaatccaagtgatcaaggttatttaattgaatacaaagatggtggcaaagctaatcatccggatcataaaggatatatctcttggtcgccaaaagatgtatttgaacattcatatcaacctgattgtgttcaaaatgtcgtttttggaagtgaaattcataaagatgataacggcgttaccgtaagtcacaatgaaactgttaaaactcctgagggtgaacagttactggaaccaggtcatttttatgatgtgttagctggtgaaacactaactccaattcaatttcaacttggtccagttaacgaagtaggagttaatggcatcacgaatgaagcgttgcttgcgattgttttacatcgtttacgtgttctaaatgaaaagttcccttgccgtgaaaattcactcgcgattacgaatattgaacaaggtcaaatgtggcttgaacaacgcactcgaaatcgacaaaaacgtggtgtagaaggctacaacattgcataa

SEQ ID NO: 54975 - DNA, 1104 bp, Acinetobacter baumannii
atggcagcagatattaaaaaactatttgaagcactcacacaacaccaggcttatctatatcgtgcctcttcgcaatctgtaaatgagttgctaggtctattcagtgaagatacaaatgcaatgttatctaagcttcgagatctattggatgaacttaatgagtcggagaaaatagctttagccggtggtaaatatacaacttcaaacctcaaggaaattaaggatctgatagcccagtggtttgctggtgtgaatacaagtttgcctgaagcttttgttatctctgctacaactttggctgtttatgaagctaattatatggctaagttatacggcagtaagatcaaaaagcccgatggtgaaaagctttattctgcagctaaaaaagtgccacttaccggcggtgcgttagtggatgatttgctatctaaaattgctgaaagcgctcggcaaaaagttgaatatgcaattcgcgacggaatagttactggtaaaacgaatcaggaaattattcagcgtatacgtggtaccaaacggcttaattatgaggatggtattttaaatggtaccaagtctgatatagatcgtacggttagaacagtacgaagccatgttgccaatcaagcctatttaactagttataacaagataggctttgaatatgtccgatttgttagtgttttagatggtcgaacttctaagttatgcgcatctctggatggttcaatttgggaaataaatgatccagccaagcgagtaccgccgttgcatccgcattgccgaagcatcttagtgccagtggaaaaagacggagagttaagtggtcaacgtccatttgtaatggatgagcgacgagttaaagacattccaaaagatgagcgtagtcaattgattggaaaattggacgcaaataccaatttcaaagagttcttcaacaaaacagatgaatttttccagaaagaatggttagggccgaagcgttaccagctctacaaggaaggtaaatttgattttgataagttctttgatccagaagggcggttatatacattggaccaactacgaaagttggatgagcagacatttaaagagttgggattatga

SEQ ID NO: 54976 - DNA, 444 bp, Acinetobacter baumannii
ttggttgcagatacattagcacctgtccctatagcattcgaactttcagcaccagctttagccccattacccaacgcattcgcatttaaacctgctgcgtctgcacttttacctatagcagatgcattgaggccacttgcaacggcacttgtacctaacgcaagcgtatcctgtcttaatgctttagcgcctgtaccaattgcacttgcatcttgttcagatgcttttgcacccttacccatagcattcgcattaactcctgttgcttgcgcattggtaccaattgcgctggcattatcagctgcagcttttgcacgatcaccaatcgcattactgcttgtgcttgttgcttctgcacttttacccatcgcattggcattaccagcagtcgcttttgcattatcaccaattgcattggcgcttgttccacttgctgttgcatag

SEQ ID NO: 54977 - DNA, 771 bp, Acinetobacter baumannii
ttgagatacgcaccattattaaatgccgctaatccattaacattcaaagtaccgcctacagttgtatctcctgtagttgttaaagtacctgtaatattggtatttttaagagccgtcgtaccatttgctacagtcaaaccatttccaatcgatgctgagcctgtcgtcgtaacattgctgagtgttgtattgccaacgacatttaacgtgttattaagtgtcgttgcacctgttactcccagagtaccgcctactgtcgtatttcctgtagttgttaaagtacctgtaatattggtatttttaagagccgtcgtaccatttgctacagtcaaaccatttccaatcgatgctgagcctgtcgtcgtaacattgctgagtgtcgtattaccaacgacatttaacgtgttattaagtgtcgttgcacctgtaactcccagagtaccgcctactgtcgtatttcctgtagttgttaaagtacctgtaatgctggtgtttttaagagcggtcgcaccatctgctacagtcaaaccatttccaattgttgctgagcctgttgtagttaatgtacctgtcttaactgaaccgtccgtatttaaacctgctgtgcttaatgtcgtatttgtcccgactttaactgtactggtggttttatctaattcaacactgcctaccgtaactttattcagacttacgtcatccgttgttgcaactacaaaatctgtgccactaggtgtaactgtaatattatttcctgccaaaacatcagcataa

SEQ ID NO: 54978 - DNA, 135 bp, Acinetobacter baumannii
atgatttatgaaagaggtctaaaatatacatttttacaaattaaatgtgagttttgtacattttataacttagaatacgaggcactaatcacattatctttatttttatttttatttttatttttatttttataa

SEQ ID NO: 54979 - DNA, 270 bp, Acinetobacter baumannii
ttggctcaattaggggcgctttgcatttcaaatctttgtgcaacaaagccaatcggtagtgttcctgttgcatttgcacaggatgaaggagagctatgtccatttattgggcaggcttcattcaagacagcagaatcagaaattattttactcttaccgccttcatatcaatttagttctcaggactgtgtcactggacatttgtcaaatgcttttggccaacatgtttataaggcgaaaggtgatattgaaattataggcgtggtctaa

SEQ ID NO: 54980 - DNA, 1353 bp, Acinetobacter baumannii; identical to SEQ ID NO: 54252

SEQ ID NO: 54981 - DNA, 288 bp, Acinetobacter baumannii; identical to SEQ ID NO: 46657

SEQ ID NO: 54982 - DNA, 471 bp, Acinetobacter baumannii
gtgactggtgcagagtcaactagcacattaactatcaacttaagtcaagaattgaatagcctagctgtaagtacaggagcaaatgatacatttacgcttggaaatggctcggataccttgatttacaacacgttgactgctgctagtgtgaatagtccaacaggaggaaacacaactgcaggtggtgtagatacatggactgatttccatgtaggtaatacagcaactgataaccaagccgataagatcgatataagtaacctgttacttactcatccaaacagtttgactattggtcagtatgtctctgtaagctataacgcagcgacacaaaatgccaccattagtgtagaccgtgatggcttaggtacgacttacacaagcacacaattgttgacgattcatatagatgaaccaagaacatcattaacacttaatgatcttctcaacaatggtcaaattatctattaa

SEQ ID NO: 54983 - DNA, 4797 bp, Acinetobacter baumannii
gtgttggcagatggtccacatactgtgactgtgacagcaaccgacccggcagggaatgtatcgattccggcaactggtacggtaacgattagttcttctagtatcttggcctttgataacactgatcatgcagtccttagtccgcaaccatctcttgttggtaatgatgtaagtttaggcagtacttcttatttagtacttacatctgtagcaggcttagaccttcaacttggtggtaattcgttaggatttaccgtcgctgctggacacgaaggtgaggtcactttccaatatagtggtttaatcgatgcagctgtactttctgactacaagttagtagttcagaagttcaatacaacaacgaatcaatgggaatctatacatggtgatgctaattcatcattaattagcttgcacttgttaggcattggtacaggaaatgttcctggtgcagtccttgatggtttagatgcgggtcaataccgtgcattcttagcctacgatggcttgttaggattgggtgtgttaggttctctgtctgccactatggatgattatgatctgtctgtagcaggtggttatcaggttggtaacgctgaaggtaacgtgattactgatccggatccaacaacaggtcaagtcgatcaagtaacagcaactacttatgtttcgtcagtgaatggccatccgattgatgctaatggggaaacatttgcaggtacttacggaacaattactttctatcaagatggtagttacgtttatgtaccaaatgcagatggctctggtataggtcaaacagatgtattcacttatacgttaactgactcagcaactggagcaacaggtcaagctaatcttaatatcgtgtttgattcgattcgtgcagcggataaccttgttgaagttgaactcaacccacaatatcaattggtgggtacagagactgattcagcattctatggcgttctattgaatgtcggaaatattgttgacctacaactactcacagtagatacggttgactttactatcgctgctggtcaggaaggggttgcaacatttaacttcaatagcttgattggtgcatctgccttaggtaactacaatgttgtgttgcaaaaatacaatgatgtgacaggacaatgggaagcagtgaatggtacaggtgatcgttcattactgaacttgaccttactcggtaatacgccaactgcgcaaataggtgggcttacagagggtgaatatagagcgttcttgtcattcaatggtttggtaggtggagcagtagctgtcacattaaacggcagtgtagatgtctataaccctgcggttattactggttacaatgtagtggcagctcatggcaacctaatctctgatccaaatacaaatggtgctgttgatattgctacacctaacagcattatcagtgaagtcaatggggttacagttggtgcatctccaactgagattatcggtacccacggtactttactcatctatgcaaatggtgattatacctatacgccaaatgcggatagtgctggtttaggtcaagttgatcaatttacctataccttgttagacccagcttctaatacaacttcacaagctacgttctatgtacatctagatagtaaagttgtggatatgaactggaatgcagcagacccatcacaacctgctactgtaacgattacagcggtagatgatgctgtaaatgcggcaattgctgctgagcctcatctcatcgaagatgacagagcattgggtagcgcaacttatcttgcattgttatcgttggctggcatcaacctacaagctcctttaccattcgtgaatagtactgtgaacttcaatgtaggtgctggtgaaactggaactgcaacctttaaatacagcagtttaatcaatgaaggagcgcttggtgattaccaacttgtagtacagaaattcaatactgctacaaatcgttgggaatcaattactggtagcagtgaagcttctttactgaacctaagtgtattgggtataggtgtgaacgcaacaccaggagtggttgttgaaggacttgacgaaggtcaataccgtgcctttatgacatataacggtctatatggtaagagtatcctaggtacattgtctggtacgatggatgtttatgatccaaaccaaattgactttactggtttagcatctgaaggcaatgtcattactggccttggtgtaggcacacatgctgatgttgtaacgggattcacaattgttgattcagttactgtaaacggtgtgactacaaatattgatccaaacactggaacaattattcaaggtcaatacggtacgcttcaaatattcgcaaatggtgattacatctatacgccgaataatacgaatgcaaacctaggtctagtcgatcacttcacttatacattatctgatcctctgggtggcaatataagtgcaagtctagacttcactattggtaataacacgcctgtgattgcggtcgatgatcttgctgtcgcagtcattaatcctgaatatctgcaaattggtaacgatgttgcggtaggtagtactacatatctagcgttattgtcattgaccgataattttgacttccaggctggtggccaaagcgttaacttcactttaactaacgcaacattaaatgatgtaacgtttaactatagtgcgcttatcagtgcaagcttgttagccgattatgttcttgtagtacaaaaatttgataccgcaacgaatcaatgggtagctgtaaatggtactggagatgctaacttacttagtcttgcagcctttggtggaaattcagtgacattggaaggcctagctgctggtcaatatagagcttatatgacttatgctggtagtggtgttggagttagcttattaggtacattgtcagttcagaaagatgtatttgatgcgacaaatatcacaggctacagtacaaaagttgctgaaggtaatgttatccatgatgttggattaaatggacacgcagatactgcttctggttttagtacagtaacgagcgttgaatttaatggcatagcacatgcggttaatccgacaggtgtaacaaatattgttggtgaccatggtacattgtcaatctatgctaatggtaattacagctatcaaccaaatggtgaggctgcaagccttggtcaagttgatcagtttacttacaccttgtcagatggtctaaatacatcgcaagcgaccttgtatctccatattgatagcgacgctgtcgatatgacttggaatacaagtgatccatcacaacctgctgacatcacaattactcctgtagatgcaattgataatgtggcttctgctgctgtagatatcgttcctcaaggcgaccttggtgtagctgtaggttctgcaacctatttagcactgataggaattacagagaatttaaatgtacctgttttaggaactcctagtgttggttttactattgacgctggtcacgaagctgaagtgaccttctcatacagtgcagcactatcagtatcattattgaatgattataaagtggtattgcaacaaaaaggttcggatggttcttggtataacattaatggtggtacaagtacgggcttacttaatattggtttattaggaagcggtggtattggtgtaactgttccagatctaggccaaggtgaataccgagcatttatggtttacaccggtttaggagtaggtatcttaggtacaatgagtgtagtgaaagatgacttcaattacacagttgctcctacaaataacgctatcgttgcagatggtaacgtattgacgaatgatataacgaccttaactacacaggtttcaactgtaacctctgaagttgtaggtgctttaccacaaacagtaggaacagatactgttataaatggtgcatacggtacattggttatttctacaaatggtcactatacctacacaccaaatacaattgatacaagtgcaattggtaaagtggattcattcacttacacaattcgtgatgcattaacaggagcaacagatacagcgacattacatgttcaggttggttctccagatgtaaatatcacttgggacagtgctaaccctggtgcagatggcgtaattccgttacctgtagcaaatgctgataccaatcatgcaactattagtatgaaacaagtgactgatgcagttgctgatgtaccaagtggcacggtaactattggtaaccttacaggtttcccgccattacctgtattaagcaatacagtcacttcgaatcaattcgttattgctaataatacggtaagtgatgttcatgttgagttagactatacggcaacattaagcttgtcagctcttccaacaactggttataaaatccagcaattggttggtggaacatgggtagatactgtttactcgggttctgcgacagccttggcaggagttttaggtgcaccagcatactcagctgatgtatctcacttatctgctggtacttatcgagtggtatttagtttatctagtctgatttctttaggaactgtgactctagattctgcagtaactacaaaagctacacatctagatcaatacacacctgatgatcagtctgattggattcacggtaatatcttgttaggcgatacaactggtggagttgcagatacttcaactggctctcaactatatgttgaagttacaccaggtaattaccaaattgctgctggtcaggcgatcaatactggtgaaggtacgtag

SEQ ID NO: 54984 - DNA, 588 bp, Acinetobacter baumannii
atgcaaaaaatcaaagaactaataaaaccacaactagacggtctatttgttgatattcagaaattggtgaaaaagtcgcaagaaagacagccttctttacctgaagtattgacgcaagacatgcagcaaaaacttgatcagcagatcgccgaaaaatggcatgacattaaagatagtgttgattgtttgagtcaaaaattgagccgagatgaacaatctaaactgatgcaatttactgaagatgaatttaataaaagaagaaggcaattcaaccagaatgtagataaaaaatcatacagaattaggctaaatccacatactaaacggatcgtactgcctagaaaaattgagagtacggagtcacggttaaaacaagggcagttacatgcccaggtactcaacgctttgaaagcatattggaaagattcacttggatattgggatgaccctaaatatttgtggggggatttatgcttaagttttatatatatttcaggctgtgcagatgaacagcatctggttgctattcatcagcaattgcaggaggccgttgagcttggtacagatctgaattgttttcggttataa

SEQ ID NO: 54985 - DNA, 1014 bp, Acinetobacter baumannii
atgactaaaaagcttacaagaaggagaaaggtgtactacaaatcagtagttatgccatccgcaaaaaacaatctacaagagcttttgcaactagcattgcaagagggctccctagtttatttagctaaagatagacatcaacttattaacagctcatctaaagatttcattctgctaaaccatcatactacctataatgggatgctttttgggcaattagtttttgttgaatatgatgttaccaaaacttttctaacccttgatgagacgactcaagagtactcaatagaaccattcgatatggctaagattcaagggaaaactagtggaactaaaactgaagaccttaaaaatcaatttattaattcaatattgtattttggtgtctttgaaaaccacttagtcctaatgcaatctcctgctttaaaagcaaaccatttagaagattacttgaaatggcttctgtctaatgcagggttatttgacgcaacagaattcttaagtcttagcgataaagtaaatgaagaatctcagaagatcctgaaaaaaaatccagctaaaagccttcgtattggagccaatcttgatagcattcctgtttcacaagatgaatcttctggagcagttctaactgaagctaaatctgcctcatttaacgttataggcaatggtatggatataataaaaaccctaattggggctgataaacttgagggactaaaactaaaagacaatcttgattctgctaatctaaaaatgtatgtcgtcatgacatacaataataaaacaacagaaagcggacagaaagttatcgacactgttgcaaatgctttaaggaacatgccagacgatgattaccaaattgtacttaaaaatggtggtacaattaaggctggtgagttgcgtatatctaaagagttgacgcttgacacaatcaatggtgtgataaatgaaagtaatctttggtcacaaatgcacacatggttgatggggaatattagccctactacttaa

SEQ ID NO: 54986 - DNA, 516 bp, Acinetobacter baumannii
atgaatgtaaaatctattagatttattaatagttttcatactatatctcttagtgtgatggctataacctcattaagttattttgttatgcataaactgaattatgttgcaccacaaataaacccttggtggctggggctttctttttttgcacttggggtattaatccattcacttcactcactgaatgcttgtggtgaattgaaggaactctctagcagcgagtccgatagaataagttcttctattacgttaaggagtaaaatgataaggaattctattcttttttattttatttttgtctcagctttaggtgttttgatatggactggttttaatacaaatttagcactttctttattggtcgctttaatttctaccttactcttatctttgtggggtgcatttaatgattacattgagttctcggaatttaagcgtactatacaagcaagagcaaataagatcacagagcaagaaagaataagaaaaaaaataaaggaagcatcaaagtaa

SEQ ID NO: 54987 - DNA, 345 bp, Acinetobacter baumannii
atgaacagtgtgttactcgcttatgtattacttggatttgcaatagtttccgaagtgattggaagtagttttttagttaaatcggaagggtttacaaaactttttccaagcgtgatggtctttattttttttagcacggcattttatttattatcacaagttattaaaacaatccctttaggtatcacatacgctatatgggctggtgttgggattgttctaactgctgtagttagctactttgtttttaaacagacactagataatcctgctttaattggaattggttttatcgtatctggcgtaataattattaatttattttcgcaatcagcaggtcattaa

SEQ ID NO: 54988 - DNA, 558 bp, Acinetobacter baumannii
gtgaaagaaattcggcaacaaaagaagcaaccagaggttattcgaaagcgcatccttgaacaggcaactattcttgtttctcaaaagggtatttctggtgtttctattcaaaatattgctacagcagtaggtataacaaaagggggggtatttcaccatttcccgaataaaaaaaatttgatagaagaaatgttcaatcaaataattcttgatttagatcaaacagttgaatacttgattaaacgcgatcaaacagaatatggtaaattcacacgagcttatattcatagttcttttatccatcaaatagatggggtggtttctgcttggtcagcgttatcaatgactatgatcacagagcctacctttaataaaatttggatggaatggctaaaaaatagattatctcaacatgcagaaacggatagtcatcctgatttagagttacttcgtttagcagcagatgggttgtggctacaaagtattaccggagtcattgatgatgagcaatgttcaaaattagaagacgatctgcttaatcgaacctatttaacataa

SEQ ID NO: 54989 - DNA, 312 bp, Acinetobacter baumannii
atgaataaagccgatttaattgccaaattagcacctaaattaaatattaatcaagacgaagcaagagttgttcttaattctgttcttgaagtcattacagaagccctagttgaagaaaaaaatgtccgattagttgattttggtactttttcagtaaaacaacgtccagaaagaatgggacgcaatcctaaaactggagaaaaacttaaaattgaagctaaggaaatcgttacttttaaacaaggtaaggctttgggagagcaatttattgttaagccaaagcaaaaaagtaaagctaagaagaaagcctaa

SEQ ID NO: 54990 - DNA, 309 bp, Acinetobacter baumannii
atgatgaaattaaccaacctattagaagaacttcacggcacacaagctgaatacctcgatatcgtaaattatgaaattgcgagggaaaatatatgcggttatatcttcctattatcccgaatatcccaaaatgccgaacccaccgaaaaaatgcagatggaaagcaaaatagaggacttaatttactatcgggataatttgcagatcgaagataagaaaaatatccaaaaggtcttaaatgagctaattccagagtataaagccgaacaagaaaacaaagagctaagaaaaattaggctttcttcttag

SEQ ID NO: 54991 - DNA, 657 bp, Acinetobacter baumannii
atgttaaaaacaattaagttgtacggcattctagggcaaaagtttggtcgtgaatttaagctcgatgtcgcaaatacgcgtgaagccatgcgtgcattatctgttcagatcgctggctttgaacactttatgttgcatgcacatgagcagggcctacgctttgccgtgtttctaaaaggaaagaactcgagtaataagcgaggcaagaaacgtccagcaatttacgatcatgaaacaaagcgcttaatcactggtgacaatattggtgaagagcagctagacatgaatacttatacagacactattcatatcgtcccgcgtgtaatgggagctggtggtaatagtggagtcttacaattagttcttggagtagttctgattgttgcaggtgtgatgactggcggtacgtcttcagcttacggtgttgcattaattggcgctggtgcaggcatggctatgggaggtgttgcttctatgctcatgccgaaagcccaaactactcaaaatcaaaatcaagacgggaaccgggcaaactttggttttggtagtgcggttacaacagccgctcaaggttatccagtaccgattctctatggtagacgtgaagtcggcggcttcgttttaagtgctggtcaatatccagaagatcagatgtaa

SEQ ID NO: 54992 - DNA, 636 bp, Acinetobacter baumannii
ttgatcggtgccgactctggcagcattggaaagatttttgataccggtgatcaaaaagtttggaaccgcaatattatctggcaaggtcaggtttttgagccaatggcactcgaagtaagtggccttgaaatgagttcaactggtaaagcttcagcgccaactttaacaatggcaaataacattaacggcattcaacatgctgtttctgcttattgtctgcaatttaaagattttgcaggtgcaaagctaaaagttattactactttggctaaatatctagatgccgaaaacttcacagcaggcaatccttcagcatcgaatgagtctaaagaacaaacttggtttatagagcagaaaacatcggaaaatgcccagcaggttacttttgaactttcaaatccaattgattttgaaggtttgaaaattcctgtacgtcaaattacttcttattgtagttgggaatatcgcggggaagagtgtggttacactggggccgcaatgtttactgagaaagatgagcctacagacaatcctgctttagatcgttgctcgtacagattatctggttgtgaatgtcgatctggtaaaaacaagcctttaccttttggcgggtttccagcttcaagcatgttgtga

SEQ ID NO: 54993 - DNA, 180 bp, Acinetobacter baumannii
atgaaattctctgtccttaacaatgggttagttcgggctaaaggaaagaactttggtgaaaactctcaagtagattttaaagttcagtgtgatgggaaaaattgtcaaattgatgatatttacactcctgatagctataaaaaagaagtaatagcgattgtcaaaaataatcagtgttaa

SEQ ID NO: 54994 - DNA, 1110 bp, Acinetobacter baumannii
atgtcgaatatcactatccgtgaatatgcatatttaagagtttcacaaaatcctcctcagcagaatcagaaaatggattttgcagaaatttcacagagtggttttgattacctatttcaactgaatcaggaactgctcagaaatgggcagcgaattttaaagttaggtagaacagcatcggaaattcaagtacagaattttgttggagttattgaaaccccatgcggcactgaaattgagatcttaccaaaacatgctgattcagtagaggataatggtaatgctagggctatcttgattaaaatcttgaaacaggttttacagttgccacagcgtgatacaggtcttgcctcgattgaaaaattcaaagtacctctaacagactggttctatgcacaatttttagatgctttgcagaaactttatcgtacagggatacgatttgattatcagcgagtagaggctgaagaaaacttcttacgaggacagttagatacagcacaacaaatgcgaaaacctttaacaaggcaacatcaattaagtataaaacatgatatttttacgtcaaatcgggcagagaatcggttgattcggtcatgtattgatgtggtctgtaaaagagctaagactgctgatttgtggcgaacatcacatgagtttcatttactgttctcagaagtgcctcaatctacaaattatagggaagattttaaaaaatggaaaaatgatcgactaatgtcgcattattccgatataaggtattggtgtgaattgattttaggcaatgaaatcccatttgctgtaaaaggtattaatgatactaaatggaaacttattaatagcaataatattgaggaaaaatttgggataaaacaaagcgatatgtatcagatgtttgcctataatcatatgtatcagggccacacatcagatatcgtattaatctatccaaaacataaaaatttccagatagcactaaagccttttgagtttaaacttcatgacttattgaagactggactacaaccaaaaatttgggtaattccatttgatttagaacgtagtgaacttattttagataatttgatgatcgctggattacattcttaa

SEQ ID NO: 54995 - DNA, 1545 bp, Acinetobacter baumannii
ttgagtggaaataataattttacttattcccaagcatataagtatcttttaggaaaaaaggataaaaatattcccattcaggaatatggaaataaattagctgaacaatatttaaatgctaaccctaaaaagagtgctatggaggaatttagccagcatgactcaattacttcagatgataacgaaacaaaatgtgataaagattcgttgattagaccattaaatcgtattttatttggtgcagctggtactggtaaaacttaccatacaattaatcattcactcagtattttattgaataaaacttttgaagagttagatgaactttatccagatcgtactgagctaaaaaaaatatttgatcactataaagaaattggacaaattaaatttataacttttcaccaaagttttagttatgaagattttgttgagggtattcgagctgaggctaatgataaaggactaagttatgatgttaaacctggtttgtttaaagaactttgtgatgatgctcgaatggagtatgaagctaagcgctcaaatagtattcaaatagaagatgaaagtattaatcaagctattgaacgattaataaggaaagcaaaagagaaaaaacttgtttttcatactaaagcaggcaaagaaatacgagtttttgcaaatcagcaaggcactttatttgccttaactcaaaaagatatagatatcagtttgtcgttaagacatattcgtaattacttaaaattacagaatgaggaaattattgatcagaaaagttatgaatgggcgatagcaaaagctcttcgagctgaactaaaagctagtgtatctgcttatgcaaaacctaaaccttatgtattaattattgatgaaattaatagagggaatatttcccgtatttttggtgagttgattacccaaattgaagattctaaacgtcaaggtaatgatgaagagttaagtacaattttgccttactcaaaagaagaatttagtattcctaataatctttatattattgggacaatgaatagttcagaccgttctctaactgggctggatgttgcgttacgtcgacgttttgattttattgaaatgccaccaaaacctgagttgttaagagatcaggaagagaacgacatagagattgatggtattaatattgtgaaattactgactgtaataaatcaacgcatcgaaatactattagatagagaccactgtattggacatgccaatttcatgcctttaatagtagaaccagaaatccaaaaattagctaaaatttttcagcaaaaaatcattccacaattacaggaatatttctttgacgattgggaaaagattgatgcggttttaaatgggaatggaatgcttcataaaaagtatgagctaagttcgcaaaatagattatttaaagatcaaagcttgattaatcgtaatatttgggaaattaaggctgaagcattcagtgatgtgaagaagtatattgcaatttatgatgaaacatccgaagtcagaaatgagttaagtggattgtga

SEQ ID NO: 54996 - DNA, 201 bp, Acinetobacter baumannii
gtgatacacccattccgtgaaggtaatggacgtacacaacggattttctttgagcatctgattgctcattgtggttatggtattgattggtctcgcattgactctcaacaacaatggattcaagccaatattgaaggtttttatggtaatttaaatccattaattaagatttttgaaatatgctttattcaaaatacctaa

SEQ ID NO: 54997 - DNA, 387 bp, Acinetobacter baumannii
atgaggaaaaggaggtgttcaatgagcgcctacacagtgtcccggctggcccttgatgccggggtgagcgtgcatatcgtgcgcgactacctgctgcgcggattgctacggccggtcgcgtgcaccacgggcggctacggcttgttcgatgacaccgcgttgcaacggctgcgctttgtgcgggctgccttcgaagcgggtatcggcctggacgcactggcgcggctgtgccgggcgctggatgctgcggacggtgacggtgcgtctgcgcagcttgccgtgttgcggcaactcgtcgagcgtcggcgcgaggccctggccagcctcgaaatgcaactggccgccatgccaaccgaaccggcacagcacgcggagagtctgccatga

SEQ ID NO: 54998 - DNA, 1686 bp, Acinetobacter baumannii
atgaccacactgaaaatcaccgggatgacctgcgactcgtgcgcggctcacgtcaaggaagccttggagaaagtgcccggcgtgcaatcggcgctggtgtcctatccgaagggcacagcgcaactcgccattgaggcgggcacgtcatcggatgcgctgactaccgccgtggccggactgggctacgaggcaacgcttgccgatgcgccaccgacggacaaccgcgccggcctgctcgacaagatgcgcggctggataggggccgctgataagcccagtggcaacgaacgcccgttgcaggtcgtcgtcattggtagcggtggcgcggcaatggcggcagcactgaaggccgtcgagcaaggcgcgcacgtctcgctgatcgagcgcggcaccatcggcggcacctgcgtcaacgtcggctgcgtgccgtccaagatcatgattcgcgccgcccacatcgcccatttacgtcgggaaagtccgttcgacggcggtatcgcggcgactgtgcctgcgattgaccgcagcaaactactggcccagcagcaggcgcgcgtcgaagaactgcgccatgccaagtacgaaggcattctggacggcaacccggccatcaccgttgtacatggtgaggcgcgtttcaaggatgagcagagcctggtcgtccgtttaaacgatggtggcgagcgcgtggtagctttcgaccgctgcttagtcgccacgggtgccagcccggccgtgccgccgattccgggcctgaaagagtcaccctactggacttcgaccgaggccctggtcagcgacacccttcccgaacgcctagccgtgatcggctcgtcggtggtcgcgctggaactggcgcaagccttcgcccggctaggcagccaggtcacgatcctagctcgcaacacgctgttcttccgcgacgaccctgccatcggcgaggccgttacagccgcgttccgtgccgaagggatcaaggtattggaacacacgcaagccagccaggtcgcgcatgtggacggcgaattcgtgctgaccaccgggtacggtgaaatacgcgccgaccagctgctggtcgccactggcagggcaccgaacacgcgcagcctggcattggaagcggcgggagtcgctgccaatgcgcagggggccatcgtcatcgacaagggcatgcgcaccagtacgccacacatttatgcggctggcgactgcaccgaccagcctcagttcgtctatgtggcggcagcggccggcacccgtgctgcgatcaacatgactggcggcgatgcggccctggacctgaccgcaatgccggccgtggtattcaccgacccgcaggtcgccaccgtgggctacagcgaggcggaagcacatcacgacgggatcgagaccgacagtcgcaccttgaccttggacaacgtgccgcgtgcgcttgccaacttcgacacacgcggcttcatcaagctggtcatcgaggaaggtagcggacggctcatcggcgtgcaagcggtggccccggaagcgggtgaactgatccagacggcggtgctcgccattcgcaaccgtatgaccgtgcaggaactggccgaccaattgttcccctacctgaccatggtcgaagggctgaagctcgcggcgcagaccttcagcaaggacgtgaagcagctttcgtgctgcgccggatga

SEQ ID NO: 54999 - DNA, 426 bp, Acinetobacter baumannii
atgggactcatcacgcgcatcgctggcaaaaccggcgcgctcggcagcgtcgtttccgcgatgggctgcgccgcctgttttcctgccatcgccagctttggcgcggccatcggactgggcttcttgagccagtacgaggggctattcattggcatcctgctgccgatgttcgccggcatcacgttactcgccaatgctatcgcttggctcaatcatcgacagtggcgacgcacggcgctcggcacgataggcccgatcttggtgctggcagcggtgtttttaatgcgggcttacggctggcagagcggtggactgctctatgtcggcctggccttgatggttggggtgtcggtctgggatttcatctcgccagcacatcgccgctgcgggccggacagctgtgaattgccagaacaacgtggctga

SEQ ID NO: 55000 - DNA, 336 bp, Acinetobacter baumannii
gtgtcgctcccgagttcggttaacggatcagcgtttgaggctggacggatagcccgcgtcctcggtcgccttggtcaacttctggacgttggtcttggcatcgtcgaaggtgacgacggcctggcgcttgtcgaaacttacgtcggtcttgctcacgccctcaaccttggaaagcgcgtgcttgacagtgatcgggcaagaggcgcaggtcatgccaggcacggacagcgtgacggtctgagtggcggcgaacacgggggcaacgaaagcggcgagagcgagggaggcaaacagctttttcatgatgaactcctgattagtagaaaaatggcatga

SEQ ID NO: 55001 - DNA, 456 bp, Acinetobacter baumannii; identical to SEQ ID NO: 25798

SEQ ID NO: 55002 - DNA, 951 bp, Acinetobacter baumannii
atgaataatgctcaattaacggatttttttactaatcttgctcataaaccatactgtgcagatgagttactgtatggcttaaaaataagaccgaaaaaaacggcaatcaacatgcaatacatacagggcaatcagccttgtatgcttcattacttcttttttgacatagaccgttcagatgcagtcatggcatggcatgaagaaaatttaccagtgccttattggacagcacaaacacagaaaaacggtcatgctcatctctgttataaattagaaattcctttgtgtaccagtgagtttggcagtcaaaaatcaatagcctatgcttcaaaggtacaagcagcgcttgccaacaaacttggtgcagacgttggctatagtcatctcattacgaagaatccatttcataaagattggcgtgtcactttttggagtgaacaagcgtatacgctcgattatttagccgattttgtagagttaccaaagaaattaagcaaaaaacaggaagttttagggcttggtcgtaactgcaccttatttgagaatgctcgtaaatgggcatataaggctgttagagactactttcaccattatagtagtctagagtgggacaaagctgttttagcgcatctagaggcattaaatcgagaatttgaagtacctttgccatatagtgaagtaaaagctacagcaaagagtattgctaaatattgttggaataagttttcgtatgctggatttagtgagtggcagtctaagaatgccgaacgtgctaatgctaaaggggcttgttctttgggaggaaaagcacgctcacaacaattcaataatttaagacaacaagccttagatttgcatattgagggtgttaacaatactaaaattgctgaatatttaaatgtaagccgtaagacgattactcgttggcttaatcaggtagtaattcaatga

SEQ ID NO: 55003 - DNA, 222 bp, Acinetobacter baumannii
atgagcgagttagatttcttttgttattcactatatgttcaaaaagaacgtaaatataaatcgaactgggcatttgttatttttaaggttcgctatggtaaatggatatctaaaagtcttagagcacaagcaatagcaaagaatccaacaaaagaatatttagactggctatataactattttgaacaaaatttagatattgtgaaggcatataattcataa

SEQ ID NO: 55004 - DNA, 1917 bp, Acinetobacter baumannii
atgattgttcagttcttcaggtacggcaatggtttaagcaaagggccactagattatttgcttggtaaagaccgtgatagagactatgcaaaagttttgcagggtgatgtttccgaagtatcagggttaattgatacatcaccttttgccaaaaaatatacgtcaggttgtttgtctttttacgagcatgatttaagtgatcaagataaacagcagattatgcaaaattttgagcaagccttattccctggcatggatcagagccagtaccgtgttttgtggattgagcatcaagacaagaaaaacgaggagacggggaagcgaagattagagcttaattttctaattcccaatattgaaattcttacagggcaacgtttacagccatattttgaccgagctgatcgttctagagttgatctatttaagaagattacaaactatgaatatcaactgcatgatgcagatgacccgttgtatcaacaagacattaaacacgccaaaaacctacctaaagctgttaatgagattaaggaaactctcaatattttagctacgaaagctgtagagaatggattaattacagatcgtcaaagcatgaaaacgtggctattggatctcggtcttgaaatcagcagagaaacaaaaaaaagcctatctattaaaaatccaaataatgatgacccaaacgccagaccaattaagttaaaaggtgcaatctatgagcaggattttagacttacagaagaaagcgaacgacttactattgcagcatcagagcgatatagacgagaagctgaacagcgaaatcagtcaaatattcaaagatatgcggaatacagtgcgaagcgaagcacagagcttgagcagcagtatcgacagcaccaaaaccgatatacagcagaaacagagcgaagcaacgaacgagatattacagcagatcgaccagactacagctcaaaccaagaagcaacagcaacagggcatgacagccctattgcaagaacaacaacagcagatcaaacagctacaagcgaacttgcagcagttgaacggcttgagccaagaaacagcccaagcagccaaattaaagaaaacccttattacatcgaatatagccttgatttcactggcatgtataacgcttatcagcagtatttgtctggggtacgtcagcaagagcaaatacaacgacatcacagcaatggagaacaaagtcaattatttaagatcacagggcgggagcatgataacaacaacgtgcggggggaaactgtgcgtggagttagacccgacagtgaaagagaactacgcattggacaatggaacgagaccgcttggaatagtaaaggaggtacgttaaatgaatctcgaagcacagttattgcagattatcgagcagcaacagcagcagctcaaagagcaacagaagcagcaagagcaagcattgcagctcattcaggcacagaacagaaccatagacgaattagagaactacaacaacaaactggtgaagcactgcaaccagttgaacgagaaagaaaacgagctgatcaatatcatcaagaaactacagaatccgaagttatcagaggatttattgcaaggcttggagaacagcttaaaacagcgattacagagccatttagagcaattagtgactgggttaaatctaaagaacgagatcaacgaaatattgccaacgatgatctatacagaaatagagaagcagacagcaccattgacggaacagcttcaaaagaaactagactcagtgcaacagtatcacgaacgattcgaggttttgatcaagaaaatatcttcaaggctttagatgagttggacagacgtagagagttgcaaatagtgcaagaacgtaaaaatgatcgaggttatgattcaccaagtccattttaa

SEQ ID NO: 55005 - DNA, 240 bp, Acinetobacter baumannii
atggaactagctattaaaaagtggggcaatagtgctgctgtccgcctaccatccattttattagaaagccttaatcttaaattggatagccgtgttgaggtatttactcaagatgaagcgatcgttatcaagccaattaaatcaaaaatatctttagagcagcttttagcagatataacatctgataatttgcattgtgaagtggatactggacatgctgtaggtaaggaaatctattaa

SEQ ID NO: 55006 - DNA, 342 bp, Acinetobacter baumannii
atgcctcaaaattatgtaccagaagaaggcgatattatctggattaattttaatccacagagtgggcatgaacaggcaggacatagacctgccttagttttaagtccttcatcttataataaagccacaagcctactagtttgctgtccaatgacaacgcagataaaagggtatcctttcgaagttaaaattgtaggaaatcctgaaaatgtagcactatctgatcaagtaaaaagtttagattgggtcgctcgatcagcaacgaaaaagggacaagctaaatctgaagaacttgaggaagtgcgacaaaaaattgcagccttactgaaaatatcaacttga

SEQ ID NO: 55007 - DNA, 216 bp, Acinetobacter baumannii
atggacaattcaaaacgaccaatcaaccagattattgctcgcatcaatgatgctgcaaaacatggtgaagctttggtgttgactgctgaagaagtaaagattctttctaaagatattggcgacaaagtctttattcctgtgcttactaatgagcaggtcgtgcagttggtaaaagaaggaaagctaggtcagaaaattaataacataaaagattaa

SEQ ID NO: 55008 - DNA, 534 bp, Acinetobacter baumannii
gtgaacgcatttgttgatatgaaaaaatctgaatacgcattagttgcttactcaaacgtagcagctaaatctaaggagcgaaaagcattagaaaaagcagttaagaaatggctgaaacatcctggtaataaaattcgacacgttgagtctatagggcgtgatctcaatatgcctcacggcaccggacctatgtataagcgtttatgttgtcgttgcgaaacttgtgtcgaatgggcgctttcaactggtttaatcaaatctaagccaaaaccagttgtaaaacgtggtccagatgctcgccaattgcgtattttggcacagaaaagccaattgaccccctacgctacagcttttaatgaagattgggatttactggccttagaagtggattattcagttacggcatttcaacttgaacgtatttatcaaggtcgttctgaaattgatcacaactttgtttggaatcgagttaagcgtgtagctgatcgtttagttgctgaaaagttaagagctaaagggggtgggtgcaaatga

SEQ ID NO: 55009 - DNA, 765 bp, Acinetobacter baumannii
atgaacgcagtgcctcaaaaattggaatataaaatttcccatacaaaccagatctgtaagatccacaaagaacaaatgatcaatgtacatggtcgaatcgtttgtcagtcttgtgttgaaaaaatcatgaagcagtcaaatgaaaaatatgaaagcgataagaatattcgtattttaaatttgaaaatggctcgagctggtatccctaaaagacatgtaaatagcggctttagcaactatgcagtaactcacaaaggacaagacaaagctcgtaaaacttgtgaaaagttcactatggatttcaatgcaggtgtttttagaaatttactccttgttggtcgtactggaacaggtaaaacccatctaggttcatctattctgaaaaatatcatcattaaaaactgggaggctatttacattacgtctgcagacttagctgaagatattgcgggtgcctatcgccgtagcggtgatagcgaagatgaagcactaaaacgttatgtgggcaaagatttattaattattgacgaatatggcttacatgaccgtgctgaaaaacgtcctcacctgcttgagagtgttcataaggttctacttactcgttatgacgagatgaagccaacagtagtgatttcaaacctaagcctttctgaggttcgcgatgatcttggggaccggctttggtcaagatttcaacatgatggcttagatattgtggaatgtgattgggatgatgctcgtataggtggaggtaaagcacagtga

SEQ ID NO: 55010 - DNA, 1044 bp, Acinetobacter baumannii
atggcaagatctagaaatattaagccctcattctttatgaatgaagacattattgaattaccttatgaagcacgattgctatttatagggctttggactttagcagatcgcgaaggccgactcgaaaatcgacctaagaaaatcaaaatgtctttatttcctgcagacgatataaacgttgcagaacagttagagaacatttctaagtttggttttatcgagttatataacgctgatggtattgatgttatccatatcgttaactttgttaaacatcaaaacccacatggtcttgagaaagatagtgagctacctgacagaaatggcatctacactgtctatcaacgtaatccaaaaaacaaaacaattgttggaaaggcaattcagctaaataaagctgatttaaagcatttttacgataaaacaggtccatttgcccctcaaaatactggttctgctgttgaaaacagttatcaagaaagtgaatcgaatcaagcaaacagtagtggaaacacacaagaacagttagataacggttctaaaactgtttctatctcagaccaaaacgccctgattcctgatacctttaatctgaatcctgattcccttaatctgaatcctgattcactgaatccagaagggaataacaactccgccgttggcgaagttgattcatcgactcaagcaaaatttagtttcaagagtgctttgaaaaaaaatggtgtacctgagaaagacgctgctgagttcttacaagtacgtaaagccaagaaagctcaaaacaccgaaaacgcttttgacgcacttttgaatgaagcccaaaaagcaggaatcacacttcagcaagccgtcgaatattgtttgaaaagacaaaatccttggggtgccttcaaagcatcttggtacctaaacgaaaaacccgaaatgactactggtcaacagtcaaaccatcaatcgttaccacgcaacgtaaatgatcaatggggagcgccaaagaaatatgaaccggttgctcacacagctgtgaagggtgagttgatatga

SEQ ID NO: 55011 - DNA, 750 bp, Acinetobacter baumannii
atggcgggtcattctaaatgggccaatattaagcatcgtaaagctaaacaagatgcaagtcgcggtaaagtttttactaaatatattcgtgaaattgtgactgctgccagacttggtggtggagatgctgctagcaaccctcgccttcgtgctgttgtcgaaaaagcactttcagtcaacatgacacgtgacaccattaaccgtgcaatccaacgtggtgtgggtggtgaagataatgatgatttaaaagaagtaacttacgaaggttatggcgttggtggtgttgctgtccttattgaaacaatgacagataacctcaaccgtacagttccagatgtacgtcactgtttcagtaaaacaaatggtaacttaggaactgcgggttctgtatcttatctatttactaaacgtggtgaaattacttttgaagatgtttctttagaagacaaaatcatggaagtagctttagaagcaggtgcagaagatattgaagtttcagaagatgaaattttagtaattacttcaccagagacttttggtgaagttcaagatgctcttgctgccgcaggtttaaaatctgataatgcagaagttgtgatgagtccatcaacaaaagctgaaattacagatattgaccaagcaaaacaaattcttaaaatgattgatatgtttgaagatcttgatgatgtacaaaacgtttatacaaacgttgaattctcggaagaagttttagctcaattagatgcttaa

SEQ ID NO: 55012 - DNA, 147 bp, Acinetobacter baumannii
atgagtgaacatgatccccaatatccaaagcaagctttgcctgatccttactatggtggtgatgacggcttcgagcgtgtacttgaccaatgtgaatcgagtactctcgcatggattaatgttttgaaaaaacaattgaaagtttaa

SEQ ID NO: 55013 - DNA, 195 bp, Acinetobacter baumannii
atggcaaaaatttattttgaaaccgttaccggggaggttcaagaatttgacgtaacagatgatgaaaatccatgtagacacaaaaatattgaactcttcaattatgaatgcataggtcaggcaccaatttggatttgtacaaaatgtggcgaaaaatttaacgaaagccaattagaagaccttcaaaaagcatag

SEQ ID NO: 55014 - DNA, 399 bp, Acinetobacter baumannii
atggcaatgaatttagaggaagctagacttgccatagtagaccgtatggaagcttttaacggtatttctcaagacagaatccaatatccaaatgctccaggcttcatagtcccaattaaaggattatggtgccgattaaacattaaatgggggccaagttccattgcaggcttggcagattctccctgtactcgccgaactggtaatatcttgatccaatgctttacaaggttgaatactggagacaaggaaatatctctactatgtgttgcgttactttcccattttgaatatttcacattcgaacatttagaatgttttcaaggtcaatcgattgatgtaggtaaagatgctgactttcaacaatacaatgtgacaattggatttacggtgaactga

SEQ ID NO: 55015 - DNA, 171 bp, Acinetobacter baumannii
atgacttggtcagtttacaagatttatgacagcgttcaggtagtgcctgacgatgatcttaagccccattcattaatacattgtgaatgccatcccaaatatgaggatggcatttttattcatagctcatttgatggtagagaggccacagaaacgcctttgccaagttaa

SEQ ID NO: 55016 - DNA, 369 bp, Acinetobacter baumannii
atgggattacgtgaagagcttcaggctgatattgctgaagcatttaatgaagaccttgctgacgccgtacatccctttacatgtgaccgcgttgttagtacgaattggaatcctaaaacgaacacttcagaagacattgttgagcggtataaagggcgtggggttttgtttggttcatataatcaatatgagattttgacccttggagtattggccacagataaaaaagctactgtgctgcagaatgaagttaccaaagagccaaagattgatgatgaatggaacactgcgcaaggtacctttcgaatcatgcatattaaacaggacccaattggtgcaagctggaaatgtcagttgaggaaagtttaa

SEQ ID NO: 55017 - DNA, 279 bp, Acinetobacter baumannii
gtggtcctggcagacaaagcggccaaagcagctgaagaacaagtggtaagcatgcaagctgaatttgatgcatttaaaaacagcgttccagcaatgcaagctcgaatcgctgaaattgaagcgggtgattctgttttggcccaagaaaatgaaacagcaaccaatgattatgaaaattggtccaatgatcaattaaaagagtttttagctagtaaaaacattggctataaaccatcggcaactaaagcagaacttcttaaattaatcccgaaggaataa

SEQ ID NO: 55018 - DNA, 1647 bp, Acinetobacter baumannii
gtgacatcgacagatatattaggtaatacatctattctgagtgcaacaggcataattacacaagacaaggatggaaaaaaatctgcatcattaagtaatacgggtttatttgtagctgaaatgaatgcaactggaaataccttgagcagcagtagtcttgaagcaggtaaattgactgtaaaaggcactaacacactggtgctagattcagtgaaaggtacattgactggtttgagtaataagacacttggaagtggtgattttgcatctcaaggccgcgcagcgactgaagagcagctgaaccgggcgcaaagtaatgtcgcatctattttaggcggtaatgcagccaataacggtggcctgctcagcatgtcgaatattggtggtactggtgaaagtactattgatgatgcaatcaaatcagtcaatcaagtggctaataatgccaataaaggctggaatgttagcaccaatggcggtacagcaaacaatgtgaagccaaacgatactgttgatttcagtaataaagatggcaatgtcacagtttcaaatcagggcaataacattactgtcgatttaaacaaagatattgatttgggtgcagctggtagtgtaacgaccggagacaccaaaattgataataatggtttaacgattgcgggtggtccaagcgtaaccaaaaatggtatcgatgcgggcaaacaaaaagtgaccaatgttgctgacggtaaaattactgccgattctcaagatgctgtgaatggtggtcaaattcacgacatgatgggtgctggtgcttatgacaccaatggaaatctcagtaatattggtggtacaggtcaaagcaatattaacgatgctattgcagcagtaaacaaaaccgcagttcaatctaaatcgactgtgactgaaggcagcaatatcaaagttgtgagcaattcaaatgcagatggcagtactaattatacggtgtcaacagctgatgatattacgctgaacagtgttacagcgaaggatattaatgcaggtactgtaacgactgataaggtggttgctggcaataccactgttgatagcagtggcttgagcattaaaaatggtccatctgtgaccgcttccggtattgatgcaggcagtaaagtagtgagtaatgtcagcaatggcgtgcaaaacagcgatgctgtgaatatggggcagttgtctcaatacctaggcggcggtgctggctataacaacatcacgcaaagttttgatgcgccaaattatcaagtcaatggtggttcttataacaatgtcggtgatgcattaggtgcgctaaatcaggccgatcaggcattgggtaaccgtattacaaatttgggtgatcagttacaacaagcattctactcaacaaatcaacgtattgatgatgttgagaaaaaagccaatgcaggtattgctgcggcaatggcattagaaaatgcaccgtacattccaggtaaatacacttatgcggcaggtgctgcctatcatggcggtgaaaatgcaattggtttgactttacgtaaaactgcggataacggtcgctggtcattgactggtggtgttgctgccggttcatcaggtgatccaagtgtacgtgttggtatcagtggtgtaattgattaa

SEQ ID NO: 55019 - DNA, 816 bp, Acinetobacter baumannii
atgaaaactttattaaaaacaattgtaagctgtgtatttttaactggtgtgttgagtggtctaacacatgcaaaagagcagattaatttacagatggctgatgagtccgtttcttttccagaagtgaaaaaaagttacctagatcaagttcaccgttatgaatatgatcaggtactgcgtctggaaaatggcttaaccaaagaccaaattcgttatattttgggccatccacattttagcgaaggcgtgtttggggttcgtgaatggaactatgtattggatatccgtgtgcctgaaacccagcaatacaaacgctgccagttacgtatcgactttgataaagactacttggccaaggcatattattggaagggtgaagcctgtcagggcttggcgcaatatggtgccaacaatcaacctgtagataaaaatgcattggttgttggaggactgaatgcccaagttgcacaagctagcgtactattcgcctttgaccgttatgatgagtctgcgattaaccgtgactttagccgcgtggaagaaattgcagaggccattaagcagtccggcagccagcgggttactgtgacgggttatgccgataaattgggtaactttaactataaccaggttttatctgcacagcgtgcgaataccgtggcttatttgctagctcaactggggattgatccgaattacattaaagtcgatgccaatggaacaacccgaatttataaagagtgtgaaggtcaaaccaaatctacttcaactgtggaatgtttagcaccaaatcgccgagtaaatgttaattggtaa

SEQ ID NO: 55020 - DNA, 771 bp, Acinetobacter baumannii
atgaaatcaaagccaatcattccatggcaaggtggtaagactcgtttagctaaggatttgttgtgtagattccctgaacattcgtgctatgtggagttgttttgtggtggagctgccttattttttttaagagaggatcaagctaagacagatgtcattaatgatttaaacggtgaacttgttaatttatatcgagttgtacaaaatcatttagaagaatttattcgtcaatttaagtggtgtatttcgagtagacaggtctttgagtgggaaaagctgaaggtgccggatactcttacagatattcagcgtgcagcaaggttttattatcttcagcaacatgcatttggaggtcgagtttcaggtcaaacctttggctatgcaactactagccgtccattaaatcttttaaggattgaagagtatttaagtgctgctcatctacgtttgaatggtgtttttattgaaaaccttagctgggatatatgttttgataagtatgatcgagaacatactttcttttacgcagatccgccttatcttgatactgctggctatggaatagattttccaattgaacagtataaattgctttctgaaaagatgaagaacagcaaaggcaaggtaatgctttccattaacgatcatgaaaaaattcgggaaatctttaagggatttaattttgcagttacatcaattaaatactcagttgggcgtgatttggctactaagagtaaaaaaagtaatgaactcatcattatgaattattaa

SEQ ID NO: 55021 - DNA, 231 bp, Acinetobacter baumannii
atgtacatttgtattggcggtgatttagacggtgaagttgtaaatggccgtgaaggtacatattttaaagccagcgaaattgatccaagcaaacaatcaacttacaacagacaaagctatgttgtagaagggaatacttatcggttttggctttgtgcggaaataccttatgtagaagctactaaaattgctaacaattatctaagcgaaaaatacccatatctttcttaa

SEQ ID NO: 55022 - DNA, 279 bp, Acinetobacter baumannii
atgttgtttaaaagtgaatcaagatatgagttgcagtttattaatgatagtcattttgaaatttactgttcagactgtaatgatacttggggagtaaaaagacaactcgaaaaagttgaatttgtaaaagatatcgctttagttgaggtgttggatgggaaatacttggaaaaaattacaggtatatcatctagccagcaggatttgatgtcatgcttagatgagtggtttgatctgcttaatagtaaggaaatcaatatctataaagattttggataa

SEQ ID NO: 55023 - DNA, 189 bp, Acinetobacter baumannii
atgcctgagtttcaaaaaaacataaatgagattagacagctcgaaacagagcttaatcatttgggaagctgtactaccaagggcctcacagaacaacagatcgctcacttagatgagcgattttttttggccgtagctaaacagcaaaaattgattgcaagattcaataataagccagagggcttctaa

SEQ ID NO: 55024 - DNA, 429 bp, Acinetobacter baumannii
atggacgataaagaatacttttggcttacaagaaaaaaagagcccaaaactaaacccaaaagtagaccgctgcctaaggctaaagaaaaatatctcgaggctgaagaaactttatttcaagaactagaagagcatcgaattggctatcgaagaaaatttcaatttgaatcaactaaaaattggcggtttgatttttatattgtgaagttgaatcttcttatagaaattgctggcagtccttgggcagttggtcggggtggcacaaagatagcaaattcatttaataagtatgatctagctctagatcgaggttatgaatttgagcgtcttgaacctcatcaaattgaatcaggttatgcaattaactggattaaaagcgaattagcgagaattgaagatggaacagataagaccattcccaccaactga

SEQ ID NO: 55025 - DNA, 1026 bp, Acinetobacter baumannii
atgattcaatttaaaaacatttcaaagcactatcagctcaaaagccaaaccatacgcgcactcgatcaaatcaatttagagattccagagggcagtattttcggcattattggctatagtggtgcaggtaaaagtactttaattcgcctgattaatttactcgaacgaccaaatgaaggtcagattattattaatcaaaaggacttcactgctttagatgcacgttcattacgtcaggagcgtgcaaatattggtatgatttttcagcatttcaatttgcttcaaaccaaaacagttgctgaaaatatcgaaatgccaatgcgcctgctaaattataaaaaagcagaacgtgaaaagcgtttaaatgaattattagagtttattgatcttaagcataaaaaagatgcctatccagatgaactctctggcggtcaaaagcaacgtgttggtattgcgcgtgctttagcaaaccatcctaaaattttattatgtgatgaagccacatctgcactagatccgcaaactactcaatcagttctagagcttttaaagaaaatcaatcaagaacagaaaatcacaattgttatggttactcatgaaatggatgtcattgaatctatttgtgaccatgttgcagttatggaagctggtaaagtgattgagcaaggctcaactattgatatttttagtaatcctcagcatccaacaactaaaaactttatacaaactgttttacatcagcagttaccagttaacattctaaatcaattagaaaatcagcatcaccacagcatctattgcctacaattcttaggacgttcggctcaagaacctgtaattcagtcacttattaaacaatatgatattagtttaaatatcttatttgccaatatgactgaaattaatggcacagtgattggtcaaatgtttgtacagcttttaggtgacccgcagttgatcagtcaagcgattgagtttttagagaaaaatgaagtgagcgtagttcaatcaggagatcaagtatga

SEQ ID NO: 55026 - DNA, 1164 bp, Acinetobacter baumannii
atgcgtgctcttacctatcatggtgctcgggatgtacgagttgaatccgttccagatccagtgattcaggaaccagatgacgtcattttaagggtgacagcgactgccatctgtggctcagatctgcacctataccggggtaaaattccggccactgaagatggagatattttcggccatgaatttatgggaattgtagaagaagtcggccctgaagtcacagaagtcaaaaaaggcgaccgggtaattattcctttcgtgattgcatgtggtcactgttttttctgtgaacatgaactaatggctgcctgtgaaaataccaataccggccgtggtgcaattctcaataaaaaacagattccaccaggggcagctttatttggctttagccatctgtatggtggtataccgggtggtcaggctgaatatgtacggattcccaagggcaatatcggaccatttaaagtgccaggttccctgcctgatgaaaaagtattattcctgactgatattctgccaaccgcctggcaagcagtgaaaaatgcccaagttggtcgaggttccagtgtggcgatttatggtgctggcccagtcggtctgctggctgctgcctgtgcgcggatgctcggtgccgagcagatttttatggtcgatcaccatccttatcgtctgagtttcgcacatcaaacctatggggtgattccggtcaattttgatgaagtcgatgccgctgaatttatcattcaaaataccacgggttatcgtggagtcgatgccgtcattgatgcggtcggttttgaagccaaaggcagcatgctggaaactgtaatgactaacctgaaattagaaggttcgagtggttcagcgttaagacaatgtattgcagcggtccgccgcggcggtgtggtgagtgtacctggagtttatgccggtccaattcacggcttcctgtttggtgatgcctttgacaaaggtttaacctttaaaatgggacaaactcatgtgcataattacttgccgcagttgctagaacatatcgaaaatggagatctgtctccagatctgattattacccatcgcatgaaactggaagatgctgcggaaggttaccgtatttttgataaaaaagaagaagactgtcgtaaagtaattctgacgccataa

SEQ ID NO: 55027 - DNA, 207 bp, Acinetobacter baumannii
  misc_feature (192)..(201): n is a, c, g, or t
atgaaaaaagtagcagtgattttatcgggttgtggttatttagatggttctgagattagagaatccgttttaaccctgttagctttagatacagcaaatattgaatatcaaatttttgcgcccgacgagcctttgtttcatgtcattgaccatgtaagcggcgaaataaacatggctgagcggagaaatgtnnnnnnnnnngcttga

SEQ ID NO: 55028 - DNA, 582 bp, Acinetobacter baumannii
atgcatgcttcaatgggagatgggctttactttgatacttcagaactcgttgaagatgacagtgaagcaagttgggaaaatactcgacctttagagcttcaatatcatattgaacaattattaaagccagaaaattatatagactttaataacttgcctaaaaaacttagctatagtgatgaagatcaagcaactctgctacagatcaatgctgaacccgaaaaaattttagatgatgttattcaagtaaagttagtcaatagtcaaactgaaactcaaaaatttgcagcttgcctcaatggatattttagttgtgatttgaacccttttgaatcttttagcttgattgagcatttaaatcaaaactatggcttagagtatgtgggtttaggggcaagcttattattctttatgaaaacaccaaaatttgatgtaaataaaacgcctcaattacttaatgagttgagcagcttttatcaattcaatcaaacaacgcatcactcgctagaacaacatttatctcatcatgaatatcttattttgccttatgtagagtcattagaagtgttcgatttggattaa

SEQ ID NO: 55029 - DNA, 1320 bp, Acinetobacter baumannii
atgacgacatatgtaaacaagccttattctataacatacgaacactttaaaattattgaaaataaagttgtaaggtgtaagggtttggatttttttaattattatcgtgatcttcaagctgagttaagcaactatccttggctagaaatgatagtttcactcacaattttgattttatttgctgcgttggcaaactttattgctaagcgaattattgttaggggaatccgtcatttagtgactaaaatcaagtcacttaatcaatctgtttttgctcagcatagtgttattaagcgatttgccaatattgtgccagccattgtgattatgaatggtattaccaccgttccacacttatctgaaaaagccattgctttggtacagatgggcgcacaggcatttattttcctgactattgcactcactattagtgaattattaaatatatttaacttaatctatcagcgtaatccaaagtctagaaataagccgattaaaggttatttacaactcgttaaactcatcatttttgttgtttgtggtttgatgattttaggtaccttccttaaaaaggatgtatttaccttactggctggcttcggtgcgatggcagccgtattaatgctggtattccaaaataccattttgtcattggtcgcgagtgtacaaattgcttcttatgacatggtacgtataggagactggattgaaatgccatcgttaaatgccgatggtgatgtgattgatatttcattgcatactgtcacagtccagaactttgataaaacctataccaccattccaaccaataaactcgtaacggacacttttaaaaactggcgtggtatgagtaatgccggttgtcgccgtatgaagcgttctctttatattgatcaaactagcgttcacttcatgactgaagaagagcagcaaaaacttaaagattttctattattagatcagtatctcaatgccaagcaatctgaaattgaagaattcaataagcatctaggaagtcagtcacgttataacaaaagacgtttaaccaatattgggacattcagagcatatgttgaattctatttacgtcagcataagggcattgctcaaaaccaaactcttattgttcgtcaattacaaccaacgagtgaaggtctacctttagaaatttatgcttttaccaatactacggcgtgggtttcttatgaagcaattcagtctgatatatttgatcatctcatcgcgatattgccagagtttggcttaagagtgtatcaagcgccttcaggccatgattttcaaaaactaacagtagaataa

SEQ ID NO: 55030 - DNA, 2895 bp, Acinetobacter baumannii
  misc_feature (397)..(406): n is a, c, g, or t
atgtatacagtagataaagaatctattgtttcatttgatccaaatataaaatcgtgtacagcaggttataatctactttcagggcaaataaattatagtaaaaatttaatttccggagcacttccttacaatcttcattaccggaaagcgacacgtttgcaaacaatagatcaagaaaactcaataggagtggactcatggtcagataattatgatggttttgtgaatgttttttatggtacttatcgtgctaaatatggttatattacgattacaaactatgtaataaaattaccgaatgataaccaccgttattattttaaatatggtcctacgagttttaaagaaactggttatcctgaaccatttcttcaagaaaataatcgtgctttatatnnnnnnnnnngactatatacttcttcagaacccgaagcctctagtttacctggtggtgggtatgttagtggaaatgcttctacagattttggtgaaattaaattctcaattgcatctaactcaatgactgttactcgtgcaggggtggtttatagcgcgacagtttctaagtctatcaataatgaaattttatttaggttcaataaaattacttatccaaatggaaatactattaatttaagttatgataatcaacttaatttagtacaggtaactgataataaaaataataagctttctctagttcgaaatggctcacaagttagctcagtaagttttacaggcggaacacaagcggatagtcagaaatatgatttaacttattcctctatacaggcaggaggaataagttatcctcagctaactcaagttaagaatgctaaaaatggcaggaaagaagactatacttatgatgctgctttatcattatctcattatgagacagcgttagataataatgttagtaatccagaaactgcagcccagcgaccaatattaaaatcagtttcagataactctaatcaagttagacagacctggaaagttgattatccaagtgtggttgtaacaacaagtggaatttataaaacgatcactgctgtaaaagttattttacaatcatatctcggggagagcacaggaactaaggcacttgatacgacaacaacttacgatgatattcaaaattctagtaaaatttctatgcttttttctccagatggaaatcaatctgcaaatacagtaattaatacaacacatcctgattataaaaaaacaattattgatgtatcaggttttccatgtctaacaacaggagacaatcgaccaattaagtctattgtttacgcaccaagcgaaatccatccaacacaaattactgaccaaaatggtaatattactgcgtatgcttttgatacgttaaatcgtattctacaagtggttgaagcatcaggtacaactattagtagaacgacaaattatgtctatggagtattatccaatggacttgaaaacttattcaatatccctacaacaattaaaacctcaaatttcacaataacaaatgaaatcaatgaaaaaggtcagatagtcaaacaaactgaatcttctactcaagtgcaaagtacgtctaaagttacaacatataattattttacggatattactaaaccaaataatggtcttttaagtagtaaggatggtccacgttcaggtactttagataaaataagttatacatatgataattatgggaatttagcatccgtttctacgactattaatggtactgaaaggactgaacaatatgttggatataattcatttggagatcccgaacgtattgtttatccaaacgggatggttgagaaatatacttataatgacgatggtactataagtagtgttgtaacaggaagtggctcaactgcagggactattacgggaaaaacagttacttttagctatgattcacttggtcaactagtaggtagcttgaatgaagatggagaaaagacaagctattactatgataatttaggccgcattattaaaacaatttattctgatggaagtattagcacaaaaaattattttaataacaatattatcagtagtgatgaggtaaaagatagttctgctattacagtttttaaaggtttgtatcggactttagatttaagtgggcggataaataaaattcaaatcggaactgattctacatcaaattggaaaacattaggttatgacggaaatggtaatgttatacaaacaaaaacagcgcaaggaatcattgaaagctggacttatgatgcattaaatcgacctattagtcatattgatggatcaggtaataccgatactaaaacttatgatgctttagataatccaattactgtacttgatgcattatcctctggaactaatccttatctctatcggaatggtaatgtcttggctcaagagactaataaagattttggcattaaaagttatagttataacgaggctgatcaattagttcagagtatatacggtaatcgcaaatgtagtttctcgaatatagatgaaattgggcggaataagactattcagtgtcaaagtaatagttctagtacacctgatatgcttacttatgatgatacttatacatttgattcaagtcgttatagtcgattagataaaatagtctctaataagccttatggagttgatatcagttatgtctatgacttatatgatcgcattattgggaagagtcaatctaataaagctttaactgcatttggatctagtgcaaatactttatcgaatacctatgcatggagtattggtaataagatcacagggataactttaccttctggtcgtaagcttacttataattatgacaacacatcgaaaggccaaattacaggtttaactgtaagcgtccgctga

SEQ ID NO: 55031 - DNA, 222 bp, Acinetobacter baumannii
atggagactaaatacgattggtcggaagcacctgaagaagttcaattcattgcacaagattcaaatggggatatttttggttttgatgttacacctgtgccaatgacttacggtaagtggctgccttcaaatgaataccttcacttctttggcaataaaccaagaaaaacaatttcagattgggagttgtcattagaacaacgtccagtagaaaagaattag

SEQ ID NO: 55032 - DNA, 342 bp, Acinetobacter baumannii
atgagcaaccgtaaatttacatggtgccaagatttagatggtaattcaggaactaatgactttaatactttgtcttctaaatttggcgatggttatgaacaaacaatatcgatcggcataaacaacaaagcaggtacttggcaatacacccgaacagcaaaagaaagtgaaatccgtgaaattaaaacattcttagatgagcataaaggtgccgattctttcctttggaatgcacccttggagggcgaagtaagagtgaaagccggatcatatcagccgcgcgcaatgggtggtggtatttggcaaatttcaacaacgttcacacaagtatttgaaccttaa

SEQ ID NO: 55033 - DNA, 1494 bp, Acinetobacter baumannii
atgccaactgaggcagatcaacttgaagcaattaacaaagttgctgaagctcagaaagctattgatgatatgcagaaagaagttaattcgaattatctcactatcccgcaaaagttagcgcaggaacacaaggatcgtactgaaaaagcaataatagcctttggtgggactgataagttaaaagaggtattagctcaagaagatgcgttatataaagcccaaattgcaaaatttacatctgatacaaaggatcagtacaatcagtactttgcttttgaaacagatcgaatcaagcaaattgaacaaaactatgatcgtcaaaaagagctaattgatacagatgccgaatatcaatatggtaagtcaaaggaagctttggaaattaaagctggtcttgaacgtcaaaaacaagttgaaattgccgccgttaagcgcgaagaagatgcacaaattcaatcggcatttgagggttatcttaaccagactgaaattgtggtgaaacgttaccaacgtgaacgcgaagagatacttcaaacttatagcttaagtaaacgtgtacgtgaagagattgctaaatctaaagattacgcaatttttggagcgttaaaccaagcctctgacaatgtctttcagtctgggcaaatatcaagacaatcattgttggaacggcaagatcctattaatgctcaaaaatgggctttacaaaatcaatattcaactgattttggtggattaaatcagtcatatgacgaccagatatctggtattaaactgattgaaaatgagaatgagcgaaatgcacaactcttggctgcacgtgagcagtttttgaaagctaaagctgacttggataaaaagtatgctcaagatgaaatggatctaaacagatcactttatgactcacaactaagccaattgagcagcttaaccagccaactttctggctactggtctaatatgacgggtattgtcaaagatgcagcaggtgagcagtctggaatctataaggcaatgtatcttgcccaacaatcatttgcgattgcttctgcgaccattaacgctttccaagcttataaccaaattcttgcaagtccatggtatttggatgttgtcagtaaagagacagcagcaagtatagttttaggtatgggtatggcaaatgtcgggatgattgcaggtcaaacaattgctggtatggctcacaatggtatcgatagtgttcctaaggaaggaacatggctgcttgatggcggtgagcgtgtacttaatcctcaacaaaataaggatttaacgaattacttaaataatcgtcaaagcggttctggtgagggggacgtacagattagccaacagattacttttgctgacggctccgcaaatgttagtactcaagggaaaaagcaaattgctgaatctctaaatattgcaatgaatgaatgggctagacgtgagagcaaacagggtggtgtgctttttaatcttgtgaagcgataa

SEQ ID NO: 55034 - DNA, 384 bp, Acinetobacter baumannii; identical to SEQ ID NO: 49258

SEQ ID NO: 55035 - DNA, 1752 bp, Acinetobacter baumannii
gtgttagccggatgcttacgtttaactttagatggcaatgctttgttgagtaatattggttatgacgcaagtggacaaatgacaggctggacatggggaagtaatgctggaagttacacatggacttatagttcagcaaaagatggtgtcattaatcaaattagtaataaaaacagtggaggggctgttacttatagccttaattatagttttgatcgtgataaccgtattataagtattaagcggaataataacttaaatgataattttagttatgatcaggaaggacgtttattgacagaaagtcgaagtaatgatgcaagctctatctacgctattacctatacttatgataaaaatggcaatcgtttaagtttacgagcgtccggcactcatttacagcctgctgcaaatgtggattatgcctatacaggtaataaacttaccacattaacaaaaaatggaacagctcagccacttaattatactgcaaatgcagaattatatatgggtgaaatcttaccgagttacgattatgcagggcgacgtcgaggtgaagggacatcaacaactattaatcgttatatgagttataacgctaataatgaaagaacactaagtggaagtacaagtgcatggagtaatacggcagttcaattcatctacgatgaaaaaagtcatttgattggtgaatatacagctactggaattccacttgtagaatatatttggttaggagataaaccagttgcagcagtttacgagagtggagcaactaccaagatttattatattgtaacggatgtacaaaataccccgcgtcgactaattgatagcaatggtagtgttgtatggagttgggacagtacagcttttggcctaggtagtcctgtaagtacgataacatttaatttacgttttcctggacagtactatgatgcaactacagggcagttttataaccataatcgtttttataaccctgaacttggtcgatacatggaaccagatccgattggtcttgcaggtggattaaatccatacatatacgcattaaataatcctgtgatgtatgtagatatgactggtgaaaacccaatattaattgcaatgggtgtgagcgcagcaacagcaggtgcattttatacaggagaagtattttttaatgcagtatatgacgcatataaaaatgaccaaagtatattagatagtttttctaaatcattttcaattaaagagttaggtcaacaaatggttataggtgcagcatttggtggagttggtaaagctgcttttttagctgctgatgtacatataattagtaaagctgcacctactatcattccagcgggaacatcggttctgaaacggtgggggttaaaaggtttaaatgcaattaacaatatggctaaaactagtaaaattaataaaataagagaagtaactactcctgctggattggttctcacaggaaatataattgcaggtaaaacaacaacaaacttgatattaaatgatattaatgaacggagttctgctcgtagacaagggggtggtgaagttggtaatagtggtattaatcaaggctctgattatttaggttttaaaagttatcaacctaatggttatgtagcaggatattcagagatgtatattaacggtgtatataatggtaggttatggactatttactttgattcaggtgatactgttcaatatggttgttatcttaagtgcgcattgccattgtaa

SEQ ID NO: 55036 - DNA, 306 bp, Acinetobacter baumannii
atgtctattatatttttttgtatttttttcacagctttattgatatttggatatttggctgttaaatcaaaatggaagattaagaatttagcatttgtgtgttttgtaagtgtgtttttatttgtttttagtgtttttctattaatacttcatatagatggtagatatgttcaattttttatagatgggaagttttctttaaattcacgtgcaatagacctattttttgttgcaggtatgtcttcttttttagctacattattacttgttattgtagtgtgggctgtgcgtaataaagtattctag

SEQ ID NO: 55037 - DNA, 822 bp, Acinetobacter baumannii; identical to SEQ ID NO: 54274

SEQ ID NO: 55038 - DNA, 477 bp, Acinetobacter baumannii
atgggtggtaatacttcttctggtactcaaggtggtctaggtggagtattaggttcggtattaggccaagtgactggaaataacaatacacctcaagctggtggcggtgtacaaagtttattagttgctgtagtacctttaatcttaggctgggttcaacaacaaggtggtttacaggctgctttagaaaagttaaaaggtgcaggtttaggtagtcaagttcaaagttgggttgatccaaatcaaagtaatagtgaagttccaactcagcaactgcaaagcttatttaaccctgcagatgttgaacaagttgcccaacagactcaagcgccaaaagagcaagtttacggggcgatcgcgtctgtgttacctcaggttattgattctttaacaccacagggtgaaagtacagatcatcaagaagcgaatcaagacattcaaaacgtgatgaatcttgtgagcagtttcttaaaataa

SEQ ID NO: 55039 - DNA, 1512 bp, Acinetobacter baumannii
atgaatgaatcaaactttcaattttttagggagcttcctgaaattgggcaattagaaaaactgagtgataatgaaatttttggatttttgaaacgttactatacggatagctatcggcattcaattactcaaaataggaaaattcataaaggcatatttcgggaaactatcgaaactttagaaagactgtatgagcgtttagagttagttgaaaaatttattggttatgagaaagtagattgggaagatgcctgcctttcaaaaaatgaggtgagaaaaaagcagatagttgatttttataatggtctagtagtagatgttgcacttatgaaattagcaactccatattacaagttgccagaaaaaattcatgctttcattaattttttagataaagaaggatcatgtatcttcagaagtgaaattcaatcagacaagtggaaagttgaagactttcctcatgaggacgcctttgaaacgattgatcaatataagcagtatttaaaagagcaaaaaaactacaaatttaatttcgatcaagataaaggcgatgagattgcgcgtgaaattttggatgtgctacatggagctaagaagattagacaagcgcttgtgttggtaaaatttcaggtacaagatttctctgataaggagattaaaaatctaactcaaattgggcaagtaaatgacatattagctactgcttcggtcgaaagaaaaacacacttgttagtagaggagttgaatacccttgaactaggaagaactcatttaccttggttatctatccttacaaaaggtgaaatagaactgaatggtgaagttcgattaatgcttggatttattctagacagttcaacatacaaaatagataccaatcaaatcaaggattcattacatcgtgagttaaagaaattttttcgtagtagtgagattgctccttttattcgatcggaaattattgcgattgatcaaattctcgatcacttaggtgtaaaagaaataaaagaattcaaactccctaatcgaaaaaaattagctctcatgttgaagtggtctgttggattgttttatggaatgggaaagattattagtcctgataatcacactgccgagagtcaattagttgatacgcctatacgtctaattacaagaaaagctgatggtcgtttaaaagatcgaaatgataagagaaagtcaaaaagacaagaaaaagatgatctagagaaaaaaccatatgattttaattcaatctgggatgatgccagtttagttaaacgtgctccagaatatgcgaagtctatacacaaattttacgagatgctgaaatattttgatgagttagatgcacagcaaataaaactattgcaaagggttaatttgttcctggcttatttggagcatacatatattgacagtttatcaacttctctatcgatcaaccaagatccctctaaatggccctgtgcagctatgatcctagccaaaataatggacagtacttccctctaa

SEQ ID NO: 55040 - DNA, 642 bp, Acinetobacter baumannii
atggatcagatcagaccatttcctccaactgattttattgatcaagcagatgaagaagaagcaattagactaacaccagcaccagatctaaaaaaatgggttgttgctaattacttaactattggtggacctctttataaccccgatcatgatcacatagctgagctgcttcacgataatgaagaatttttagcatttgcctgggcctcttctgcatataaaagcaagcaggcgatggtgctggggcaatgtgaaaaggttatgtttcaacaaggcggctggaagaaagcccgacaagagcagcaaatgcgagactggttcggctttgtgccaacatacttaataactgtcgacgcttctttctgtgagcgtgcaaacgatacagagttctgttacttgcttgaacatgagctttaccacattggagtgatgagagacgaggacggagaaattgtttatagcgatagttctggtcttcctaagcactatcttgcaggtcatgacgttgaagagtttattggcgtagttaaacgttatggaccaagcaaaaatgttaagcgacttattgaagtcgcaaagaatccgccgtttgtttcgaatcttgatatttcaaaatgctgcggcaactgtgtaatcaattga

SEQ ID NO: 55041 - DNA, 468 bp, Acinetobacter baumannii
atggattctacagaatacttttggcttactcggaaaaaagaacctaaaaccaaacccaaatccagaccgctacctaaagctactcaaaagtacttagaggcagaggaagaatttactgaagctttagacaatctggaaattaagtacgaaaagaaattccagtttaagtctactaagcattggcgttttgattttcatttaattgaacatcacatattagttgaaattgctggtggcccttggtcgggtggtcgaaagggtaagctaaaaaacaaagcttggagtcttgatcgttacgatgtggctgaagagatgggttacacagtaattcgcatagaggcagcaccaagatttaagattaatgaatctggtccattacagatccaagctcatttcgcaagccaatggcttaaaaatttaaagaggcaaatatttaatggatcagatcagaccatttcctccaactga

SEQ ID NO: 55042 - DNA, 456 bp, Acinetobacter baumannii
atgccacagtatctcatgtttgcggaaaatatttataacaaaattaaagatgaggaattgttttcacatgactgtattgaaaatatgaacttacttatgatatgtatacgcagagaaattgagggaacagaatttaaattaaaatataattttattgattttgttgaattgttcagtagaccattagatgaatgtaaagtaaaaatagatgtgagtttgattcctcctcataattcagaaggtgagtatattttatggttagctggatttatcgaaaaaattacagaaggtggacctaaaccacctccgcctataaagaaatttattccagagtatatgagcttgaaatatgaattagattttttacctttaaatgaggaaaaaattcaaaccgaaggtaaagaaattacggattactttaattcaaagctttataaggcaacttttaagaaataa

SEQ ID NO: 55043 - DNA, 1017 bp, Acinetobacter baumannii
atgtcccaactttcttgtcggcaaagcttaagagacattcaatccaatctcgaatcccagcaggaaaagctctatcatcttggcgcgaaaagaattgcgcgaagcaccttagcaagactcaatgaagaacagcccgccagcctgtatcagcaattgttcacacagctgcttcagcgctgtgaaaactctaaaactgcacataaatttagattcaagaatccgctgtattcactagatgccagtcatattgatctttcactgtcattgtgcgaatgggcaaaagtgcatgaatccaaagccagtattaaactaagtgttggcttaaatcacagcaataccattcctgaatttgtagcgcttggggatggtattgaaaatgatatggtgcaaggcagagcatttaaatttcctgctggcagcattatcgtctttgataaaggatatgttgattatcaatggtttgctcagttgacacatcagaaagtcagcttcgtaactcggctacgccccaagacagtttatcaagttaaatcaagccgcaacgtattagcgactaaaggcattattgcggatgaatgtattgaattgagcagtgcgcacgccaagaaaagaggtgcccctaaattattaaggcgtatagagttttatgatacagataagaaaagaacattcgaatttctgagcaacaactttcatctggcagcatccaccattgctgcaatttataaagaccgctggaagattgagttattctttaaagccatcaagcagaatttaaaactgaagtcatttctaggtcgaagccgcaatgcgatacaaacgcaaatatggattgcattaatcgcctatttgctggtgaacttcgctaaacacatggcacaagaagaatggagtattcagcgtttattgcgaattattcaggtcaatttatttgaaaggaaacttttaaggtcactctttgtgcctgataaaaaatggcgaaaacaagaagaacctcaattgaggttcttcttgtga

SEQ ID NO: 55044 - DNA, 237 bp, Acinetobacter baumannii; identical to SEQ ID NO: 52173

SEQ ID NO: 55045 - DNA, 303 bp, Acinetobacter baumannii
atggcgacattaaacaaaaagcagaaactctttattgtacaatcgcttgctgtgtttaacacccctcaagaaacagtaagtctcgtcaaggaggaatttgacattgatgtttcgagacagcaggtagagtcatataaccctacaaagtttgctgggagagacttaagtaaggaactcaaagaaattttcgaaaatacacgggaagagtatttgagtcagccactaaataaaatcagtggagcaaatgacattgttcagttgaagattttaagtgatttgctttggactaaaaaaacaatgtga

SEQ ID NO: 55046 - DNA, 642 bp, Acinetobacter baumannii; identical to SEQ ID NO: 52171

SEQ ID NO: 55047 - DNA, 1209 bp, Acinetobacter baumannii
atgactgatattaccctggctccagtacaacctgatcaaccaacacacttaatggctacttatggtcgccaagcgatcagttttgtccgaggccgaggggcatatctttatacacaagatggtacagaatatttagatgcacttactggtattgctgtatgtggactaggacatgctcatccagctattgcagaagctattgcagaacaagcagctactctcgtgcatacgagcaatttatttgaaattccatggcaaactgcggcggcgcaaaagcttgctgaggtttcaggtatggaagaaattttcttttcaaacagtggtgctgagtcaaacgaaggagcgattaaaattgctcgtaaatttggtactcaacaaggtataagcttgccaaagattattgttgctgaacaatcatttcatggtcgtactttggcgacactttctgcaactggtaacaagaaagtacaagacggttttgcacctttggtggaaggctttattcgagtcccatttggtgacattgaagccattcaagaggcagccttacagcatccagatatcgttgctattttaattgaaccaatccaaggtgaaggtggtattaatactgcacctcaaggatttagctatttagaagaagttcgccaaatttgtaatcagcataactggttgatgatgctagatgaaatccaaactggtaatggtcgtaccggtaaatactttgcgtatcaacatacaaatattattccggatgttttaactacagcaaaaggattgggtaatggtttccctgtaggtgctgtaatgactcaaggtaaggctgtaggtttgttagggccaggcagtcatggttctacttatggcggtacagtattgggttctcgtgtggtttatacggtaattgacacaatccagaaggaaaatgcggtagagaatgcagcagtagtaggtaattatattgttgatcaattacgtgcccaattgtcggataagaatgtgcaagtacgtggtttcggtatgatgatcggtattcaactacctaaagattgtgctgaacttgttgcgattgctcgtgatgaatacaaacttattattaacgttacggcaggttcggtggttcgtttattacctccaattaacatgacacaagctcaagctgatattttgctagagcgtttagttgctttaattacgaattatctttaa

SEQ ID NO: 55048 - DNA, 462 bp, Acinetobacter baumannii
  misc_feature (409)..(418): n is a, c, g, or t
atgaattatcaacatattattgtacctgtggatggttccgagatttctttggcagcagcccgacaagctgcccatattgctaaagcttttggtagtaaacttacagcaattagtcttgttgcagtagatccatttagtggtgttgatttttattacatctctcctgttgtaaaagattattttgttgaagcgcgtgcgaatgctgaaaaaacgcttgccaaggtaaaagccttatgtgctgaagaaggcgttgatattgatacacaaattattcaaggtgaaatctcatctgatggcattttaaaagctgtagaagacttaaaatcagatctgatcgttattggttctcatggtcgcaaaggtttccaaaaacttattttaggtagttttgcacaagatgttctaaacnnnnnnnnnnctattagtctcttcccccttctattttgtgagtcacgccaatga

SEQ ID NO: 55049 - DNA, 501 bp, Acinetobacter baumannii
atgaatttgtatccaatacctgctgattttattaatgaaaaggtgacactttcatggtgtgatatcaaatggggctataaaaataatcttctcacttcagaaataccaataaaaaaagcagaaaatagtttattaacggaagactatactaacgctgaacttgaactatcattccttataccgagtgaatcagatgatatcggtccctttttgaatgaattatgttcagagactaatgaagattcgatgattagggaaaaatggctttatatacttcttagctggctttggattaatcgagaaagttttgaagatcctttagatgaagtagaaagtatttatacagattttgattatcctgctgaaatagaaagttttattaaatatatacctcctacggatggatacgatccctcattgtattcgtatgcagaaaatattaatcgcttaatgaagaattgggaaatttacttacaaaagggtgctgatatattcaaataa

SEQ ID NO: 55050 - DNA, 243 bp, Acinetobacter baumannii
atgcgccccaatgcttcttccgaagctgttgtctgtgattggatggtgactttattacttgttttcaccacattcaatttatcagcaggaatattcactactgctaaaagttgtgaagtgttggcaattttaaacatcggagtagatgggttaacatttgtgccaatggcacttagaatttccagcactgtgcctgacatcgcggcacgtacttcaatcattccattgccagaaccaccataa

SEQ ID NO: 55051 - DNA, 519 bp, Acinetobacter baumannii
ttggaacaggaaagtgtcttaaaaacacagttggcaaaaacacaacttgaattggcaaaaagagaggccgtacctgatattacattgggtgttggtgtccgaaattatcaggaaaccagtgacaaggtatttttagtttccacctcaattcccctcgctgtcttcaatcgtaataaaggcaatattgccattgctcaagctacccaagccaatgcagaaacccaatctgtctgggcaaatcgtaacgctaaaattgaattggaaaataaatcggttgagatttcaaacctgattgatgcaatcaagcaatatgacagcacggtattacccgcagccaatgaaagtttacgtattgctgaactgggctatcaggcaggcaagacttccctattggaatttaatagtaataagcaaatttggttggataaacagttagcccgttatgacctgtggttggctttgcaaaatcaaattgcagagattgagaaaaactacgtcaccaatttagaacaggaatag

SEQ ID NO: 55052 - DNA, 315 bp, Acinetobacter baumannii
ttgcttcgctcatcattgcctgtgtttgtagtcaataaagatgcgatgactaagctgacttggtcaatacaacaagaacaaaatagtgcttatctttccattaataatattggcaatcgccatgcactgttaaataatttaacgcttgtagatactacttcaaacaaaagttatccgattaaagtaaataccgtaaatggttatattctttccggaaaatcaagaaactttaatattagttctgattttaaatttcaagctgatcataaatataatatttcattgaatattaacggtaagccagcatctctttaa

SEQ ID NO: 55053 - DNA, 468 bp, Acinetobacter baumannii
atgagtgagcagcaaatccaaactctttggaatgaatttttaaatcaatggtcagtagaaaaagttcagaaaatgactctgccagagtattcccaggtaggtaatattgatacatttggctattggcttgaacataagactaaacttatcgctaatattttaggtgggtctgcatttaaatttggtatttaccacagaaatgcttctgatgagaaagagaatggtaaaggtaaaatttatgagactgactatgcatggttagaaaaatatggtcaaactaaagaaaaagcatttgatgaagttaagaaaagaatattggaaactattaaagcaagtcaattaggcgaaatggaagctatagaccagattgacttttctccagtattaaaatggaaaattgcatatttataccaggatcaaaaaaatccaaatattgttcctatcttttcaaagacatggttggattga

SEQ ID NO: 55054 - DNA, 966 bp, Acinetobacter baumannii
ttggcttttgataatgcagcagaagcgcagcaaacaggaacaacggcggtaaaagctaccgaagccctttctcaaaatttattaagtctaaaatctcaaactcaagtaacttctggggtacgtgcagtcgttacgacaaaaggtattgatgactggacacgttggcgtaccactgcagaagcgaaagtaattcaagattctgatgcactaggtggttatattcttgagcttggaaataatgctgataatgatgaaacatgggttcattggaatgagtttgtaaagattaacccagatacactttatcgggttcgtgcacgtttcagccgtgtactcggtgaaaatggatctatttatcttggtgttgcatgtaaaaatgcagaccaaagtaaatacgtaacgactacaaacacccttgcaggagatatgggttcttctaactacttattgtcggccattaaacctaatttaggtgagtggcaagaagtagttctatacatgaagggtaagtctactggggcagcaactggcttagggacaattgataatccacgtactttccccgcgcaagctgaattttatgccccaatctttattgcaaactacaacttccagacaggaatttgtcagcttaattacattattgttgaagataacaactcattagcttcagctaatgatgcaactgcaacagcaaatgatttattcaaaacagcaactaacagaacagaagctgaagctgaaaggaccagtaagcttgaaacaagaatgcagaatgcagaaacaggtattcagagcaatgctcaagctttattgaaaacagctacaaagagtgatctcgaaagtgcaatgggccgtgtatcgactgatataacagctgctgtagataatttaaaaatcggtggtgttaatgctgttgctaattcagaagctcctagaacatcgacaattaatgcgtctaaatga

SEQ ID NO: 55055 - DNA, 918 bp, Acinetobacter baumannii
  misc_feature (883)..(892): n is a, c, g, or t
atgctgttaaaagttggtgaattggctaagcaaacaggacttactgtccgtgctcttcatcactatgacgatatcggtttacttcagccttcggtccgttctgatgctggttatcgactatatacccgtaaagacattacccgtttgcatcagattcaagcattacggggactgggaatgtcgttagccgaaatccatacggttcttgaagaccccaatcttgcacttctaccaattattgatcagcagattcaagcaatagatcagagattgaacgagcaaaagaatttgcgaaatcaactcagcaaattgaaatctcaaattataagtggtgaagagcttggattggaggattggctaaaaacactggagcttatagcaatgtttgagaaatactttacaaaagaagagcttgaaaaacttactttcttacaagcaggtactaaaagtcatcaagagtggcaagaattaacactggcagcaaatgcattatttaatgcaggtgaaccatttaacagtgaagcagctcaagatttagcacgaaagtggatgaaaactcttgagcataatacgagggctaacccagaatggcttgttaaattaaataccataaattcagccgagcctgaatttcaggaaaaattaggggtaacacccgaagttgttgagtttttacttcaagcgttttctgaaagtaagctgagtatttttgcccgttatttatctgatgatgagtttaattttctcaaagaaaattacattcgtgagatgaaaaaatggcctcaattattggtcgatattgaaaaattgattgatgccgaggtcaaaccagatagtgaaggcgcgcagcgtttagcaaaacaatggcttgctatgttacaannnnnnnnnnatgttacaaggctatgctggcaataa

SEQ ID NO: 55056 - DNA, 1020 bp, Acinetobacter baumannii
atgggacaagttctacacagcagcgccacaacgacacaggcagtgcgtcgagcaatacaaaatagtcaagagagcttaagaacgctagccaagcgttacggcatcaatcaaaagaccgtcgcaaaatggaagaaacgtacttcagtagatgatcttacaaccggcccaaagaattctcgctcaagcgtgttatcgcctgaagatgaggcggcaattgttgcttttcgaaaacgcactttgttgccgctagacgattgcctttatgcattgcagccgagtattccttatctgacacgctcgtcgttacaccgctgcttacagcggcatggtatttcacgactgcctgaggtacaaggtgatcgccctgtcaggaagcgcttcaagagctaccccattggttactttcatatcgacatcgctgagatgcaaacagcacagggtaagctttatctcttcgttgccattgatcgcacttccaagtttgcgttcactgaattgcatactaaagccagtaagatggcagccgcggagttcatgcgcaatctggttaaggctgtgccctatagaatccatacggtgctaacagataacggcatccagttcacgaaccgcacctgtgatcgctacgcctctgagcacatctttgatcgggtttgtactgaatgtggcattgaacatcgtcttaccaaggttaagcatccatggaccaatggacaggtcgagaggatgaaccgaacgattaaagaagctactgtcaaacggttccattacgacgatcacactcagctatgcattcaccttgctgattttattgctgcatacaacttcggccgcagactcaaaacactcaggggcctgactccctacgaattcatctgcaaacagtggacagatgaacctgaactttttaaaattgatccgatccatcaaatgccgggactaaacatatttaaaagcagattggcaaggtttagcagatgtacaacttgcgacactaaactgggtagattggttcaataa

SEQ ID NO: 55057 - DNA, 237 bp, Acinetobacter baumannii
atgacaattatcacattgcttgatgttgagacgaagaagaaggtgatagttcggtccgtaatagacccaatagcaagaatagacaaaaaagggaatatacaaattattcaaattcataaatggctatatgatgaatctggagatttcgttgatgaagacttatatgaggcactcaacaatggagaagttggaatatacataactttgcagtatatgatcattgatattgaaaattaa

SEQ ID NO: 55058 - DNA, 507 bp, Acinetobacter baumannii
atgaaaaaattagacttccaaataagtaagataacagaagtaaaagatcctatttactatggagatgattttttacatttgtatattcatactgaacaagcaagctatattcaatttttttgcttggatttgttttactatgaagacaattttaatgagttacttgcatgtattctgaataaagagacaagagcagactattcatttagagaatggattgttaatacagagtttaaagaaatatccatcgaagaattagtaatacaagctaatggtctaataaatcaattagatatgattttaaaagaatctccagcgagcttaagtgccaaactcttgaaagaatacttatgtactttaaattttgaaaatactacaaatagttatgaaatcttaggttgttctaaaattgtccctaatagtcctgatgaaggcggcccaaattatcaatttttttgggaaaataagggaaaattttactttttacacattcatttagaatcataa

SEQ ID NO: 55059 - DNA, 747 bp, Acinetobacter baumannii
atgagaaaatacgataatgctacaacggtagcaaatgaaggggaaatactagcaagctttcagtatagaagcttgctgagttatcagacctatcaccatataaaagatataaagtacggttcacagaaccgatcaacgatggatttttttccttgtgaacacaccaataaaaccgtgatttttattcatggaggctattggcagtggtgtgataaatcggattttgcttttatagtgccgtatatattggcaaaaggagcccagtgtgtacttttagaatatgacttggctcctcaaagtcatatttcagaaatgattatgcaaattcagaaagctctagattttattgctaaacaaaattggaaaacgaatgaagttcaattagtggggcattcagcaggtgcacatcttgcagctgtatgtttaaaccatcctttattatcagaattggctttattaagtggtatttatgatttatctcctataaaggagactcatttaaatcatgcattaaacttatcagaagaggatattttgaaatatagccctatttatcagaaacagcagactgatataccttgtaggattttgtgtggagagttggagctaagtgaattgcagtggcaaagccaaaattattttgagcacagatgtagtactggtcatgagttagtttctttcgagactatttctggagttaatcattattccattttagactactattttaaatatatatttaaatag

SEQ ID NO: 55060 - DNA, 357 bp, Acinetobacter baumannii; identical to SEQ ID NO: 50562

SEQ ID NO: 55061 - DNA, 501 bp, Acinetobacter baumannii
atgcaaactaaattcgtagatccatcaacttatgctgttagcaatcaacctaatccatcttttagttatggtgtacagcatattagtaatgaaaatgggcaacctattaatggttttaacttttcagagtacgaaattcctgtcagaaaaatactaagaaaggattcatctccagttattggtaactttagaagctggccaactcctagtgctgacaaatttattaacgcagtagtaatgactcgtttatttgttttatgtaaggataaacaaaaatttcttgttgaaaaaatggtgtttcgtgaaacaggaaatatttttaatgaagacaagttgtttatttattctttttgtacagagaattctcaacttgaagtttatatagatgataatggaatgatctcagaaattaatagatttaaccagaatctaaattatgaagctaaaattccactaaacattttaggtcttaactatttgatgacacaggttttctattga

SEQ ID NO: 55062 - DNA, 318 bp, Acinetobacter baumannii
atgacaaaattaaaatatacccctgaaatcagagaaagagcggttcaattattgattgaatctgaaaaagattatccatcgaattgggctgcgatcaccgctattgctcccaagataggttgtactcctgaaacactacgtgtttggtatcaaaaatatttagataaactaaatccagttaaagtacagcagctttcagatcaagaacgtattaaacaactcgaacgtgaaaataaagaactgcaacgcgccaatgagattctacgtaaagcagccgcttttttcgcccaggcggagctcgaccgcccacacaaataa

SEQ ID NO: 55063 - DNA, 903 bp, Acinetobacter baumannii
atggtggattttatccataataataaagagctgtacggagtcgaggcgatttgtagaattttaccgatcgcaccctcaacctattaccggactctagatctctgcgaaaatccagaacatcgagcaaagcgagatttacatgacttgcatcatgctgaggagattaaacgaatttggaaggaaagttcaggtcggtatggtgtacgtaaagtctggcaaaaactgaaacgtgaaggctatattattgcacgctgtactgttgctcgattgatgcaaaatctaggtatacaaggtgtttggcgtggtaaaaataaacaaactactcgtagccgagatgatcaaaaacgtgcacctgacttagtgaaacgtaattttactgctgatcagcctaatcacttgtgggttgctgactttacctatattcaaacaaattcaggctgggtctataccgcctttattattgatgtgttctcacgagcaattgttggatggaaagtatctacacggatgaatacagatatggtgctcgatgcattggagcaagcattgcatgatcgaggcatgccaaagaatgtgattcatcattccgatagaggtgttcaatatctttctattcgctataccaatcgtttagaagcagcaaatttaagagtatcagtcggtacgactggtgattcatacgataatgctttggctgaaacagtgaatggcttatacaaaacagaggtgattgaatatttaaaagcagattggcaaggtttagcagatgtacaacttgcgacactaaactgggtagattggttcaataaaaagcgtgtacacagtgcactgggttatgtatcgccttttgagtttgaagcaatgtactatgataagattaacccgttaggtcaggtggcctaa

SEQ ID NO: 55064 - DNA, 408 bp, Acinetobacter baumannii
atgttaacgaaatatcaggaaattactcaaaaaacagattatttaaaatatgcagagaaacttgcaaatggtattttaaaattagttgattcagatggattaactactcatgtattaaattatccagactatgatttaaaagaaaagtttagaatcatttattatgatggagaagcagcattagctttactcaggttgtatcaaataaatcaggataaaagattattagacactgttaaattaatgtttgaaaattttatttataaaagatatgaaaaatatcatgatcattggttaagttactgtaccaatgagcttacaaaaatatgtcctgaagaaaaatattttatttttggtttaaataattatttaaaacattttttgaacaagcttatatgcacgaattaa

SEQ ID NO: 55065 - DNA, 216 bp, Acinetobacter baumannii
atgcacgaattaaaaaaactgattacatttcgggctgagtttcaaaccacaggttttttctatccggaaatagcgatgtacatggcgcgtccagataaaatattaaatgctttttatgtacgacatgatcgttttagagtaagaattgatgatcaggaacataacttgtctggctacattgcttacgtaaaagatttcgaaggagaggagatatga

SEQ ID NO: 55066 - DNA, 228 bp, Acinetobacter baumannii
atgcatagtttttctgtaaaagaattggatcagttgattgaaaatgatctaaaggaaaagaaaaaatctagtaagttattgattggatataaactatttaatgatctaatgaatgaccctaaattttatgcagaagtgacagattcagccctgagtgccacaaaacgaaaatataagaacctcaagatcaagattacgacggataaatatcaacttcattttgaataa

SEQ ID NO: 55067 - DNA, 429 bp, Acinetobacter baumannii
atgaaaagatgtccatcgtttaacagttactcagtcactgcagatgggaaagtttttacacaccgtcgcaagggtaggttagccaaagggctaaatagagttgatttttcatactcaaaagaactatcgcaatttaccacttcaaaaggatatcgcaccgtttctgtatatatcggtaatggcaaatcaagaccaattggcacaaaacaagataatgcaaatgatagggttcagcatggtggatataagcagggggcatcacatataaatgcaaaacttaatcaagggcaagtagagagcgttaggaaaaaacgtgcatcaggctcaaaagttaaagatttggcaaaagaatttgctgtaagtactagcactattgagttggtcctctatggcaagtcttataaagttaaccaaggtggcgcctcatga

SEQ ID NO: 55068 - DNA, 264 bp, Acinetobacter baumannii; identical to SEQ ID NO: 47948

SEQ ID NO: 55069 - DNA, 276 bp, Acinetobacter baumannii
  misc_feature (199)..(208): n is a, c, g, or t
atgatggctggaattaatatcaaacaactcatgaatattacgggttcaaaaaaggttataagaatcatatctaacccaccagtattaacttatacaggtactcatgtgttgattggttcagaatatctagaacctttagataaagagttagttgagacaatttattcagccacagggcagacctattgggcaaattcannnnnnnnnntgatgccattatcgcgttatcgggttcaggcccagcgtacttcttttatatcctcgacagtatggtaa

SEQ ID NO: 55070 - DNA, 288 bp, Acinetobacter baumannii
atggtaaaaactggtgtttctatggggctagataagcagtttgctttagatctggcacttcaagcagcgtcaggtgctgtagacatggtgcgtaaaagtaatgttcagccaagtgagttatgtggcaaggtcacattagctaatggcattactgaatctgcattacgaatgtttgagctaggcaatctttccgatgatattcgactggctttaaaagcagcttatcatcgcagtaaagaaataagtctagagattaatgctgaaattgccagacatagcgttaactga

SEQ ID NO: 55071 - DNA, 753 bp, Acinetobacter baumannii
atgttagttgaaaagtttgattttattgagttacttcgccttgctattgctcaaggcaaagcagaaggtaagaaaatttcaaaagatgtagttttaggtgaattagcgctgttatcaccagctgcaaagctttgggccacagtactggttgagaaggttgattttgaacgtattgcaataattaccccggcacaaaaacaaactgaaactttttacagtaaatatgattttaattttcaaactgaacgccgtattgaagatattccgggcaaggttgaattcgttcgcggcgagattaaatctggtaattttttccgagcgcgaaataaattagcggtaaagattcatgaagaaatggtaaagaaaaaatttacacctactaatgctcaaggtgatctcactaatctggctaaaggaatggctgagattattttgcgtggccatgtttttgttaaggctatgtgtggaggatgccaaggaataggaaaactcgaaacttttaattcaaaaggtttttctgaaggggcaaagttttgcgaaaaatgtaatggaactggcaagcgtccatatacattaaatgaaaaaatgaaaattgcaggaattgttgccactaagactgcttacataaaaagctatcaaaagtttgagttattaggagaatctattgttgcagaatgggaaaatgaaattagatcgggtatttctcgctcatttcgttttgaacttcctgataatcaagaaacttgtgcttga

SEQ ID NO: 55072 - DNA, 753 bp, Acinetobacter baumannii
atgttggttgaaaagtttgattttattgagttacttcgccttgctattgctcaaggcaaagctgaaggaaagaaaatttcgaaagatgttgttttaggtgaattagcacttttatcaccagctgcaaagctttgggccactgtcttgattgaaaaggttgattttgagcgaatcgcaataattaccccagcacaaaaacagactgaaactttttacagtaagtatgactttaattttcaaaccgaacgccgtattgaagatattccgggtaaggttgagtttgttcgtggtgagattaaatcaggtaattttttccgagcgcgaaataaattagcggtagagattcataaagaaatggtagagaaaaaatttacccctactaatgcccaaggtgatcttactaatctggcaaaaggtatggctgagattattttgcgtggccatgtttttgttaaggctatgtgtggaggatgccaagggttgggtaaaattgagacatttggtttaaatggctttccaaatggggccatgttttgtgggaagtgtaatggaactggaaaacgaccatatacgttgaaagagaaaatgaatattgctggcattgatgcaaccaaaacagcttatataaagagttatcagaaatttgagctgtttggagaatcaatcgttgctgaatgggaaaatgaaattagaacgcgtatttctcgatcattccgttttgaacttcctgatagtcaagaaacttacgcttga

SEQ ID NO: 55073 - DNA, 318 bp, Acinetobacter baumannii
atggaatacttcgcaggttatctactggaaaaatcactggcgattgacaacgtcttcgtctggctgatgatcttcgcagcatttgcaattccacctgcgctgcaacgtaaaatcttactctatggcgtattaggtgcaatcgtattaagaaccatctttatcttcattggggcttggttcgtacaagaattttcttgggtactttatattttcggtgcattccttgtttgtgatagattttacagagaggtgctatatatgacatatcaagctgtctcttatacacatctgacgctgccgacgatactccttgtgtag

SEQ ID NO: 55074 - DNA, 699 bp, Acinetobacter baumannii
atgaccaatacactttctgagcacaaacaagttgaagtggtaactacttttgctgagcttgtaaatacacagtttcagggggataagaacgctatttgttgggtcagaaatttggcaggcgactttaaagaaattgtggcaaaacttcagttaaaagaaaatattactgaaatttctattgaagatttattagcactgccgctttcagaacaaggtgatttggctcgagacattattttaaaggacatacagctcttaactgatatgggtgcatcacctgtactgaacttacttaaatattatgagcgtgatgatgagctagattttatttcaacagatgtctattcatttcacgttgatcgctcccctattgaaaccgatacgttcttatgtacttatcacggtgcagctagcgatattgtgcctaatgatcaagttgaacaaaaagttttaattccagaaattagagaaaagcttagagctttacacgacgggtcagaagccgaatttgaaagctttttagcagagtatttctttgatttacattatcaacctaaatccaatgcacaacctataaatttaggtacgggacacttgtggcgtttggcggtagaccatcccactcaaaaggttttaccgtgtgtgcatagagcacctgttgaaaatgacggtgaatatcggttgctacttatctgttaa

SEQ ID NO: 55075 - DNA, 363 bp, Acinetobacter baumannii
atgcaagaagttagtaaacgttacacagaaatcagtattgaaactgctaaaagaattgaaaaacaattagagcctaggctgctaaataatcataacattgtcacagaatacagattacaagggtcagttcccctaaatattcatatcaaaggtgtaagtgatgttgatttacttgtacttaacaaatcacattatcgtacagagggttatttaggtactttacgccatgaagagttacgtatccatcgaggatttgtagagctgacacttcataaagacaataaaagtgccagtgctaaatattataatgttactggtcgaagaacgatgggtacaatgctatgggaaaaattagataactaa

SEQ ID NO: 55076 - DNA, 279 bp, Acinetobacter baumannii
atgtatcattccaatctagaaaatttaaagaaaggtagaacaaatgctttagcaatagttcttgaaacaaaaagattttttgattatctgtatcataatccaaactatagaaatagcttatatacacctgatatgaccagaaaaatatttgatagttatcagaaagaaacctctctcacaacaatgagcattgccttagataaactcgttacggaaatacgtaaagatttgggttacctatatgacgaaaccattggctcttatccattagttatctaa

SEQ ID NO: 55077 - DNA, 201 bp, Acinetobacter baumannii
atggattggagggagcttaaacttactgatattactgaacagatggttgaagataagtatattcaattatctaaaattagttatgccaaagcgaacttatctatgcgagtacttcgagctatttatcgtttttcggttaagtattatcaagacagaagtaaagaactcatcatatctgcgatgaacccagttaatttttaa

SEQ ID NO: 55078 - DNA, 642 bp, Acinetobacter baumannii
atgggtagttatattgctgaagctcaagccaaagtagattcccaattcaaattaccagaaggttactggatgtcttggggcggtacatttgagcagatgcagtctgctactaatcgtttgatgattattgtacctgtagcactattattaatctttaccatgatttacatggcattagggaatattcgtaatagtttattggtctttactggtgtgccatttgcattaactggtggtgtcatcgctttagcattaagggatattccactttcaatctctgctgctgtgggctttattgccctctcaggtgtggcggtattaaatggattggtcttagtcaccgcaattcaacgcttgcaagctcaaggtcaaagtttggttgatgcggtaaagcatggtgctttagaaagattaagacctgtattaattacggctctggttgcttctctgggatttattccaatggcgttaaatgtcggcattggttcagaggttcaacgcccaatcgcaactgtagttattggcgggattatttcttccacattacttacattgattattctgcctaccttgtatgtctggttcaatcaaagagccaagcgtaaagcagaagtagaaaatttctctgagcaacaggtttag

SEQ ID NO: 55079 - DNA, 249 bp, Acinetobacter baumannii
atgaatagtaaagctttctttggtggtgtggtggtcagccctgaagcagatatggtcgctcgtgaattaatccatgagctacacattcccaaactgcacaatctggcctttttgctggaaatcaataaatgcttcgatgatcaccaggcattgagactctggttacagcgaatgctggatgaagggcaagcccattacgatgacttggcccaacaggcccgtctccggttaatgagcctagctcactaa

SEQ ID NO: 55080 - DNA, 306 bp, Acinetobacter baumannii
gtgcgtcagcttgctgaagatgttatctctgcccaggaatcagaaatcaagatgatgaatgaatggttggcaaaaaataaaaatcattctgacagcaaaaatgaagatagcccatcaactcaagcatacattaaggtcaatgatgaaatgcacgcagatatgatggttccatttacaggaaatgctgatgttgatttcatgagaggcatgattccccatcatcaaggtgcattgaatggctttcatgtttattctcactcattgaattatcctttggagcgtcagaagaggaacaccccgcactaa

SEQ ID NO: 55081 - DNA, 309 bp, Acinetobacter baumannii
atggtccagcaagtaaaatatgcaccgcaattgacctatatcactaaatacgaagatttatttgatgatgaaggaaaagctgtaattgtggatggcaagaattataaaaagccagtaactcacattcaaactgatcaaaacggtacgcctattttgtcgaatcaaccagtcattaatgaaaatggtgagccagtttttgaatgggttcaagcagttgatagtgatggaaatccaatctatgacgaggtgccagtcttagacaaagatggaaatccaatctatgacgaggtgacttatgaccctgaatag

SEQ ID NO: 55082 - DNA, 219 bp, Acinetobacter baumannii
atgaatagtgaaaacacaagagcatatttagcttttgcattagtgggtttgatgtttgtcttagttattgctttgttctttgttgatatgcctagagaaaacagcaatttgatcaatactgcattaggttttatagcgggtgccatgacaacagcatgtggtttttatttcggtagctctgaactagagaaaaagaagggtgggcaagatgagcactaa

SEQ ID NO: 55083 - DNA, 228 bp, Acinetobacter baumannii
atggttatttgtaagctaccaatattgttggctgaaagaaaaatgcgtgtagctgacttaattcgtggtacaggcattaataagacaactttgcataagctttataatggcgaattgactcgaattgatttggagaccatcgatcgaatttgtgattatttggatgtacaggtaggggatttatttgtttttgaaaaagacaataaagaacaatctgttagtaagtag

SEQ ID NO: 55084 - DNA, 297 bp, Acinetobacter baumannii
atgaaatttggagtgttattatgcaaaagccagttaaacgcggggacggcgtggcgcatcactgttcgttatctaggcaaacgttatacgcctactcgagatacagcgagtgagtgtgaacaatgcgccgctaaaaaattattagaattacaatctgaatatgctaatcctgagcctgaaaaaatccatatctccttctatgccctttttgaacagtactatcaagaagaaggcagaaaaatgaagagtgcccgcttaattgttcaaatacttaaatgcctaaagaaaaaagaataa

SEQ ID NO: 55085 - DNA, 318 bp, Acinetobacter baumannii; identical to SEQ ID NO: 55073

SEQ ID NO: 55086 - DNA, 219 bp, Acinetobacter baumannii
gtgccgttaactcaaaatcaatttgatgctctggtatcactgacttataacattggttcaggagctttcaaaaactctacactgcttaaaaagttaaacgttaaggactattcgggcgcagctgatcaattccttgtctggaataaggcaggtggcaaggttatgaaaggtttagttcgtcgccgagaagcagagcgagcactctttttaaagaagtaa

SEQ ID NO: 55087 - DNA, 177 bp, Acinetobacter baumannii
atgtataagcaaaaaaagcgcctgaattataattttggcttcctgtcactaaacctaacgatgaaaacaaaccagctacaggaaaaaacattgttacataagtcaatggaggccattctgcatgtaaactatttactattgatggcaatatataagttagactttgtacataaataa

SEQ ID NO: 55088 - DNA, 177 bp, Acinetobacter baumannii
gtggtttttcttcgtgttggtgatgactttgaagttcgtccacttgagttgggtgagaaattcaatggatttgttgaggtcaaatcgggtttaaaagttggacaaaaatatgcagcaggtaattcttatctcataaaagcagagctgggtaaatctggcgcttctcatgaccattaa

SEQ ID NO: 55089 - DNA, 507 bp, Acinetobacter baumannii
atgactaagtatttattggacactaatatttatatcaatttttatgaaagatattatcaatttgatttttttccaagtttttgggagaaaattaaagtcatcatcaattcacaagtggtacttccagatattgttgttaatgaacattatcaagatgaaagttttaaaaaatggcttgaagaaaactttacaggagcatcttgtaaatacaaagattatgctgatttatgggctgaagttatccaacatattgcaactcatgactgttatagtgagaaagccttaacaaatgacaaaagttggacacatgaaaaaatagcagatggatggttgatcgcaattgcaaagaaagataatttagtgattgtaacaagtgaaacgaaaaatattagtttaaataaaaatcaaccttcacaaagcccaaaagttcctgatattgctaatgatcttggtattcgctgtatcaatatgaatactttttttcaagagattggcttaaaaatttag

SEQ ID NO: 55090 - DNA, 1107 bp, Acinetobacter baumannii
atgtcaatgcgtatcgacactaacacattgaattattatgttcaaaatgcccaaatttctttgagtgttttaagaacaaaaattaataatttagatcaatttttaagtggagaaaagcagccaacttttaatcagttatctgaaatagcaaaaaaaattaatgttccgacaggtcttttattactgaataaaactattgatattgacatcaaacgattggacttcaggacacttgagtcagattcaatcgatgaagcaagtgaagagttaagagataccattgcagaaatggaggtcaaacaggaatttttgaagaatgaaattactgaaactttagattttgtgggtcaattctctattgattccaattttctagaggtagctaaacaaatacgtaataagctagaaattcctttgtttttccataatcaagcggataatccattaaattatctacgtgataagattaatggtataggcgtatttgttttttttaatggtaaagtgaaagacaatacacatcgtcccctaagtgtgaaagaatttcgagggtttgtattacttgaccataaagcacctataatttttattaatcagaaagatactaagaatggtcaactctttacattagtgcatgagttagtgcatatttttgtaggtactgaagaaatatttaacattgtagaggctggcgattaccaatttgatcgaactgaagcatttataaataaagtaacagcagaaattttagttcctcaagagattttcttacagcttaattcaaccgatagtaattttttagctagaaaatttaaagtcagtgaatttgtaattgtaagaagactattagacttaaataagattacacgtgaagaatacctgaatcgtactagagacctaaaggaaaaccttgaacgttttttaccgaatgaatctaatggtggaagttatactaataatattagatttagagttgataatagatttttcaaatatgtaatgaatgcagtaaatcatgatcgtatttcatatacagatgcatttaatattgtaggtgtcggttttaaaggatataaaattttgatgaatagaggtggcaatgactaa

SEQ ID NO: 55091 - DNA, 1341 bp, Acinetobacter baumannii
atgagtcagttaccacgttacgaaagttataaggatagtggcgtgcaatggttaggggaaatccctagccattgggctattgtacgattagatcaaggttgtgaaattgttagaggtaatacaggattttctaaagctgatttattagaagaggggcaatacgtagcattgcaatatggtaaaacttataaagtagatgaaataaataatactttttcttcttatgtaaatgaagagttttataagttgagtcaaatcgcaatgtatggtgatacggttcttatctcaacttcggaaacgatagaggatttaggtcattcatgtttttatgcccgtcaagatattggtctaataggtggtgaacagtttttactaaaagttaatcaggaagaacagttaggcaagtatctgtattatttatcaaaagcattttctggttatctgcgtaaatatgctacgggcacaaaagtttatagatttaatacagatcatcttaaaaaaatttatattccacaaataccatttaacgagcaaaaagttattgcagattttttagataaacgccttgcccaagttgatgctttaatcgctaagcaagaaactctattggaaaaattggctgaacaacgtgtggctttgatttctcatgcggtgactaagggtttaaatcctgatgtggagatgaaagagagtggtattagttggtttaagcaaatacctaaatcttgggatgtaaaacaattaaagtttgttattactaaaattcaaacggggtctactcctcctagtgctgtgcctgaatattatagtaatgatgatattgtttggtatggacctgctgattttacagatgaaaattatattttaaatgaatcagttaaaaagattagcgcattagcattagaagataaagtcgtaaaaccaatgccgaaaggatcgattatgatgattggtattggcgctactttaggaaaagtcgcgattactaatgttgattgtacaaccaatcagcaaattaactctttgattcctatcgaagatgttaatgctaagtatttgatgtatcaattaaattctttgagagatatagtcaaattattatctagtgcttcaactttaggcattattaatcaggaaaaaacgaaatgtttgaaaatcattgtgccaagtctaaatgatcaaaatgaaattgttgaatttttggataaagagcttaatgaaatttcagcggttaaaaaatcagttgaacaaaccattaataagttaaaagaatatcgctcgactctaatcacccaagtggtgacagggaaaatcgatgttcgaaatcttaaagtaaactaa

SEQ ID NO: 55092 - DNA, 2238 bp, Acinetobacter baumannii
atgacaaatgaagtaaatcaacacccacagcattctaaacttgttggactagtttggagtattgccaatattattcgtggaccttaccgcccaccgcagtaccgtcgtgtgatgttgccattaattgtattagggcgttttgatgcgattcttgcaccttatgcagatgaaatgaaagcatgctatgaaaaagctgtggcgaatttgcaagataaaaccccgaatgtctttttacaaaagcagttgagccaaattgcggataaagatcgtaagcaaaatctttataacatcagtggttttaatctacaaaaactgttggatgatccagatcaatttacggcaaatttaacaaaatacattgatggtttttcacctaaagcgaaggatatctttgccaagtttgaatttgctaaagaaattgaaaaacttgatgatgcaaaccgtttatataaagtcttccaagagttccgtaatggtttggttgaatcaggtttaagccttgcgcctagtagcgtgagtaatctacaaatgggctacctatttgaagagttagtacgtaagtttaatgaacaggcaaatgaggaagcaggggatcactttacgcctcgtgaagtgattgagttgatggtgaacttaatctttgaagaagatcaggatgagcttgttaaggcaggggtacatcgtagtatttatgacccaacggcgggtacgggcgggatgttgtctgagtctgaaaaatttctcaagaaatacaatgacaagattagccttgatatgtatggacaggagtacaatcctgaatcatatgctatctgttgttctgacttattgattaaagatgaacctgctgaaaacattgtgtatggcgatacgcttggtgtgaaaaatgccaaggaaaaagatggttatgttccgcgtgatggtcatgcagataaagacttccactatatgttctcaaatcctccttttggtgtggaatggaaaaaccaaaaagaatttattgatgaggaagagaaacagggcttttcaggtcgctttggtgcaggcttgccacgtatcaatgatggatcattgttgttcgctcaacacatgatttctaaaatgaagccttcgcctgaaaatggtggggaaggttcacgtattgccgtagtatttaatggttcaccattatttacaggtgatgcaggcagtggtgaaagtaatattcgtcgttggattatcgaaaatgattggcttgaagcgattatcgctttacctgatcagatgttctataacacaggtatttatacttatatctggattatttcgaacaaaaaatctgaacagcgtaaaggcaaagtgcagttgatagatggtacagcacattatcagaaaatggcgaagagcttaggcaacaagcgtcatgaattgtctaaagatcatattgctgaactgactaagttttattcgaaatttaaagatcaagacacgagtgcattgattcaaaccaaagctggtgaagcgaaggtgtgttcgaagattttcaataatcaagattttggttatttgaagctgactgtagaacgtcctttacgtttaaactttaaaatttctgctgaccgtattgctttgttggatgatcaatctgcctttgcaagcttagccaagagtaagaaagtaaaagatactgctgaaatctcgaaagaagagcaagcaggtcgtttacaacaggacgcgattaaagaggttcttactgaaaaaatttctgatcaagtctggaagaaccgtgatgcattcttaaaagtacttgatccaattttaaaaggattaacctttaagcttggcgcacctgtgaagaaagcgattttggaagcattgtctgaacgtgaccaaactgcggatgtgtgtaaagacagcaaagggaatattgaaccagatacgcaattgcgtgatacggaacttgtttcattccctgacaatttgactttacctttgcctgtgaattatgacaaagagcctgacttgtctaagttattgccattggttacagcgcattgcgaagcttatttaaaagcggaagttttaccgcatgtggctgatgcgtggattgactatagtaaaactaaagtcggttatgaaattccaattaaccgtcatttctacgtatatgagccaccacgtcctttagaggagattaagtctgagattgttcagcttgagcaggagattatgcagatgttaggaggtttgtctgcatga

SEQ ID NO: 55093 - DNA, 594 bp, Acinetobacter baumannii
atggagacaaaactaaaaaatattgctgagatatatacagggtttacgcaacgcccccctgaaaaatcagtaaatgcttttgatttaaaaacgattcaaattaaagatttaaccaaagatcaagtggtgatttcaaaagatcaatggtcggaacttgaatgggcttacgactcaaaacctcaatatttgaaatacaactcaattattgtggtcgctcgtggggaaccaagagcctacgtttttaaaggacaagagtctgatcgagttgctgtgagtaatcaatttatcgttgtaaatttaaaggttgatgaaattaaacccgaatttttagcttggtactttaatcattcacaagcaatgcgatcttattttgaaatgaatagtcgaggatcattgctcatgatgctcagtatttcgaccttaaaagaagctgaaatagttattccctctatgtttcaacaagaagagattcttcgacttgtcgaaaaagcacacaatgaagctttaatattcaaacaattgacagctttaagagctgaatacaatcaagcgaagagcgaacaaattttaatgcaagccaaagtggcgcaataa

SEQ ID NO: 55094 - DNA, 1941 bp, Acinetobacter baumannii
atgaaaaataactttgtacatcagcttcggacattaccagagatttttgaggggaattttttttgtatcccagactatcagcgagggtatgcatgggatgaaaagcagattgatgaattattgaaagatattgatcatcttcttttagatacttcagccgttaggcactatacaggtacacttgttttatcactgaataaagatcagtctaatcaatatcatattgtagatggtcaacagcggttaactaccttggttatttttttaaaatgtatttctctatttgctgatagagaggacaaagagagtattggcaccaaatatttaaagcgtggtgatattggtaatgatcagtttgttttgaagttgaatttagatactaataaattttttgagaaagttattttatctgatcgtaatttagaaaattgccctattacattagagtcacacgaacgactattgaatgctcatgatttgatccataaatggttgactcaaaaaacttcttcaggagttcttattacgcagattttaaatgttttagaagagcgtttagggtttttagtttattcgccagttgaagatgctgaaactggtatcatgtttgaagtgattaacaatcgaggtaaacaactcagtgaattggaaaaagtcaaaaactatttaatttattgttcaattaagctatctgctttttcattgcgggatgatattactgaacattggtctgatattttacaatcactaaataaagcgaaaaaaacatcaccaaatgaagagagttcatttttaagatattgtttggttgtattttttaaaatgaataaaacggatagccagtatgggtatgatgttcttaaggaaagaataaaaatagatcaatgtttgcagtccagtgaaaagaaaaatcaaacaataaccaaactacaagattttattcaatttttaaaattatctgcaaaatggtacgaacatctttatgcccctaattatgttgggcttgataaagctattcaaccactaattgaaaacattcgtgctcagaatgttcatgcttcaattatgcccttgtttttagcattggtactcaaaaataaaggtaagggtgagatgcttgaacggcatttacaattattagaaacgttaaattttagagtttatatcgctaacggcatgacatttagaaaagatacaggtcagggtgacttataccagtatgcgagtaggtactactatgggagtttgttaaacagttttattgcagaggagaatagagtagttggaaaaacaacactaacaaatgatgaccaagcattggaatatttactggttagttttactcaaaatcttgcgcatgatggttggttcgaagcctcattttatttggatggtaagagttcttttgatttttatgggtggagaggacttcgctacttcttaatgaactatgaatcttctttacaacctaataagactattaatatagataagattttaaagagtagatcatctggtaaaaccaatgattatttgtcggtagagcatttgtgggcgacagagaatagaaattttgagggacaaaattgtagagaagttgatcgttatcaaaaaagaagacttggaaatttcgttttacttgaactccgtttaaatattcaaggtactaatgatgatgcatggattaaagcagatcgatatcttgaagggtttgaacaagaagctccaacagatttatatcatgtacgactagcaggaaaaagtgttcggaaaacctttaacactatgagtgatgtcaagaaaaccattaattattattctgatttttatagtgaaattattggtgaacaggaagagcgttacattaagtttgcgatgaaaagatggtcattaaaggggtatattggttataaaaaacatcacgaagaattggaaaattaa

SEQ ID NO: 55095 - DNA, 942 bp, Acinetobacter baumannii
atgattaaaggtttagcaatcacaccaccgatccttggacgtatcagtattggtaaagttgttgaaaagaacggtaaacgactgcctgaaaaggatgaccaatttaccattaccagtcaaatccaaagcaaagaggggtggatcaaacatccgcttgatgagcaattacgcagtaaagcaccgaatcaaaaactccgtaccattccagtacggatgatcttcaatgatcctgaactgaatctgagagctgagtacactttatttgaccgacaaacaggacggcctgtctgtgtaggtaatggtgaaacctgccagcgactcaccaatcagggtgttgagcagcacccatgcccttcaccagacttatgctcattggcacaaggaggaaactgcaagccctatggacgtttacatgtcaatttggatgaaagtgatgaactcggtacattcatttttagaaccacaggttttaatagtattcggaccttggcggctagactgagttattaccatgctgcatcctatggtttactttcttgcctgccactacaactgacacttcgaggtaagtccaccacacaaagctatcgtacccctgtgtattacgtggacttaacactcagggagggagttaatcttcaacaagcgattcagatggcgaaagacattgatcaacagggtaagcagagcggctttaatcaatcagcgttagatcatacagcaaggcagggttttgccaatgcacagtttgaagtcaacagcgaagaagggttagatttagtggaggagttttatagtgatgaaaatcaaaagggagacgttgaacaagcacagtctgtaaccacagcgagaaccaaggcaatgtctaagccgaatcaaggtgagggttttgtgcaggatatgcagaagggcttgcaggggagtgtgagggcggtgaattga

SEQ ID NO: 55096 - DNA, 1041 bp, Acinetobacter baumannii
atgaataccgcaattttaaatccatctatgcaacaggtaagtactccatttattgccccaaaattattcacagctaaacgcttggtcaatacaaagaatatgactcaatctgactggcttgaagttcgtcgccaaggtattggcagtagtgattgtgcagcagcctgtggattgaatccctatatgtcgatgctcgaactttggatgatcaagacaggacgagtcaaacaatcgattgaagatgaaagttcaggtatcgcgccactctattggggtaagcagctagaaccattggtggctgagtactacagcatgcataccaataacaaggtacgcagaatcaatgcagtgtttcagcatccagatcctgataagcattttatgcttgccaatctggattactccgttgtgggtagcaatgaagtccaaattctggaatgcaaaacagcaggtgagtacggcgcaaaactttggcgagatggagtacctttatacgtactgtgtcaggtgcagcatcaacttgcagtgacaggcaaacgagcagcacatgtttgtgtgctgatctgtgggcatgaaaccaaaattttcaaagtgacgcgctccgaatccgtgatcaaacatatcatcaatgccgaacgttacttctgggagtgtgtggaaaaagatacaccacctgatgtagatgccagtgaatcggcagctaaagccatacagcagctctatccacaacatattccgttgactgttgaagacttgagtcataacgaacaagccaatcaattgtttgctcaactgatccaggaaaaacttcagattgaaaaacatcaaaacaactttgatgaaactaagcatcaaatccagatgttgatgagggatgctgaacgagcaacctttgccactggttcagtgacgtggaagaaatccaaagattcaatcagtttagacagcaaagccttactcaaacttcatcctgaaatgcttgagcagtttccacaaagtaaagctgggacgcgacgttttcagatttataccgatgactga

SEQ ID NO: 55097 - DNA, 1044 bp, Acinetobacter baumannii
atggcacatcaacttgaacaaatggcttatgtcggtgataccccttggcatggtctaggtaatcaactaagtcaaaaccaaccgattgaagtctgggcacagcaggcaggcatggactggcggattgagtcttccaatgtcagttatatggcacagaatgaacgtgggcaaagtatcatcataccttatgaagagcaacgagtactttatcgctcagacacccatgcaccactatcagtcgttagccaacgctttcaggaagttcaaccacgagagattttagaattctatcgtgacttgactgaacaatcaggctttgagcttgaaactgcaggcgtgcttaaaggtggtaagaaattctgggcactggctcggacagggcaaacatccatattaaagggcaaagatgtcagtaatggctatatgctcttggcaacagcatgtgacggaacccttgccaccaccgcacaatttacctcgatccgagtggtgtgtaacaacactttagcgattgccttaaaaggacagaacagcagtgcaggtgtggtcaaagttccacacagtactaaatttgatgcagatagggtcaaacagcaattgggtatttcagtacgtgcatgggatgaacacatgtatgaaatgaagcaactgacacaacgtaaggtgagtcagatggaagcatccgcttactttgatgcagtattcaataacagcaccatgaacaacgtattagatcaggaggataacatcattcagttctaccgtgatgtagccttgcaagcccaagccaatggcaaggacaaagctgaaccaaatgcgagatcgatgagtcgagttatggaaatgtttaatggtcaaggacgaggtacggagctaagttcagccaaaggaacagcctatggattactgtgttcaatcacggaatttatagaccacgaacgtcgtgccatgagtaccgatcaccgacttgattcagcttggtttggtgctggcgcatcgatcaaacaacgaggattggaacaggcacttaacatgcttgcatag

SEQ ID NO: 55098 - DNA, 288 bp, Acinetobacter baumannii
atgagcttgagctgtcccttttgtcattcaacgaatgtgatattggttgaagcaagtacacaacaatcaaatacaaccttaaccaatttggtcacaccgaccacattgggtgcattgggaaccacggtcgcaaagtctttcaatctgccaccgattgtcggtggaattgcaggaacagtattgggtagtgtgttgaattcattcactgaacaaagcacaccatcacagcagaatttgtgcttttgccacaactgctaccaaaaatttccaactcatcttttgcactaa

SEQ ID NO: 55099 - DNA, 762 bp, Acinetobacter baumannii
atgaataccagcaatagccctacaggaagcaatacctcaacagcagagactaagtttcttgaaatacccatagttcaatttgtcatttttattatcatcactggcacttacttttttggtatctatcatttttttggggttgattttaataaaataaaagcacttgaacccaatgcccttggggattttctagcgggaacatttgccccattaggattcattttattaattctaggttatatgctcaatacaagcgccttgaaaattcaagcccaagaacttagaaatagcgtacaagaacagcaagcattagttgaaacagctaaaaatgagtatgatttgctgatcacccaatataatcaaaaccaaagtaatttagctaatcaacgtagcgatcaagagttaaaagatgagctgaattcaatgcctgttatccagtttaaattcgcaggaaattacaactattttgaagtcattaatatcggctctcccgttattgatatttctttaattaaaggccaaaacattgagcatatgacctcttacattcctgtactgaaaacgaataccacaacacgagaagtcacaattacaatttctgcaaataaagacgctatctttagttttgaaatggtatttaagacgactaaggggttaaaatataaacaaaaatttaaaaatgacagatcagagtttgatcataatttatttattattacagctcaaaatgaccctgaaaaaattgaaattatagactgctaa

SEQ ID NO: 55100 - DNA, 405 bp, Acinetobacter baumannii
atggtggcgaaacgaaagagggttagcagactgatagccaaaggatcagcacacccgaaggtgtccccctcccgttccgccgcagagggggcacgcagggtcgcccaccaaaaagatatactttttagtgtgctttggctgaacggtctgctaaaaccgactgacgatgtaggtcagcagttgaatgataaaattaaggtttcgctgagtcaatcaagtgatatgaaaaaacaaataaaatcaaaggtagaaaatgcattttatgtgaggttaggggtttatttaacaatgacaataaatgatcgatttatattgaatgcttgtgcaggcttgaggttggtcattgctggagacatttatatcattgattatggaagtaaagcagaatccaagagcgctgattga

SEQ ID NO: 55101 - DNA, 255 bp, Acinetobacter baumannii
atgaaaattcaaacttcacttgtactcatctctgttgcattaatggcttcaggttgtgccagtaaaaccgaacgtcagtttattagtggttgtaaaacaggtggcattgatggcagtacctgttcatgtatttacgacaaacttgaaaataaatatggggaagatgggcttaaagaaaacctctacaccttgcagcaaactgaatccttccaaaaagatatggtcaatatttcctatcagtgcatgaaggaataa

SEQ ID NO: 55102 - DNA, 129 bp, Acinetobacter baumannii
atgagaacacttgctggcatcatctgcatcattgcagtgatttgctttttaggtttgccatttattggcttcatgatcgtaatgggaatttttattgcattagcaaaatatgcaatggggggaaagtaa

SEQ ID NO: 55103 - DNA, 225 bp, Acinetobacter baumannii
atgaattcaaatattaaaacaggtttgattagtgtctatttgataattggtttcttctttgccatctatcaacacttttgggggcagtataactacaagtcttttgcctacaacattggtcaaggcttagtttggcctgcggtaatgtttccaacagtggggaaaatcgttggtggaattttgattctatgtttggtcggctttctgaccatgcgttctaagtaa

SEQ ID NO: 55104 - DNA, 654 bp, Acinetobacter baumannii
atgaaaaaaatactttccactgtgatgttatctagtttactgatggcatgtaatcagaataatcagccaactcagaatagtacaacggatcaagcatctagttcacccaatgcttctgctcagaatgaacaatccaaatacgccccatatagcaaggatgaggttgaagccaaagtacaagctttaactcagattgtggaaaatgatactgagtatctgcctgctgcggtcaaacaagctcagtcatttcttgagagttgggataaatatcccgaagcactcaaatccatgatggagtctgatcttaatccaaacaatgctgaatatagcaatcatattcccatggaaatggaacagcctgcattatctgttcgtgctcaaattaccagtcgtgagtctcaatctgcatttaatgtacaaggagcgattgaatatattttagagattcagtccacaaacgatcaaccttttgttcttcaaggtatgagcattaatcgtggtcgttgtggttattacaccgcagatttccatagcaagatgcctgtgcaaatgagttatagctcaacggtatcgtacttgttgaaatgtcgtggtgatcaagtgcttgaagctgagttgacaaccgaccaaggcaatgtcagtttatctttttga

SEQ ID NO: 55105 - DNA, 936 bp, Acinetobacter baumannii
atgtccccaaatattccattagccaatgaatcttccattcttatctcaatcgaagattttatgattagtacatgccatgagcaattcattgatgatcatgatgagttcaaacgagaattattagaagcggtagtgctgtttaagcagatttatagatttgatctgagctattccaaaatcatacaagtttttacaagggtgattatccttgtcgattacatcatggaaaaactggattttcagatttatgaagatattctacggtttgaactcaatcatatctttcatatccaaggtatgattcagtatgaaatgaaaagttcttttctagatattcataaatttaaatatcaagaacgaaaaaatcaaattgaattagaacgctatttgaacaaaatactcaatcattatgctaggttggtttttgtacgagtagatgtaggaatctttcaagaacatcaagcgaattgggatgttgaggattttcatagggctttggaaatattacggaataggatgtcaaataaagattcctgctttcgtcatttacaagggtgtgtttgggcatttgagcaaggtactaagaagggctatcactgccatttattacttatttatgatggcaatatgcgtgacggcgatgaatggttaggagaggaagtagggaagtactggcaacaatacattactaataatcaagggtgttatttcaactgtaaccgaaaagagaataaagaaaagtttgaggtcaatggtttgcttggtataggaatgattcatagaaatcagcaaaaacaagtcgagaatgctattcgtgctggtctatatttagtgaatcccaaaaaagtagaacaacgcttacgtgccaagacatcccctaaaatgaggtcatttgggattagtcagtttgatctggattggcgaagaggcatataa

SEQ ID NO: 55106 - DNA, 1638 bp, Acinetobacter baumannii
atggaagatagatttttactttttttacttgctcatgaattttctcctattactttgagcccaacagcacgatggttgttactccaaataattcaaatgtatggagggcaagaattttgtttaacatctgcaatgagtgcaaagaagtttgtatttcatgataaaaaattgcagacaacgctgaatgagttacaagagcatcaaataattgttagaggaattgatgaaaaatcttgcaaagaatttgtaagaatagatattgaaatgtttggtctttgggggagtgtaaaaacgataggtgattttgagaaagagcgatggttctctaagatgatgaatcatgaacttccgctgaaggctcttttttttcaccttgtcgataccaaattaaatgacttttatgtacatcacttacaacatactaaaccgatattatttggaaaaatagatttcaaaacggcattggtattaatggtattggttagacatagtaatcaatttggaattaccaataaatgcggaattcataaattaaagcataaaacaggactgtctaaagatgcgatctttcggtgtatcaaaaaattaaagcaacagggactcattcgtacacgagtcgatgggactcaatcaagcaagattatcagtcgaatgaatccattttacgcactcaacttatcgcatgagctttggggggataaagctcgatatggtcgattttatattgagaaaagtaaacccactcagctttttgaagtacaacgggtaggtcgtttacttcagttgtttgaaacctttaatagagaattggactattatttaaattttagacatgatccacattcagcatatatcagtttgatacagcatgaacctagaatcttgagtgatcgcttatgccagcgaacggtattcaattttgaaaattcatccagaatggctcaggatgatttagaaaagaagcttgttcttaatttattgagtggttactttgaattaaaaaagcaccctgtagctaagaagtggttgaaagaagtcataagttataatgagttggacaccaagtcgaataattttgctaacgctttaatggcttgcgcattatttcagtgttatttggagcagtggagtttagagttatattcctcctcaactagattgaagcaattattactaaattttgatgttgtagaagtatatgatctcaagaggcttgaaaaaaaccttaagctaagttctttgcttcagataaatgatcgcgatttgagtagattcttcgaacaagaaattcaaagtgttaccttcttaattagttttttactgacattgattgcaaacaataagctttatccgttccttgctaagcaaagtaatattaagcagttgaagcctttcagtattatgcctcgttcatatcatcaacaaatatatagctgcatttttatgattgatccaaccctacgagcaaatgagttttacttattggatgaaacagatgaggacttttccgagagtcaacaacacaaaaatcgtgattcaaatttcagttcttttgactcaccaagtttacagcaattacaagattttggtttgcttcctgtggaatgtagggaggtagattgcttagttaatatttaa

SEQ ID NO: 55107 - DNA, 927 bp, Acinetobacter baumannii
atgacaagaccatacgaacattttgaaaattggatgaagaaagacagtaaagctaaggaagatttcatccaaaaaaataaagatgcatggagcaaattaatcccaaaacaatttacagtgtctatatcccaaccccaaatcctattcggttatgatcaagaacaagccatactttcgacaaaagaatttgtcgccgcatctaaagatttctatgaaaccattcgtaaaaaatttagggagcacaagcaccaaacctctaaacagcacaaaagccgtattcaggcaagaataagtaaaagctcaacatccaagcttgaacaaatcaaaaaaaagcttgaacatagcagtgcttcagggacacttgaacatgtcattaatagttttgatgaagacaaattaaagcaacaaattcaaattaataaattacaggaacaaattcaaaaactgcgagattttgaagcgtatctaaatagtaagcacaaattagagcttgagacagcacatgcactcaatcagaaaattcaggattacttattcagccaatgggtttcaacccagcaaaaattggaagtcctagaaaaccaatttccgaatgaagatgaccttgaccaaatttatgcttctcaaagtgacgaagaaaaggagaactctcgtaggataataaaatcgaatttacaatctgattttaataacaaccttctccgcataaaagcgacactggaactcaaatcagaaaccacaaatccccttcatacaactcttgcgcctatttctgaaaacgattacccacctatttatccacgaccttcaggatttactaaacaaggagaaattattcatgatggcatagaagaaaaaactgataacaaacagagagctgtgccagagtaccttacaaacccaataaaactattcaccaacaaataa

SEQ ID NO: 55108 - DNA, 897 bp, Acinetobacter baumannii
atggaatcaaaaataacttcagatttagcattacttgaacaaaacattgttgaaaatttctgttactactatcagtgtgatttggtggcagagtttgggaatccattatatgcagctatgaaagaaaaaattatgcttcgaatgaaagataatgatttttcactcagtgagcaagccttaagtctgatagaggcgagtggcgatcttaaatcaattccttttaagcctactcaaatttttgaacttcttactcagatcaatagcttaagacaagggatggatcagttaaaaaagacgctccaaaaaaatcattattcaaacattttaatggcgtatgtggatgcattgggtggagagctatatttaatctataactcgacgcttgaaagacaagccaaagcagtaagggcagcgatggcaagtcacactaaaaatttatacccaagacgtgaaataatacttagcgttttacgtgagcaacttgctcaacgtgggcataaatgggatagcctgaatcaggcggtcacttcaataattcctatattaataaaagagtttgaaaaatatgatctcatttggatcaaatctcaaatgaacttgatgcaagcggagcttcaaaaacttgaacaagaagatacgctcaagtctgaaccacttttagataattcaataaaacgtaaaaaagtaacatctgctgtaagagctaaaaagatcgataaaattcaaactgaaattaaaaaattagacagtattcttcattcaaaaaatccttcattcatgcttaagcatttgaattacaaaataccatataacaacaccgtgtatttggatgaaacgatcattcattggctgagggaacagcctgaaatattgaaggaaatattgaatccaatttaa

SEQ ID NO: 55109 - DNA, 222 bp, Acinetobacter baumannii
atgggctacttaacatctaaagaaattcgccacaaacttaaaaattgctctccttcaacattatggcgttaccaacaacctaatcaaaaaatgttcgaacaaccgatgccacaacctattaaaaaatgtgctggctcttctagtctttgggatgaagaaatgtttaatgaatggctactcaaatatttcaataacaaccaaatgagtaatctgtctagctag

SEQ ID NO: 55110 - DNA, 1200 bp, Acinetobacter baumannii
atgcctttaacagatacttggcttaagaagaatctagatcgtgaacgttcagctatacatacagagcctgatcaagatggattgagcgttcgtgtatcgcaaaaaggaaagctcacttttcagatgcgttttcgatataacgataagcaagctcgtttagacttgggaacctatccaaatatgagccttaaagaagctcgtattgaattgcagaaaatgaaagcaattttagaaaagggacatgacccacgtattcataaaaaagtagaacttcacaagatcacagaggctataacttttgaagcgttatttcgtgagtggcatgcgaaatatagtattcctaataaaaagaatgcagatcaatatttgagatcatttgaactttatgttttcccaaagttaggtggcatacctgctgagcaaatcacattacatatgtggttagatttactagaagagcaatttaaacagtcgccatcgataactgatcgcattcttacgaatacaaagcagtgtttggattgggggatcaatcgaaaattaattgagcaaaaccctataagacatatcactggaaaacgtgacttgaatattaagaaaaataaaactgttcgagtattacaagatgatgagttgtctttaatttttaaaatttgtgatgagtctagaacatcattaaggaatgttttatttctcaagttatgtttgttttatggtaatcgatatagtgagttgaggcttgcacggaaatcagattttgattttagtaaaaatacatggacagtaccgtatgaaaatcataagacaggagaaagtaaaggggacattgttcgacctattattgatgagatcaaaccgtggcttcagtctgcaatggatttgagtaattctgaatacattttcccacatgaaaatggcaaagagccaatggggcgtagtgggccaacagataccccttataacttcatgcaatttgcaaggaagaattataaatttgaaatggatcattggtctatgcatgatttacggcgtacagcaaggacaaatttcagtgcgtttacgagtagggatgttgcggaactgatggttggtcatgtgatgcctggggaacaggggacatatgactattatgattatcaaaaagagatgtcgaaagcttataaaaaatggtggaaaaagttaagtaatctgtctagctag

SEQ ID NO: 55111 - DNA, 864 bp, Acinetobacter baumannii
atgtcaaaaaaatttgaagactttgataatccaagacaaaaagcattacaaggtatgaaaaatagtatttctgcccaacagtgggaagaaaacttacaatttctcaaacagttaaggaatagaattgcacatttaccagtaagtcatcatccagccattgaaatattaaataacggttatcttgataaacaaaccttgacacgtattcatttagaatatcgtcatgccattgtacaaatttttactgatgctttattacaggcacagtttttaacaaagcaattggaaccaaagcttcactctggcgccaaaatgtttccacgtgtgctattaagcctaaatatattagatgaatttggttttagaccgggtttgggtaaagataattattatttaggaaacccagaatacgcacattatccattatatgaagatttattaaatgactacggtttgtctgaggacgaccgccgtaattataaaccttcaaaaattgcagatcaggtgagaacatttttagaagcttcttatgatagttatatgaatgtagtggctttattggctgtagcagaagaagaggttattctttttagcccaccattaagacaagccaccaagtttgttaatattgatgttgagggtggtggttattatcacgtccacggcgtctcaacagatgaaacagcagaagctgctgatgatgatcatcaagacgacttgtggtttgcgttggctcaagcgattaccaaagatgattatgaaagcttgactaaactatgtcttgattattgtgcattgtggactgagttttgggatgcacaaattgccgatgttcattttattgaagaaaagaaattggcataa

SEQ ID NO: 55112 - DNA, 267 bp, Acinetobacter baumannii
ttggacaaaatagaaagtcttgcttgtcgagtatgtgggcttatacaagatgaagagccgtggggtgaaaatggagagaatccaaactttgctatttgtggttgttgtggcactgaatttggatatgaagactgtactaaagaatctgtaaaagcaaaccgcaagagatggttagaggcaggtgctaattggtcggtattaaaagagaaacccaaagattgggatattgaaaaacaattacaaaatatccctgcaaactataaatga

SEQ ID NO: 55113 - DNA, 486 bp, Acinetobacter baumannii
atgaaattattgtatttactactttttattagtagttctgttagtgcttctcttggttcaacattatatgtaaaaattaaagacaatgatgtgtgtgtatttacaaaaggagaatatgataaagcatatggaaatcagactttgatttatatgggtaaagtagatggaattaatgcttttcactcttcatattcaaaaacttatttgaatcttagaatgcctattattgaagaaaactgtattaaaattaaatcttctgaatttaaagagccttttccatatgatgttgttcttgaaacagaccaatcatatacacaaagaatttgcgtaaataagacttcagaaggtcacataaaattattagaagctaaagcagacctagaaaaaggtatatattgcggtactaatcaatatgattactctagcaatactctttggactaagttaaaaaatctctattattggttaattaattttttaaattaa

SEQ ID NO: 55114 - DNA, 399 bp, Acinetobacter baumannii
atgagcaaagagtactctggtggagaagtttacataacaacaaaagataattccccatgtttttatataaacaataaaaatataagcggagattatgacattacactttatgaacgaaatatcaattcgggtctttataaagttagtagtatttcatcaatattagcctcgaaaagatatccagacaaagaaaaatgtattacaacaaatgaaataaaagataattttaagtataaaaataacactccatatttggttgttttagaaatcaataggtttagctttggtaaaaatttttgtgttgattcagcaactaaaactattcaagatttcacagacacctgtaaagtaaaaaacttatcttggtgggaaaaaattcttaatttacttggcttttaa

SEQ ID NO: 55115 - DNA, 378 bp, Acinetobacter baumannii
atgatgagattaatctttgtattcttaactattggattaattagttcatgttatgcaaaaaatattgcagtacctgtactaaataaaaatgaaatcaatttaaaaaattttggtttttcatattgtttatcaaagtccgataacgaagccgtagctaaagaagcatctttagcaatgggagggtatttccagaatggcggttatgatgaaaatgcttataaaaatataaaactatttattgaaaaaggttcaactgaaagtaaagatgtctatcaatctacaggaaaacctgcaatattgatgaactgtttaaaattatataattcaaataaatatgaacaggtcattcaaaaccaaaagaaatatattatcaattaa

SEQ ID NO: 55116 - DNA, 546 bp, Acinetobacter baumannii
atgggtactggcataagagctacatcaagtggacaagcctcaactattcaagttaatagaccgctattttctgaattatggaaaaactatcccgtcaaaatggctgcacctgatgtttatcaaaatgttggtggtcaagcttttgctttatatcaagaaaatccaacaggatatgcaaatgcttgtgcactaagattaagtaaagcattaaattatggtggaatgccaattaagcaaacaacaaaaggctataaagttaaaggcaaagataataaactttatttattacgcgtcaaagaaatgatctcttttgttgaaaataatttaggcaaagctgatattacgttaaggcctaaaaacaatgaagatgtatcaagtcaattaagtaataaaaaaggaatcattatcttcaaagttagtggctggggggatgcaacggggcacgtaactttatggaatggtaacgattgtggtgatagttgttactttgttcaccatcaacaaggtgtgactactacagaagtcttattttggaatttaaaatga

SEQ ID NO: 55117 - DNA, 594 bp, Acinetobacter baumannii
atggctaaatgttttgcaattcataatgctattacagatcatggtggagttattccatctacgcaagcaataagctctcaaatggggaatttgtttgttagagctggtgatggtcatatgtgccctaaatgcaggtgttggtcggtagttattaaaagtcatgaccatgtgatttttgatggtaaaccagtagcatatgtgggtgataaattatcatgtggtgcaacgattcaaccacaacagtctcatgttgtaggagagagtggtagtccttattctggaaaagaaactacacagaaaaataatttttccgagaataatatcgagaaaaaagttacagagatcacttggagttatggtaataatttcactcccttaaatgataaatctagattttttaatgatttaaatattcatgtgaaaactacaggttattcacaaggtgaaaatgtatcaataattatagaacctgagaattctgatatttcaacatttgaaccatttgctataacaattaaactcgatagtaatggtgagggaatacaaaaagatgtttttcgtggtaaaactttaatcatagatacggaatattaa

SEQ ID NO: 55118 - DNA, 429 bp, Acinetobacter baumannii
atgacaagtcctatttttttacaagaccttcctattgaacaattagaaaagctttcaaaaaatgatattcaaaagatttctaatgctgaacagctctattggaataataaaccccatgatatttactatgtggctgtacatggtgctaaatctctgaacggtggtttagttaatgcctcttctaataatgggaaaattaaaggattatctattgcccgtgttggtgatgaagttatttatgcagatggtacaacctctaagattatctctggtgctggtactgcatgtgttgtcgagggattatcagtagctctagtcggcagtcgattagaaaatggggatgaaattattgagagtccgaatactactattgcgatcagaatttacaaagatcagcccttacctcaaaactttttgagtcatgaataa

SEQ ID NO: 55119 - DNA, 528 bp, Acinetobacter baumannii
gtgaaatctaaactttgtattattttattgtctcttttaacggtagcatgtagccaagtccgccctcaaaaacatggaattactgaagctgatataacccaagcatatgaagcatcactctatgcccagtttaatcagctttactacacaaagtttctgtataaagcagcatacaatgaagctaacaaagtaactcaaactaatgatcagttgctaagttatgccacttttttaatgtatacagtcaatacaacatacgattctttaaatttaaagcttaatgatgatctagatttaatggcttctggcaaaaaaagtaagatgtccattgatgctttagattcattatgtgtaagtaataaatacattgaaaaatatataaaactcaaagaaaaaagcggaagtgctatatcagctaaagcgaaagaactttcaaaagaggcattgatacttcaaccgaaaattgaaaaaatcattatgaaaactgattcaccgttaaatgatattgaatgtaaaaaattaatctaa

SEQ ID NO: 55120 - DNA, 870 bp, Acinetobacter baumannii
gtgtttatagttgaaattataaatgctggggttaagaagaaagcaaaaataaataaaatgtttttagataaggggcctttctgtatttactatattcatgatgaatatggttttcctaagcctattgctcgatgtgaccaaatagaagaagtcgaagtcataagagatttaactacaaaaaaggcgacaacaaaaggttatgaattttcagaaacaacgacctccacttcagatttaataactcgaaccttgcttggaggagcattgaaaggcacaactggagaaataataggaggtgtgacagcagctaaaaaaactcaaactgtgcaagtgagtcaaagtacagaagaaatagataagcatctattacagctaaaagttaaatttttggatggaaatactttaataattaacacagataatccagaggtcatggagttactattttcttatgttggtgttcagcccgttgatgagagtgaattacaaaagctaagaaaattatctttacaacaaagagataaagaaaagttaagagattttaagtttgtcaacgatcaagagtcttatgaacaggcaaatcaaatagctactgaaaagcttgctcaatttaagcatgcgagtaagcaatctttactatcgcggagcttatttatatcttttttagtttcttttatcgtcgcttttctactcaaaagctttgtagggttgctagtctcttttatagcttttttaattttaggtttagttatttcaaaggttatttatattaaacttaattttcataatgaaagtaaaaaagctagataccatgctttattcgaagaagaagtgtttaaacaaattacctcaataagagataaaaaatag

SEQ ID NO: 55121 - DNA, 2907 bp, Acinetobacter baumannii
gtgtctacacaaaaagagctagaattagaagctttactcataaaacaattagaatctttaggttatgagcgtgtccagcttcgtaatgaaacaactctattagaaaatcttaaaagaaaaattcagcaacttaataaaattgaaaaaccattttcagattcagaatggaagcaaatctggcattacttgagtaatgaaaccatagtatttaaaaaagcggagctattacgcaatcgctgtcccgtcaaatttgatgacgggactgtaagacatgtacattttattagtgaagatgttcaagaaaatagctttcaggtatctaaccaagttgtagcggatcaccgagatttaaacggacgtactagccgttttgacgttacgttgttgattaatggctttccattagtacaaattgagattaaaaaatctggtgtagaacttaaaaaggcctttgagcaaacattagagtatgccaaaacagcctataaatcaggcgaaggtttatttggctttattcaattttttgtgattagcaatggtgtaaattgcttgtactatgcaaatggtacacaaagtattgagtttgctttcccatggacagatgaaaaaaataaaaaagttaatgatttaggtaaattcactaatacttttttagacccgcaacatctgaccaaaatgttgatgcaatatattgttatgcatcagtcgactcaaagtttaatgatcttacgtccatatcagatttatgccgtagaaaagattattgaacatattaaaacttcaccagacaatgcttatatttggcataccacaggttcgggcaaaacactgacttcctttaaagccagtcagttactcattaaacagccagaaatacagcgagttatctttgtagtcgaccgtaaagatttagacggtcaaaccgcagaagagtttaataagtttcgtgaaaacagtgtagacagtacaaccaatacagcaaacttagttaaacaactgcgttctttagataatcgtttggtcgtgacaaccattcagaaattgaacaatgcaatttcaaatgaccgttatgaaaatgaaatggcttttctaaaagatcaaaaagttatttttatttttgatgaatgtcatcgtagccagtttggtgaaacgcatcaaaaaattaaaaagttctttaaaaatgcgcaaatgtttggttttacaggaacaccaatttttgaaaaaaatggccacaccataagtggggaaaaatttaccactgaatatttatttccaaagctattacataaatatgtgattgtagatgccattaacgatggcaatgtcttaccgtttaacatcgattatttaggacgtttcgtacataaaaatccagaagcacaagaagaaaaaatagaatcaattgataaaagagaactttttgaaaatgaacgccgaattgaaaaaattgtacgtaaagtaattgcaacacatgctagcaaaactaatcagcgtgaatttaatgcaatgttttgtgtatcttcagttccagcactcattcaatattacgataaatttgaaaaagtgcaggctgagctactagaaaaagcacaacagaataatgagctttatcaacctctcaatatcgcaactatattttcttatgcacaatcttcagcgcagcaagctagtgaagctgatgatgattttattgcagaggaagaagttgatgcgcctaaacaagttgatgagtttgcagagaagaaattaacccaatatatcgcaaattataatcaaacctttaatactaactatagtcttggttcaggattttacgattattatcaaaatattagtagtcgagttaaggcctacggtacagataaaaataaaggtaaagaaattgatatcttactggtcgtaaacatgtttttgacggggtttgattcaaaacggcttaatactctttatgttgataaaaatttaaaacatcatggtttaattcaagctttttcacgtaccaatcgagtctatggtcagacaaagccttttggaaatatcgtgtgcttccgaaatcttaaacaagcgactgatgatgcattgattatgttttctgataaagaagcaaagaatgttgtcgttgttagcccttatgagcaagtaataaaactctatgaatcagcagtaaataatttattaaacattacacctacatgccagtctgttgatgacttatatggcgaaagtgaaaaagaatcgtttgtgtatgccttccgtgatgtaatgaggctaaataatcgtttaaaaatgtattcagagtacgatcaagatgctacttcttttacaaaacaagattttgaaaattattcatcaaaatataaagatctagcttttagctaccaaatgagaccgaacttagctgaaaaaacttcagtactagatgaggtcgatttccagctcgatttattgtttagtgatcgagtgaatgtagattacattttaaaattacttaaacttattattaattctaaaaatcaggaacagaaagacagtagagtcaaacagcttaaggatttattgaataataatatttctttatacgataagcgtgatttgattgaaaaatttatcaatgagcaaattcctaaaatggtaacaggggaaactgtacaagaagcctttgccgcattttgggatatggaaaaacatcgtgcctatgatattttctgtaatgaagagcagctaaaaaaagatgagttcaatagagttgtagataattttgaatttacagaacggttaccgctcattcatgaaattaaagaactaccgataaaaaaaccaccattaggaagaaagcgagcaatatattatgcggacttacataccaagacgaatggattgttaagtcgctttgatttgaaaatataa

SEQ ID NO: 55122 - DNA, 912 bp, Acinetobacter baumannii
atgcagatttatcgtacccaagaccaaaagcttgttgagttaacagaagatccttttcgcttagaaaaagagattcaatcagtttttgagagcaacctttacgagtttacaggtctagagtttattaaatctgagttcacgattaaaagtaatcgtattgatacgctcgcttttgaccctgaaagtaaagcatttgtgattattgaatacaaacgcgatcgcaattatagcgtgatagatcaaggtatttcttacttaaatctaatgcttgaatataaagcagattttattgtcgaatataatgagagtcaggctaaaaatttaaagcgacaagatgtagattggtcacaaagtcgaattgtttttgtttcaccaagctttactgattttcaaaagcaatcgaccaactttaaagatttaggtattgagctttgggaaattaaacgttatgaagggggaattatttcaattaacctgatgcaaaaaactaaatctgcgccatcaattaaacaagttcaaacagaaagctctaaagagataaaaacgatttccaaagaaatcaaacaatacgatgaagattatcatttagcagataaatcagatgatattaacgaactttatgaacagtttagagattcaattttaggcttaactacagatttagaggtctatcctaaaaaaatgtatatcgcattccgtaaaggaaaacgaaactatgtttatatgagtataggcacaaaacaaatccgtatttggttaaatatgccttttgaatcattggatgacccgaagaagattgcaagagatgtaagtaatatcgggcattggggaaatggagactgtgaaatcgttgtttcaaatactgaaaatctagaatatattttgagccttattaagcaactcttaaagtag

SEQ ID NO: 55123 - DNA, 303 bp, Acinetobacter baumannii
atgaaaaaattattgaaaaaagtgactttactttcaacatttctttttatgagtaatttaagttttgccaatacatttaactttgaaaaaatagatgttaatcaaattactcttaatgagatcatgaaaaatgtctataagatgaaagatggcgaatatcaaatttccaataagcctaaccaagtcttagtaaaaggtaatccacaagttttattgacgatgaggcctacaactgagtatcaaaatattcagggtaaaatacgctatgaggtagttttagaaattaatgaatggaaagcttaa

SEQ ID NO: 55124 - DNA, 1218 bp, Acinetobacter baumannii
atgtttgtacctaagttgcgttttaaagagtttgatggggattggtctgaatcaaaattgaaagattgtatagattcaattgattcaggttggagtcctcaatgtgaaagctatcctgctgatgagaatgagtgggctgttttaaaaaccacatcagtagattgggatgggtttaaagcaaattttaataaaaaacttccatctaatttagaacctaaatttgagattgaggtaaagcctagtgatatcttgattactcgagctggtccaactgaacgtgtaggtgtggtggctgtcgttccacaaaatgtacgttcgaaattaatgatttctgataagttaattagattgaaagcaaatagtgacaatagtcctgaatttttaggaattagcttgtcatctgtaaaatgtcaaaatcagcttcaatcaaaaacttcgggattagcaaaatctcagacaaatatttctcagaaaattttatctaatgtaagcttaatgactcctgcaaaagcagaacaaaccaaaattgcttctttcctctccaccgtcgaagaaaagattagtcaactaaaccaaaaacatgagctactcagccaatataaacaaggcatgatgcaaaagttgtttagtcagcagattcgttttaaagcggatgatggcagtgagtttggtaaatgggaggaaaagaaaataggagaaattagtacaactttctcaggtgggaccccaaaaagttcagataaatctttttatcaaggtaatatcccatttattaaatcaggtgagatctctcaaaaggtcactgagcagtacattaatgaagtagcattaaagaattcatcagctaaattggtaaataaaggtgatctactttatgcactatatggagctacaagtggtcaagtggcgatatctcaaattaatggagcaattaaccaagcaattctatgtattagaagtgatctaaatacacgatatttattgaatttctttttacttgaaaaagagaaaattctatcaacttatttgcagggtgggcagggtaatctatctgctgcaattattaaagaaatctctattcctgttccatccttagaagaacaaactaaaatcgctaattttcttgctaccatcgatcaaaaagttgaagttgtagcgaagcaaattgaacaagccaaacagtggaaaaagggtttgttgcagcagatgtttgtgtaa

SEQ ID NO: 55125 - DNA, 1572 bp, Acinetobacter baumannii
atgactcaagtacagctccaagaactgcaaaaacaactttggaatattgccaacaccttacgtggcaaaatgggtgcagatgaatttcgtgactatattttaggactgattttctataaatatttgtctgaaaaagtgttaaatagtgctaatgccgagcttgctgatgaaggaattgaattcccagatttagatgctagtaacgaagaacatcaggaatttttagaagcccttaaacaagaaagtttagaaaatatgggctactttcttgagccaaatcagttgtttcatagcatcgctgagcgtgcaaagaaagaagaatttattttagatgacctaattcagacattaaaaagtattgaacaaagcacgcaagatgctgaatcggcagatgactttgctcatttattcgaagacctcgatttaacttctactaagttaggtaacaacgccaacgaccgtaatgagttgattgccaaagtaatcattcatttagacgccattgattttgatatttctaatacagagtcggatgttttgggtgatgcttacgaatatttaattggtgagtttgcttcgggtgcaggtaaaaaagcaggtgagttttatactccacaaatggtttcgaccttgcttgctcgtattgtcacacaaggtaaagagcgtctacgtagtgtatatgacccaacatgtggttcaggttctttattgttacgtgtaaagcgtgaagttggaaatcatgttgatgccatttatggtcaagagatgaaccgtaccacgtacaacttggcgcgtatgaacatgattttgcatgatgttcatttttctaagtttgatattcgccaagaagatactttaaaaaaacctcagcacttagataaaaagttcgatgcaattgtggcgaatcctccattttcagcgaagtggtcagcagatccattgtttatgaatgatgagcgcttcaagtcatatggtaaacttgcgccaagttctaaagctgatatggcgtttgttcagcacatgctgtaccagttggatgagcacggcacaatggcggtggtactaccacatggtgtgttgttccgtggttcaagtgaggggcatattcgtcagtttatgattgagcagatgaatgtgattgataccattattggtttacctgccaatattttctacggcacctctattccaacttgtattttggtactcaagaaaaaccgagagcataaagacaatattttgtttattgatgcgagtaatgagtttgaaaagcagaaaaatcaaaacaaattattacctgagcatttagacaatataattggagcatatgaaaaccgccaaaatattgataaatacgcgcatgtcgcaactttacaagaagttaaagacaacgactttaaccttaatattccacgttatgtcgatacctttgaagctgatgatgagatcgatctggatgtcattactcagcagctacaggatttagagcagcaaagccaaaagactgatgccatcataaccgagttttgcaaagagttagggattgcttcgccatttgcggaggtgatgtaa

SEQ ID NO: 55126 - DNA, 468 bp, Acinetobacter baumannii
atgctttttgataatttaatgaataaagaactgcaatcattttctagaaatattgcttctcaaatctttatcgatggtacaggtttattatttttataccgagcagatacaaaatcagggttagtatattatgagttttttggtttatatattgttggtcttctcctcttaacttggtctatgtatatggcactaagcaatgccacaattttacgtaatgattatcgagattatttatggcgtcagagtgaaaagtttgaccgtatacgattaatgaaacattctgaaaaagaagataataaaacaagcgatattttgaaaacctttaaaggtttaaattttgtagatgtaattaaatttcgtttcgaaggggcatgtatcttacttatgttgttcctattcacaatcatgtacatgcttggaattatcgctattcttttccaacaagctaaggcttttggattttaa

SEQ ID NO: 55127 - DNA, 591 bp, Acinetobacter baumannii
gtgaaaaaaataataggaatacttttattttccttagtgttagttggttgtggtaaatcggcagaagatattgctaaagaaaagcaagctcaagaacaagcacttaaaataaaacaagaacaagagagacaattaaaagaacaggctgaacttaaaaaagttgaggatgctgttcgctattatcttaaagatggtgattctgcaaaatttagaaatgtcattaaaaattgtggtgaggtaaatgctaaaaactcatggggggcttattcgggtttctccagatttatagttaaatcagaaaaacaagttatctttgatgggcctgataattactattttgatagtttggttaagtcatattgccataaagattatttagctaagtttccagtgcaaacaagtgaagatatagcaattgatgcgaatacaactgaacaaatatcagcggcagcggctgctgatgcggcagcgggagaaactttagaaaatgaaactcgatcagttagtaaacgtaagaaagaggaagtagctattgaagaatcagctactgaatctacaacgtcagatactggtagttctgaaaattattaa

SEQ ID NO: 55128 - DNA, 354 bp, Acinetobacter baumannii
atgagtgaattatatagcagtcatgcggtcaaagatgttctgaatgaaagagaacgccaaattattaaagaaggttatttacctgagtttgacaatctttatgaagaaaatgaattgccacgagccgcatcttgttacgttgaccatgcagtaagtagaggctgggtttataacagcaaagacttcggtcccgaagtttatatggatgagggtgccgccggatggtggccttttgcagatactttctggaagccaaaaagcccaaggcaagatctagttcgtgcagcagctttattaattgcagaaattgaacgactcgatagaaaagttaaagcggaaagtaaggaggggtga

SEQ ID NO: 55129 - DNA, 438 bp, Acinetobacter baumannii
atgaatgcacaaaaaggttttacattaatcgaactcatgatcgttgtagcgattattggtattttggcagcgatcgcgattcctgcttatcaaaactatattgctaaatctcaagtaagtacaggactaactgatattaccgctggtaaagctaatactgaaactaaattagcagaaggtttaactgctaatttaacaaatgctactgatgtaggcttgcaagcttcaagcaatgcttgttcttcaattagtgtgtcagttgctactactggattaacatcaattgaatgtacattacaaggcacttcacaaattagtggcaagaaaatttcttgggaacgaacagctgatagtgctacagcagggactacaggaacatggcgttgtaaaactgatgtagctgataatttacgtcctaaatcatgtggtgcatcataa

SEQ ID NO: 55130 - DNA, 312 bp, Acinetobacter baumannii
atgaaagacggctttaataatttaagaaaactatcagataatcttaaaaagatggatggtgaacaagaagtatcattgggtactttatttaatgaggggttcatccaatctaatacagatttcgaaagtattgatgacctttttgaaaaggcgggttttaaagtagaatctcaagaagatttcgcagcaattccgcaagaagaaattgacacctttgttagagaaaatactaaatttgaaagtttcacagatttgcagcaaaaagcaggggccgaatacgttcgaaaacaattattcaaagggctaaaataa

SEQ ID NO: 55131 - DNA, 432 bp, Acinetobacter baumannii
atgaaaaagattatgcaaacaaaagttgggttaggcggaaattgtgaaggagcaacacttgctaccctgttaggtttgaaccttgaaaacatccctgatttttgggaaggctgttcaattgaagacccaaacagcaccgctaatggcgaaatttatcaagaaaatttaaataagtttcttgcgcaacacggttttaaatcgatttctttgggttggaacatgccaacggaagaaagcattaattgggtcgaagagataagtaaaaagattggtactaagcatttggttgcaggtgtttcaccccgtgggcatatgcattcggtgatttatgaagatggtaagttgtggcatgacccacaccctgaaggcgggggcgtagtgccgtgccaaattcaatttttggtaccaatgttttcagggataagcgaatga

SEQ ID NO: 55132 - DNA, 261 bp, Acinetobacter baumannii
gtgaactttactaataaagaaaagattgcttgcccgaacttaaatgaaattgagcaagaagctcttcaattcataaatgcaaataaggtcgcttatacgcgccaaatgtatagcgcccttcgcattaaagataaaggactaagtctgaataagtttagaaagctacttcagggacttagagagcatcaacttattaaatttattcctgcacaacaagacagcttatctgcttggggtgcgaataaggcaggtgaaaaatga

SEQ ID NO: 55133 - DNA, 843 bp, Acinetobacter baumannii
atggaacaatcagtagacaaaatcgcagcgttagcgattgcagcacaaggcaacttacctgtacaggttgataaaaacgcttcaattgcgatcgtgcccgatggttttaaagttcatagcactgaaaaatttaacgcacatcgtgaccgtttccgcggcacttttaataccaacaatatcgactctttcgttgattatgcaaaagctcgtggtatcgaaggcttaaaaaacttcatcaatacaaataaccaccttcgcgccgaagcatttttcaacattggtgatgacaccctccctggtcatgcagatgacactgcaagcttaatcttggttaaaaagcctgaatttgtagcttttgaacaagcgaattctcgccgctttgaccaagaacaactaattgaccttttagatgattgggctgaatacatcacctttaaaggcaaaaaggttgtagatggtcaagtcgttgacacttcaatttcttttgaaaaaggcgttcgcgcactccgcaaagtaaaacttactaaaggcagcgaagtaaacagccacgtagccgaaatgggttaccaaaaaagtgcggctgaaagcatggaagcaacaggcgttgatgacgatcttcctacaacaatcgttcttcacactgaaagcttcaaaggtctgccgattgaatcagtgtttatttcagttcgcatttccgtgaaggattcagaccctattttcattttgcgttttatcggtaaagacaaccacgaccaaaagcgtgctgaccaatttattgaaattctcaaaggtaaattggcatcgcttaaaggtgaattttaccaaggtgtatttgaagcataa

SEQ ID NO: 55134 - DNA, 135 bp, Acinetobacter baumannii
atgaacactcaaacccattttttaaataagcgaatcaaagccgtgtttacagttggcgaattaatcggtttcacccttgccctgctaatcattattgctttggcagttgcagcgggctttacggcagctcaataa

SEQ ID NO: 55135 - DNA, 465 bp, Acinetobacter baumannii
atgacaacagatatccatacatggcgcagcctaatctgccaagaccttatcaaagcgggtttaacaaactcaaaagatatcgttgcagaagcttcaaacattgaagtttatgtatttggcgaaaccaaaacagcagaagcaaagcctgaaattaaaaacgcaggagttaaaacttctaaccctgcaaaaactcaaacggttaaagaaaccaaagcagaaaaggttgaagaagtaaaacctgttgaaattgcaacagttgaagaaccaaaagacgaagttgttgaagaaacaactacctctgaaatcaccgaaaaagaagtgaaagacgcttgtttagcagtagctaaaaaagaccgtgctgcacttttagccattttaagtgctgtaggcgcttcaactgttgcaaccatccctgcggataaatacgcagaagtaatcgcagcttgtgaatcagcacttgcataa

SEQ ID NO: 55136 - DNA, 666 bp, Acinetobacter baumannii
atgaaggccggactaggtaatgcaattaagcagttgagagcagctaaaaagatgagccaacaagaccttgcagataagttaggggtcgataagggcaacgtttcccgctatgaatctggtaaacaatttcccgacatagacaagctcgaaaaaattgcttcagcttttaatgtgacagtgtcagcgctttttgaaatggcagaaggtattgagaaacctaatgtctctagtcttcgcaaaaataataagctccctgtactttcttgggtgcaagcgggtgtttggacaaatgcagaagaagttgatttatcagaagttacagaatggctacctgcaccagacgaaggatgtgaagactgtttttatctaaaagttaagggtgttagtaatgaacctgagtttttagaaggcgattacattttagtagacccatccgtttattatgctgatatgcaatcaggggatgtaatcgttgttcgtaaacatactgatgcgacttttaagaaattgatcattgaatctgacggttctagatacctccaagccatcaatccaaactttgttccaaacatcattccattagacgaagattgtatttttgtgggtcaagttatcgattcagtgcgctatgtttaccgtgcaaaacgccgtacgagatttagttaa

SEQ ID NO: 55137 - DNA, 252 bp, Acinetobacter baumannii
atgtctacaccgcttcgtcaaatcagactgaaaaataattattcccttgcggaagtagcggcggctgttggttctgacgcggggaatttatctcgtattgaaaaaggcaatcaaaagccgtccttacaactggcagcagacctttcaaagttttttaacgaagaaatctctgagttagagcttctttaccctgaacgctatgtaacagaagggtatttcgaagacctcacacaagaggagaatgcagaatga

SEQ ID NO: 55138 - DNA, 369 bp, Acinetobacter baumannii
atgactgacggtaaaaaatttgataacggaaagccgcgcttttcgttaattccaaaaggttcgcttgcgcctgtaatcaacgtacttgaatacggtgcgcgcaaatattcagaagacaattggcgcaaagttgccaatgcagaaacacgttatttcgatgcagctcaccgacatctaaatgcatggtgggatgggcagaccttagaccctgaaacaggtgaatcgcatttagcgcatgcggttagctgtttgcttttcattttggctttggaacaagaaaagagtttgtcacgcccgatttgcggtacttgcggatttgctccttgtgaatgcaagcgggtctcttatccagttgattgggggcgttga

SEQ ID NO: 55139 - DNA, 540 bp, Acinetobacter baumannii
gtgaatgcaagcgggtctcttatccagttgattgggggcgttgatatggatgctaaagattttattcgtgaatatggaattgaaaaggctacaaaagttgttgatggcgcgcctagtaatgctgaaagttttcaagatggctactacttcagaactaagccgcaatttgaattttacaatggttttcatcctgtttggaacataacggataacgatggcgcgtatttcaaaaaacgggggttcgatcctgtagggattaatgatctgaaaatggtgcttgaaagtcttcgcatcgttgatcaattcggtggaatagaaaaagctaagttcaaatcacgaaccaaagacgggatgggttatttaaaagagtgcatcgcggatgttgaagcaatttataccaatcctcaatttacctacacggttttaactggcgcacaagttggctcagtgcttcagctcacgccacaaattgatgacatgggcgacgatagcaatttagatcatcacgtttcacctttctgtgaggtgcgtgacgtatga

SEQ ID NO: 55140 - DNA, 726 bp, Acinetobacter baumannii
atggctttacgcggaaaacaacaacgatttgtagatgaatacctgattgatcgtaacgcaacgcaagctgcaattcgcgcagggtattctgcaaaaaccgcatattcaattggcgaacagaacttgaaaaaacttgaagttaaaaaagccattgaagcaggtgaagctgaacttgcagaacgcaacaagatcacccaagacaaagtattaaatcgcttatgggaaatggcacaagcagacccaaacgaactacagcgatttgttcgtgtaaattgcagattttgttggggaattgatcacaactaccaatggactacaggagaatttaaaagagcaattgcccatgcacatgaaaccaatgctcctgaaccaaaatgtgaaggcggcttagactttgatcgtctcaaagagccaaacccagattgcccagaatgccgtggcgaaggcgttggctatacacatgttgcagataccacaaaggtaagcccacaagcccgtttgatctatgcaggcgttaaagagacgcaacacggcatagaaatcaagatgcacgaccaactaggcgcattgattaaagcaggtcagcacattggcatgttcaaagagcgtgtagagcacagcaacgacccagataacccgcttactgataccaaggcatcaagcaaaaagctatctgcacttgccaagttgatgaaggctaaaaagaaggtgaaaggcgatgagtag

SEQ ID NO: 55141 - DNA, 2220 bp, Acinetobacter baumannii
  misc_feature (532)..(541): n is a, c, g, or t
atgagtagagaacaatttgaaatcaatttacatgcaaatagcggcttgagaagcggtcacatatcttggagcgaagagcagcaacagtaccaagcgcatgatgacgattatgttgaagaagccgaaggcatgaactggtcattagctacattcacaaaatgtcagaaagaaattgaaggattacgaatgcttctatggtttgtcaaagatcatttcgatatgaacggtttggacaaagcaatgcctcgcgtctatgaaaaattaaaagatgcaactaccaacatcattaaatcaaaccacaacacatcatgcacatatcaatttgaacttgcttttcacaacctgcaagacacacctgaactacgcaagatttattggtctgcattaggccaattgcaatttgattctaacgatcaggtaatcccacctgagcttgaagagtgtccgtgttgtaagccattaattcgcaaaatcggaactgagacagaaggctacgagacttatgaaataggggttgatgaaaggggggggnnnnnnnnnnggggggggggggggtcgttacgggcgtcaccctcacggcgattgggagctattagaatgaccaaaacagctgatgatgaaatccttgcactgcttgctgaaatggatgaatcagagattgagcaatatttattgacgctcgatgaagatgaacaagcggaaatcgcaaagctacttgccgatgcgcctatttggttcccattggaaggcccgcaaatggctgcatatttatcacaagccgatgttattggctacggtggtgcagcaggtggtggaaaaacagatttagtcgttggctcattcttaacagtgcataagcgtagcttggttgtacgtcgagagaaagcacaaacagacggtatcgtacagcgttgtgaagaaatactaggccacaagaatggctacaactcgcaaaaatcattctggaatatgggcaacggtcgcttaatcgaatttggtggtcttgataatttgggtgatgagaagcgttggcaaggtcgtgctcatgattttaaggctctcgatgaagctacagaaatccgtgaatcacaagctcgctttgttatggggtggaatcgttcatctgacccaacaatcaaatccaaatgtctaatgaccttcaaccctccaactacagccgaagggcgttgggtaattgattacttcgccccatggattaagaagggacatccaaaccctgcaaagcccggtgaactacgttggtttgcaatggtaaatggcaaggaacaggaagttgaaaacaataagcagtttgtacttatcgatgatcagatcgtttatgactttgatccaaaagattacaagcctgaacacatcatcacacctaaatcacgcacgttcattcctgcacgtgtaacagataacaagtactacatggaaacaggctacatgagtactttacaagcattgcctgaacctttgaggtcacaaatgttatacggcgattttggtgcgggtattgaagatgacccttggcaagttatccctaccgcttgggtagaagcagcacaagcacgttggaaacctgaagatgagatgcgcatcttgtataaggggaattttcctatggattcttacggcttggatgttgcacgtggcggaaaagacaaaacaattggctatgggcgtcacgctttttggtacaacaaggcaaatattcttgaaggtattcaatccaaagatggacctgcaagcgcatcattcgcagtgtcacatgtaagagaccatgcgcctattcatgtcgatgtcattggggttggtgcaagtacttacgattttctaaagcaatcaggtatgcacgttattcctgttgatgttcgcaacgcggcaaattctttcgaccggtcaggtcaattaacctttttcaatttgcgctcacaactctggtggcagttccgtgaagcattagaccctgcatacggcagtacagttgctttgccgcctgaaccaaagcttttagccgatttaacggcaccacgttggggattgcagggaaccaaaatcaaagtggaatctcgagaggaaattattaagcgtattggccgcagtcccgactacggctctgcaattatcaacgcgcaaattgatacacctaaacgtcacatcatgcaggcaattaacgcttcagcagctagacgtgattatgacccttacgcgtag

SEQ ID NO: 55142 - DNA, 288 bp, Acinetobacter baumannii
atgtcaaatcaagttgaagttgttgcgattaaaaagggtttttatcacggcattcgtgatgttggcactaagttttttgtgccttccgatttgcttacaggtaaaaaaacttggtttaaacctgttaatgaaaattacgtattttcagaacagcaaaatgcagaccctaacaacccatatacacgaatgaataaagacgcgctcacacaagctgccgttgaaaaaggcattcagttatcaggggctgaaaccaaagcgcaaattattgagcttttaacagctgagtaa

SEQ ID NO: 55143 - DNA, 198 bp, Acinetobacter baumannii
atggcgcaagtaatgattatggttatggaggcaggcaaggctgagcacacatgcaacttgcttgctgacataaacaaaaacggtgaagtaacaaagctctatgattataacggcaatgaattaaaaattaactttttgcagggccaagtctattacaacaaaacttggtggcagtttactaagaagcaagacatctaa

SEQ ID NO: 55144 - DNA, 339 bp, Acinetobacter baumannii
atgtttattcatcacaatcaaattttatcgacattgcatcgtattacggggtttattgtaatttcagatcttatctatgcgatttacaatatatttgtgcatacgcccaaatactttattggtagtcttttagggcttattgcagcaatcgctacacagttcttatgcgctaaaagtgttaagactggaactacaagcagccgtatcggttcaattgtgatatctatcttaatgcttaatatgttccctataggaactgtaattgctgttgtgatgctatttttctctctatttaaatgggaaaaagattcaacgtttcaattacccgtaaaaaattaa

SEQ ID NO: 55145 - DNA, 126 bp, Acinetobacter baumannii
atgaaaaaactaatcttggtatgtttaatggggcttgcggtaacaaatgcttttgctcattcaggtggtactgattcttcaggctgccacacgaatagcaagacaggggatcgtcactgccattaa

SEQ ID NO: 55146 - DNA, 597 bp, Acinetobacter baumannii
atggacttttataaagaaaaactgtctcgaaaatgggggggatggtcaatagctgtggtctgcttctctttgacctatggtcatgcttatgcccagccactgaccttggatacagctttgaatctcgctgagcaatattcacctaccctaagagcaaatagcgcccagattgaaggggccgagaatgtagtttcagcttcaggtattttacccaaccctaaattatttgtaggtttagataattaccctgtatccggcgatgccgcatggtcagtcacacgcgaaggtatgactatgcaaaaaattggcgtgatgcaagattttccaaatcgtgccaaaagacaagctgaggtcgatttagcaaaagctgaactaggttcggccaatgctcaaactgagattctgcgtattgagttacgtcagaaagtcgcatctgcttggcttaagcgcttttatcttgaacgtaaattagcactatatgatgaactgttttcagagaatcgattactttctcaaattactcaaacacaggtcatctctggtcgtacaatcattgccgatgcacttgatcgacttcgaattaaaaatagagggtga

SEQ ID NO: 55147 - DNA, 177 bp, Acinetobacter baumannii
atgtctgagcaagattgtattatgtcttttgccaagattgcttatgccaacactgctcaagatatttcgcactcaattgtgttctctccaatagaacgctctattttttattctccagatcaaaaccttccttctccatacccttctggtttatggaaacccccacgctctaactaa

SEQ ID NO: 55148 - DNA, 429 bp, Acinetobacter baumannii
atgaaaattaaatttcaatatgttctaagagaagagtatgaaggtgatgaaggagtatatgtaccaacactcggttgggggatagccccatataaaaatcaagcggagggatttgatgtatatcttaggggggatgaagactttttggattttatttcaagcatagataatttagaacttatatctgaggctttattaaaaattgagagtatattgaaaaatcaaagaaaagaaattattttttctccttacggtgatatgggcggaagtgcgaaatttacaaaggatatcacgacatttaaacttcgtactaacaaaactaaaaattatcgtggagaaatttctactgaactatttttaaaagtattaattcaatggaaaaaatacttagaatctaatactaaagagtgtgagatagtcgatatataa

SEQ ID NO: 55149 - DNA, 471 bp, Acinetobacter baumannii
atgttatttggtgatcctagtattttttccttaaagtgtattgatactgatagtaggcaaaggaaattcatggttaacttagtgcttattataaatggaattgaagttggtacattagaggatggtacttatattccaacgtttaaagcaagtcttaatagaattgttaatccagaaaagcttgacttagagaaaataaaactaagtacagaaggaaaatatgattatttcataaatcctaatacaactggaaaatatatggcaagcttaggtgactcctttgatgatttcgatattttcttttatgaatctgaatcaggttttgttgaatttatttggaaacttcatcatcaaacagtattttcttatcatggtttaagaagtgatattatttattcgggtaatgtattaatatcttgtttattaaatattattaaagagtttttagaatgggtaaatgctgtagattag

SEQ ID NO: 55150 - DNA, 1461 bp, Acinetobacter baumannii
atggtgccatttgatttttcaaacttatctcctcaaattgtttggcagcattttcaaacactttgtacgattccgcgtccctcaaagcatgaacaacagcttcgtgagtatctaaaaaactgggccgaaagtcgaaatttagaaacttacgtagatgaagttggtaatttaattatccgaaaggatgcaactacgggtaaagaacatgtatctggcgttattcttcaaggccacttagatatggtcacacaagctaacactggcacggtacatgatttctttaaagacccgatttgtccagtcctcgaagatggctggttaattgccaaagacactactttaggtgctgataatggcattggggtggctttggctttagctgttttagattcaaatgatattgctcatggaccaatagaagttcttttaacagtcgatgaagaagcaggtatgagcggtgctcgacttttagaagccggtatattaaaaggaaaatggttatttaatattgatacagaagaatggggtgagttgtatctagggtgtgctggtagtattgatattgaggtagagcagccgcttagctatgaaccaatttctaaagatttaaatattgtgaatattcaggtggctggtcttaaaggcggacactctggcatagatatccatttaggacgcggcaatgcaaatgttattttggctcgttttttaaatcaatatttaggctcacttggtgggcatcttgttgagtttacaggtggtacggcccgtaatgctttaccgagagaagctgtagcgactattgcaatttcatctaaccaattgcctgaattagaaaaattactcgatgaatatcaaacagcatggaaaaaacagctacaaggtgttgatgacaatctgcaattaacaattcagcctaatagtgctgaagtgactgaagtgattgctcaacaacagcaaaacgagtggttacaagctttagcaacaagtccttatggcgttgcaagtatgagtcaagctttaccagatgtggttgaaacttcaaataacattggagtggtgagactaaatagagaaggtggaaaagctgttttaatggttcgctcaatggtcaaccaagaagctcaagattttgcagaaaaaattcaggcacattttcgtcaatttaatatcacctctatactcacaccgttagtttcaggatggacaccaaaccctgactcggcggctttaaagtgcctacaacaagcctatcaaaatgcgtttaatattgaaccaaatctaaaagtaattcatgcgggtttagaatgtgggattattgccgagcattatccacatttacagatggtttcgtttgggcctgatattcaaggtgcacatgcaccgggcgaacgagttaaagttgatactgtagagaaatgctggaagctactggtaaccgctttggcatctgtagagtag

SEQ ID NO: 55151 - DNA, 168 bp, Acinetobacter baumannii
atgcaagtcatgatcatggtttatgaagcagggaaggttgagcacacatgcaaccttcttgctgagcttgaaaagaataatgaagtcacaaaactttatgacttcaatagaaatgaactaaaaattaattttttgcgaaatgaagtctacttcaacaaaatttggtag

SEQ ID NO: 55152 - DNA, 1266 bp, Acinetobacter baumannii
atgaaagctttaacttcatctttatttatcgtttgcacttttaccacttccttatgtgtgggtgcaccttattctgcttctaaaattgaagaacttgcaaaagcaaatcccacagaatttaaagcctcatggttcgcagataaaaatagtgttaaatcccagactaaagaattacaaactggttatgactatgccacttctaagaaagtgccatttgtaattgatggtatttactatgttgatggtcaagctcaaaaatatgattcagcacaaaatagtaaagcttcactaattttacgctctaactcaactttaaagtttgaacaaggtgctaaattaattaccaagccaaataactatagttcttatacaacactagttgctagaaatgtctctaatgtgaatattgtatcgccagtacttattggggataggccaagtcataaatatactggcaataatagtcatgagtgggggtatggcttagctatatacgatggatcaggtaatgttactgttacaaatccagttatagaagatatgacaggtgatggaatttacataggccgtgagtggggtagtgtaaaagatagtccgccaaaaaatatccagatttcaaatgctaagattagtaaagtaagacgcaatggtatcacgatagcttctgtagatggactgactattaaagttccaactattacagatatatctgacaaatttaatactgttgcaccgtcagcagcgattgatatcgagccagaagaatcagcgaatactgaaaaatcttcaataaaaaatgtggtaattgactcccttacagcgattagagttaagtcaccaattcaaactaatcttactgacaaacgcacggtagatgttaagtttactggtgtaacaaatctaattgatagcacttcaagtgcacagatttttgcttatgacaatacgattgatacaaaaagcattacgggtggaataactattgataatcttgtaatcaaaggtaatgaatttgccccgaacttatctttaaagcaggacaattttcagttcaatataaaaaatcttagttctgaaaaagatatgactgtttatttgattggaaatgccaaagaaattagtaagtacaatggtttctcaatccagaatattgagtcaaaaggtaaaataaaagcaaagtataattttgactatgcaactaagaagcctcaaaaactagtaagcctaaaatataaaataaactatcctattgagataagtcagtaa

SEQ ID NO: 55153 - DNA, 201 bp, Acinetobacter baumannii
atggagagtaagcagattattactgttgcagtattggttctagcattattgattctaattttcttatttttctttgatatcccaaaagaaaataaggatttagttaatatctttttaggtgcagttgttggttggactggtaccatcgtcaattcttattttgggcatgatcgaacaaaggcaggatcaaatgacatttaa

SEQ ID NO: 55154 - DNA, 252 bp, Acinetobacter baumannii
atgtctgaaaaggcggcaaatatggttgaagtggttgcatccactgcggctacaaaatcaatgtatgcggggagcggagtgacgttatttggctggtattttcaggtcagtgcagctaccgctattggtttaattattacggttctaagttttttagttaatttctatttccagtttcggcgggatcgaagagaacgactggaacatgcagcacgtatgaaaagctataacggagcatgtgatggagagtaa

SEQ ID NO: 55155 - DNA, 1029 bp, Acinetobacter baumannii
atgaaaagctctaatgaatcaaaagctatatatttcttggttactttttttattggcttaatatatgtttattttgcggtttctatgcctaatgaatggtttagagaccgtaattattatgtactttatgctgaaattgcaggagatttgataagtgactatgactcaattttatcacttttagttaatgagccactttttctaactaccgcaaaattttttggtgatgcgttctctgctgatgctttccccaaattcatgtgtgctattattacaagtatatttgtctatgtagttgccaaaaaatcaagaacattcataatgttcgcactgggaattatatcgcttttttttgtttcatacttagaaactgcccagattatggtgcttagacaaggctttgcaactgcaatatttttacttgtctttctttcaaatataagtgacaagaaaaagctcttaacttgttttattctttctttctttcattctgttttcttcattgtgtcggctatttacgcactatatttattctatttgcgaaagaaaagcacgaagacaatgatttcaatagttgcagttgtgtcagctatcttattcttgttctctaggtttcttcttgagtactttggatttagacaggccgaactatattcaagtgaaacaggaagcggaggcgggggagcttttgttttaagtatttttatattcttgtatttatatttttatggggataaggaaaataaagaactatatgactggtcgctgattggagttgtgctattccttgtggggtattatttattcttctcggctggacgtctgtatgtttcattcttcccatttatcttggttctattgatatcaagatcaaggctacaagatatattgttcttaactgttatcaacctgatttatatcatcttgttcttcaatggtagttacctaattttgtttgaagcaaaggatccattttatatcagcacattattctcaaatcatgtaagtaatcttcttactttcttttaa

SEQ ID NO: 55156 - DNA, 315 bp, Acinetobacter baumannii
atggtccggttacagctactttttttatctaatttaaagaaaagtggaactggatttttatttgatgggctttttattgctcgtagtggtaaggtaataaattcaggttcaaatattggaagtagtgtaattgtagctaatggtcaatatgttgatcttattaatgtaatgcaggttggtgatggtggtttagttaaatcatctaaagatgttaggacagacttgaataatggtattgaatggaaagaaggagtagtgcataaacttgttaaaggtgcaactctcaacattccaggaggtctaacagactgctga

SEQ ID NO: 55157 - DNA, 246 bp, Acinetobacter baumannii
gtggccgcagtaaatcctgatggatcattcacaggtgaggttggggttgatatatatgatggaaacaaggtttacactggtacaaccaacctgctagaaacattcttaatgaataattttaagcagtcatataatgtgcaaaactttcaaacgttacctttaaagaatagctatggcgagcatattgcaaaatcaaatggtattctgaaacaattaatttctttattgcaaacccccacaatttaa

SEQ ID NO: 55158 - DNA, 858 bp, Acinetobacter baumannii
ttgggtgaaatatccgagcctttagtagctttaacccctgctttgagtgagttagcgttagcaggacaagctgctcgtggtgttgcaccaattgcacaaggtgaggctattagagcagggcaagcaattgcaccaatagctgagcgtgcaggacaaatggcagtaagaccagttcaagctgtagctaatgccattcattcaggtgttcaacgcatgggtgagatggtaggcttaagaacaccagaagcagaaggtccagcacctgcaaatgttggtgcagctcaagtcgatcaggccacaatccgtcaagcactttctcaagatttaccttatccagttcaattaactgaaggacaaatgaatcgggatcccgcccaactcaagtttgaagttgaaactgccaaggatccagaacttggtactcctcttcgccagcgtcaagaagaacaacatcaagtaatgcaacataatttggatgcttttatcgatatgactggtgctaaagccaccaatatgcttgaagcaggattatcagttgataaagcacttcaaaagcaattgcaggcagataaaaataaggtgcgagtagcatatgcaaaagctgataagtcagatgaagcaaaaagaccagtagaccttactcagccagtgagatcaggcgagaatgatccaatgtttgtgattgattatctgaactctcaaccggatttgccaactacgccgattttaactagtgcaaagcgcacagcagaatctttgggaatagcaagacgtggagagaatggcgaatttggattctatgcaccccgccatgcagtatgtgagacagaaaaccttcagtttgacaatgttaagtaa

SEQ ID NO: 55159 - DNA, 192 bp, Acinetobacter baumannii
gtgatcacttatgagcaaccacaatcagccccgcaagttcctgaaccatcttttgctgataaggcacttggattaggtgaaacagcactatcttctgcaacaggcgctacgagcggtacgcttgggatgattggtggaaccattagtcaagcaggccgagaaatcatgtcaggtagctttggtacaccttaa

SEQ ID NO: 55160 - DNA, 1446 bp, Acinetobacter baumannii
atggataaaaatcagaatgcactacaagtgggttatgaaagggaaaaatcaatagaagaagtattaaaacaatatttaatagcaatagatggaatcacttcgacggctaaaattgctttacctcatattttgaaatggaaactttcagaattcgaaatattacaaaataaattaaaaaaatttaaagaaatcataaatgatgagactggaaaaaaaggtttaatagcagaaaatgctagagattttgcagaaataacagaatgtcttcgtcaattagaagtaattaataagaagaaacatgagacatatttagctaaaagtttatttactcaattatttgcagaatttgatgcatatattggcgagttactaaaagtaatttatctgggtaatgaagacttattaaagggtattgttagagagatatcattagctgacataatggatttttctgatttagattctgtcaaaatatctatattaaataaagaaatagaaacattaagacgagatagctatatagagcagttttccgccctagagaaaaaattcaaaatagagttaaaaaaatttccggagtggtctgcttttgttgaactttcacaacgtagaaatataattatgcataatggtggagttgtaagtgatcaatatataaatatatgccagaaagaaggacataaatttgaaaatactacaaaaattggatctgatttagatgtcggttttgaatacttcatggaagcttcaagaatattatcaaaagttggtttaatgctggcatatacattatggagtaaagtatttccaaaacaaatagaagaattacacttatcattaaataacactgtttatgattttttacttaataaaaaatggaggtttgtatctgaattaggtgactttgtatttagtaagcctatgctaaaggatattcaggacattcattacaagataagaattgttaactacactataggtttaaaattctcagagcaaaatagtaaagcggaagaaatgcttagttctgtagactggtccgcaaattatagagattttagacttgcgattgctgttttaaaggaaaattattctgatgctattcaaattatgaaaagtattgggaaaaatggtgagttgattgaacaacactcttatcatatctggccgcttttttctcgattcagagaacaacaagagttttatgatgcttattatgaaatatatggtgagcatttttcagaaagtttagaactaccgaatgaaactattaatgctactatagaaacggcaacttcatcatcagatgaccagaggtctcatgaagaacttattgctgagaatcaattagaaacaaataaggatgatgaatctaataatattagatctactgatgaagaaaatactcaggatgatgaggaaagcgaaaaatataaatgctcataa

SEQ ID NO: 55161 - DNA, 1104 bp, Acinetobacter baumannii
atgaaaatattatatttaatcaccggtcttggcgggggcggagctgaaaaagtagtagctgaccttgctgatcaaatgcatttgcgaggacatcatgtaaaaatagcttatttaaagggtgaggctattgttaagccgaaatctgctaacattgaattaatttgtttggaattaaataaaataacacagttttgtagtgcttttaaaaattttaaaactattattgaaaattttaaacctgatgttgttcatgcacatatggtacatgcaaatatttttgcgagattagctcgtaagtatgtatcttttcctcgtttaatttgtactgctcatagtaataatgagggtggacgcttaaggatgcttgcatatagattaacgcatggtttagcagatatgactactaatgtaagtcgacaggcctgtaaaagctttgaaagttttagagctgtccctaaaggcgatattttcactgtttataatggaattgatcttagaaaatttaattactcagaacagattcgtattcaaactagaaaattattaaaagtagaagaccatacattaatatttctagcggtaggacgttttcatgaagctaaaaactatcccttattaattaatgcttttgcagagttcgtacatactatttctaatactaaacatagtattgctgctaaattatatattgcgggtgatggagaacttcgttctgttattgaggagttaattgctaaatatcgactcgaggaaaaagttattttgctaggccgtagagatgatattcctgctttaatgtgtgcatcagattattttgttctatcatccgcttatgaaggttttgggctagtagttgctgaagcaatggcttgcaataactttgtaatcgcaaccgactgcggtggtgtgtctgaagtgatgggtggaacgggtttattagttagttctcaagaaaaagataaactagcaagtgcatttttaactgcaagtcaattaagtggagaggagataactcaaaataatattcaagcaatgaagtatattaatgaaaaatttaatctcgataatattgtaaatcagtggttaagtatttatgcaaaataa

SEQ ID NO: 55162 - DNA, 552 bp, Acinetobacter baumannii
atgccaactttagaaatctcttccagaaaattacaggttattcaaaccgccatacaactctttactacgcatgggttccataatgcaggggtagacctgattgttgaaaaggcccaaataaccaaaaccaccttttataaatattttggctcaaaagaacgcctaattgaaatgtgcatcgcctttcaaaaaagcctactccgagaacaagtgctttctatcatttactcaaaccgttactacacgtcaaaagataaactcaaagaaattattgttttacatactaatttaagcagcctgtacaaccttttacttaaagccatttttgaaataaaactgctttacccgcaggcctaccgtatggcggttgaataccgaaagtggttgcgccatgaaatttttgacctgatttttagcggggaaattcgcgagccaaaattcgatgccgatatggtcgtaaacctgatcgatggtttgctgctacaggttttaagctcaaatagtttggatgaacgggatgtggtggtggagcggttttggggggaattttag

SEQ ID NO: 55163 - DNA, 417 bp, Acinetobacter baumannii
atgataagactatcttcaaagtccattttaatattaacaactgggtgtttgttaaatggctgtagccaaggccctcttccattagaagttacactacatcaagattatgtatgtgcctttaccaataaacctccaaaaaccacttatcctgttgataatagttttttgatttatatggggaaaatcgacaatagaaacgcatattcaagttcttatgagaagttttacccaagcggtccgttaccaatagaagaaaaggattgtgcaaaaattcctctaaaagagtttgaaaagaatgtggtttatgacattactttggatacatataaaatttttgatacacgtatttgtgtagtagaacagaacaataagctagaaattcgagagcctgaactcggtgagacaacttgtaaatag

SEQ ID NO: 55164 - DNA, 660 bp, Acinetobacter baumannii
atggaagtagaccatatttttatttgtgtacaatcaggcgctcccgaagctgaaactttaaaaaaattcggtctaacagaaggttcatctaataagcacccgggtcaaggtacccaaaacagacgctttttctttaaaaatagctttatagaattaatctttttaaataatccagaagaagcttcaagtgatctcacaaaaccgactctgctttttgagcgactaagtactccaaataatatcgcgtccccttttggtatttgttttcgccctaaaaataaagatgataacggcgcaaaatttcctaattgggtttacaagccaatctatttacctgccagcttagaagtaaatattgccaaagatgctgtggtatctgagccaatgtggttcttcctttcatttgcttcacgaccagatcttgccgcaaaagaaaaacaacaaccacttgtgcatagcaaagatttatcagaaatcaccgcaattaaggtttctgttccaaacctagagcagcaccctacttcgttgctgttcaatacacttgataattttgaagtgactgatggatcagagcatttaatggaaattagttttgatcatgaacctcaaggaatgattcatgatttcagaccagaactgccgcttatttttaaatattaa

SEQ ID NO: 55165 - DNA, 2010 bp, Acinetobacter baumannii
atggcatcactactttctgccgtacgaacccgcttttttgacaaaagcaacaagcctcttgctggtgggaaggtgtatacctatgaggcaaactcaacaaatccgaaagttacatggtcagatgaggcgctgactgttcaaaacactaaccctgtacttcttgataatgagggaacagccttaattttcttttctggaaaataccgctttcggatcgaagacaagtatggagttttagttgaggacaacccatcagtaaccagtttggtgggaattgatggtgtcacatcggacattgtaaaagatggtgatgaaaaccaaaaaaccatcaatgataagaccacgcaatatgtagatactattgttgacttatcaaatttgcttgttcggaaaaacaatcaaaaagttattgttaataaccgttatacctatcaatacgataaagactcagtagagccaattgatggtatttattcagttgaggctagtaactcaatcggccggtggatacttcaaaaacctacgaatttatatgcttcagattttgcaaaaacttcagcacaatccatagaaagccaatcagttaagttacagcaaactaatgatgtggcagtaaagcttggtgttccttttattgtggatgatgaatttatggttgctccagttgagactgaccataatatttgtttttacgtccgaagcaataatgacatcacttttacaccaaggggcaactttaaaatcataccaaatgattttacaacctattcaattctacatatcgaaaacattgaaaactataaggtgctgttccctcaggtaacaggtgatagagatcagcatcttggtacagatggggagtggggatacgggattgctaactaccaatccaaaaaaggctatatttatcgaccgaaggttatgaatacctggggtgatggtatttatgtcggccgtcgttggggattaataaccgatgatactcctacagacatcacaatttctgaaccaactgtattgaacgctgggcgaaacggcatttcactcagtgcaggcacaagagtaaacattttgatgccatatgtttatggtactaagggaaaagcgcctgaggctggcattgacattgaaccagaagctgctgatggattgccaaaatcacatttgaaagactgtattatttcctcaccaactattgaaaactgtaaaatagggctggttgggtacttcttcccaaatgattctacatatgaattagaaatttcaggtgttacaactattaaaagttgtgagcaaccattagtgctttgcgcggggggtgcaaacaaccaaggttatattgatatcaataagttggttttgtcggacttaaaaggtaatacccttttgcaaaatgcatggcacagaagcgggggattccggtgcacagttaaggagctagttactgataaatctttaccaattgtcatgacaatgaatggggcttttagcactggtaagcttggtcattttgatattcgtaaaatcattaacaatgatccaacaggtaaaattggctattacgttccagcttcggttcaaaactatgaagataattcttcatacatgttcgaagatccaaatcgtgcatatctagactttgatttcattacccacttttttggtaaagactttctttccaatatcattactttgcatactggttggactgcttcaagccggaacatggcgaactatatctggcaagatccttcgatcgatacatctggagcttcggcaatttatattgcaacagccaatgattaccgccggttgaaaatcgggttggcaaatacaacaaccatcgttggccaaggttgtaatatttcgggtcttcgtattcgtaaagcggatggctcttattacactgaagcgcatacacaaagcattggtgcatggctagagttccaaaataaccaaggtggcaacaccgaagtttttgggcaatatggtacatggacatttacataa

SEQ ID NO: 55166 - DNA, 2250 bp, Acinetobacter baumannii
atggctagtcaaaatgatatttctgcgcgtattgatgcagcaaggaaagctggatttagtgatgatgatatttactcaacattagctagcaatcaaggatttagcacacgtatctctatggcaaagaaggaaggatttagtgatgagcaaattgcacaaacacttggattgaaagttcaaaaagaccttgggatgcagcaacctattaaaatatcagctactcgccaaccttttgactggaaagcagcgcagcaaaagtctatgcaagatcaagctaagaaagcaggaccaacacaaatgtgggagtctgcactacttggagcatcagatctaggggcgggaattatgcaaggttttgcgtatgctggcgataagttaggacaaggccttaactcagctttagggacaaattttgacaccaatgcttataagcgattcacaaaccaacgccaagatattgaagatttccaacaagctcgtagacagcaaaatggacagggttatgactgggctcgcttaggtggtcaagttgctgccactgcgccacttggggtattggggcgtagctatcaaggtgcaaacgtattgtcaaaagcaggcgcaggagtagcagcacagaatgcggctgttggtgcagctatcggtggtgcagggtttgctggtgatgccaaccaacgtctagataatgcagtcttaggtggtattgggggcgctgccagtgcagcactgggtgaaaaggttgggcaaggtgtttcaaaagctgtgaatgcggttcgaaatacaggtccacaagcagcacaacgcacagcacaagcaattgataaaagtcttgatgatgcactgcgtcaacaaggtatgtcactaagcgaactatcagatgatgtcgctaatggcttgcgtaaagaagccgctgatgcattgaaatcgggtaaaaaccttaatcctgaagctgtagctcgtaaggctgttttagatcaagttgggattaaaggaactaagggtcaggtaagtggtaatgcacaacaatggcaaaaagaagctgagttggcaaaacttcaaaatgttggagcaccattacgagagaagtttattgatgataataaacagcttgcaagcttgttagatagtgctaatgcaagtacaggtggcaaagcaactgatcaatacggggcaatgcaaaatgcgttatcttctgttaattcgcaacttgatcaaaacaagcagtttatcaatgcagcttatgaagcagcaaagaaagctcctggcaatgatgtagtcattgatgggcgtggctttgccaatgatgcgtttaccgctcttgaaaataactatgcagcttctagtttgccaccaagtgtacagaaaatcttaaaagacatagctgataaccctgacaagttcactttaggaaagtcggaagaattagtaaaaattctcaatagagaatacgaatcctcacttcaaatgggacagcctaccagttcaacatattcaattggtttggtgcgtgatgccttaaatggtcgccaagctgaagccatgcaaggccttttatctggtggtaatgacgcagcaaaagcgtaccagtttgcgcgccaagcaaaccaatttaatgcaaatcagatagagggcatgccactcttacaagatgctagaaaaggtgttgagccagacaaactgtttaatcaacatatcttaaatggaaatgttaatgaattggctcgtactgttgatttgctcaacaatgtcaacccacaagccgtttcagatattaagcaacaagttttagagttcattgccaataaggcaattaaacaaaatggacaatttagtccagcagggatgaagcgtgcacttgatggtattggtgatcgtagactttcaacattatttgaaccagatgagcttaaaaacatcaagaatattggcaaagcaggtgaatatcttgtttcacaaccagctcattcttatgtgaataattcaaatactgcttcagcttcaatcaatagtttaatgaactttttcggtaaccctaaagtgaaagcggttttgaatataccttatttaaaagattatgtagttgatccagttgccaactatgggagtactaggtctgtaaataaggctttccaaccagatatctctggggctccatctgcacctataaaaccttcaccacaacagcaatcgctaattgatcggcttgtacaggctggattaattagcggggcttctgctgcaacccaataa

SEQ ID NO: 55167 - DNA, 627 bp, Acinetobacter baumannii
atggctacatcacaacagctaatgcaattaatgaataatccaaatgcaagaaaaatgcttgatttgattgcagcaacagagggtgttgagtacggctataacactctttttgggaatcaaagattgaatgatctttcttggcatccaaacatcaagaagccttttaagcaaacggatgggcaggttaaatacactactgccgcaggacgctatcaattccttaaagatacatgggatggggtggctaaacagtatggactcaaagacttttccccccagtcacaggatcttggtgccttagctctactagctcagaacggtgcattaccttatgtattaaagggtgacttcaatactgcaattaaaaaatctggtagtacttgggcatctcttccaacgtccccgtacgcgcaaaataaacgctcatgggactttattaataagcaacttggttcaactacaaccagaccgcaatcatttgaaccagattttatagatttaaaaaaagttggaataggccaaaacttccaaccagaaatggttgatcttgcaagtgtaggaatcgggcataaaacagaatttcagcctgaatttattgatctaaagtcagttggtattggtggataa

SEQ ID NO: 55168 - DNA, 459 bp, Acinetobacter baumannii
gtgaagaagattatattttttatagcttttttagcttctagtttaagttttggtgcagactggcgatatgcggcttctacagatgctgatagcttttgggttgataaaagtttttataaatatgatagtaaaaacaattctattgaggtttggtctaagtctgtaactaaaaaacttggattgaatgaattttatacaaaatcgaaatcgcttgataagtactcttgcgtggacaaagctgttaaaaatattgcatatgttgaatataatgttgatggaagtgtatcaaaatcttcaacaagtgcagctagcaagttcacaattatattcccagattcaattgctgagtcaatttgggaaattgcttgcagcacaaaagggaaaggatttaaattttcaaaatttcaacagcagttttttgatgcatcatcagcagaatttaagtctaaatttgaataa

SEQ ID NO: 55169 - DNA, 1377 bp, Acinetobacter baumannii
atggctattgatccaagcatcattacgaatgcaacactacaacagcaagcgcagcaaaatgaaataggcaataaacttgcagggctaacaggtgctcttgggcaattggtgcttggtcgcaaagctcaacaattgagccaactagctactccacaagaacagcaagcctttgccaataattctattttctcaccttatttgaatagagttttaaaggcaaaccaacttacagcgcaaaaaaatgcaattgaccttttaaaggcccaagcagaaattggcaaaaccaacagtgaagctacaaagaataatgctcaagcaggtggatttactttagataactctacgaagaagtttggagcaattcaagatgtaatgcagcaagcagctatgacaggcgacaaaggtcaacttttgcttggcttggatgctttacaaagaactggaactattactcctgatgactactcgcatcactcatcgctacttcaggctatgactcctgatgaagtgaaaaactatgcaagaggcatagcttttactaataaggatacagcgccatacctttaccagtctgcaaataatgctgctgataacgctacaagtcgtgctaataaccaggcaacagttgatgcatcgcgttatgcaactgatacagcagcatcaacagctgataaaaatcgtgaacaacagtcgcaacagttcagtcgtgaacagcagttgcaagaatggttggcaaagaataagcctattgatacccaagttggtaatgatggttatttatatgccatctatccaggcggtaaaggagttaggatttcagatcaaaaaggtaatccaatccaacctcagtctaagcgagatggtaaaccccaaatcagtgataaagcattagaatcaataaatggaatcaatgttagtctttcaacagctacccaaaatgctcagaaaattaataatattatttctgatctacaaagtggaaaacttaatttaagcgcagcaaatcaattaggtgcaaaggccaaaaaccttgttggactatctgatgaaaatagccgtggagttgaaaacttccagaccgcacttaaccaagctgttaatgatttgttgatgatggcaaaaggtacacaaacagaaggggatgctcaacgtgctgcgcaagtcattgcagcgaacccaccgcgcgataatgcagcagcactacaagttcttcaaagacttgcagcagtccagcaaaacacaattgctgcactaaaccaaaataagaatgatatttataacaactatgggatatctccacctcaggcaaaagcgcaacagcctgcacaagcaggagctaatcaggcaaagttgaataatattctgtttggtcgttaa

SEQ ID NO: 55170 - DNA, 648 bp, Acinetobacter baumannii
atgtcatttattggtaatgccgtaggatcaatcactggttcaaacaagcaggcaaaagccgcacaagaagctagtaatcagcagtatgaggctactaaatacgctactgaccaacaaaagcaaatgtttgatgaagtacgtaaagatcagcaaccctatatgcaagctggctatgatgcactcaagcagcttatggggggcatgggccagaatgggcaattcatgcaagcttacaatggccaagatatttataacgacccaagttataagttccgcttaaatcaaggcttagatgctgtgcaaagtggtgcggctgcacaaggtgggttgctaagtggcgcaacacagaaagcacttaatgattatgctcaaaactttgctagtcaagaatatcagaatgcttacaacagatataacgcggaccaaactaaccagtataaccggttatctaatcttgttggtttagggcaaagcgcggctgctggtgttggtaatgctggtatgcaaacagggcaagccattgcaaacaacactatggctggtgcaaatgctcaagcagctggaacaattgctgctggcaataaaacagcaaataactttaacaacttactgggtattggtactgctgtagcaggcatgtttatttaa

SEQ ID NO: 55171 - DNA, 441 bp, Acinetobacter baumannii
atgatcacagtgaggcgtgaaaagtggattgattgtatagatcagattatgccgctttgccaacaggtatttgacttagaagaagctagatttaccggtttgcaattagattttgatcttgacttatatcaagcagttgaagaagcagaccgctttcattgtcttgttatgcgttcaaatggaatgcctgtaggtttccattggattttcattactccaatgcttcgacataaaggtttatttcaagcgcatacagatgcgatttttgtagatccaaagtatcgaaattactcaaacaaacttattgaattctctgagcggtacataaaaagaatggcctctttttggacgttagcaaatctaaaagcagtagatcgtgagcatgtctggtgcagaaaaggatttgagccaattgaaacaattatgtttaagaaattatga

SEQ ID NO: 55172 - DNA, 333 bp, Acinetobacter baumannii
atggcactaattaactacacacaagcagttataccccaaactctgccagctggtgatttccttgcttatacagtgccagcaaacacagtggcgcaagtacgagcttcaacgttttataacaaatcagctgcacctatcacactcaaagtttcagttgttccaagtggtgcaacactgggtgctcaacatcaagttgctcagaaaaatattccagcaacaagctcctatttaaatcctgaaatcattaaccatgttcttaaagctggtgacaaactctatatcaatggtgaagggctgaatgcgtatatatctgtaatggaacaagtcacatga

SEQ ID NO: 55173 - DNA, 399 bp, Acinetobacter baumannii
atgaatatcaccaaatcaattcagatccccaacactcaaatgttcaataatggtgttatggatcaggcttggtatatgtttttctattctttaagccaaaatgctagcaaaggagaggaaattgatactggtcaacttcttcagctttcaagtcaattacctgccgtgacagtatccaatgcaatactttctgatattgatgatttacagcggaactttcctataagtccaaccgctcaatgtgaaaatattcaaccgatgccaactgcatcggttttttattttgagtcagacaatatttttccaacaacaaacatctgttgtgatgacaagctttatcccttgccaactgtacagatcactaatgatatgcaggtaattataaatggcactaattaa

SEQ ID NO: 55174 - DNA, 1395 bp, Acinetobacter baumannii
atggcgactattattgatattcctttcgttggtcagtcatatcacatgaaagattgggcagttgattgccaaagaacacttaacctatatcctcaaatagttgaaagtgggaatgctcctcaagtgtcagccttaatgccaacacctgggcttgtctcaaaatatcaacttacaggggcaataagaggcctatacccaacaaatatagggatcttggctgttgctggaaataagttatatctattagatgagaatgttagcgaaataggtgatattgcaggatctaacatggttagatttgctgacaaccgcatagaagtcttaattacttcagtttcgcaaacatatgagtttcacttggaaactaaagctctaaaaattgttgagggtggtggtttccttggggccgaagatgtcacattcttggattctcgttttattgttttaaatcctaattcagaccagattcagtggtctggactgcttaatacaaagttttcggcactaggttatgcaacagcggaagctagctcggataaattagtaagaatctttacccaaaatggccaactatggctaattggagagaagactaccgaaatatggcacagtacaggtaatgctgatcaacctttcttaagagtatctggtgcatatattaattgtggatgtattgcgaagaactcacttgcgcaatttggtatgggtctaatttggctttcacagaccgatgtaggtgatggtcagatagtacttacagagggatatcaggttaagcggatttctaaccatgccatggagcaggagtttgcaagttactcgcgattggatgatgcagttgcatactcttaccagcaggaagggcattctttctacgtattgtctttcccaactgcaaataaaacatggtgtttcgatggttcgtctggaatgtggcatgagcgtagttactataactccagttcacaacatgagcgtcatagatcacaagttcactgtttccacaaaggaaaacactatgtaggtgatcattctaacggaatgatatatgaattaagtttagatgctgaaacagataatgggcgtttaattatgagagagcgagtaactccagtaattaatcctcaggcacagcgcctaatatttgatgaactagaagttcttattcaagctgggcaaaaaacaaatcgtgaaccaattgtcatgcttgattggtcagatgatcatggtcagacttggtcttttgatcgtcaagagtcacttgggaaagttggtgaatggaataaaagattaatatttaggcgattaggtcaggcatttaatagggttttccggctacgtttaactgatgctagccgcttaattattctaggcgccaaggcgaaggtgaggtag

SEQ ID NO: 55175 - DNA, 621 bp, Acinetobacter baumannii
atgaatgtcagtaagatcgtgacacttgcactaaagcaacttggtgttcttgctgcaggtgagaatccaactgctcaggaattagcagatgctacagactgtctaaggggaatgcttgggcagtgggcaactgaacagcttttcgtttataagaccctacctataacacttaatttaagcggtgcaggcacctacacactaagtcaaacaattcagtcaatttcagagattggagtgcttgatgatgtagagatcaatctaatcaatgataagaataatactggtgttgctgaaaaggttatttacacaaaggattcacctttctggaaattccaagttttaagtgactcaaaaaagctagaactgaagtgttatgtattgccaactaccttggagatgcatgacgaagttgaattacctgttgagtatgaaagggcactgatattgtcacttgctattgaaatagcaccattattcgcagttgagccttctatgtctctagttaggaatcagcaaggggctgtaaacctattaaaacatagcaactcaacaccaatgtatacacaaaatgatatgccaataggtgtttgcagaggcgatatatatggcgactattattga

SEQ ID NO: 55176 - DNA, 459 bp, Acinetobacter baumannii
atgtcaaaagaatatccaaagatgctctataagggcgatttagttaatttcgaatatgctacggctcattctgatgaacatgaagatgaactgaaagaaagcggttggattgagcatcatgagctaagtttacccgatgatagccccgacattaaaagcgcagctgatgcaacagaagaaattgattcaagtgcttttgtcccagttgaacaatttaatgctgtagccaaaaaacttgcagaaactgaagatcaacttgccacagaaaaaggtgaatacatccaccaaatcaatgagcttcagaaagaaaatgccactctaaaatattcagcgatgggtgctaatgatttgaaagcaattttagatcagaagggcattaaatatggctctcgtgatgaaaaagatgctcttgtgaagttagttctcgacagtgagtatggcaatggtgattcagagtga

SEQ ID NO: 55177 - DNA, 1197 bp, Acinetobacter baumannii
atggctaatactttattaacgcctaaccagattacacgcgaagcacttcgcattctccaccaaaaactaactttcattggtaacattaaccgtagctatgacgattcttttgcaaaatcaggtgcaaaaatcggtgactcgctgcgtatccgtttaccaaaccaatatgttgtacgttcaggtgcgactttaaatgctcaagatacaaatgagcaatcagttacattgcaggtcaacaaccaaaagggcgtggatttaaacttcacctctgtagacttaacactttctttagatgacttctctacacgtattctagagccagcaatggcggtattagctgcaaacattgaagctgatgccttgaacatgtacaaagatgtttataacgttgttggtacagctggtactgttccaaatgcattaaagacctacttgcaggcacgtaaagttcttaatgacaaccttgctccaatggataataaccgcagcatgcagttaacaaccggcgcaaacgttgaaattgtagatgcattgaaaggcttgtttaacgactccacacaaatcagtaaacaatatcgtgaaggtatcatgggccgtactgctgggtttgattggtatgaaaatacgctcatgccaacgcataccaacggcacacaagcaacaggttttacagttaatggtgctggtcaaactggttcgaatttaaacattggtggtttaactgctgctaataccttaacaaaaggtacagtgtttacaattgctggtgtctatcaagtacatccagagacaaaagcaatcacaactaacttgcaacagtttgtagttacttctgatttcactgcctctggtacaactggaacaattggcattagccctgcaattgtgacgtccggagcgcttcaaaacgtcaacgtatcaccagctaactcagctgtttgttcggttgtttctggtgctgtgagcactggttatggtcagaatatcgcccaccataaagacgcctttacgtttgcgacagctgacttagtcatgccgagcggagttgatttcgcagcacgtgaagtgtttgacggcatcagtatgcgtgtggttcgtcaatatgacatcaataacgataagttcccttgtcgtatcgacgtcttgtatggctacaaaacaatccgtccacaacttgcttgccgtgtaactaactaa

SEQ ID NO: 55178 - DNA, 804 bp, Acinetobacter baumannii
atgacagtggaaactgaagctcaagacatcgtagatccagctactacggaaaataacagcgcagcaagtcaagagtcagaagaactaaagcagcaaacgcaagaacctgaagttgaacagactgaagaggaaaaagccaaagctgctgaagaagctgaagagaagaagcgtagtcgagcaaaagaacgtattgaacgtttggctcgagagaatgcagaacttcgtaaatttaaagaagaagctgaggccaaggctaaacagccagttcggtctgatgaagcgccgaaaattgaggactttgaagattactcagattatctaaaagctcaacaagattggtatgttgaacgggctgaagaacgggtattggcccgcctcaatcaagacaaagccacccagcagaaagttcaagctgaggctgaatatcaagcagctatggcggagcttgaaagcgaaggtgtagatgttgcttctttaattgagaaatcaaacagccttccttctttgccaataactcttgatcaatttggaatgtctgcaaaagacaccctgggcttagctcaaacacttcttagtgacgaggatctttattacgagttggctcgtatgaatccagtccaagcagcagcaaaaatcggtcagatcattggtaataaaacagctaaatctgttccaccagctagtaaagccccagcacctatcaagccagttacagccaatgcgccagcatctcgtgaccctgaaaagatgtcgacagatgagtggatgaaacatcgtaacgaacaactcaaaaatcgtaaataa

SEQ ID NO: 55179 - DNA, 2268 bp, Acinetobacter baumannii
atgatgaaagaaaaagatcaagaaaaagatgatgatattcttgaagatgccaaagaatttagagacatggctcaagattactgggacccaatttataagcagggacttgaggataaagagttcgtaacgataaaaggggcacagtgggaacgtggagcgattgcaaaacgtgagcagtctggtaagccttcactggaaattaacctttcacgagcttacgttcagcagcaaatcaatactatgcgccagaacaggccgcaagctaaagtagttccggttgattctggagcagacccggaacttgcaaagattcttgaagggctaatcaaagacgttgaagaagcttccaattttgaagacgctttagataccgcagctgcaaatcaggtgcattcagcagttggtttttatcggattgtcactgattacatcaatgagcgctctttcaaccaagaaccacgcttcaagccaattgaaaatccccaagctgttctaatcgatccattatcaaaagctcttgatggctcagatatgactaaggcacttgtttgcgaatgggtcgacaaagaacagatcgaagaccaatatggtgaagatgctgtatctaactttgaaattgaggctaatgaaaattggtacaacaaaattgaagatacagtctgtgtagctgagtatttctacaaggaagaagtaccagataagcttttaagacttgttgatgggactattgagtttaaatctgagctactcaaaaagcttaaagaatctgagttaaagctattaatttctgatgagcgtgatagctcaatcacagttatcaaatgggcgaaattaacagggtgcaaggttcttgaaaaaggtattttccctggtaaatacattccaattttccctgtttatggcgaagtcacttggatcggcaataagcgtattgttcgctcattagtgcactatgcaaaagatgcacaacggctgttcaactattggaagtcaacagaagcacacattttgcagaaaaaccaagatgatatgactattgttgatagtcgtggtatctcagggtttgatgaatggaagaacccagcaggggcacaatacttacgtttcaaagctactgatgaaaatggaaatgccattccatatccaacgcgtttaggggcagcagcgccacctgttggtattttgaatgcttctgagtctgcaaaacagcttattccagacattttgaatatgcatgcgccacaaatggggcaagatgttaatcaacaatctggtgtggcaattggcctgttacagcgtcaatcggatacagcgcaatttcattttcaagacaacgtaaacaagacaattcgacattcagcaagagttctcattggtttgttcccaatcttatatgacacagaaatcgtgcgtcgtatcgtgggggatgatggtgatagtgagctagttcgacttaatgccactccacaaaccgaagatgagcaaagcaaagctatcaatggaattcttaatgacatgtctattggtcgatttgatgtccgtttagatactggtccatcattcaatactcaacgtgaacagtcatttgccttaatgatgcagcttgttcaaagcaatccggcattatttaaccttgttgcagatctaatcgtgattaattcaccgttgttgaacgctaaagaaattgcagaacgcgtgaaaacccttattccaccgcaagctcttggtaaagacaagattgatcctgagcaagccaaggcgcaaatccagcaacttgaccaactcgtgcaaaaacaaatgcaggatattgaaacgttgcaacaagcattaaatgataaaaatgcagatcgcaatctagaggtatttaaggctgaattgcagaaacagaaagatattgaagttgcgcaaatcaatgcagcaagccgggctgatgtacaagaattacgtggtgttgttgacttgattaagcaaaatatgaacttgagtcaattaccacccaaatggatgcataacggggaggatgttggtaactaccaacctccagagccacagcaagattattcgcagaatatcacggtcgatccaccagataatctgacgccacagacaaacggaaaccctgccactgagcagggttttttaatgcctgaacaaacggatcaacaaaacttcgctcctgagaatagccaactcggggacagcgcaatggctacagatgagcagttattgccatcaatagagggttttacaaatgacagtggaaactga

SEQ ID NO: 55180 - DNA, 1287 bp, Acinetobacter baumannii
atgatggagaagcgagtaccaagtaaattcaagccactttaccgacatctttctaacagccaattattttatgtgtttcatggtggtcgtggcggtggtaaatcatgggaaattgcagacttcttattaattgaaggcgctcaaagaaagcaccgtattttatgttgtcgtgaaattcagaaatcaatcaagcaatctgtacacaaacttttgtcagatcgtattgtttcactaggtttagaaagcttttaccaaattttagatacggaaatacgtggtcagaacggcacagagttttctttctctggtctgcaaaaccacactgtggattccgttaagtcgtttgaaggagcaacaatcacatgggttgaagaggcgcagactgtaagcgcttattctctgaaaatccttatccctacagttgttcgtacaccaaactgtatgatcatcatgtctatgaaccctaagctgccaagtgatgcggtttatgctgaatatgtaacagttgagcgggacgatacgattgttgttcagatcaattacacagacaacaagcactgtccagaggacttaatcaaactcgctgagcagatgcgtgacagtgattacgatgaatatgaacatatctatttaggtaagccgaaagaaatcgccgacggtgcaatctataagtctgagtttgagcagatcaagcgcgaaaatcggatctgtaaagttcctcatgatcccaacttacctgtttatacctcatgggatttagggattcttgatcctacagctatttggttcttccaagtctatggcaaagagattcgagtcattgatcactatgaagcgaataacgagcctttatcacactatgcgcgcattcttgacgagaaagctcaagagtatggctataagtatgcaaaacattttgctcctcatgatattgctgctcgcgatctatctagtggtgtgagtcgtgaagaaacaatggctaagttgggctatcgaatgactaaaggtgcaaggcttggtgttgaagaccgaattgaagccacacgccagatgctcaaaaacgcatggtttgacgctgagaaatgtaagtttggcatcagagcactacaaaactatagacgtgagtttaacgacaaactagagcaatttaaggctactcctgtgcatgactgggcatcacatagctcagatgcgttcggagaaggcgcacttaacattaataagatgtgcgagcctactgaagctgcacctcctccaccgccaccacaatcatcttggatgggttaa

SEQ ID NO: 55181 - DNA, 498 bp, Acinetobacter baumannii
atggaagaacaaatcaaaggcgcagaacccttagaaaatgagcgtcacgagaagttctgccaagcattattagctagtccacaatttagcattactgaagcaggcaaggcggctgggtacaaacatcgtcaaaactcttgggatgtttataagattccgaaggtgcaagagcgtatcaaatatttgaaatcaatgctcatggcagaattgggtgttgatcaactatatgtagttcgaaatctacgaaacattgctgagcggtgtatgcaagctcagccagtgcttgatagagctggtgatcctgtattgattctggatgatgagggcgagttaaaagctgcttataagtttgattcagcaggagctataagagcaacagaactgttaggcaaacacacaggcatgtttggtgacaaagttcaacacgagcacacaggctcagttgatatgaatttaaaggtggtattcgaagatgatggagaagcgagtaccaagtaa

SEQ ID NO: 55182 - DNA, 168 bp, Acinetobacter baumannii
atgttcgttcagtacaaagatcatattattaatattcatgcaatcagttccatcaatgttagaacacaaattttacaattagctattagctttactaatggtgaaaaaacaaacattaggtttgattcgcaagaagattttgataaattcttagaaaagtttaagtaa

SEQ ID NO: 55183 - DNA, 483 bp, Acinetobacter baumannii
atggaaccacgatttgtcatcaaaaaccattctgacatcaactatgtaattggctatctcaatactaatcacgctaaggcagcgaacgaagggaagccattagtagttctaatcgcacctcaagagaaagaccggacgaaggctcaaaaccgtttgtactggatgtggcttaatcagtggtccaagaagcagggtacggataaagactacgagcatctattcttcaagaagaacttcttagcaaaaatctatgatcgtgatgacgttggccaatacaagaaaacattcaaggcagttagagaattaaaagactctaagcaccctctctaccaagatgtagcaatcggcctatgcgagctaatgagcactacagacgcaagtacagcgcaattcactgagtacctaaacgacattcacgctttctgcaataaaaacgggtgttatttagaaacgcctgatgatcttaagtatgtgttggaatag

SEQ ID NO: 55184 - DNA, 291 bp, Acinetobacter baumannii
atggtgaaagttatgtacctttacaatgaactgattggtggacaatgggatggacgcttagcctgtctagatcaagactatgttattgcaatacctaacgtagactataatggtataggttcagaaaaggctccatataacgtatcaataacacgttattataaaagaaaagcttttgtaaaatttaataaaaaaacatatttcagagagttcttagtttctgatgaaacgggagctaaaaaagcaattactaaaattgaaaaatatttcaatccaatttttataaagtaa

SEQ ID NO: 55185 - DNA, 156 bp, Acinetobacter baumannii
atggataagaatgaattattagaagtaatcgaaggcgcatctaatttcatgcgtggaatgcaatttgatcctcgcctgccaagcgatgttaagagtgctttgattgaaaaagcgttagagcttgatcaagttgttgaagataacttagatgcgtga

SEQ ID NO: 55186 - DNA, 303 bp, Acinetobacter baumannii
atgggcaatacttggcatgctgatcaagacaataatatgcgccctgacattgaaggcttaccatgtccattttgcggatacgcagatgggttagctgtagattcagattctcatgacttaaaagaacatggtgtaatttggtcggctcgtgcattttgtcatgagtgcggttcgcaaagccctagcacacttattacaacttggcccaatcatcctttaagcgaagaaagcatttatgttgactgggaaaatgaaaaagaagttgtaaatcttgcagttaagatctggaataccagaatgtag

SEQ ID NO: 55187 - DNA, 213 bp, Acinetobacter baumannii
atgagtttagttaaaaaatttgaaggttttgacttgggtgatattgaaaatcaaattaaccagtggatttctgattgctccaaaacaaaacaacaagagattactggtagagcaatagcaggaagaaaaatccgtattacccaaacagaaacaatatacatagagaatcgaggtactccttttaatgttttaattacttatgagtatgcttga

SEQ ID NO: 55188 - DNA, 294 bp, Acinetobacter baumannii
atggagaagtgtagagaagagtttgaaaattggtttttatccacaccaacaggcaaggctttatctgcggcaaatttggattattacatttttgaacgtcagtttgatgaatatagggatcgtgatgtagagatggctcacagaggttacgcttaccagcaagcgaaagtggaggagctgcaaaagcaggtggatgcggcactagaaattgcaaaacaaggaatcagaaaacaaggtggtgattattacttggagaagttagagcaagcgctcaagggggaatctaatgattaa

SEQ ID NO: 55189 - DNA, 411 bp, Acinetobacter baumannii
atgaaaccagagcagtttattcgtgacttggggttggagaaggcgagagaggtggttgagggccataacaaagcttacatgcctgaactattcaaatattggtccgaggagttaagcgattatgtattggctcctaggtatgcatcgttcttagttgaagacctcaagcgtctagttgatagcgtggagttggttaacaattgcggtggtttggctatcgcaaataaaatcacatttcaaaaaagactgagaaatgaaaaagcaactcatttcatacaacatcctgaaaatcaaaaattaatacagcttttggggcgaaatcagcgcaaacctaaagaagccattaaattcgatttatttgaacaagccatccgcgaccacgaatcaatatacggaggcggggatgattaa

SEQ ID NO: 55190 - DNA, 177 bp, Acinetobacter baumannii
atgatcgaattagtggattacaactcaatgatgaagctacgtagagactacaaccttggtacacgcaataaagaaactagagcagcagcgaacctatacgagaaattaagaaagctgaaaatgctagaccagcttaagcaggaagccatgactaaacgttacaaggaggcggtatga

SEQ ID NO: 55191 - DNA, 297 bp, Acinetobacter baumannii
gtgaaacatcctctagataatcaaacagtcgattggtgtgatgaagagtttaaaagccatatcgctatcttcgagcgctttgcaaaggtgattcaagttgtaagaactactccagtggcgactacacgagaagttcaaaaaaaagcactgcctgatttaagccttagatcagtgcagcgatacatcaaaggactaattgacgcgggctatctcaaacgtcacggggagaaagattcaatgggaacccgtttgtatccaacagaaaaagttaatgaattattgggtggtgcagcatga

SEQ ID NO: 55192 - DNA, 840 bp, Acinetobacter baumannii
atgcgtgagttcacctttgaagacgctattcgcctaatcgggaaaatgcgtgggttttacggaaagaaattcgcagatcaatgggccggtgtagatcctaaagatatcgctgaatcgatggttgagtgctttcaaggattaacagcagaagatttcaaacgcggtgtaaccaagatgatgaaatcgacattctgcccatcaatacctgagtttcgttcatggtgtgagcctaaagcatcagattggttagatgctcatgaagcttgggcaatagctaaaaactcaatcgaatatggaaccggtcgtgaaatgactgtggtgtggactgagcaagctgctaaagcattcgagaagtgtgctgatttggttgctaccggtgacaagtttcaattggcagaagctaagaagatctttgtgtctatctacgatcgcttggtgactgaggcaaaagatcaaggattaaaaccagtctacaacgtgagcttaggtgtagatccagaccagcgcattactgcaatcaaacaagcagaggttgcaggctttctctctacacaagaaacgcagcttcaacttgagcacaagcaaaccaaggaagagcagcaagcagatgcagagcgatacaaaacgattgcacaaaaggcaattgcagagttgcgcgaaaagctaaagatccaagcgccagtcaacaaaatggctgaggaaattaaagaagttcagccttgggaactcaaacccgacactgaatattggcccgatccattcgaccagaaagaagacttcaaacaaatgcttgaagccgatggtcttaagttgcctttggcgttgagaggtgcagcgtga

SEQ ID NO: 55193 - DNA, 864 bp, Acinetobacter baumannii
gtgcattactacaagcgcaacctaggtgattatgcgaagaaagcaggtcgtttgactatgcttgagcatggtgcctataaccagctgcttgatgctatttatgaccgtgaagagttcccaactttagaagaagctctagattggacttgggcacgtgatgaagcagaaatcacagcagttaaattcgtcttgagtaaattttttgaacttcaagatgatggtcgttatgtgcaaaaccgcattaaagaagagttagatgcttataaatctaaagctgaaaacaatgcacgaattgccaaagaacgagaggaaaaacgcaagaatggtaaacgttctgcaaacgactcgtcaccaaacgtgcacgaaacgtgtgaaaaagagcacgaagcgtcacctaaccataaaccattaaccaataaccataaaccaataaccagtataaatattagtgaagaaaaatcttcacaagcaaatgcaaaggccaaaacacctcgcatcactaaaaaacaagcagcaatcaacgaacttgtttcacttggtcttgatgtgaagtttgctcaaccaattattgaaaagcgaaatggtaaagcattctcagatgttgccatggatgaaatcaaagaacaggcagcactggttcaacttactgtcatcgaagcacttgaattcgctgcaaaacaagactggggttcattcagagcagattggtatcaaaaccgagttaagcaacaagctcatcagcctgttgcacaacaaaccatttcagaacaagagaaatgggatgagttcctcaaccgtggcacaaactttcgagatgtcacgccaaaaaagccgttaatgattgagggggtgggtcatgcgtga

SEQ ID NO: 55194 - DNA, 174 bp, Acinetobacter baumannii
atgttgcaagagacaaaagaaagaatggctcttcttatcactgagcaaagaatcaaagaaaaggcaacacatgaccttcggtatgaaagagatgatccaagcaattggttgataacttttagtgttattatgaaggaacttagtgatgctgaaagtgatttaaacctgcaatag

SEQ ID NO: 55195 - DNA, 207 bp, Acinetobacter baumannii
atgagtgagataagtatgaatcaaagaattgaaaagtacaagtttagccaagcctttcgggatggcacgaaagcattcgtagctttctggattatcaccttcattgcatttgcattcctaaaaggctgtgccgatgagcaatacgccaacgaactcaaagcaaagcagaacatgtatgtgcgtgtgcaagtggaaggagctaactga

SEQ ID NO: 55196 - DNA, 3462 bp, Acinetobacter baumannii
atgtttcaacaagaaatctctcaattgaatttgcaacagctcaaggccggtgaaaagcgttgggtggggtcattattaggttcatcagcagctttattgcttaaagaaattgcgaatcagcattcttctttattagttttagtcgctcgaaataaccaacatgttgctcaattagaaagtgaacttgagttttatggaataaagccgacaatttttcccgattgggaaattttgccttatgatcggttatctccgcatcaggatattgtctcggaacgtcttgcgattttatcgaatatgccgcagcaaggcgtattactcatttcagcaagtactttggctcaacgggttgcgccttactcatgggttttgggtaagcactttgatataagagtggggcaaaaatttgatttagaacagcaaaaactaaggttggttcaggctggctaccatttagtagatacagtttatgatcatggagaatttgcggtacgcggcagtattatggatatttttgcatctgggcaagaagctcctatccgaatagacctatttgatgacgaaattgattcgttaaaattctttgaccctgaaacccagagaacaactacaacgctaaaaagttttacagttctacccgctaaagagtttccattaaaagaagcacggtcagtttttagagatcgttattctgagtttttcccgacagcaaaccctaagaaaaatccaatttatcaagatgttttagatggtatagcatctcccggaattgaattttatttaccattattttttgataaagaacaaatgcaatcgcaaagtatgtttacaatgtacttgccaaagaattgcattgtaattacaactagtgatgttgataccgatttaactaacttctggaaagaagttatgcgtcgttatgaagatcgacgtcataatattgatcaacctattcttgctcctgaagagttatttatttctccaaataatttgcttagtgctttaaatcagtttccgcgcatgcttgtaagtgcagaaattattgaagaaaaagctggtgcacttaaccttaaaactgaacaaccacccaagttgccagtcgatccgaaaaaagaaaaaccatttagtgccgtaaaaaaatatattgatgaagcaaatcatccggttctattggttgcagaaagtgcaggacgccgagaaagtttaaaagatgcattgcgttcaagtttgggtgaaattccgaatgtagagaattttgagcaattcaaaaccagtcaatttgcaattgcgattaccaatgcacctttagaccgtggtttacttataactgatcaattaacagttatttcagaaaatcagctttatgaacaccgagttgtacagcgtcgtcgtaagcgtcaacaggaagtttctgaagagtttctaattcgaagcttaactgagctaagtattggtgctcctgtcgtgcatattgatcatggtgtggggcgttatgctggcttaattacacttgctatcgaaggtcaagactatgagttcttgcaactagattatgctgaagatgccaaagtttatgtcccagtaacgaacttacatctgattagccgttatagtggtggtgacccagatttagcacctttacataaaattggtactgatgcttggagtaaagcaaagcgtaaagcattagagcaaattcatgatgttgcagccgagcttttgcatattcaggcacgtcgtcagtcaaaacctggttttgcttttgaattggatcaatcactttatatgcaatttgcaagtggctttgcgtatgaagaaacacttgatcaggccaatgcaattgaagctacgctgtatgatatgcagcaagcaaaaccaatggatagattggtatgtggtgatgtaggttttggtaaaaccgaagtggccatgcgagcagcatttgttgcagtacaaaatggtaaacaagttgcagttttagttcctaccacgttacttgcccaacagcattatgagtcttttaaagatcgttttgctgattggcctgttcgtattgaagtgttatcacgatttggttcgaacaaaactcatttaaaaaatattgaagacttggcggatggtaaagtcgatattgtggtaggcacacacaagttattacaagagaatgttcagtttaaagatctaggcttaatggtcgtggatgaggaacatcgctttggtgtacgtgacaaagagcgaattaaggctttgcgtgctgatgttgatatgttgacccttaccgcaactccaattcctcgtacgcttaatatggctttttcgggaatgcgtgatttatcgatcattgccactccaccagcacgtcgtttagcagtaaaaacctttgtacaagaacatacagatgcttcaatcaaagaggcgattttgcgtgagttattacgtggtggacaagtttatttcttacataatgaagtagatactattgagcgagcggctgaaagtattcgtatgcttgtgcccgaagcacgcgtggcggtagcacatggacaaatgcgcgaacgtgaacttgagcaagttatgcagcagttctaccacaaagaatataatgtgctggtgtgttcaaccattattgaaacgggtattgatgttccaaatgccaatacaattttaattgaacgtgcagataagcttggcttagcacaattgcaccagttgcgtggacgtgtaggtcgttcacatcaccaagcttatgcttacttattggtgccttcaatcaagcacttgaaaggtgatgctgaaaaacgtcttgatgcaattcaacgagcttctacattaggcgcaggctttatgctcgctacggaagatttagaaattcgtggtgctggtgaattgttgggtgagcaacaaagcggttcaatgcaggcgatcggatatagcttgtatatggaaatgcttgagaaagcgactaaagcaattcaacagggtaaaacaccgaatttcgatgctccattgtcgttaactgcggaaattaacttacatattcccgcacttattccggatgattacttaggtgatgttcatcaacgtttattattctataaacgtattagtaatacagatactcaagaaaaactggataatattcgcatggagcttattgaccgttttggtgttccaccgcaatcagttaaacacttgtttagcgtgcatcagatccgcttaaaagcggagcatttgggtattacaaaaattgatattaatactcaaggcggcaacattgaattttcaccagatactccagttcaggcgattagtattattcaactcatgcaaaagaacccgacctattatcgtatggaaggtggacagcgcttgaaagtgatggtacagcttgaagactatgaaaaacgaattcaatttatcaatgatttactacaaaaattgatgagtgaattacatgcctga

SEQ ID NO: 55197 - DNA, 438 bp, Acinetobacter baumannii
atgaaaaatatttatattttaatttttataggcgctttaatggcttgtagcgataaaagtccagataaaactcaacatgatgctaatcataagtcagatgtggtgcaggtggataaaaatcaatcagactctgctgtaagtgaaaagaaagagagtgcggagaaggagcttaaaacagctgatcaagtgggggaaatctcttgttcaaatccaaatattacgcaatggtatggttttaatgagagtgttgctgagcctaaatgtgaggtcgtaaagaactttcaactgtcagcttataagtgtgatatctctaaaaacgcctttggtgaaaataaagacgctattttgctagaaaatcaagataaacgaatttttgtttattccacttctaaagactgtaatgaaatgcttgaaataagaaatgcgaatgggccttaa

SEQ ID NO: 55198 - DNA, 309 bp, Acinetobacter baumannii
atgaaaaaactgaaatatcagtatcaacaatctgtaaaaacaccacactctaatgagttttttctgaaccactttcctaatatgagaagtgtgtactataaaaaattcagtactaagcaagagaaaagcttttattcaattcattttattgaatataaagattaccctgttaagcttcgtgtagcccgtagctctaatttagttgatgcatggggtgatcttccaacatatgtcacaaaagttgctaaaagttggaagcataattctaagagagtgcatcaatactacaaagaacatgaacaaaaataa

SEQ ID NO: 55199 - DNA, 498 bp, Acinetobacter baumannii
atgctcgctacagagatcagtgccaatttggctacctacttatatgaaaaaatagatcctaatggtgagttagaaattgcccaattggacgaagataaagatgaaaatattcctcaaacatcaaaagttgcgtacatcatgcaacgtattgggcaaaacattttccgtaaagaactaatcacgcaatttaaacattgtccgcttacagggattcacttaactgagcttttacgtgcgagtcatattaagccttggagaatttctaatgataaagaaaggttagattctgctaatgggattctattagcagctcacgtagatatcttatttgataaaggcttaatttcatttgatgatgaaggaaatcttttgactaaaaataatgaagtagacactctactaaaacatatgaatgttcagactagaaagattaaattaccaattgagtcaaaaaaatatctgaaatggcatagggatagttttaattatccaatctaa

SEQ ID NO: 55200 - DNA, 1338 bp, Acinetobacter baumannii
atgaaaaaattatccgaagacacaattcatcatttgttatcatatattcaatccaatcgtctaagaaactcaagcaagggaaaagaaacactattagaggctacagaaagcgataaaggtagagtaatcaactcacctgcttttcgccgattacaacaaaaagctcaggtctttccattagaagcaaatgcatctgtacgaagcagactaactcactcaattgaagtatcacatataggccgttatattgctcaagaaatcttttctataattcaaaaagaacacaaaattcctaacctagattttgaaaaaataactgcttttgtaaataccgtagaaactgcctgcttgttacatgatattggtaaccctccatttggtcatcttggtgaagctgctattcaagaatggtttaataagccagagattaaggacattattaatcatgatttacataaatttgatgggaatccgcaaggttttagattaattagactattaagtggtaatgatgcatatggtttaaatctcacctgttctttattattatcaacagtaaaatacccctatactattgaagaacataaggatggtaagattggtctttttaaactttgttattcaagctatgaagaagcttgtcaggaaattaactgggaacatggtaaaagtttcccattaatgagaattatggatactgctgactcaatagcttattctatgagtgatttggaagatgctattgataagaaaataaatactaaaaaaatttttaatatccctcggtcccaatttaatatcaaaaatataaattttcttaaatttaaaacttcaattattaatactgcagtaaaagaagctgcaaaaagcttctgccttgaaatagagaatatattaaaagggaatgataatatagagttaatcaaaaaagatactgatatatataaagttcttgatgaggttttttcctttgcaaaaacaaatatttactgtcacgagtcagcagaaaaaattgagttagcgggaagaaatattattcaaggtttattaaagcattttgaaaaactaatccggttatcacaagatagttttaattgcttagttacaggaaaaaatgctgaaggtataggaccaagaaaattaggtttggattatgagctgcgactattccgtcgcttgcctaaaaatcatgtcaaaaaatacatacattgtgtagagattgatgaagcaaatgaaattttgtacagagctcatttaattgttgattatatttcaggtatgaccgatgattttgctttggaaatgtatcaattgttagaaggtatacgaatccaatga

SEQ ID NO: 55201 - DNA, 639 bp, Acinetobacter baumannii
atgtcgatacgggatgaacgaaaacagcaaagtcgtcaggcacttctcgatgcagccttgcatctaagcacgtctgggcgttcgttcagtagtattagtttgcgtgaagttgcacgtgaagtaggtttagtgccaactgcgttctatcgtcattttcatgacatggatgaacttgggaaagaattggttgaccaagttgccctacatttaaaaagcgttttacatcaacttggacaaagttatttacaacataaatctgctaaaacccaaactatcattgagctatttgtgcaggcagtgaaccatagccctaaacagtggcaatttatgattgctgaacgttggggaggttccgaaaccgttcgtgcagccattgctagagaaattgaattcttaattgaagatctaacaacagatctgactaaactcgaaaattttaaacatattcaaaaccctcaagacttaaatgtcttatctaccattttgaccaatatgtcatttacatgggcaatgacatggctcaacctcgccaaacaatatcaaggtgagcagctcaaacaacaacaaattgcctttattgaaaatgcgtctacacaagttcgcttactgtttagaggcattgccaactgggaacggtaa

SEQ ID NO: 55202 - DNA, 858 bp, Acinetobacter baumannii
atgaatttaattagttggattgatttaccgaattttggtgatgagcgcggtggcttggttgttgctgaggctagtaaaaatatcccttttaaagtgaatcgtatttattatatttttgatgcaaaaccagaaataccacgcggatttcatgcacataaagagttacagcaagttgcattctgtataaaagggaagtgcagaatgcttatggataatggtattgataaacaagaggtatggttagatcaggctaataaaggcttgatgattcctccatttgtttggcatgaaatgcatgatttctcagaagattgtatcttattagtactagcaagtgaacactatgatgaaagtgattacattcgcaattatgaggattttttaattgcagtgaatcgcccatttattcatccactatcagatgtacattcggaaagaatcggacaaaatacaagggtttggcaatatagcgttatactgaaagatgcaattattggtaatggatgtaatatttgtgcccatactttaatcgaaaatgatgtcttaattggtaataatgtgactgtaaaatcaggggtttatatatgggatggtattacattagaagacaatgtatttattggcccgtgtgttgcctttactaatgataagaaaccacgttctaagcaatatcctgaaagttttgccaaaacgatagtagagcggggggccagtataggggctaacgctaccattttaccaggcatacgaattggtcgaaatgcattagttggtgcaggcgcagtagtaactaaagatgttccggaaaatgcaattgtagtaggaaatcctgcaattattaaaggctatgtgaaataa

SEQ ID NO: 55203 - DNA, 675 bp, Acinetobacter baumannii
atggaacggggaatccttttagaaaaatcattaaaaatgattttggaacttaaagatgagatcattaatagcgaagtgattgattgtggactacgtttagatttggttgaacaatgtatttatatttcatttgaacatggaataggggttaatactttattgacattagatatgccaattcaagcgatggttttatcacgcgctcagttcgagtctaccgtaagggcctattggctattgttttgtgcatcaaatcttcaaatttctaaattaagttttgactatacttttgaagaacagtttgtcaaagatagatttcctactttaaatgaaatgttgggcatacttgataaagcaaatttaccagctagaacggtaatcaatatgttggtcgaatttaaaaaatatcatctcaaccagctgaattcatttgttcatacaggtaaacattcattcactcgtgatgagataggttttgatgagaatcttgtcctaactctaatgagacaatcaaataatttaatcacagcttcagcacaaataatgttggcacatactattccagataaacagaaattcattcatttattgactgaaaaatatcgggattgtttctttttgcaggaagatttagatcccaaagtgaaagctagattagataattatttcagctaa

SEQ ID NO: 55204 - DNA, 588 bp, Acinetobacter baumannii
atgccaaatcaatttgaaacacatatttcagatgcgggaactacgattcatttaaaaatgaatggtgagaatttagaaaatttaataatttgggaccgtgtaatagtaactacatatgatattttctttgtatgtattgcttttgaagcatatacagaaaaagaagggattcaaacatttattgtactattattatttttattatttcttttctacaagcactatgaatatagaaaaaataaacgatgggctaagaatgccgaggaaacattttttatttccaaaaataatcttcgcatttccaaagactgccttgggaaaaatttgttaacaaaggatattaatactcagaagattatagaaattgtctacagaccttggagtggtggagcgtatccaccttttttgccagagttccatcaaggtactatttatttaattggttatgatgatggttgttcatttggtattaatcttaacaaagaagaagcagaggcatttattaccgaattgcgttctttaattatgcaataccaagaacctagacactttatttttgccccacatatgcatttagcaaaagattga

SEQ ID NO: 55205 - DNA, 1209 bp, Acinetobacter baumannii
atggcatttagagttaataaatgtttccatgctgttggaaatggaactttatttagtggtcagatacaaaatatacaaaattctgaagtttttaattggttgtatgactgtggatctaccagtttaaaaactataggaaatatactagccaatttaccaaattggtttcaatcccataacacaatagatatggtggtgatatcacattttgataatgaccatgtaaatggtttagaaatattactaaaaaatttttatgtgaaaaaattagttcttccttttactgaatggccgcagagtatacgagaaatatcaatattaggtaaaaagggtattaccccttcaattgctttattccagttaaatccagctaagtggctgcaattaaatggttttgagaatcgaataaatgaaattgtattagtaaaaggaggagaaaatccaaattctgatatattagagtcgggtaataatttagtagataacccagatttaccaatagatagcacaacgtcagtattttttgaatttgatacaccagttcagaaatctactattaacttattgaaaataaatcactttcagtcttttaaagattcaagtggatcttttgaattcatgttttacaatgctgaaaagagtttctcagaattgggacttatttatgaagtaggaggaaaaagattcgcaaaaaaatcacgtcaagagatatctattgttaaggctgatattgaaaaaactattatctctctaggtttagatcaacatattactaatttacctaaagattggcgtaaaaaattaaagcactgttatgagaaacatttcggtaagactggtgaggctaagaataatatttctttatgtatgtatgcagctcctttggatttaaatttacagaaaagtcgttatgcaacattacttacaggggatattaatttatcttctaatgtcatggatgatatggaagcgcatttggggacgaaccgttgggactcacttggcatcgttcaagtgccacatcatggatcccaacatagttggaccgtaggaaatacagctaggtttatgccagccacatttgttcaatgtgcaacccctacaaagcttcatccccattcaaaagtggtagcagatctagcaagttatggggcaagagtacgcgtagctaatcgtcaattaccagttgcttattcttttctatattag

SEQ ID NO: 55206 - DNA, 2382 bp, Acinetobacter baumannii
atgagtgatgattcagaggaattatttaatcttcgcattgagctaattcaaaatggagtcagcagtcgctatattttttgggatgacttaaccaaagaatatccattgagagctttgcatctattaaagctcatgtgtaatgaagaattatatacaagattaagctcaagagaagaatggtctgattacaacacagagtgtattgagaaacttgctaaaagccattcacaagatgtgctaaggatttttttaccttttttagaacagtatttttctgaacctctaattgaggattttgatgcttttaaatggtctgaagaatatgctgtaagaacatcgtttgaaacttttatatacaaagccttattcactctcgtcattaaagcttctcagaatatggttttacaatctactgaactttttcatttattaatcccattaaaaaataatcccaatctaatatttaatcgtatatatgctaatgctcttttaaatattgagatagatcatgctgattttgtaattgaatggctgttagacaactcaatcgataagttcaaattaggaaatgataacgaagaacctgtttggaaattggctgggaaactaattgaaaaattttcgcctcattgtaaccaaaaaaactttgaggaacttgaaaatacaatttattattttccccctgattatgagttagaagaaattagatggcgcttagaagctacacgtataaaccactacataccttattggggtaaaactcaatatcatttactgcctaaattagatttatctcgtatatctaaaaagtctaaacaactaattaccatacttaaccgtaaatatggaaactatactgaaaatgatttttgtcataataccaacagtatggcagggtttgttagatctcccattaaaaatttccttcaactatcagataaagcttggaaaaaattaatactgacagatcccaaagagtttaaaggctttaaatttgatcaggaaagcaccgaatgtagtattcagcagttttcaagtaattttagaaatgctgtgaatgctggacctaaacgttttgcagaatttgctttgaccttaccgaaaaatattcatcaagattatattaatgctttatatgcaggattaagtgaaaatagtcttgatcaagttccagagcatctaaaagaacaatggaccccctgtcctattgatttgattgaacaagttatcgatcatttttcatctataaattattctagagcactccaaaaactactttctggaagagttaaattactatctccaaaatacttaaaactactggaagatattgctttatcagcggatgacccattaccaaataaattaaatattcatagaggaggtcaacctaatcaaatagatgaaatttcaagccatgatttatctggaaatactcttaactgtacaagaggaagcgcatataaaggattggctgaaaaattttgggatgatcaagaatatgctctttctcacaaatatcttattgaaaatgctttaaatgatgaacatgcggctgtaagaatggcaactgctgatttactactacccatgtataattatgaacgtaattatgcttttcaaaagtttatagaattatgtcaaaaagacattagaaataccttaagtcatggctattactactatttcaataatgcatttagtagtgaatttaaagagtcatttataaccattgttaaaatgatgctagattctccctataaagatgttagtaaggaaggtcataaacaagttattgcccgctggttattcaatggtttatttgaagaagagttgaagcaaggactcgagtccaaagatcatgaaagtcttttgggctatgcttcagtaattagccaacttcttggtgataatacaaaaggatatgaccactcaaaaatgaaacagatctttgagatcttagttaattcagaaaacgaggaaattcttaaaaatatagggcgtttttttaatcaaaagttttggtcgaaaagatatgctcgagagtttttcgaaatatatattcactcaaaagccttaaatcataatatttataacgttttacactcaatagaagaaagttctatgaatatggctcaatttagtgaccttattattatcatgattcaaaatattcttaagttaaatactcaagaactagtaagccgtatggatacagatgctatcacgagagtcattcagcaattatatgatcaagcagaaaatgataaagatgatgaaacactagattattgcttagatatgtgggacgaattattagctagtaatcattcatttacaaggaatatgacagacaagcttgattttggacttctagcataa

SEQ ID NO: 55207 - DNA, 2229 bp, Acinetobacter baumannii
gtgtctttagaaccaggtggctttacagaaaaaattggaaatcgttatgaatcctcttgggtggcatatcaactcttaagattattagatgaaaaaatttcttatgtacaagtagagcctattggtccagatgaagatgctgtagatgttattattggtaatttggatggatctaaagaacatcatcaatgcaaaattggaaatctttctgataatgcttggacacttgccacactccaatccaaacaacttttaacaaaaggtttacaacacatcttatctggctctaaatcttacaaagttgtatctagaattggatttagactactggaagatatttgtgaaagtgctagaaacagtacaaactctagctctgaattttttgaatatcaaattaaaaatataagcccagataggctaaaattatttaatgaattatgtacccgtttaaatttggattcatcaagtttagatgatttggacaaagctattcagtttctaaagagttttgaaataaagaaatttaatgaagatgatatagataatgaactgtgtatattattagctgaaaaactggtttatcaatctcctagtcagcttgttcatttccttcaaagttaccctgttaaatgcggtaagttaagaacacatattacatctcatattcttaaaacagatttagaagtccaccacttttcctttaaaacctatccgggtcatcctcatatatccgatgtaatagcaacgctaaatgatgagtttgatcgctcaatcgagccttatttaatatcacaacaaaacattcaacgtgccgagttcagtactacattagatactgttaataataacccaatcacaataattaaagctgatgcaggggttggcaagagtgctttcttattagatttgaaaaaacattttgttcaatctgggactatcgttcttcctattcgactagatagacgcgttcctgaaaaaaatctcgatcaatttggaaaagatttaggatttccatattcacccattgcatgcttagaaaaatatggacagggtcaagaaattatcatcttgcttgatcaattagacgctcttcgttggactgctcttcactcatcaaatgcattagatatatgcattaaaatggttaaagagattcttttactacgtcaatatgcccataccaatataaaaattattatggcaacacgaaattttgagctcgaagatgatgtgcgtctaagaaattggatcagtgaaatcaatagtgatgtcaaacagatggaactaaaactgtttgagccagatcagattaagccatatgttagccaatttgaagactatgatcagttgagtaatgagcaacagaatattttaaaaattcctttatggctaggtatttatatggatctagccaatgatttagggtgcgctcctaaatttacaaccaaattagatttaatcaaatctttcatcgatgatagatttgaacaactcactgatagtcatggtatttccacagcaaatagtgaaaacttcttcaatgaagttataaatttaatgaatcaagctaacaaattaagtgtttcatcaactcaattatcaattggttcatcagaaattaagaaagctatgatttctgtcggattactcactgagcaaaatagagaaattagttttagacatcaagcaatccatgattatgcaataggaaaaaagttatattcgcaaggtcttagttcacctgaagatttcttacatgaattaggttcaaaaaatcaacaaacccttttaaaacgagagcatctcagatatgcactcgcgatgttatatgaagcagatgaaagagctttctgtaattgtattgaagcagttctttttcattctgagattcgtttccacttaaaatcattggtatttagtacattacggcatatagagaactttaaagctccccttaaaaagcttataaataagatcatttcagattctgatctagcacctcattttataagattaagttgtagcggttgccctacactcgttcaatatctttctgaaaatcaatatctaagtgattggttagatgaagatgatgagatgcaatctaaagctctagagcttttaagctcagtttctgataaagctccaaatttgttaattaatgaattatctaagtttgtgaatcgatcacctgagtggaatcaaaagatatacaactgtttatgttga

SEQ ID NO: 55208 - DNA, 897 bp, Acinetobacter baumannii
gtgcaaaaaaacctcaagcaaattactagttttttacaagtcgttgattccggttcttttaccaaggctgctgaaattttaggcttaagccgatcaatggtgagtattgatataaaacaattagaaaagcagctaaatacaagcctattaattcgcaacacccgtaatattgcattaactgaaatcggtcagcatttttatgaggattttaaacaaatccaacttcagattgatgaggcatttgaacgaagccaacacttaggtacaagcattacaggcactttacgattttcgtctaccaatgagtttggccaacgttttattttgcctttgcttcctgagttttgccggctttacccacatatacgcttacagtattctttcaactcttctcttgacgatttagttactgaaaagttagatctcgttattcggttaggaaatttaaaaaactcatctctaaaaactcgaaaaatcggagaatattcaatttatcttgtggctactccgcagtttataaaagatcatcctatagaaaagatatctgatttggcaaatgttccttggattggccactctttattaaactggcaagattcacaatatattttgcaaaaccgtttgggggagcaatattcattaccttttgttcgcagtcagtatgaatcaaactcggtcactgtaattcatcaaatggctctttcatctttaggtgtggcaatttgtcctgcctggttagttgatgaagatattcaaaacaatcgcctaattcggttatttccagatttttcgttaccgttacaaagtattcaattactttatcctcacacctctagtttacctgccaaaacacgcgccttaatagaatttttggtgttgcgtctttcttttaattag

SEQ ID NO: 55209 - DNA, 870 bp, Acinetobacter baumannii
atggtaactaaaattaaagctccgaacatttcaagtatagttttcattaataaagttttagaaagtagaatggttagctctaatcgattgtctgctttttataaagcaattgagaaggatttaatttcaagttatgaaagttatattcaagagaagggtaatcctgaaataattaacactttagattttaaaaaatattcagctgttaatgatattgaattaagaaaaaaaaccatgattaacctttatacaacaaaacaggatgcttatataactccaattttagatagtttacgaactaaacataatttactattttgtccattttgtggagaagaggtaattcctagtacattagatcactatttaccaaaagaaaagtttccagaatattcaatatgcttaatgaatttaattccaatgtgtacaaagtgtcaaggaaaagatgctaaaggtgaaaaggttctagatattaacaattgtagaatttttttaaatccatattttgaaaatattgataaatttcttgttttaagtatattaccaccatttaatgaacctggttttatattgaatttaaaagatataaaggataagtcatattataaacttttagctagtcatgtaatagaactaaatatctatgataggttcttaaactttgctagatctaaacatattagtcttttgaagcttgcaaaaagaaatcgtcaatcaggccgacctataaaagaaattattcaaatttatctagatgaaaaagaaattaatagtacaaatagttggtctgcaatttattatcgtggagttttatttaatccggacttattaaattatttagataaagaagatttgcctgaatatatttaa

SEQ ID NO: 55210 - DNA, 1698 bp, Acinetobacter baumannii
atgttcttaataaaatatattccaaagcaaaactggagaattgtgccagaaaaaatagaaggttataaagatcaaattatcttaagtggaaataactgggatgattatggttctaagacttcttttaatatgagagttgtacttaatgataaagagtatatgaattgggcagtacgtattcaaattgaagatgagtcctatagctctctgtatttagatcagctttgtgatcaaggatgggatggtatatttccaattcctactaataaaaattatattagccaattttcagagatagatttttataaaacattaattagtgttttaggcaagaaagaagctgctgagattttaaaaaaatttaaagatgctagctatatggtaaatatcgagaggaatgaaaaaagtttagatttaataaaaattcctgtttttaatgaatccttgcttagagacacgagttctcataaagcttatgaagaagcttgggaactatttgtcgagggagtatcaagtaaaattgaggatttccagttaaatttcttcgataaaagtaatattgtgaggaatattaagtttagtttttctaagaaattacttccgacagatataaatgttttaattggaccgaatggagttgggaaaagctatactataatgattttaatggaatatttgttaaagttaggtaggggagatattaaagaaattgaaaagaaagattttcgaccatttgataaaagaccgaatttttcaaatcttatattaacatcgtatagtgtatttgaggactttttagttgatttggataacgaaaaaatcaaagacaatgaaaaaggaaattataaatactttggcttaagagttagagatgagtcaaataaagagagaataggtataggcaaaaatattcctagtattgatgcagcgaaagccgtatttaaaatgagttttgataattatcagtttcaagatttgagttggtgggttaataagcttgatttagcaaaaaaaacattaaagaaagcttttgattttgatgagtttgctattgattttagtcgtgaaatagataacttaatgggatgtgatttttcaattattaatgataaaaaatacttgataattaataataaactacaaaaatttcctcaatatatgagaaattataatgcaggagtaccaatattatttttaaaaaatgataatattgtgcaattgagttcaggacaaaaaatattttcttatatagttctcaatatcttaggtgaaattaaacaagggagtttaatcgttattgatgaacctgagctttttctccatccggctcttgaaatagaatttattactcttttaaaagaaatacttgaaccttttgaatctaaagctattttggcaacacattcattgtctatagttagggaggttccttcgagttgtgtacatatttatagagaagatgaatttgggctaactattgaaaatcctccatttcaaacttttggtggagatatgcagcgtatctcaacttatgtttttggtgatacgatgttaaaaaaaccatatgaaaaatttttaaaaaatttgcttgatgagaggacatacacaccttctgggttaattcaagcgctgggcaatgaagctaatgaagaaatgattatggatataaaaatttgggaatcaattaatggtaactaa

SEQ ID NO: 55211 - DNA, 171 bp, Acinetobacter baumannii
atgtttactctaccatcaaatgtttttcaacctttagtgatcatacttgcatgccttattatcattataagtaaaatgcctcagctaaaatttagaaaaaccatattatttttagctcttggcagttttactttaatctgtgctttggcaatatttggcttctttaattaa

SEQ ID NO: 55212 - DNA, 687 bp, Acinetobacter baumannii
atgagatatcctggcggtaaaggcaagtgctatcagcacattattaatttaatgcctgtgcatgacgtatatattgagacacatttaggtggaggctctgtcatgcgcaataaaaagcctgctcggcataatattggtatagatattgatccaaaagtaattaataaatggaaagctgagttcccacagttatgtgaactagtactagaggacgcgttatcttttttggcaagttataactttaatggtaatgagcttatctacgcggatcctccctattatccagctactcgacgcaacacaaagatatatacatatgaatatacacatgatgatcatgaaaaattcatatcattaatcaagaaaattccttgcaaaataatgatttctggctatgaccatcctttttataatgatcagttaaaggattggaagaaaataaatttttctgctaaaacacatgtagataatcgagaagagagtatttggtttaacttcgaaaaaccagatgttttacatgatggtagatattatggaaagaattttagagagcggcagacaataaaacgccgtcaagaacgactttataaaaagatccaaaatatggatcctattgaaagaagtgaattgtttcgttggatgaatactgaatatccagaggaactaggggagctacaatgcaattag

SEQ ID NO: 55213 - DNA, 822 bp, Acinetobacter baumannii
atgcaattaggagtaatttttttagaaaaaacaaatattagtgttgagtttcctgatgcaacttgcgaagttatacctggattaaaatggggtgctatagaaacttttctatcgccagcttactgggcttttcaagtttattcccaacgtcttacgggttctaaaattaattataagcttggtacaacactcaaagaagaagtgggtgcttgtctactaggtgggcatggaatacctgcacaagttgggattgctgcatatagtcatttgaagaataaagggatattttctgaaattaaatcatctgagcaagatatttataatttactagctgaaccaattgatttggatggaaaaaaagtaaaataccggtttgctagacaaaaagctaaatacttagcagatgctatggatcagttatctcaagatatcccatcatttaagtcaggccaagagttaagaaattggctattaaatatatcgggtattggattgaagacagcttcatggatagctagaaattggttagatgcagatgacgttgctattcttgatattcatattctaagagctggaattttaggtggtttttttagtaaaaacttaagtatcgagaaaaattacctagaattagaggagcaattcctcacctttagtaaaggactaggaataaatgcatcagaattagatgctgtgatttggttagaaatgatgtcttcatctacaattgtacatgaactaatgaattcaagttcaattgatattgatctcaagtttaagagaaaaaatgcacagatggaccaattagagatgagaatttag

SEQ ID NO: 55214 - DNA, 675 bp, Acinetobacter baumannii
atgacttggataaacttgggtaatcctaatcctaaacaaaagtttgataagtatatcccttataagtgggatattagtaatgaatgcatcaggttagatgagcctgagagctttataccaactccatttacacaagttatgtttgaacggaagtcccaaagatcttttaaaatcaattcaattgatcatttatcacatcttctttggcttacaaatcgagttaaagattgtattaattcaactatgggatttcctataactttgaggccggttccttcggctggcgcaattcaccctattcatattcttataaactcaccatatactaatatctggtggagatatgatcctttctgtcacactctccggtcagttaataaagaaaataaatatttcctagaagttagaaaggactgtaaaaatatattaaattgtaattcagccagcttaatgctcttaattgcggaacctcagaaaactttatccaaatatactgatggagccagtttagtttggcgtgatgcaggtgttctattaggaaatttagcactagcagctagttatttaaatatcaacttttgcccaattggagctctcttgccaatagaaattgatgctaaaaggcaattagttactgtaggaatggcagctctcgatgctattgaaattgactag

SEQ ID NO: 55215 - DNA, 606 bp, Acinetobacter baumannii
atgaaatctgtattattactctctggtggcatggattctacagcaatagcatggtggaaaagaccagattatgcattaactatagactatggacagcttgctgcaaaagctgagatagctgcatcacaatccatatgtagatatatgaatattccgcatcaaatattaactgttgattgtagaaatattggttcaggagatatggctggtactattgagagtgaacatgcccccgcttctgattggtggccttatagaaatcaactcttaattactctagctggtatgaagatgcttccttttaatatttctaaaattttaataggaacagttaaaacagatagcggtcatacagatggttctcatgaatttattgatgcaatcaatcagctaatgttcttacaagaaggccatataactgtagaagctcctgctatcaatctatcaactaaagaacttatccaattatctaaggtaccagctgaattgttggcatggtctcatagttgccataaatccgaggtgacttgtggtaattgtcgcggctgtaataaatattttgagatattcgagcaagtaggctatgacttggataaacttgggtaa

SEQ ID NO: 55216 - DNA, 1206 bp, Acinetobacter baumannii
atgataactattacaggcggaatatataaagaatactgtatgcacccttatagatataatatttttggttctggaggaagagctgcttctgcaattgcagcaatgaagggagaagttaaattaatctcatattgttcgaaagacatccaagaagttattcaggctcgtgctgaattggaagggttcgaattcaatattattaatattccagtgaatactaaattttattatacccacgctcttgctaaacccttaattcataatataactactaataatcctcctttaaaaattaaagaaaaaaatgtcattaggtttggattcttggaagggacagctatcatagacagtgaatacgctgtttatgatcctcaaaatgtagcatcagtggagcttttccatgcaaatggttctaaagctaaacacttagcgattgtacttaatcaatatgaagcaagatcattatttcagattgatgatccttatgagctacttaaggaaattgctatatcccaacaagctgaggtagttatattaaaaaaaggacctgatggatgtctggtttacgaccatacgcttgttgagttcaagcatgtaccagcctttagtacaaataaagtatcaaaaataggttctggagataattttgttgcccattttggatatgcttggatggagcaaaaaaagaatgcttatgaatcagctctacaggcatctaaagcaactgcttattattgtgaaacggaaggatttattacgccagaacgtttaaaaaaatattcaccgtcccctattattctttctgaacaatttaaaaaaggtttgagacccaaggtttatcttgctggcccattttttactcttgcacaactatggttaattgaggaagcgaggaaaaacttacaagatcttggtctcgacgttttttctccctatcatgatgtaggcaaaggtaatgctgaagatgtggtaaataaagatcttgaaggcatacataaatgtgatcttctattcgctatagctgacggtatggactcaggcacaatttatgagattggctatgctagagcaattaacaaacctgttgtggtctatgcagaaaatgaaagtgaagaaaatctcaaaatgatggaaggatcagattgtaaaattcttaaagattacgttactgctatttatcatactctttggacggcaattacttaa

SEQ ID NO: 55217 - DNA, 324 bp, Acinetobacter baumannii
atgtcaggttcaggcggcgggggcggaacgccaattctagatttccaatcttgtgaagatttaacaatgaatgttcaacttagctcacctaaagaagctatcgtttcaaaattaaaaggaggggatattttaagaattggctttgaatcaaataatatcactactgtatatgctttctatgaagatgagattgctggcggtattgctgcgccagttataggaagattacgagaatgcttacgtagtggaacaaaatatcaaggaaaagtattagaaattaatcaagggcaagttcgagtaaagatcacagcaattaaacattaa

SEQ ID NO: 55218 - DNA, 1245 bp, Acinetobacter baumannii
atgccacatgttattgtgattggtgcaggaatcacaggggttacttcagcctatgaattatctcaattaggttaccaagtcacagtgattgatcgccacctttatccagctatggaaacatcatttgcaaatggagggcaattatctgcttgtaatgcagaagtctggaaccagaaagcgaccgttataaaaggttttaaatggatgaggcaaaaagatgctcctctattacttaatccttcttttagtttgcacaaatatagctggttagttgagtttttatctcatattaaaaattatgaggctaatacgatagaaactgttcgtttagcattgcttgctcgtaagcgcttatttgaagtcgctgaaaaagagcagcttcaatttgatttggagaaacgcggtattcttcatatgtatcatactaaggatgactatgatattgccaagcgagttaatgatgtcttgaataaagggactttggagcgctactcagtttcacctgaagaaatgaagtcaatcgaaccttctttaacgggtgagtactttggtggttattacacaccaagcgatgcaactggagatattcataaatattcaaccactttagctgaaaagactaaacaatatggggtgcagtataagtttggcttagaagttactgatattaagtgtcatacagataaagtcgtactgaattgtcagccaagtgctgagcatccgcatctttcccaaacagatagctttcaattagaaggtgatgttctggtggtttgtggtggtgtagggagttatcaattggctgacatgattggtgagcgtgtaaatgtttatcctgtgaaaggctattcgattactgtccaattgaaagatgagaaaagcattaaaaatgcgccgtgggtaagtttgcttgatgagagtgccaaaattgtaacctctcgtttaggacaagaccgtttacgtatagcaggtacagctgagtttaatggttacaatcgagacattcgtgcagatcgtattcagcctttggttaattgggtgaaccgcaattttgacatttcaactgagcatgttgtgccttgggctggtttaagaccaatgatgcctaatatgttgcctgtagtgaaacagtctaagcaatcacgggttttttataataccgggcatggccatttaggttggactttgtcagcagcaacagctgttttggtgagtcaggatatcctacaaaaatatccagcttaa

SEQ ID NO: 55219 - DNA, 318 bp, Acinetobacter baumannii
gtgacgactaccaatcagaccgcacttgtgggctatcgtcaaggaaccttggttgactttggtgcacatcgggttatttcaggcttggtgagaatagttgataaaaacaacatgccattattaccaggctatagcgttcgaattaatggacagcaagatgctgtagtgggctacgatggtgaagtattcgttccaaacttattaagacaaaacaaacttgaagtagatcttctcgatcatggtacttgtcaaattaatttcacttatgaaagtaagcaatacagtgctaaaaaattggggccttatgtatgtcaataa

SEQ ID NO: 55220 - DNA, 1419 bp, Acinetobacter baumannii
atgtcgataaaccctatagaactgcttaaagaaaaagtatcatcaacaatattgaataatcaggatggattcctaggcgaaaaaactaacgcgctctctaagttttatccaattctactttcattattagctgctaaacctgatcttattggacagttaaaaaacagtttagctccatcattatccgatcttttttctcataatgaccaaattaaaaatacggtactaacacacctaagtggcactgcaccatctgccgagattgaaagtacactcaatagtgcgatcaaacccagtcttaatacgatttctgaagtcgctggaagcgatcaacaaagcattgtgaactatttacgtcaacatgcggaaacgattcgttcatatttaccagggtgggcagtcggcttattagctccattgggtattggtgcgggtttatcatcagtaacaacatcaactgcacctccgcttgcagcggcaacggaaacgactggtaaatctcgtggttttttaccgattattgcgcttattattcttggtttattaattgcttggttatggcgctcttgccagcataaagaagctacacctgtacccgagactactcctgcaagtggtgtagcggccgcagcagctgcaccggctactttaactttaagtacggacgataaaggggcagtaagtcaatgtcaggcaggcattggtgatcagggcttcttggcaactttacaaacgcaagttaaaaaagttctttcagggactaaagactgtaatgttgataccagtcaaacttatgctgctgcatttaccgataaagatgcgttagcaggtgtgctcggtgccttaaaaggagttccaaacgcgtctttagaatgggttggtgacaaaatcactttgaaagcaggtgatgccgcagctttagaagctttaactgcaaaagtaaaagcactcgttcctcatactgaagttgtttcagctgcaccacaaacagctgagcaatctgtaagtaatagcttaactgcttcacaaactgctttaggctcaattgacccgaacaatgtagatgtaaatgctttggttaaagcgcttaacctacaaattattaacttcgcgagtggttcaagtgaaattcctgcagataacaaagccattcttgaccaagctgcaacactgttaaataaagtgactagtgtgaaattaaacgtaggcggtcacactgactcaacaggtaatgctgctgccaataaagccctttctcaacgccgtgctcaagccgttgtagattacttggtttctaaaggcgtagatgcatctaaacttgttgcccaaggccatggttcagaaaaccctgttgcagaaaacacaactgaagaaggacgctttaaaaaccgtcgtattgagttttcagtagctcaataa

SEQ ID NO: 55221 - DNA, 6408 bp, Acinetobacter baumannii
atgaacaagaatagttatcgcattatttatagcaaagtacgtcaaatgtttgttgccgtggctgaaaatgtaaaaagccaaaccaagacatctggtcaaagtcaagcaaactctcaaagccctattaatcatgaatctcaggtattccatcagctctggcaagtgaaagcactggttgccagtatgagtttttggatgcctttagcccctgtatatgcagatattgtagcggacaatgcagcgaatgcggaaaacagagcagtaattgctgccggaagaaatgctcagggggcagttgttcctgtggtcaatattcaaacgccaaaaaatggtgtgtctcataacatttatcaacaatttgacgtgttagctgaaggtgctgtattgaacaacagtcgccaaggtgctgctactcaaaccgtcggtaatgtatctgccaacccatttttggctacaggtgaagcgagagttattttaaatgaagtaaattcatcagccgcttctcgctttgaagggaacttggaagttgcagggcaaatggcggatgtcattattgccaacccatctggtatcaacattaaaggtggtggctttattaatgccaataaagcaattttcactacgggtaaacctcagttaaatgccgatggcagtatcaagcagttcactgtagatcaaggtaaaattacagtttcagcgaaccccaattctaaatttggattgggcggaaataataatgatgcaaattatatagacctctatgcacgtgcattagaactcagtgcagagcttcgtgccaaaaatgatattcaggtaattactggtgcaaatgatattagtgcagatttacaggatacaactgctaagactggtacaggaactacaccgacattggctgtagatgtcaaagcgctgggcggtatgtatgccaataatatttatttagtgggtactgaaaaaggtttaggtgttagcaatgctggaactcttgaagcattaaatagtcttgttgtgacaagtgcaggtaaaattgaaaatacaggtgcgctctacaataaaaatcctcaaaatagtttattaagcctaagttcaggtgagggaaatgatattgttcatacaggaacaatgatcacaaatggtaatttaatattagattctggaaaagatattatagtcgatcacgctagaatagaaaaacatggtgctgataataaaaacattgtttctttaagtgcaaaaaatgacattaatatcaaaaacagtgcaaacatccaaaactttggtgaaggtggagacctttatttagatgcaaataatatcaatcttggtaatgatgtcaacttaggtgtaaatggagcaatttcattacaagcgaagcaaaatttacaaggtgatcgtgttagaaatatttctagtatgtatgatttgaatttatatgctggaaacttattatcatttaataatacttatatttgggctaattttggaaatctgaactttaatactgcaaatgctaattcaaatcttatattagattggaatggttttaatgtaggaaaagatattaacatatatagttcaggcgatctcactttaaagaatctaggatttgtacttgataactctgttactcgctccaagaattttaatgcttatagtggccataatttagtttgggacagtagctctagagcattaccacaaattaatggcgatataaaagttgaagcgggcaacataattgatttgaaaggctctggtctatcgagtactggagatctaaaactacaagctaaagctctaaatataggaacagatctaaacgctggcaaaaacttaagccttaatgcgactcaaagtgatctaaatttaaataaaacgcttactgcacaaaataatattgacgttacttctttagatggaaaaattactgcaacgggattaaatgcaacgtctttacaaggcaaactctcaatattaggtgcaaaagatactctcttcactaatgcaggcacaaccaacacagtattaaaaggaagtaaaggagttactattggtactactggtataggtgacttaacagtacaaaatgcaattttagaaagccaaagtggcaatattgttgcgactagtggagccaaaaatacgttaactgatagtacgttaactgctaaaaataatattgaaatatttgctacagatgaccttactcttgacggtgttaaatctacatcgcaacagcataccgcattaaattctaaaaagaatatttatatcaatagtcatgtgaatgcgtatggagtagcagattttagctcgactaaaagcagtgagttgaattcaacaggagtgttgtcactagttggtggaggaagcctaaatgttcaaaacactaagcttacaggtggagctgttttaattgaaggtgatgccttaaatacagcaaaatcagtagacttgaatgctacaggaagtgatttacttaagaatgatactaaattaaataatctaaatggcaatttaagtattcaaacgaattcaaacttgacgattgatcctaaaattcacaacttaaaagcagcaggtgatattgaacttatttccaagaatggtactttaactttaaagggctatgaaggaactgcgggtaatggatctgaacaagttgttaaattagatacagccaatggcagtattaatttagaaggtaacaaagtcgatattcaaggttcacagttaatagcacagaaagatataaaaattgtttcaagtaaagatgatttgttagttgatggaatcaaaaatatattaaataataggactgctgatacaaagaatataattaatatcgaaaataatattaaggaaattgataataatataaatattttatctaatagtaaggaatttcaggaaagaaaaatacttcttgataatataaaaaaggcaaaaaataatcttgaagcatctatgtcatatctctttaatgcttcaaatggagaatatggagctggggctttatctaatgtagatgtaagtaataccttgttctatgaaaatgcttatattcaatcaatttcatcagagggagcgagtgatacttatattatagtaattcctactggttcatatggtaatatacaaggtttcttgccgtcattaggctatgtagaggttttactaaattcatataaaacagaaataaagaaatataaaattttaaatgagagtaaggctattaaagatctagagagtatgattaataaactgcaatctcagaagcagatagagttaaaaacaaaggaatttcttgctagtaatattaatggtaatgaacatgcagaagctaatttaatttcaaaatctggaaatattaatattacatctgccaaaggtttaacaataagtggggggaatatttcttctcaattaggacaagttaatttggaggcaaatggtgctttatctgagcaatataagactacaaccactataggtacaaatgcacaacctagaatattaaatgcaagtgttattattgatggtcatgtaaacttctatgataaaggcaatgaaaatgatcaaaactatagtatgcgaacattaattagccctactattattaatggtgataaaggggtgagtataagaactgtaggtaaaagtcaaagtgataatttagttttacaagctacaggtgttacttcaaaaaatggcgatgtaaaaatagaatcaaacaaaagtattttgtttgatgctgcaattgaacaaagttatgaccgttcattaactacggaaaagaaaaaatcatggggcggcttaaagaaaaagtatattacgaccatagctgaaagtaataatgctaatgctgcttcagttgatatttctggtaaaaatatttttattgaaactaaaaaattagacccatctcttaatactccagataataatattgatatttattcaggccgattcactgctgatggtggacaaatttcgattaactctggtggtaatcttaatttctactcggtagaagagagttctagcagtaatgtagatattaccaaaaaatcatcatttgctggtattaaatacaatacctctaaaactaacgcaacacgtactcaagtgagtgagttacctgcaaccttaaaagctgattacattggcactaaatcggggtttgataccagacttgttggaacagagtttgagtatttaaaaggggcatcgattgaagcaggtggtaagttagagttaattgccgcgaaaacatctattacagacctcgtgaaaaaagaaaaaaattctgtggtttggcaatcgatgcaagataaagggtcaattaccgaaacagctcaattgccaagattcaatggaccagttttacctaccattaatgctgcaggtggtttaagtgtacaagttcctattagtgaaacagatgcgaataaagctgaattacgagatgaaattttaaaactggcaaatcagcccggaaatgcttacttaaaagagctggttaatcgtaaagatgtagattggcagcaaatacttcttactcaaaaagactgggactataagtcacaagggttaacggcggctggtgctgcacttattgttatcattgtaactattgctacgatgggttcaggtacagcagctgcagctggcgctgctggtggaacagccgcaagtggtactactgttgggcttggtgcgagtatgattggctcagctggtgttacaacagcaaccgttggaggtgttacaacaattacaggtgtttctacacttggtgctatggcaaacgcagctattacaagtttagcaacccaagcaagcgtaagtttaattaataatggtggtgatatcgggaaaacacttaaagagttgggaagtaaagactcggctaagaacttagcagcatctgttgtaacagctggtttaatgagtcaggttagctcggcactgaatattaatttaaatgatatgcctcgattagagaagcttgctaataattttgtacaaggagttggttctaatattattagtagcagtatacaaggtgaaaacctatcagataatttagactcaattattttatctggtttaacaagtgctttgcatgctgagatagcacaaggaattggggaaaatttttccccattattaaaagataatcctgatatttttgataaagtacttcataagattattcatattgcagctggttgcgctataggtagtattcaaaagcaatgtgaggcaggtgcaataggagctggtgttggagaaattcttgcagagactataattaatgatagtttaaataatcaaactactattaatgaattagaaattaaaaattatggaaagcttttatcgggaataatttctgcatatgctggatatgatgttaatattgctgcaaattccgcagaaacagtcattgaaaataacgcattcgttagtgcaaaagttaaactcgaaggtgctaaaagaagttgtacagaagttggatttgcttatggttctactggttgtaaagaatttttaagtaaaaaatatgaaatgcaaccagcattacgaaatgctttagtacaaagtaaagtttctgaatttatttttgaaacacttgaagatgtaactcccatttggggcaatataaaagcatttagagatgctgaaacgaaaactgattattttgttgctggcataactgtttttcctatagctaaatgggtaaattcgggcaaaaaagcaattactttaattttaaaagatggtagtgaagttgaagctattatttcaagggctggtacaggatacagtatttatgtaccacaagtaggtaaagatattgttgaacaaatggctaaaggaaaaacagtaacatctacaacttttaaaccgggtgcgcgacaaacaattaataatattaaaggcctagataaatcaggaaacaattggtctgttaatttaattggtgacggtactaaaatgaataaagccgctcaagtaacttatgtagatgttagtcctgcaggtgtgaaaactacaaaaatagccaatattccttatgatagtagaggtttacctatttttgacgatattgcaaaatttactacgacaatttcagcacataaggctgaatctacacaatttaagtatgcaagcttatccctatgggaagctattcagaaaggtcaggttaattcaagccaattcacaagtgaacagttaaagcagatacaagctggagccagtaaaataaaaggttatacttggcaccataatgctcagtcaggaccaaataatatgcaattattaccagaagttgtacataatgcagttaagcatattggcgaagattctttaaaaaaaggggtaattattaaatga

SEQ ID NO: 55222 - DNA, 1740 bp, Acinetobacter baumannii
atgttaactaaaaagtttataaatacttccattattttttttgcgggttttaatcaatatgtttacgccatcgaagatgtctctttaccgggtcaagtactacaggagcaacgattcaaagagctgagtcagcaattacaagaccaatttactcagcaaactccttatcaaaatacaaagccattacaggactttaaacatttgattgttgaggagagtccctgtgtagcggttaaaaaaattagtcttataccattaaaagaacagtctgttactgacttgcagcaatttgactttattgtaaaagctattcaaaaacaccctcaggctgttttaggaaaatgtattggcacacaaagtctacataacattgttaattatgctcaaaatgagcttttaaagaagggttttattaccagtcaaattgtcgtaaatccacaagacttaaatcagggtaatttatatttaagtgtacaaattggtcgattaaataaggtcgttatacaagaaggaaaaatatcgtcattacagcttaaaacaggactaccatttaaaacgggcgatatcattaatctaaaaaaattagatcaaggattggaaaacctaaaacgcgcttatgctgtagatatgcaacttacgccagcagtttctacagataaagaattaatgggctataccgacttaatacttaaactacaacccctacaaaaagttaatttcaatttaagtgtagataactcaggtaatcaggaaactggtacctatatgggtaatataggtgtaggagttaataacccatttcatttaaatgatattttatctttaaacgtgagccattcattagatgacttccatgaaaacttaaatcgaagttacttcattagttatcaattaccttttggctattatgatttaggtgttagctataacgattatcaatatagacaaggaacggttactcctaaatatcctgttatctatcatggtaatagtcagcaagccaacctaaatctctctcgtgtcattagccgtagtggtcaacataaaaccagcatttatggcaagctttatcataaagaaagtcaaagttttctaaatgatattgagattaatgtcctacaccgtaaaacttcaggttgggttctagggtttcaacatcgccaatatttaggaaatgcagtattagatggcagtattgattaccgtcatggtatgggaataaatgcactgactgcaccagaagaaaatattaccgatattaatggcaaacgtcttgctgtagaaggttactctcgtgctccactttggaatgccgacctacgttttactatgccttttcttttgctagagactccagcgcaataccgccttaactggcgtggtcaatatgcccctaaaattttagtacccaacgatcgtttttatattggcggacgatatagcgtgcgtggttttgatggtgaactcatgctttcaggggataacggacagtatttgcagcaagaaattagcctaaatactcctatgcctaacactcagttttatatggcggtcgatcagggctgggtcaatgggcgtaatagcataccgggtcagcgttatttactcggcagtgttttagggctacgcacctatcaaaatagtttttatctggatgcttttacaggtcggggccttattgcacctgacagcataaaaaaagactgggttaccggttttagtatcaacctttcttattaa

SEQ ID NO: 55223 - DNA, 2463 bp, Acinetobacter baumannii
atgttcttactgaaaaatctcgtatcttcgataacaaaagttactcaggacctgggtaatgttgtatcggtgaatcctgttgtaaacacaggttctcctgttaatgtaaacgtttctgacataaatattgctaatggaaatgtttcaacatcaggcttactttctaatgtactttcaactgtaaccaatacagtctcgcatgctacaacaggattagtttctgatgtagtgggtaccgtaactggtactgcaggctcaacaaatccattaggaaccataaccaatgtggtaggtggtttaactggtggcgtgactggcggtagccctgttggtggattaaccaacgttattggtggtataactggcgctattggcggtgtaactggtggtgctactggtagcaatcctgttggtaccgtgaccgatattattggcggtgtcactggtggtgtagtcggaggcggaacttctccactggcaccagttgttaacgtcgtacaaagcggtattgacgtgctacaaggtgtcgaaagtctaaaaaccagcattattaatacaggcattaatactgttgcggacactgtagttggcgtacttcctcaaactgaacatcctgttactgatattgctcacctcggtacattaacttttgaaacttctcgcgatactgtaaatggtgctttagaaacagtttctcatttagtaggtggtgacatccaaggagctacccaatctgcaacaggtattcttggaacacttgttcataacggttcaactgcaactggtattttaactgacattcttggtggtgtaactggtgctatcggtggtgtaactggtggcactactggtggtaacccgcttggtactgtgactgatatcatcggtggggtgacaggtgctattggcggtgtaactggtggcgctactggtggcaacccgcttggtactgtaactgacattattggtggtgtaactggcgctatcggtggtgtaactggtggcgctactggtggcaacccgcttggtactgtgactgacattattggtggtgtaacgggcgctatcggcggtgttactggtggcgctactggcggtaatcctcttggtactgtgactgacattatcggtggtgtaacgggcggaattattggtggtggtacatctcctatttccccagttgttgatgccgttcaaagtggtattgatgttcttcaaggtgtggaaagtttaaaaactagtattattaatacaggcattaatactgttgcggacactgtagttggcgtacttcctcaaactgaacaccctgttactgatattgctcacctcggtacattaacttttgaaacttctcgcgatactgtaaatggtgcgcttgaagttgtatctgatttagtgggcggcaatatccaaggtgcaactgatcatgcgactggtattgtcaacactctcgtttcaaatggcacaactgcgactggcattttaaccgacattcttggtggcgtaactggtgctattggtggtgttactggtggtaccactggtggtaacccgcttggtactgtgactgatatcatcggtggtttaactggtggtgttactggtggtaacccgcttggtactgtgactgatatcatcggtggtttaactggtggtgttactggcggcaacccgcttggtactgtgactgacatcatcggtggtgtaacgggcgggattattggtggtggtacatctcctatttctccagttgttgatgccgttcaaagtggtattgatgttcttcaaggtgtggaaagtttaaaaactagcattattaatacaggcattaatactgttgcggacactgtagttggcgtacttcctcaaactgaacaccctgttactgatattgctcacctcggtacattaacttttgaaacttctcgcgatactgtaaatggtgcgcttgaagttgtatctgatttagtgggcggcaatatccaaggtgcaactgatcatgcgactggtgttgtcaacactctcgtttcaaatggcacaactgcggctggcattttaaccgacattcttggtggtgcgagtggtgctattggcggtgttactggtggtgtaggcggtgatagtccacttggcactgtaactgacattattggtggtttaactggtggtgctactggaagtaacccacttggcacagttaccgatattattggtggtgtgactgggggtacagctggcagcaaccctatcggtgtcgtaacagatatcgtaggtagcttaactggtggcgtaactggtacaggtggcacagatgttatttctaacttattaggtggagtaactggtaacttaggcggagtaacttctacagtatctaacgtaacagacacggttcatactttagtacctcagtcactacttactgaccacttcttaaatatctctgtacacactgtttaa

SEQ ID NO: 55224 - DNA, 411 bp, Acinetobacter baumannii
atgcccatgattcgttttacgactagttatgcatatacagatcttgagaaagctcagatttcgaaaattgtccaaacttgtatggaaagttattttgatactccaaaaaatgattgcttccatatttttgagcaattacctcaaggcaatgtacttgtcgatcctgactattgggtgaagtcttcccgtaccgaaaagtttatcctgctatacatcacttctggcaaacccagaacagctcagcaaaaattagatttaatgcaacatgtgactacacagctccatcaaacatttaacattcctgagcaggatgtcatgtttgtgattgtacaaaacagtgcagaagattggtgctttgggcatgccgagcgtgcagatctttatttaaaaatcttacctcctataagttaa

SEQ ID NO: 55225 - DNA, 318 bp, Acinetobacter baumannii
atgttcagaaaaattgatattcataacttagaaagtatttcgcccaagctgtatgagttcggcaaagactacttatttgcagatatttggcaaaggcctgtgcttgatactcaaacacgttgttttattacaatcactacacttgttttacaagggcgttattcacagctcgaatggcatgtcaaaaatgccttaactcaaggcatcaccaaagagcaaattattgaagccattacccatattgctttttatgcaggcttacccactgccatttccgcacttgaacatatgccagaggagatatggtcatgcccatga

SEQ ID NO: 55226 - DNA, 885 bp, Acinetobacter baumannii
atgaatgattatgccaaacttccaaccaatcttgatttagacgccttacgtgcgttcgttaaaggaattgagcttggaagttatcagctagcagcacaacacttatgccgttcaccggccgcaattagcgcgcaattaaaaaaattagagcaacaaacaggctgccagcttcttagaaagcaggggcgtttattagaattaacccctagtggtgaattgttattgagccatgctaaaaacatgttggcgattaatgatacggtgcttttaaaactacatcggactcaggccagtggcgtcattcgttttggtctacaagaagattttgctgagggaaccttacaacaactcatcgctcagtttatgttgcagcatcctaatgtacagtttcagattcaggtcgaccgaaatcagaatttgatagagaaagtacaaaagcaagaactagatttggcgcttatttggcagcaaccccccgtaattgaaaacttttatgaactcaaaagtgtcgagacaaaatggttgttttgcgcccatgcgcatattcagcaaattattgaagataaagcttctattccactcgtggtattgcagcaaccttgtatgttaagacatatggcgattgaggcacttgaacaggcggggctggcttggcatattgcttatgagtgtaactctgttcaagcattatggcctgctgtacgggcaggtattggcataagcttgagatcatgttttcaaacgccttcagacattgagatcataaaaagtgatgtattgccggagcttaaggctttaacttttggtctctatttcaattcaaccacacaatctctacatattattcagcagtttcaacaatatattgaacagcatctacggtaa

SEQ ID NO: 55227 - DNA, 138 bp, Acinetobacter baumannii
atgtttatcaatagattaaaagttgataaatcagtcgataaagtagctaaacttgtatttttattttcattagatacgctaaatatattttcagcaaaaccatactcaattataaaagccctactcatagggctttaa

SEQ ID NO: 55228 - DNA, 873 bp, Acinetobacter baumannii
gtgaaaaagataattttagcaacaataataggtatctcgggtatgaataactcttttgctgagtgtacctatagctttgatgcgaatcagcaagatataaaggcttttgaagtagcaaattcagctcatgcagctagttatcgttatgcggagccagttgctaatttaaatattgcaaatcagtcaggttatgatgttatacaatattactcaaataaaaacgttgattcattgttcacttctaaaaaatatattcagtttaaaacccagtatccatctgatacaccagacaacgttgttattgtagataaagctattggtagttcagatatatttgctcaggagtttatttttgatgtgaataacttaaaggttaaccttggtaataattctcagatgtatgagtatggttttattattactgggtcttcagagtctaaagtggaattaacactaaatttaatgtttgcaaaaggtaataattattctggtgtactaaatggagatgcaattgcttctttaggcgctacatataaatctgatgggaatggtcatttaacatatttaagtgccaatagaactaataatccagtagaagttccagcagatggaaaagttagagtaggtatttatgtaaatcaaaatactaaacaggttggctatattattaatggtgtaaattatggttacttgaaccttactatggaaaataaattaaaatatatgagttttatgggagcaattaaccaagatcatttcactaactcggccttaactggtaaaacagtgggtcttcaattaattacagataaatcaaaaatgcagtttacttacccaacagggactaaagacatttgtggtgttgctttataa

SEQ ID NO: 55229 - DNA, 282 bp, Acinetobacter baumannii
atggtaaaagcttttattttagccgaattaaaaacacaacttttctttcagggtttgggccgaatgaaagctgaaaatgtagaagcagagtttttaaaacatttagaacgtattgagcaggtgttatcacaaagtgaatggttggttggagataaacagacgatagcagacattgccgtagttgcccaactcggtgaggtggttcgaacaaacaaaaagtttagtaaagaaattttgaatcgaccgtttattgctttatggtataaaaaacaaacagggtga

SEQ ID NO: 55230 - DNA, 180 bp, Acinetobacter baumannii
atggctgcccgtgaaatttttgaactaatttttagcttagaaatgagtgtgttaaaacccgatgccgacatggttttaaacttaatagatggcttaatgtttgagtttttaagtacagatagtgtggaaaacagggatgcagcgatggactgcttttttaaacctatttgtttgaagtaa

SEQ ID NO: 55231 - DNA, 534 bp, Acinetobacter baumannii
atgttagttatgtctgataagcagcagcctaaacatgtactgactaacatagattcatacattcctttttctattgagttctctaatagtggattagctgatctatactggcgatgtggaaatggaaaaacttgtttatttgaactaggtttaagtaacactggcggagtaattaatattactcttgcatcaataaattctagtaacattttgaaaaacaataataaatataaaattccatttcctgtggaaaatttcctacctaaatttgatgtttcagagtggaatataatatctgaggattattcaagcatatttagagatgattttaattatgaacttcaattaattgtaggtttagattacttagtattaaatttcttaaatattgaaaaatcagtatgttactttaaaaatgaagaattatatttgggttttaactccaataaggaactatcatcaatacagttaactcatattgcagctgaagaaatagaaatcataaaagaaatttttaaggtagatacaaactaa

SEQ ID NO: 55232 - DNA, 243 bp, Acinetobacter baumannii
gtgtcttacgcatgtccatgctgtggttatcttacatttgatgaattaccctatggttcgttcgatatctgtgcagtctgtttttgggaagacgacaatgttcagaataaagatcctgattatatgggaggagcaaatggtattagtttaaatatggctaagcaaaattttcaattatttggagcaatgaaaaaagaatttataccatatacccgtaaaccgcttgaagacgaaatcccgtga

SEQ ID NO: 55233 - DNA, 429 bp, Acinetobacter baumannii
atgaaaattaattttgatgttaaagtcgtttctggtttagtaggttccttaaatattcaaattatacctttggatctaaatagaaataaagattgtatagactctatagttgttgatgaaattgctttttcactcgttgaaaatatatttaaccgagataaagaaaagttttttcattggggagctacttttattaaacaagaaaaaataagagatattataaaagatttatattggcttcattcatttataaatcagctagataaatacgataaggcattaaagctcattttcgaagaagaaacagaatggtttgcaaaccacttcaattttttcaaaccacaaacacttaacatgatcatagaaattacaaaatttcttgagaaagccgaaaacgaatatgacggcattaccgtattaggcatttaa

SEQ ID NO: 55234 - DNA, 1068 bp, Acinetobacter baumannii
atgaaaaatcagtggataacagacgaggatagatggcaagcaattgtagatcgaaatgctgaagctgatgcatattttgtttatggcgttaaaacctcagggatgtactgtctaccgtcaagtacaaaaaggctgcctaaaaaagaaaatgtagttttctttgaaagtgccgcgcaagccgagaaaaatggttatcgagctagccaaaaaatacaaaatagactctcgaacgcacacgatccaaagcttgtagaaaaaattgagaaagcttgtagatatattgagctgcatgaggaaaacctgtctttatcagacgtggcagatcatgtgggaatgagcgcataccattttcatagagtttttaagcaaattactggtctaacacctaaaggctatgccgatgcccataaaagtaaaaagctaagagaaaacttaaatgaaaatatcagtgtgactgatgcgatatttaatgcaggctttaattcgaatagtcagttttatgaaaattcaaattcgctattaggtatgacagcgaaagaatggaaatctggcggtaaaggtgtacgtatttttttcgccataggtgagtgctctttaggagatattttagttgctcaaagtcaaaaaggaatttgtgcaattttgctaggcgatgaccctgaaaagcttttaaatgatttacaagataaattcccagaagccgatttaattgggtgtgatgatgagtttgagcaactgattgcgcatattgtcgggtttattgaagcgccacaaatcggattagatttaccgctagatattcaagggaccgcatttcaacaaagagtatggcaagccttgaaagaaattcctgcggggcagacggccagttattctgatatagcccaaaaaataggttcacctaaagcagttcgggccgttgcaggggcgtgtgcagcaaacatgttggcggttgctattccatgtcatcgtgtggttcgaaatgatggttttatttcgggatatcggtggggcatggaacgtaaacgtgcattgttagagaaagaagcagaactggcaagaagctaa

SEQ ID NO: 55235 - DNA, 765 bp, Acinetobacter baumannii
atgaccagattaaaagacaaagtagctattattacgggtgcgagttcaggtataggtttaagcgcggcgtccctatttgtagcggaaggtgcaaaagttattcttgttgcacgccgtgaaaatattttagaacagctttgtaataaactgaatcaagatggagttgttgcgcactttatcgcaggggatcttaatgacccgacaaccatgcaaaaagcgattgatacggccttgcaatattatggacggttagatattgcgtttaataacgcaggcctattgggcgaatatcaactgactcacgacacaaccgatgaaaattggaatcacgtactgcaaagcaatttaaccagtgcgtttcagtcggctagagagcagcttaaagtcatgttaaagcaggaatatggctcaatcctgtttaccgcatcttttgtggggcatcatattgggttcccgcaaatggcggcttatgctgcaagcaaagctggactgattggtttaaccaaagtgatggccgcagaatatgcaacagcaggtattcgagtaaacgcgcttttacccggtggaacaaatacttcaatgggacaagaggcgacgtcttcgccagaagtgctagagtttataaaaagcatacatgccgtgaaacgtttagccgagcctgatgaaattgcgaaagctgcactttttctagtgagtgatgatgcaagctttattacaggaagtgctttacttgccgatggtggcgtgactatttgtaaaagttag

SEQ ID NO: 55236 - DNA, 1089 bp, Acinetobacter baumannii
atggaccaaataacccaacaggaactgtttaataatctggttcaacaccaagcctatctttatagactttcatctagcgaaatcaattcacttttagatcaatttaactctttatcaaatgagatgttaagtcaattaagggatttgctagatgacttgtctgaagctgaaaagtcagcattaatggcagggcaatacacaacaccagcccttaaagaaattcgagcaagtatccaaacttggcatagatcacttcttacttcaataccagaagcatttatcgtttcagccacagcattagcagtgaatgaggctatgtatcaagctcgaattcttggggagaaaatcaaggaaccaagtgctaagactttatatggcaagatcaaaaagcagccaatgtcaggcggagttttgcttgactatcttttcaataagatagccgatgataccaaaacgaggattgagcaagttattcgtgatgggctctctcaaagccaaacgaatcagcaaattattcagcgcattaaaggtaagaaggctctaaattatcaagatggaatattggagcaatcaagatccactatttctaccatggtgcgaacggccagaagccatgtttctaatcaggcaatgcttgatacttatgaggcactggatgtttctcatgtgaagtttgtagccactttagatagtcggacaagcaagcattgtgcaagtttagatggtgcagtttttaagacagatgaaccacatccaacaccaccacttcacccaaattgtagaagtattattcttccagttacggataaagaaggtactaccattggtaaacgaccattcaactcaaaagctggtgattctggtgaaataagtacaattgattctaataccacattcaaaatttggtttgatggccaatcgaaagaatttcaaaagtcttggctaggaccatccagatacaagctattcaaagttggtaaatactctctagataaatttgttgatccgctatctggacaaccattcacccttgatgagctaagaaaattggatgaaaaggtttttagcattttatataaaagaagttaa

SEQ ID NO: 55237 - DNA, 1479 bp, Acinetobacter baumannii
atgacagacgttactgctaagcatcctgattacttaaaaaacgttgatctatggagcaaggtagaagacgtttgtgagggtcagcataaagttaaggctgctaaggaaaagtacttgccacgacacaataagcaagacaattcgccggaagctatggctgcatacgattcatatttggaacatgcagtgttttatggggtcactggtaagacattggggagtcttattggtggcgctttttcgcgattgccaaactttcaaaggcccgatgatcttgaatatcttgaacgaaatgcaaatggacagggagtgggagtctatcagcttggtcaagcagcattgcgtcatgtattaaaaacttatcgatgtgctttatatgttgattacccaaatgttaccccgtctaaagtaagagcagatgactacaataaacaagctttcccaatgattcatgtgcttcctgctaagtcagtaatcaattgggatacgattattattggtaatcagcaaaaactgtcacttgttgtaattcatgaggaagtttctagtagggcgcagggtggctttaactttgagaaaaaagaacagtttcgagtgctgcgcttagaggaaaatgaaggcagatatgtttttaccattcaggtttacaagcaaaatactgatggcgtattaaaagaagagcctaagacaattccaactgattacaatggcaagcaatgggattacattccattcacttttgtcggggctatcgataacaccccagcaattgaaagcgcaccattgcttgaattggctgatctaaacttagctcattatattgatagcgcagatttccaagagtcagtttactttgttggccagcctcaattctttatggaaaatgtagatgcaaccatgtatgaaatcatcaaaaaagatggtttgtatattggatgtaagaacgcatttcctgtgaaattagggtttgcacaagcaaaccccaatacgctttctcaaactgccatggaaaaaaaatgggagcagatgaaagagttaggtgctcgtttagtgcaagcaggttcagcaaataagactgctactgaagcaaacaacgatgatgcggtgcaacattcggtattatctctgtgtactgtgaatattagtgctgcaataactcaagctctgcgttggtgtgcaaagtttgctatgcctaatgttgatttaatacttccagaagagttggtatttgaaatttctaaagaatttagcaagcctcagtttgataatgaacgctccaagcagctttatgaagcatgtgttgctggtaagtatccattcaaggtttggcatgaatatcagcaaacgggtgagttccctgattattcttttgaagagattcaagacatgcttgaagaagagcaaatgaatagcccaatgcctgcttacaacatgaatggtgtaaataatggaccaaataacccaacaggaactgtttaa

SEQ ID NO: 55238 - DNA, 1494 bp, Acinetobacter baumannii
atgctgaaacctgagcataaagcgaaacttaaagaccagttatggcgcttaaacaatctttactacattacaaataaagaaggtaaacaggttaagttcaagatgacacttgagcagcttgagtacttcgaaaatgagtggacacgcaatcttatcttaaaggcacgtcaactaggcttcactactgagatgtgcattatccaattggatgccgcattattcatggctgataagtgtgcgttgattgcccacactttgcatgatgctaagcgcctgttccgtgaaaaggttaagtacgcttatgaccgccttccgcacttaatcaaagcagctaatcctttagagattcaaactaaggatgagcttgtctttagtaaaggcggttcaatcactgtatcaacctcatttcgtggtggaacattagatcgtctacatgtctctgagttcggtaagatctgtgcgaagtttccagaaaaagcgcgtgagattgttactggtgcatttgaagccgtaagtcttaaaggtcgtatcactcttgaaagtactgccgaaggtaaaagcggctacttttatgagttctgccaattagcagaaaagctgtttttactcagcaaaaagttaagtccactagattggaaattctttttcttctcctggtggaagaatgctgattatgaaattgaaccaactgaagaactcccacagcgactagttcagtattttgaggaactggaagcaaagcacaacattaaaacaactcgaacgcaaagggcttggtatcactctaaagagaaaactcttggtgaggatatgaagcgggaatatccaagtattccaagtgaagcttttgcacaatctgttgaaggcgcttactacaagaaccaatttaaattcttgtatgccaataagcgtattggtgtattgccagctaatgatcacgtgcctgtgatgacgttctgggacctcggtgtctcagattctatggtgatctggtttattcgtaagttatcagacacttgctatcaggtaattgattactacgaaaactcaggcgaaggcatgcggcactacttcaaagtgctgaaagaaaaaggctacaagtacaacaagcattacgctccgcacgacatcaaaaaccgctctcttatgaatgatggtaagtctcggctagacattgccaaagaaggctatgtcttagacgacggtgagaagtactcagtcaatttcgaagtggtgccaagtatcactgtaatggatggtattgagcaggtccgcgagattctgcctctatgcgaatttgatgaatacaaatgtgcagaaggtattactcatcttgagaactaccgaaaagagtggaatgacaagcttggatgttggaaagataacccacttcatgacattcactctcacggtgctgatggtttccgtatgtttgctgttgctatgagcaagaaacaatatgtaacttcattaaaactaggatttgcaagatga

SEQ ID NO: 55239 - DNA, 531 bp, Acinetobacter baumannii
atggaagaacaaatcaaaggcgcagaacctttagagaatgagcgtcatgaactgttctgccacgaatatttaaagacactaagtgcgcaagaagctggaaaagctactggttataaaaatcgtcagaatgcttgggatgtgctccagcgtgatgatgtgcaaaagcgcatagcctacttaaatggtcagcgtttaaagcgtgttgatgtgaatgcagactatgtgctcaaacgccttgtagaaatcgaccagatggatgttttagacatcatggacgagaagttgaaaatgaagccattagatgagtggcctactatttggcgtcaatatgtcaacagtattgaaaatatggaaattactgacagtgcgggctggcttaaaaaaattaaatggcctgataaagttaaaaacctagaacttctaggcaagcatgtggatgtgggggcattcaaagacaaagtagaacattcgggaacaattgagattcagtctgtatctgagttgatggatgaattaagcgagggtgattaa

SEQ ID NO: 55240 - DNA, 531 bp, Acinetobacter baumannii
atgatcggatcgattgtcatagttttttttgaaaatatttcagaaatttcaataattggaacctctgttaagcttcaacaggtaaacaaggactcacaacaactacttgaaaagcttcaaattgaaaacttcaaagttagattatctcagattggctctagtgatggtttattcggtgatggacgagatactcaatatgaatttaaatcgaaattgtatgagttagttgcagatattaaaaaagctgatttacaagataatgaagatttaaaaaataaatttctgccactgctaactttacatattgatcttcaacttaagactattcagcaatttggttgttttttagatccaaatcctttggttggtattgaagacccagaggatctagaaaatgctattacagatcaactggttgaaaatgcacatgtgaaaatgtgcaatagtaatatagctaagctgaaaactattttagacaacattaagctctataaaaacttattacaagccaaaaattggtttttaaaataa

SEQ ID NO: 55241 - DNA, 891 bp, Acinetobacter baumannii
atggatcaaatttacattgatgttccatttggaatgcactatgacataaaaaatggtattccaattcacgaggctatagatcaattaaaagctataaataaaataatagacaagcagaagtctgttatctcaattgtcgcaaatgctgagattgaacatactgaagtatttatcacagaacttaaagaaggtagctggatcgaagaagtttgcataagaatcttttttgaaaataaagagcattatgaaaagtttgctcaagcagcaggaggtgttcctttggatatgtggatgaaagtcatacttagtatgggagttggtgcttttcttacatatggactgctttccatgttgggcaaaatagggaattcgtcaggaacaaccataaatattaaaaataattctggcattatttctctaggcgagagcatcggtttaacagagagccaaattgacacagtaattgagaaaaacgcaaaacaatccaagtctgacaaacaagccactttagatgtgctgaaccctgctaaaaatggtggtgcatcaaaagtagcaatatctgggttaagcgaactagatattgtaaaggaggattttgaagaccttcctgaggaagtgcctaatcaagataatgaagaaaaagaacaagattatgacgcaattgatgtttatatctatgcaagtgatagagataaaacaagtacaggttgggcgggaattgttccagaactatttgaacaaagggttaagtttgaattagctgatggtgttgatcctaatactttacatggtagaagaaaagtgaaggccgatattactgttcataatcagtatgttaaatcaagaaaagcttttaaggcctataaagtgactataagagctgttgattaa

SEQ ID NO: 55242 - DNA, 276 bp, Acinetobacter baumannii
atgcgtgatgcaaagcgacttgccgcaataagaaaattaccttgcgttagatgtggctatcctcactctcaagttgctcattctaattctggcaaacatggcaagggtaaaggtataaaggcctcagatgagtttactgtggccctctgttacaaatgccatcacttattcgacacataccaattaggcacaagacaagaatcggaagtgatgtttgatggatggttagagaagacagagcggatgcttaatcttaaagatcaggatgttttttga

SEQ ID NO: 55243 - DNA, 255 bp, Acinetobacter baumannii
atgacatattttattggtggaagttgggacgggaagcaagttcaaattgaagaaatgattaactctgaaattatagattttggagagaagttaaattctgtcggtaaacaaagaaagatttataggaaaatgcaagtcagtttccatggaactataaagactttctacataattgaaggtaaaaatcctatagattttagagatcaaattattgatttatgggataaagttaaaacggatgtatatgcaatttag

SEQ ID NO: 55244 - DNA, 219 bp, Acinetobacter baumannii
ttgaatatctgtgttggtggtgaactagatgggcaaaagatagagaaagaaggcagattacttaaggcttctgatttagatccttcttttaaaaccgaatattacaaacagatttacaatcgtgacaatgtggtttatcaattttggttgcctgtaggttctgatctacatgaaatgtctaaattagtactagatatcttaagagcacctaaaaactag

SEQ ID NO: 55245 - DNA, 252 bp, Acinetobacter baumannii
atgtcaattaacgctggaaaatggctttgtattggtggaagtgaatctggaaagtggattgaacaagctgaatttcacgaagttcatccttataataatcctctaagaccagatatatatcgtcctaaaccgttaatgaatccgcaaactaatcaaatagaaactttttatgttttaaccgcattaaatgaagaaagatacgagtatgctttgaatgatgcactttcaaatcaagttggaaataataattga

SEQ ID NO: 55246 - DNA, 441 bp, Acinetobacter baumannii
atgaatgcagcagtagtaacaccagtaatggattggaacaaatacacaattgatggatggctagagcaattcggcgcttggtgtgaaactgtgcgcatgaaaggaggagatttaccagacggattgcatatcaatcagatctattggcttatgcgtgaagcaggcaaagagattccaaagggtaaggcttacattcgttgtgagatcaatgattttgaagcggatcaagtgcaagctttattgcgtagcatctttaaatcagaaagcattgcatacaatgttaaatacgcattgatgtgccttgtaaaacataaagttgaaaaccgctctctagcttcagtagcggctattacaagtcaatcaaaacaaatgacacatatgatgattaactgtgctcgttttcatttgaatggacatgacaaacgtttgcgaatcgactag

SEQ ID NO: 55247 - DNA, 306 bp, Acinetobacter baumannii
atgcaggcaatcaagcttgcatttcaaaacccaaaagtgtccgtcaagaatacgcttatgacaatgcaatggtatgacgcaacgaacacaacattgattaaagctgaatctaagagctcttacctagggctgattttgggcctagttgtgaatgttaaacgtcaaaccgactcattcaagaagtatgacaatcagaagtatgtggatttttgctctaacgctttgcaagcgattttggtgaaaagagcaaaacccactgttaagcgtaaaagaaagatgcgggcagattataggaaggtgagatga

SEQ ID NO: 55248 - DNA, 330 bp, Acinetobacter baumannii
atgagtaaacgtcaaaacaaaaaactaaataagaaggccatggatttattgattcgtcattggacttttgcaccagaagactttgagttatacggaggggattgggttttgtatatccattgtcagacatatgacgaaagttggtatgaggaagctgagccatttaagtacttaacaggcttggcccaagacacgctaattgactacgaacaagttgaagatgattcggagcttggctttcacgttcaagaagtttttaagcgggatctcaatttatctgttcgtgaagtcttctcaatcttcagaagtacatatgggagccagccatga

SEQ ID NO: 55249 - DNA, 432 bp, Acinetobacter baumannii
atgaaaccagagcagtttattcgtgatcaaggattgctagaagttaaacgaattattagtgaagctcctgagtctggacatcctctctactacaacacagtaaacggagtttatttgtttactgggtatagaaacacttacttcgtaaatggtgtatggggcacagaagacatccacccagaaatgatgggtcaagactttaaatgtttatccattacacaactcaagcgtcttttggagtctttggacattattaatgaacttggaagtttaagaagcgccaaggcaaatgtacgcgagatgtatgcagattcaagttgtgattatgttcatcctgaagccgcactttatgactacaaacatttggaaattggtcgggtaatgaaggccatccttgaccacgaatcaatatacggaggcggggatgagtaa

SEQ ID NO: 55250 - DNA, 252 bp, Acinetobacter baumannii
gtgaaagcaataaaacgagttaaagcattccaaaacatttttgacattttgttattcgctacacatgcaacacaacctttcacgatgaaagacttgcgtgaatatgtcttagatgcacctaacaacactatccaatgctatgtgcaggaattaattaaaagcggttatttggaaaaggactcatacgcgacttacaaagcaactcagtttgcaaaggacttgctgaatgttaaaggggagctgaaagcatga

SEQ ID NO: 55251 - DNA, 810 bp, Acinetobacter baumannii
atgaacataggcgtcgattttgacaaatacattaagcaggcgacacaagtggaagataattacaccaagaagcctaatgcggtgattgatgaaatcatgcgccatgtaagccctaacgcttataaatgccttgatgtagttattcgttgcacacttggatatcagcgcgacagtttccaaatttcaggatctcttttccaagaaattacgggtatcaaacgtcgtgaaactatcattgatgcgattcgtgaacttgaacaattaaagatcatttctgttgatcgcagcactcacatcaacactttttctcttactttatctttgtacgaaaaaaccgtacatgtactaaaaaaccgtacagagtctgttagtacggaaaaaccgtacatagttagtactaatgaagcgtacacagtatgtacggaaaaaccgtacacatataaagaaagaaagaaaaaagaaaatattaatactgaaaagcaggaaaaattcaacttcgcagtagcacttaaaaacctaggtgcagatgagcaattaatcaaagactggttagctgttcgtaaaaccaaaaaagcatcaaatactcaaacagcattcaacggattcttacgtgagttcaataaaactgatcttactgtgaatacagttttaaaaatctgtattgaacgctcatggcagggcttcaatgcctcatggttggcaaatgtaaatctttctgaataccaagagcaaactcaacaaatcatccctgaacaaccagcagcacagttcaaaggcgttgctaagaaatttaaggggatggaccaatga

SEQ ID NO: 55252 - DNA, 159 bp, Acinetobacter baumannii
atgaactattcaatattagcagaaacagaactaaatcaaaagataagtttgtttcaaaaagcggttgaggcttatgtgcttgatcgaactctcgaaaactctatggctttagctaaagcaaaagctgatttagctgcatttgtattgcgaggtgtttga

SEQ ID NO: 55253 - DNA, 189 bp, Acinetobacter baumannii
atgtcaattgaagctgacaaagaaattctcttgaagcttggtggctctacaaaagtggcagagctgcttggcttcaaagataagcaacgtgtccagaactggatgaaacgtggaatacccgcaaagatcaaattgcagtacccacacatttttttaaacccaaatattcaaagtcataacgctgcatag

SEQ ID NO: 55254 - DNA, 729 bp, Acinetobacter baumannii
atgcgtttaacggaaaccttggatactgcaatgaaacaagagaagcctactcacccttcggtggaacgacttttacaagcaagtggaatgacacaagaagaaactgccaaggctattgacgagttcccacaaacaattacaaactggaagaaacgtggggtatcaaaggcaggtgcacttaaagcagcagctaaatttggtgtttcggcaacctggattctttcgggggaaggtcataagtcacaaggaactgtaactaaagtattagagtgggatacagacactccagtagataatgacgaagtggagatacctttttataaagaggtattagtgtcatgtggatcggggtctttagctgaaatggtcggcaatgaaacaagaaaattaagattaagtaaggcgaccttaaggcaatatggtgttgaagcttcaaatgcatatgcgctaacagcatttggaaactcaatgtctcctgttattaacaacggtgcaaccgtatatgttgatgtaggaagaactaatattgttgacggtaaaatttatgcaataaaccatgggggtttgtttaagtttaaatatttatatcgaatgcctaaaggtggtgttcgcatagttagcgaaaacaaggatgaatatccagaggaaatacttacagccgaggatattattgagcaggaattttgtgtagttgcttacgcatttaacgtacaaaactcacttccataa

SEQ ID NO: 55255 - DNA, 282 bp, Acinetobacter baumannii
atggagtggattagtgttgaagaacaaatgcctcagtatgggcaaccagttttagttttctgcaagaaagcttcgtataaacatgatggattaaaactcacagttgcagcttatcaaacagctaaagagatatacgaaacatctgattattttgatgatgaaagtgaagcagaagacggctgggtagcagaagtttctctatttgactcagattatggcggtcgatggatgaatgaagaagtaacccactggatgccactaccagaaccaccaaagaattag

SEQ ID NO: 55256 - DNA, 207 bp, Acinetobacter baumannii
atggaagttaaaacgtacacacttgctgatggtcgatattttaaagtaattaacaaaagtacgggttcagttatcacatatggtgaattaaccgaattaaatcaattggtcactattcacaatgttgaatttatctctgaagagcaatatgaatctgaacgaccaaagcctgagttaccccctttgagaggtaatgttttagcatga

SEQ ID NO: 55257 - DNA, 1350 bp, Acinetobacter baumannii
atgtcatgcacagtatttcgatcaacgaatacagttgatcagtcaataaatgtttttccaccagttgggtatgtgagtgtagttcgtattgtccgaaattatgatgtggaaaatggcaatgtttttaaattcagaacggatgtacaaaaatactttaaagccgtgggtggcacaatcacttgcccagctcttggggtgattgaccctgttactgaaatagctctcaccagtagagatatttatttcaaactggatgaaggtcgtgaatttgcatacttagcatggaaagatgcagatcgtattatgggtgcaaacaatgacgatggcggcacgttctatggtgcatatgctgattacacgctaggtcttcacactgcaggtgttgtatcgataaacggtatttgcattgctgctgggagttttaatcaacgtgtcaatacatgggatgtttctgaagtagttgatgctgcttatacttttgcagatgcaataaattttgatcgagaaatcaactggtatgcaccgaaacttcaatggttgaacaactttctttttaatgcgcataaattcaataaagatattacgttaagagcggctaagccgaaatcaatgctcgcgtttttgagcgtggctaattcatttaattctaagctgaatatagatacttcagaatgtactgattttggctctatgttcgctggttgttctaaatttaatcaaccaatttcaaatctaagttttaaaagcgctttaagtatcgataaccttttttacggagctaaagagtttaatcaaccgctcgacttcgggaatatgctccagttgactcaagctaattatgtgtttgctgaaagtaattttaataacacaattaaattcaatgcgcctaacttgcttagtgtatctggttggttttcaaataatacgaaattcaatagtaagatcacgggagccttcggtaatgtaaccaatatgtcttttatgttctggtatgcatcatctttcaatcaaccgattaatgattgggacattagaaaagttgaaacattcgtaggttttttaactagtgccacatcttttaatcaagatttatcgtcttggccttcaaaattcaatgttaatgcagtaattgagggtgtatcagttgcaccgaattggtcgactgaaaactatgacaagtatttaaatgccctgtggttagatgttggaacaactcgtaaaaacgaatggcagaatagtcttgggccgcgtactgttcttgcttctgttaaacgttcagcagcgagtcaagatgctgtaagtggtctaactggtgcaggttggacaattattgatggaggtttagcgtga

SEQ ID NO: 55258 - DNA, 366 bp, Acinetobacter baumannii
atgccttacgacatggacacggtgattggtcttgaatggacaggtgaagttgtatatgacgatacaacaggctctcaaacaatggataattcaccaaactcattctggcgcaaagtcaaaaaaacttataactcagaaatcgaagctcgttacaaacagcttagagatttaaagatcatctctgtagataacatctacaacttatcgactgatcttttgttgaaatatccgatcagtctttatgatctcgagttaaatcgttggcccgcacgtccttctcttaacatcacgagcttagaacaaattctgacgtggacaaaaaaacgtattcagtttttagacacattttttaactatacagcttaa

SEQ ID NO: 55259 - DNA, 387 bp, Acinetobacter baumannii
atgagaactataccattccaatttaaaagtgacaaggttccagaccttctagacctaatcacacaaacacctgatgctttatttgataaagtggcttgtaaaaaagttgctgcaacaaatgaagaagaggactttctagaaaaagtgagtaaagctgctgaaaacgcaaatacgccagtattaatgggtattagtgcaattggggagttacttgctcatgtaacagacgaagtccgtattgaagccattaatgatattggttggctaatccattcgctaggtgtgcaagctaatgcagtctgcaaacttaaagaagatgcagaggttctacttgctgaaagtagaaaaataaaaattgcttcagcaaatggagggctattgtcatga

SEQ ID NO: 55260 - DNA, 192 bp, Acinetobacter baumannii
atgtatacatgttcgtatgatgacgaattagcagatattgtcaaggccgcagcgaaaagagaaaacagaacttaccgcggtcaattcaatcactatttaaagttaattcttcaacaagaagggcttctggaaaatccaggcaataaaaaagcagattgcactcgccaaagtaatcaatctgcttctgtttaa

SEQ ID NO: 55261 - DNA, 483 bp, Acinetobacter baumannii
atgaaagattcttttggtgcgcgtcttaaattttttagatcaaaggcaggtctttctcagcaacaactagcagataagactggtctaagtagaaaaataatttcagattatgaagttaaacttgacgtaattcctagagatacaaacctttataaaattgccgatgcattaaatatagattcttctaatctaattccgaaaacgaaggaagatgctaaagaacagccagatggaagttatttgcttacttataatataaatgagtttcctagacaggttattgaaacactttcagcttctgcggaaaaaaataataggtcaatacaagatgaattccaaattttaatgatagaagccttagaaagacttctcgattctcctgaagatgaaataaaaactaaatttgaatccgttaaagaaagtaaaattcatcaagatgaaaatgcatttgaaaatttccttgcaaacaatagtaatacttaa

SEQ ID NO: 55262 - DNA, 234 bp, Acinetobacter baumannii
gtgaaagtattattattgatccctattattcttttagtatcttgctctagttcagatccaaattctaaacctgtttatggtaaagactatggattaccagctaattgtagagcatatattcagttagctataaatgattggcgaaatggtaaatatgatactgaaaccacaatggatgcaattgagcgaaattgtggagaaaagggaagtctttgggactacaaaccaaaataa

SEQ ID NO: 55263 - DNA, 381 bp, Acinetobacter baumannii
atgaaatatttttttatttttataataggtattttatcaaccagtacctatgctgattcatactacattttaaacaacaaaaatcagccatatgattattctattaatgctaaagatccaattaaatcatcttctgaaggttttaatagtggatttagtatggcgaatgcacataaaaaaagtagacaagaaatagaagagcggcaggctaaaattaagagacaggatgagtatagaaatgaccttaaaaaagcatacgaagattataaatcacatgatgatgatagttttcaaaagttaattattgcttatccagaatatgccgataccactttaaaagttcaagaatcaataacaaatttaaaaggtaaaaataagtga

SEQ ID NO: 55264 - DNA, 330 bp, Acinetobacter baumannii
atgaaatatatacctttaattttacttgttgccattatggctgggtgtgaccaatcttcagatgttggaacaaagattgattacaaagttcagtttgaaaaatcggatgctgccataagtaaatacttagataaactggattcaactaatacaccaccaaaggtgaaagaaaagatcctttgtgagagctatccaaatgagtacaagcaaaattacatgccagctttactagctacctctaaagactatacggaagataagcttttaattgatctaaaagcagcgactgattactacaaagaaaagttaggtataaagtgttttagctaa

SEQ ID NO: 55265 - DNA, 207 bp, Acinetobacter baumannii
atgtataaagcttgttatgtctgtgatgataaagtgatattcactaaagatttttcagaaattccttgtgttggagatgaggttcgattaatcgatgctaatggtgacaaaacgttttatagagtaattgaacgtgtattttgtctggatactttagcaagcacaagcagcaccttggttaatataagaatagcaatagtgaattaa

SEQ ID NO: 55266 - DNA, 690 bp, Acinetobacter baumannii
atggcaaataatttaaaagaaaaaattagaaatgttgttttctggatttgtgctggtggtgcagtatacctaattgtagcctttttgatgaaaacagattggcttagcagtcctaagaagttaagtgaactttatgaaatcattagagatacacttactttaatggcgtattttttagctccagcagcagcctttgcattgtttacagattggcgtgaagagcatcaactaaaaactactttatctttattaaatgagattaaagatattgcaggcagaattgaggatggccttctcagatttgatcaaaatgtcagagctattagcgctattccatttgataaagttttggagtatggggaaaattacgaaatatcatatcttttaattgcacttagccgactgtatatggagattgacgaaaaagatgagagtctaaagaattttaagttgatagttaaagactttagagaattcgcctcgaaatcagtaattgaatttaaggctgctgcttcggcaatgcaactttacagattagaagaaaaatcaaaaaatgaaagagtaaatgcacaacatctgaagtgccaattcgaagaaaagttgatgcttggtgaggaatatcgagcggacgcaattagcgaatacaataaaatgatcattgaatttaataaaatcaaatctttactttaa

SEQ ID NO: 55267 - DNA, 387 bp, Acinetobacter baumannii
atgagcttacgtgccgaacttcaggcagatatttctgaagcattaaacaccgatttggaagacgctgtagattcttttacttgtacccgcaagattttaactggatctaatcccgctactggtgaagatgcttacaccgaatatgtatatagcggtagaggcgtcctatttggttcgtatttaaaagatttagttaatcctattgattaccgagtcacagactctaaagccgttctactgcaaaatgaggtaaaagatgcagcaggtactttagttaagccagatgttaatgatatttgggtgattgagagtggtaattatcgagttgtgagttacagtaaagatccagctggcacaacttggattgctcaactgaggagagtataa

SEQ ID NO: 55268 - DNA, 378 bp, Acinetobacter baumannii
atgacttttatcaccattgcagatgcagaaacaatcttaggagctgactttgcaccggatggtgataaggctcgtttggttttattggcaaatacttggatgaaaaatgagattgggtttgtacctgatccaattattgaaaaccttaagcttgctgcatgtgaaattattaaaggcattcaggcaggtgagatttacagcggcaaggaacaagagcttaaacgcaaaaaagtgaaagccgacacagtagagtctgaaaaagaatatcaagatggaagcttttcattatcaagttttgagcaaattgccttggcactcattgaggttgagaacttgccaaaacacaagtttttcacaattccgttagtgagaaattga

SEQ ID NO: 55269 - DNA, 429 bp, Acinetobacter baumannii
atgtcaaaagaacagaaagtaatttacgaaccacatcctgttagtgaagaacgtaagcaagaactgaaaggtaaaggctataagattttagatgcagcttttatgcctgataactttgaaaatgatgagtttgatgaaacagatgcattagaagctattggtgagttgaaccgagaattggttgtagaaaacagtcagttaaaagaagcactcttaagatctgaaaaagttgcagccgaaattgaatcccaaaaaacgcaactatcagatgtgactcaagaacgtgatgcattggcaattaaggcggctgagctagaaaaaactgttgaaagcttaaataaaactatcgcagatctggaaagcaaaaataagcagaagcctgctcaagagccaaagaatgccaaacctgaagatcagccaaaggaataa

SEQ ID NO: 55270 - DNA, 969 bp, Acinetobacter baumannii
atgtctttaactcaaatgcaggttttcaatgaatacatcatgcctgcgacaattgaaactctcgctcaaatggtgcaaaagtttaattctgcttctggtggggcaattcgcttgaccactgacggatttacgggagacttcttacaagagtctttttttgcctcacttgatggtgctcaacgtcgtgtagaccgatatgctgctaatggcacagcacctatcacagatttatctgagattaaacactctagtgtaaaagttgcaggtggtattggtccagtacgctacgaaccgtctcagatgacttggttgcagcgtccaactgcacaaggtattgaagttgcatctcgtacctttgcaagtttaatgcttaaagaccaactcaacacagcaattgctgcacttgtggcggctatctctaaccaagcagatgcaactaatgacgtctctgcaactggtggccttacttacagcgcaatgaatggtgcacatgctaagtttggtgaccattcaggaaatatcatcactgatgttatgaatggtgctgcttatcataagctggttgataaaaacctagataacgcagctaagcttttccaagcgggtaatgttcgagttatcgatattcttggtaagttggttgttgttacagatgcaccagcactttatgcagcaggaatgccaaacaaactcaaagtgctttctttgacagatgcagcggctatcgtgtcagacggtggtgatgttgtttcaaacattgaaacaactaacggtaaagatcgtattgaaacgactttacaggttgattactcatttggagttggtcttaaaggttacacatgggatgaagtcaatggcggtaaatctccaagtgatgctgaattagcaactggtaccaactgggataaatcagcaactagcattaaacatactgctggtgtaatcaccattgcagatgcagagcagtaa

SEQ ID NO: 55271 - DNA, 765 bp, Acinetobacter baumannii
atgaaacttaaaacgacagaagtaaacggtaagaaatatgcggaactagatgcaggcggattgcccatttatgttcatgatgatggtaaagaagtcgggtttgatgctgctcaagcagtaggaaagatcagctctttaaatgcggaagcaaaaacacatcgtgaagcaaaagaggctgccgagaaatctttaaaagtctttgaagggctagatcctgagaaagcaaaaattgcattagaaactatggctaatcttgatgctaaaaagcttgtggatgcaggtgagatcgagaaggttaaagcagagcttactgatgcattgaaaaaatcatatgagccacagattctgcaacttacccaagagcgcgattcagttcaggctcaactacataaagagctgatcggtggtggttttgctcgttcgaagttcattcaagaaaaaattgcagtacctgctgacatgattcaagcgacttttgggaacaacttcaaaattgaagatgggaaggttgtggcttatggcattgatggccaaaagatctattcacgaacaaagcatggtgaagttgccgactttgatgaggctttagagacactagttggaggataccaacataaagactcaattcttaagggcaatcaaagcactggtggtggatatggtggtcaaggtggcgggggtaataacaacaatgtcggcaatatgggcggatcaatccaagaacgccaagccgctattgcagccaaatataatttagataagtaa

SEQ ID NO: 55272 - DNA, 1224 bp, Acinetobacter baumannii
atgtttgaaaacttacaagaaaaagatgtgaaaatcgaaaaagataaatataaaaaagtgataatacaagcttttgttgacctttacactgaagataaatttacaaacaagcctgaggagataaaaaataatattaagcttttgaaaagagaaactgatatgcgtctatcaataattaaaagtaactttacacatcactttgctgcaagaactgttaatttagaatcggaagaggctattcgtttaggtccagtgtctattttgacaagaaatcagtggattgatactgtcgattatagtgaaaaggtaaaaaataattttcttaatgaaaaacaagaaaatcatagatggaaagaaaatttacgtgcagccttaagagaacgaaaatcaaacctcaaaggtctcgctattgaaatttatcctgtgattgagaagtgtaatgcggtgattagtgttgatgtgaaggggatggagagcaatctatcgcaaaaatttgcacatattctagctaaaacttcattagatatgatttctttagttattggtaatgatcgagtttttttccaacaagtcttaaatgaggaacgtcttgggccaacaatgagtttctcactcaatagctgtgacggatatctcaatttaaagggccaatctctgggtaagcaatgtggatcaattattggatctgcaatgcacaaaaaggaaattttggaacaacttaacttttataaaccatattttgagtatatttttgagaatttaagctcaagtaatgatgtcgtaaaatatccaactttagcaatgaagtgggtttatgctttaaattggtatgcagaagggatgagagagtctaacgatgctattgcggtagcaaaattggcaagttgtttagatacattgagctcgagcggtaaattacctggaattaaagaagtattgtgtaccatgttggaatgtaaagaggaggatatcctttttaataagaatggagttaatcctgtttcagtgcatacttttgtgaaaagtttttatgacgatggtcgttcaagaatcttgcacggtactttagatagtatgttggaatcttttattaccgaacgtaaaaggttagctactgttgcccgggatatacttctcatatgttccgaaagactttataaatataagggcttagatgatgacaaagcttttagaacaatgacaatagataccgatattaattaa

SEQ ID NO: 55273 - DNA, 333 bp, Acinetobacter baumannii
atgcttacttatgagtattctgaatttaaactattggttttgcatgaattggataattttaatgtggctgagcaaaatatagactttaatattatagtagataatattaaatatgctggaacagcagtaacgcttaaaaatattgaatatttaatggaaaaatttagagcaagtggtgattgtcaatttggccgttatttttggcaatctaacatgctaattttagatgaaatgacgattgattgtttgcgtgctgcattattagatattgttaaagataagacactaggtactcttgataatatgttttataaaatcaattgtgatagttga

SEQ ID NO: 55274 - DNA, 378 bp, Acinetobacter baumannii
atggatgctaagacattagttaatagctatttgaattctgcagttactatcttaagtgagtgtgatataacattcaaggatttcgattatgatgctattgatattactaaaagaagattaaatggttgtatagttagtaaagatagagaagatgctttagattggtattggaattatattgatgaacgaaaagctcctatggaattctataataaagatatcttaagagtaagattgggtatttgtttgctagctaaagatatagaccaagttgaagattttaatgagcatgtttcttggtttgtaaccttaatgaaaaattatggagttagtgatgataaacttcaaattttaaccaatttatatttaaaaaaatga

SEQ ID NO: 55275 - DNA, 369 bp, Acinetobacter baumannii
atgggtagtttattaaatcgaaaactacttgcctcaaatattgaaccagaaatattggtaagacatgcttatcacatcgcaatgttatcaagcgtgattgcttggatattacaaacaaccgtatggatctttattccgatggctgggatcgttctaacctatggtattgccatcccaaacatacttagtcgggcactctgtcattatcgagaacaagcaggtaaagctggttcattgttcggtctaacatattatttacttttgggatgtatgcttggactggctgggctagtacaacaattgggccttgttcttacagtctgtgcatcgttagcgttacttctgcagccaaagctagagtcgagttaa

SEQ ID NO: 55276 - DNA, 207 bp, Acinetobacter baumannii
atgatgtattgtatggctcctgtattgctaatacagttactaaaaccaatactagatttaacttcaaatagtgaatactttttatatcactatggttttgatacgcttgtatacagccatctgcttcaaaataaattaaaaagatatgtagttaacgtaaaaaacaacattgcccatgagacatttcttaatgatttcggcccataa

SEQ ID NO: 55277 - DNA, 573 bp, Acinetobacter baumannii
atgactatacccaataaccaaattagggcttactatactgatgaaactatccgtatatatcaagcatactcggatataatcgctgactctgctttagaacatggtactttcgtttcaccaccgttcaaaattgatagaatgacttggataaaaccttcttttttatggatgatgtatcgctcaggttgggctcaaaaagatgctaatcaaaaaagaatattagctattgatattaagagagaaggtttcgaatgggctttgatgaatggctgtttaagtcataaacctgaacatttaaataatgaagaatggaaaattcacaagagtaaatatcctgttagaattcaatgggatcctgaaagaaatatattttcacaaccattatcctacagagccattcaaataggattaagtgaagaagctgttttaaaatatataaatgaatggattattaccattaacgatattactaatgatgtactcactattaaacatttaatagataagggcgatgtagaaaacgcaaaaagcatgcttcctatcgaaaaaatttatccttattattttaattaa

SEQ ID NO: 55278 - DNA, 276 bp, Acinetobacter baumannii
atgccttcaacgatgactaaagcattcgtaaattgttatattaatgcttcttcttatgaagaagctgtaaataaaattttgaatcagtttacgaatgatggaatatatttggatgaaattgaatctcctatctatgaaatgcctgttagtagttggcaattgcatattcaagagaaatataaatctctatcaaatgagatgttaagtcaatcagattttgaaaatgaaattaaaaatggtaaagttgtatacggtatttttagtggttttaattga

SEQ ID NO: 55279 - DNA, 291 bp, Acinetobacter baumannii
atgaaaaataatatatttaaaattgtagttttggcggtactttccacttccccactattttgttatgcgaataacacaataatgattaaaggaaatattgttgaagatacttgttctacagtaaatattgaaaaagaatgcgctcaaatcaattctttgaatacaactattgatactcaatatttaaacaaagataatgtgttcaacttagcgcgacatactgaaaaaatggatacgagtattgaaactataagtgctaataaaaaagtagtgcttgttaactatcattga

SEQ ID NO: 55280 - DNA, 300 bp, Acinetobacter baumannii
ttggttaatgtggttgttacagttactgctggtgcaaccgcatctactgtaccagttgatggtgctgacgggttacccgctgggtcagttgcaacaactgtaactttgtctccatctttaagatcacctgggtttggtactgtccatttaccatccgggcctgcaactacagtcgctgttgtaccatctgggaaagtgaccttaactgttgaaccagcttctgctgtacctgttacaggattagtcgcattgattggatcaattactggtgcatttggcgctgtggtatctactgtataa

SEQ ID NO: 55281 - DNA, 852 bp, Acinetobacter baumannii
atgatagattgggaaaatttacattacttttcagttttttctgaagaaaaatcactttcagctgcggcaagaaagttaagggttgaccatgccactgttgcaagaagaattgctcagttagaacagagcttaaaattaaaattagttgatcgtagaccccgcacttacgttttaacatctgaaggcgagcagcttgcccaagtagtggcacgtatgatggaagatacgttttctattgagaggcttgctctggctggacagcaggaggttacggggactgtttctattagtatgcctccgttaaccgccgctcatctaatcatgcctcatctcggaaagttttatcgtcattatccacaattaaaactacgagtacttggagatgttcattatgtatctttgcagcatagagaggctgatattgctgtaaggtttgggcgacctaaagatgaatatttagttgctcgtaaagtcggagaaatcccttttggaatatatgctaccccaagttatttggcttcaacgaatcaagaaaattatgagtggattagtgtggaggtcggtggtgtacatggacagaaacaacaaaaattaaaagaaaaattgaataataaagacccgctcatggttactaatcaccctgagttgcaatggagagctgcatgtggaggagtaggtttagccgtactacctgactttttaggtcaacaaggcaatttgataaaattaccagataatgacccgatgagcgctgaaatttggttggtcatccatgaagatctaaggagtagtcctgtggtaagagtagtgatggattttcttttaaattgttttgaaccatttagagtttaa

SEQ ID NO: 55282 - DNA, 348 bp, Acinetobacter baumannii
atgacagatttgaataaggaaagagaggcttttgaagcagatcaaaacactactttgctatttgaacgtatcgaatatatagcagctatgaatgcttatatgcctaaatttgaatatgcaaataacttaattgtaatgcaagccgcagaaagatttaattttggttggtctatgtggcaaaaagccaaagctcaggcggtgccagagggttatgtactaatgccaaaggtgccaactgaaaagatgttccaagcttatgagcgttattcagtcgcgccgatgtcaacactgagcaagactggatatagggcaatggttgaagcaagcgaatcgggagctgagggatga

SEQ ID NO: 55283 - DNA, 354 bp, Acinetobacter baumannii
atgagtgaattatatagcagtcatgcggtcaaagatgttctgaatgaaagagaacgccaaattattaaagaaggttatttacctgagtttgacaatctttatgaagaaaatgaattgccacgagccgcatcttgttacgttgaccatgcagtaagtagaggctgggtttataacagcaaagacttcggtcccgaagtttatatggatgagggtgccgccggatggtggccttttgcagatactttctggaagccaaaaagcccaaggcaagatctagttcgtgcagcagctttattaattgcagaaattgaacgactcgatagaaaagttaaagtggaaagtaaggaggggtga

SEQ ID NO: 55284 - DNA, 291 bp, Acinetobacter baumannii
atgggaataatgcaattttcaatcactttggagggtgacacccctcctcagattttactgggtcaaaatcttggtggcgctatagtcaccaagcttgagcaagttaaacaagagttagtaagtgctgctgacttggcgaaagtatataacttgagtgttactaccatccgagaaaagcttgtctcaattaatcaaggcacgggagggaaacacatgtatgatcctgagcgagcacgacaaatactaactaaaaaagatgcaaacaaacgtggtagaaagagagctaactag

SEQ ID NO: 55285 - DNA, 1020 bp, Acinetobacter baumannii
atgaagctacctaaacctattaaacgtggtgaaacttatcgtatcaccgtgacttacaacaaacaaagatattcttgtacaagggatactgcaaaagaatgtgagcaatgggcagctttaaaattacttgagctaaaaactggaaaggcacagattgagaaaggtattaaaccgcacttctcgtttaaaaatctttgtgagaaatattatttagaaaaggggttgaaacttaaatcaaaagaaattattagaataaagttgaataatttggaaactttgtttggcgatttagcatcaaaatctattcatgatttcgagcctaacgatattgtgagatggagaaacaagcgtttacttgaagttcaaacaagcacggtacttcatgagttttcgcttttttctgccatatttacttatgcccaaaaagaactttttttgattcaaaccaatgtttggcattctgtagttaagcctgaaaagggtaagtcgcgaaatcagagaatttcacatagcgaacaagaagcaataataaatcatataggttgggataaaatttccaccccaaaactagtgaaagaatacgtttgttggtcaatgctctttgcgttagaaactgcaatgagacaaggtgagattctggcaatgcgcagggttgatataaaagaagggtttatacatttgccagttaccaagaatggtgactctagaaatgttcctttatctagtgaagcaaaacgactcttatcattgttgccaagtgatagtgaccacttagtaccaataaaagcggagacatttaaaagggtatggatcagtacaagaaatgctgctggtcttggacatattaactttcatgatacacgacatgaagcaatcacacgaatggtgagagaaaggaaactgccagtagaagtattagcaaaaataacagggcataagactattggtattttaattaacacttactacaaccctaatgctcaggaccttgtagaaatgtttaatatcagtgagagctag

SEQ ID NO: 55286 - DNA, 498 bp, Acinetobacter baumannii
atgagcgatattgtaccgtccattattgagataaaaccttatctcaaccaatctatggttttatctgatgtcgtgtcaattaaacttgttatcccctcaactcatatgctagtgccctatgctttagagaagatcaatgcaggctttccatcacctgctcaagattatatcgacaaagctctcgatatgaatgagcacttaattaagaatgaaactgccacgtttattgtaaaagttgcttcgctttctatgcttaatgctggcattgatgttgatgatgaattgattgtcgatcgtagcttagatgcaaaacacggtgatattgttgttgcgctaatcgataatgaatttaccgttaaacgtttaatgatcgatgaaaagggagaatggctaaaagctgaaaatccagattataaaaatatttatctacaagaaggccaagagttgtttatctggggcgttgtcacttgcgtcattaaaatgataagaaaatcatga

SEQ ID NO: 55287 - DNA, 360 bp, Acinetobacter baumannii
atgccaaaatatttactattagcagaaaaaatttcaaaaaatataaaaaaagaacataccaataatcatctaaaaaacctacataatttaattatggaaatcaaaaaagcaattaatggtacagaattaaagtttttatataatttttttgatttcggaggcacatttcttaatcttcaggatgagttacctttcaagttagatattagcttgattcccatctataaaagtgaagaagactttattttttggttagcagatttcattgatcgaatcactatcgacacaagtaaaggagattattcaataaaaaagaagttagccatcctacactctattgttgagaaaattgatctatag

SEQ ID NO: 55288 - DNA, 426 bp, Acinetobacter baumannii
atgagtaacattggttcttgtttatgtaatcaagtaaaattctctctaactcgtgaaataaaaacggtttatcactgtcattgcagtttatgccgaaaacaaacgggtacaggagcgaatgcggctactttggtgaaagaaagccaatttaactggttggctggaagtaaatatgtcgctacctataaaaaggagactggttttacctcgtccttttgtaataaatgtggttcacccgtacccaataaaattaatggtacaaattatatatggataccattagggcttttggaacactcatttaatccagacttaaagcttaatttttgtatagagtcaaaacatgaatgggtcgtgctagaagatgctcataaaagttttgtccatttacctgtgcttgaagagttcttaaaatactttgaataa

SEQ ID NO: 55289 - DNA, 225 bp, Acinetobacter baumannii
atgaagaaatttttatttgtccttattgctggatttgggctagaaggttgcacatcattgacgcaaaaagctgatgaaaattatattaccaagtctcccattacgccggttaatactgcatttaatgggacaaaagtacttgagcatggaatttttactgagcaggatattgctgatatgcctgagcattcaaatatcaattcacgttacaaaatatcattttaa

SEQ ID NO: 55290 - DNA, 864 bp, Acinetobacter baumannii
atgagtgaaataaaaaaccctttagtatctattgttattccatgttataaccatgtggattatgtgcaagactgtattcaaagtataattgatcagacttatcaaaatattgaacttattattattgatgatggttcaaaagatgaatctgttttaaagataaatgaaatgttaaaaaaatgcgagaaccgattttctcgttttgaattcagacatcggccaaataaaggactaagcgccacattaaatgaggcattggagtggtgtcagggagagtattttgcgacattagcttcagatgataaaatttttaactataaaataatgaagcaggtcaattatttagaagataataaagactttattgcaatgtttggcgctgttgagttgattgatgaaaataataagagggttggtgaaattagacaacccgataaaatatttacctttaatgatttaatatatactgatcgatttttgcctgccccaactcaaatgattcgtttagatgctctaaaaagagtgggtgggtttatagatggcatgatcattgaagattggtatatatacttaaaacttttagaaactggtaataagattctatataaagatgaattatattcatattatagaacacatcaaggtaataccttttctaatccctataaaatggcaatagggcgtttgcaagttttaaatgaatttaaacaacacgatttatttaaaaaagcatatataaaggtttgttgggataatgcatttgaaacactaatattagactttaagctttcaataacggtattgttagctagactttttcataaatttaaaatgattgttaataaagtatttggaagtagatga

SEQ ID NO: 55291 - DNA, 207 bp, Acinetobacter baumannii
atgaaaaagatttgctttttaataggtgatataaatcattctggtggtacagaaagagtgactacattaattgccaataatcttattgaaaaatataaagtatatatattgtctttatcaggcggtgataatcctttttttgaacaaaataaagcaatcattaataatagaattttcccagaaaaagtctcaatgaagacaaaatag

SEQ ID NO: 55292 - DNA, 684 bp, Acinetobacter baumannii
atggctgcaaaatggtgtgacaaaattgttaccctaactaatagggataaagatttctggattaaaaatttcaagttagaaaaagaaaaaaaagttattgcaattgccaatcctagtccttatcaactgcaagataatcagcccagtttagacagtaaaactattttatgtgtagggcgtttaacatatcaaaaaggatttgatctacttattcctgcttgggctgaagttaaaaaagctttagatggttggaaaattgtaattgttggaattggagaagatgaagataatcttaaacaaatgacaaaatattacaatgttgaagattctattgaatttgctggtcaacaaaaaaatatgagtgagttttataataaagcttcttttttttgtatgagttcaagatttgaaggacttcctatggtgttattagaagcaagaagttataagttgcctatagtttcttttgactgcgatactggtccagcagaagtgatagaagatggaaaggatggttttttggtaaatgttgataatttacaggagtttagtcaaaaaattttaaaaatggctaaaatggatgaaaatacttttttgcattttgtagaaaattcggaaaatgcttctattcgttttgaaattcaaaatattattagactatggattgagttaataagccaatga

SEQ ID NO: 55293 - DNA, 435 bp, Acinetobacter baumannii
ttggttaatgctgttgttactgcaactgttggggcaactgcatctactacacctgtgccaggtaatgacgggttacccgctgggtcagttgcaagaactgtaactttgtctccatctttaagatcacctgggtttggtactgtccacttaccatccgggcctgcaactacagtcgctgttgtaccatctgggaaagtgaccttaactgttgaaccagcttctgctgtacctgttacaggattagttgcattgattggatcaattactggtgcatttggcgcagtggtatcaacagtcaccacagcattagttgtacctacattacctgccgggtcagttgctgtcacagtcacggtatgcggaccgtcagtcaacactggaagtgtattgtctgcaagggtccaggtgccatcaccattattagttgccgggtag

SEQ ID NO: 55294 - DNA, 1134 bp, Acinetobacter baumannii
ttggttaataacgtagttaaagaatatttagatcaacaataccaatatgatgcttatggacaactcgtaagacagaaaacgagccaaggtgatttaaaccttgaatgggatgtctatggccgtatggtgaagagccgtaatagtcaatatacggcagaatatcgctatgatgcattaggccgccgtattcaaaagcggagtaaacatcaccatacaggtcaagagcagaacatcatttatggatgggatggcgatacgcttgcttatgagtccacagagcaattgaccaagcattacatctatgaaaaagatagttttgtaccgatgctacaagctgtttatttaagtccaatagaattgcaccaaactccagattggtcagatagagcttataacatacaccgagacccgctttggaaaactgaaaaacagggtaaagaatttgatgatgtatggttctatcactgcgaccacttaggtacgccgcaggaaatgaccgaccatacaggtgcaattatttggaaagccgaatataaagcatggggtgagtgtaaagctgaaaaagctaagtcaaacttcttcgaaaatagtgaaattatttcaaataatatccgttttcaaggacagtattttgatgaagagacagggttgcattacaatcgctatcgttattattccccatatgtaggcaggtttgtaagtaaagacccaattggattgttgggtggatttaatgtttatgaatatgcaccgaatcctaataattgggttgatccattagggttatccccaaaaaaagattgtaatgtccctaaaagagaaccagaaatagttgaaaattttagatcatttgaagctgcacgaactcgtgcattacagttaattggccctttagtcccgggtacgcgacaggaacagattggtagtctaggtcaaggaaaagggaaaaaggttggattttatgggattagtgctgcaaaaaaagaatacgttcgatatagattggattatgatccacttaaaggccctcatattaatgtagatgtaggtaaaggtatttgtggaaagcgctatgctataaaattcccaggtaatgaaaaaacatttgtaacacttttaaaaaggaatacttaa

SEQ ID NO: 55295 - DNA, 270 bp, Acinetobacter baumannii
atgagtaacaactttgaagtggaaattaagattttacaggatggtgatgaaataattgggttatgggaaaatagaattctaattaaacataaagatggaagtgctgaattttttattattcagattgatgcaaatggatatcctcgcttagataataagacatggaaaataactaaaggtgatggtgaaatacatatcactaaaaaaacttcaaatgatgaaagtagtgaaaataaattatctaaaaatccaacagtaataacattttaa

SEQ ID NO: 55296 - DNA, 282 bp, Acinetobacter baumannii
atggcctgttctcaatgtggaaaccatgggcataatacacgatcatgccccaataattctcaaaaaaaacaaacctcaactgtgattaatggcagagatagaatgattatcgccatagataatactaatgaggaaagcttacaagcgattgcaacagccgtgatgaaagcgaaaagacaaatagatccaaatgctcgtggaacaattgttataggagatgagaggtcattacctcataaagttttatctttattgaagcaggatagttcttcagatgagtaa

SEQ ID NO: 55297 - DNA, 231 bp, Acinetobacter baumannii
atgagtaaaagtagaccatcagatcatattaaagctcaaaaagaagttaaacaaagagagggatatatatgtctacgttgtggagaggtttatgccaatgctcatggacatcacttgttatatttcagtgaagggggccctgcaaacttctacacgatgactacaatgtgtccgccttgccatagtaagtatcatactaagaaagctaatattgatattattaggttttag

SEQ ID NO: 55298 - DNA, 870 bp, Acinetobacter baumannii
atgctacaagctgtttatttaagtccaatagaattgcaccaaactccagattggtcagatagagcttataacatacaccgagacccgctttggaaaactgaaaaacagggtaaagagtttgatgatgtatggttctatcactgcgaccacttaggtacgccgcaagaaatgaccgaccatacaggtgcaattatttggaaagccgaatataaagcttggggtgagtgtaaaacggagagagccaagtcgaatttcttcgaaaacagtgaaattatttcaaataatatccgttttcaaggccagtattttgatgaagagacaggattacattacaatcgctatcgttattattccccatatgtaggtaggtttgtaagtaaagatccgattggattattgggtggtaataatgtttatgcatatgcaccgaatcccatagaatgggctgatgcattagggttatcatcttgtaaattaaataaaaaaattaatattgatgctattgtaaaaaaatatggtggaaaacatttaacatctgattattatgaaatgccttcacacaaagcagctaaacaagctgcggctgaaattgctggaaatttatcaagtacaccacaaaccacccgcagaaaagattatagaggggggccgagaacatggggaaatagtaatggtgtgattggtaaaactagtggaggacttaatccatattctggttggcgtgatgattctcctggccattcatttaatgataaaaatggtaaaactgagataccatcacatttaaatgcgtggaataaattaggtggtgtagaaaatgtacatttattgtacaaaaaaggtttgatcgtagatgggaaaagctattga

SEQ ID NO: 55299 - DNA, 786 bp, Acinetobacter baumannii
atgcaagtcagtaagtggattcggattttcttggccatcattggttcaattttatttttagacggcttatttctagctttcctaaataaaattcatgtaggcacaattgttcctttaatcttaggggcatttttctgcctctatgccttattttattatcatctggaacgttttttcttttatcactatcgcctgcattcagtttggcgtttcggatggttatgtttctggatctggttgtttagcttaggctatttttttagttttattaaagataataaagatacaggccaaaatattcccgcggtgaaagcaatcattgttttaggtagtggtgtcgaaaatggacagccttcagccattcttgcaaaacgcctcgatacagcagctccagttgccctttcacaacctcacgcaaaagttgttttaacaggtggtttagacttttcagagaaagaatccgaagcattagttatgtctcgttaccttgaacagcactttcacattgccaaagaaagaatgattcttgaggacaaaagtacaagtacagaacttaaccttaaaaacagtaaaccattacttgagcaagctcatattagtattgatcaacctattgcaattgttacaagtgactttcataccccaagagctgctgctattgcaaagaaacaaggctatacccatgtttatacagttgctgccgaaactcctttagtcagtcgctataacgcttggctgcgtgaatactttgcgtacgcgagtggctggattctaaacgagtattaa

SEQ ID NO: 55300 - DNA, 585 bp, Acinetobacter baumannii
atgcaagaagataaatctgagttaatagatttatcttatattgatttaaatagtctaaactttggaaaagtatggatgggacattatttggctcatgcaaacttatcctattcaaaattttttagaactcgctttcatcatgctatagcaattaatgctaattttacgggatcattttttgaaagagtacaatttataccattctttgctcctaattcaaattttgaaaactgttattttaaagattgtttagcttttgggaatggtggaaacccaagaaatagtgaggcttataataactttaactattgcaactttaaaaatactaagatgattggttgtaatttttcaaaatctagttttcaaaattctagttttgaaaatgcggacataatagattcaagatttgaaggagcaatatttttaaatgctaatttaaaaaatgctttctttaataactgttcgttttctagtttagaatataatggaatacatgactttataacgaatgtagatttctcttgttttgatggtgttaagtttattaattgtgattttaaggggatatcaaggggagaaaaatag

SEQ ID NO: 55301 - DNA, 300 bp, Acinetobacter baumannii
gtgggtattcacgatcaagatgaagcggaacgtatcgctgaaagtggacaacctattaaggatgttgcaaacgaagtgccagaaggttaccaagcatttgaagatgaacatttagctacgcttaaatcagaagctcaatacggtacagaacgtttgcaggcggcttatgtagcgattccaaagggaaatcttaaaaagcacctttgggaagttcactcaattagcttaaaagaaattgctcagtttgcagaccaagctttacagcgccaaggagaaacttatgaacattctccagcgtag

SEQ ID NO: 55302 - DNA, 396 bp, Acinetobacter baumannii
atgaaagtaaaattatattggtatgatagatggaaagatggggttttatatcctgaaggggtggacaagaatgcatcaactaattttaaaggtttaattttcagcttattaaatgatgatgaaggtcatggtttagcatatttaagtaattggatagatgaagggctaattgaggtagaaaaaattcataatggtacgttagatttttatgatatgtgggggcatgcatggggagctgaaatctccaaagaaaatgttcttatttattgggggtatgatgatactgaatgtgaagaaaacatgagttttgaaagtttctacacaattttaagagaatggagtcaatttctcaagacagaaccaaatgagacaaatatcgtagagtttgagtgttaa

SEQ ID NO: 55303 - DNA, 354 bp, Acinetobacter baumannii
gtgaaaaatataaatagtaaagctatttctagtttttctagtaatttttttgaatatattgatagaaaaggtggtgatgtaacagaatcaggtgtaattataaaattaccaaatatttgcgataaagtcgtatttattagttattttgtagatgagggggagaatattaattatgctttaaatgtatttaagaatggtgcagggaagtctgtcaattttggaactggttcagagttttggattgatgaaaaatataatataaaagtaaagtattatcatggaaaaaatattttttataaatactttaaagtaagtgagaagggtgagatattagagtcaaaaaaaccattctaa

SEQ ID NO: 55304 - DNA, 276 bp, Acinetobacter baumannii
gtgaactcattgagtaaagcagaagttcaaatttcttcttttagatttgaaaaagatcctaataaattgaaaaaagtaatcaatcaattagaaaaagatggttggatattaaagggacatggacaaggggtagacacatattgtttagggactaataatagtattaatattgttagccccactgcaattggtgtttatgactatcaaggcggaaaactaaatattacagattacaattttgatgcgatatcttatagctataataaatgggggtga

SEQ ID NO: 55305 - DNA, 375 bp, Acinetobacter baumannii
atgaaattacgattttttatcttgggtttacttatttgtactaacactacggcggcaccaaacacaagctttgaagatgaatattatagtcttttagaaaaattccatatagctcaagcacaaagagatgcttttatcaaaaagaatgcgaataaaaatttaaccagttcgcaaaggaaaaagctagattcaatagaatgtagctatatgcaatccgaattaaaatataacgaatttcttatttctagatttaaagaatataaaactttcatgaaaagatctggtctagtagtagctgctgataaagagttaattcaaatggatattgattctttaaaagaagaaataaatggtcctaatggaaagtgtaaataa

SEQ ID NO: 55306 - DNA, 195 bp, Acinetobacter baumannii
atgattccagcagcattcttaacagtcactacaacatttgcttccgttaaacctgtaaccactttaccggtcgcgtcaattgttacagttaagcttgatggtgctgtggtatccggtgcaacaattgtttttggtgctgtagcattaccagctaagtctgttgcagtagcagttaagctttcaccatttaagtaa

SEQ ID NO: 55307 - DNA, 153 bp, Acinetobacter baumannii
atgtatgatgaaactttatgtttagatgatcctattaattctgcctttaaatcgattcaggatgagaggaaattcaaactattaggaagtgaattattcgatcttttaagtgaagagttaagtggtcagtataaggttatctatgaactctaa

SEQ ID NO: 55308 - DNA, 819 bp, Acinetobacter baumannii
atgaagtctatagatgaaataaaagctcaagaggtatgtgtagctattctattagataaaaaagctactaatacacaagccaagatacttcctagtgaaaatataatcattgataggttacttgagcgtaaagttgagttacaacatgcttatagtgagttgtattcaaaactagggaaatatcatcaagccctcacaaattttttagatttgttagtagaaattacttcaatgcatagtccagaggaagtaataaagtctagagctgctcagaaaaaattgaatgagattaatcagcaaatttctattaaagctcatgaattagcagctctcctagaaactagatccgagttaataaatacttctggctttatgacagatacccattatcacattggtaatgtaattcgtgaagcatctcagaataatccgtattttagaacatctttgctagataaattaaagcaactccaaggtcggtttgatcttaaatattggcctcggttagatgatgtaatgaaagttatcgctgaagatgcaagaatggccgtacctattgctattgattctattactgaagtggcaacaagaggtgagagagcttccttagttgattattttagagctttatttgaagctattgaatgtaatcgtcagaaagaatatggtttcttacctaatgactttaagttaacagataatacaattgctactttagctaattgcgccttagctttagagccaaaagaaatgattgatggcctatatgtgaaaaattttagaagtcgtgaacgcaaacgcataggtagtgactcctaa

SEQ ID NO: 55309 - DNA, 219 bp, Acinetobacter baumannii
atgcaacaatatttagatttagacggtgattctggcatttttgcatatgaaattggtgatacatatataagggtaaagtttgataaaacctttaaaatttatcagtacagctattataaagcaggtcaacttcatgtcgaaaaaatgaaaatactggctaagagtggtaatggattaaactcttatatcatgagaaatgtaaaaaacttatacgattaa

SEQ ID NO: 55310 - DNA, 837 bp, Acinetobacter baumannii
atgtttttttcaaaaagaaaaggattggtcccaattaaaattgagatacaaaaagagagtatagataatgatttgagatatggattatggaatgcattacatttatttatatgggaaaaatatgatggtgatacttattatgtaacttttgaaaaagcaaatttattctggctgtttagaaaatactggcataatttttttaaactacctattgataatatgcctaataattttagaaatgtaatagaaagaattagaaaatatttttttgaatgtgagtggtatgaagtatatgattttatagaatttactgctcaaaattgccctaatagtcttaaaaaagattttattgaatttgttaatatagttcttgaaaaagaactttcagcatatagattcgttgatgaacaattaacagatataactgatgaacaggaaatcgagtcaattgaaacagcaattaattcttctaataaattttcaggtacaaatatacatttgaaagcggcattaagttttttaacagatagaaacaaacctgattatagaaattcagttaaagagtctattagtgcagtagaagctttatgtgtaactttatctggtgatccgaaagctacattaggagcatcgctaaatagtattgaaaaaagtcattctttacatcccgcttttaagaaagctctaacaagcttatatggctatacaagtgactctgatggaattagacatgcacttttggatgaatctaccattagttatagcgatgcaaaatacatgcttgtttcttgcagcgcatttataaattacgtcattggaaagataagtgaaaactaa

SEQ ID NO: 55311 - DNA, 348 bp, Acinetobacter baumannii
atgagtttaacgcaaagcatggaattatcggctgaagcaattgctgaaaagcaattaataaaaaaagtagcatggaaaatcatgccattaattatggtgtgttacttatttgctttttttgatcgtatcaacattagttttgccaagtttcagttacaagctgatttatctctaagcaatacagcttatggccttggtgccagtttgtttgtaattgggtatgtaatatttgaagtaccgagtaatttattgctacataaatttggtgcaagaaaatggattgcacgcatcatgatttcttggggtgttgcaacggccttaatggtatttgtgaccacagagtggtaa

SEQ ID NO: 55312 - DNA, 1695 bp, Acinetobacter baumannii
atgcaacaagaacggttaagctacgcctcgggaccaagtacacaacccttattgggtatgaccattggtgaacaatttgatcaggcctgtcagcaatatgctgaaaaggaagcgattgtcagttttcatcaaaacagacgattaacctataaagctttacaggatgaagtaaacgcttttgcttgtagcctattaaaattgggattaaaaaaaggagaccgattagcgatttggtcacctaactgtgtggaatggaccattacgcagtttgcagcttttaaagcagggattattttagtcaatctaaatacagcttataaaagtcatgagcttgaatatgtgttgaataaggtctcatgcaaaggattgattattgcttctcaatttaaaacgacggattatcaagaattactcaaaaaaattgcccctgagttaaccacctgtgcagataaagtgctcagttcagagcgactgccacatttaaaatttgttattaaaattgatgatcaacagcatacaggtatttatcgttttagtgatttactaactacaccaacttctgaacagctagaacaattaaaacaattagccagacagctccagtttgatgaaactattaatatccaatttacctcaggtacaacaggtaacccgaaagggaccatgttaacccatcataatattttaaataatggttattttgtcggtgaaggcattcgtttaaccccccaagataaagtctgtatttctgtgccattgttccattgttttggcatggtgatggggaatctggcgtgtatgacgcatggggcaaccatggtctatccatcggctgtatttaatcctttggaaactttaaaagcgattcatcaagaacgttgtacggcagcttacggcgtaccaaccatgtttattgcaaccttagagcatgaacagtttaatgattttgatctgtcgagtttaagaacaggcattatggcaggtagtccttgtccacgtgaaattatgcaacgtgttatagaccgaatgcatatgtctgaaatcaccatttgttatggcatgaccgaaacctcgccagtgagtgtacaaagctcggtaaacgattcgattgataaacgggtaagcacagttggacatgttcatccgcatgttgaaattaaaattgtcgatttagaaggacaaattgttccgcaagggactttgggggagctatgcgtccgtggttattcagtgatggctggttattggggtgaagaggaaaagacccgtgaagtgattgacacggctggctggatgcatacgggtgacattgccgagatggatcaagacggttttattaaaattaaaggccgtattaaagatgtcgtgatccgtggtggggaaaacctctttccaaaagagattgaagactttttatatactcatccagacgtaagcgatgtacaggtgattggcttgccagatgcgaaatatggtgaagaactttgtgcatgcattattctgcatgagcatcaccaagtcgatgaagacagcatccgccaattttgcaaagaacacatttcacacaacaaagtgccgcgttatgtccgattctttaatgagtttccaatgactgcttctggtaaagcccaaaagtttaaattgcaggaaattatgcgagctgaacttaatttaacgggaaatgtctttgactaa

SEQ ID NO: 55313 - DNA, 240 bp, Acinetobacter baumannii
atgagcactactaataatcaagcaaatcaacgcaataatcagcagcaacaacaacagcaaaatgacaaccgtaatcaacagcaacacggtaaccaacagcaacacggtaaccaacagcaaaacgatcaacagcaacaaaataaccagcaacaacagcaaaatgataaccgcggtcaacaacaaggatctaatcaaaaagattctggccaacaaaactcaaataacaaccaacaacgttaa

SEQ ID NO: 55314 - DNA, 702 bp, Acinetobacter baumannii
atgtttaataatcttttaggatctacagatacagctgccgtacttggatttatcgcctttcttattttaatccttatgggtaccaagaataaaaacacagggatcattcacagtatttttaatatctatcaatactttaacagtagaaaaatagaatatctaaagaatcagctagcctcgcctttgattggagaagaagataaaaaaatttatttaaatcagctaattgttgctatttatcaaaaagaacttaatcttaacgaaaataatttacaaaaactacgctgtattaagcgaaaaatagatagtgattttgcatcaaagctttataaaaactgtagcgaattacttgaacttgatgacgcacagtatcaatttaaacctattgaaccaattgatcctaaaagagccaaacaattagaaaaaattggagtatgtctcttcttcgcttctggtctattcgcatatattttcctactttatatgttatatatagttgatgtaccacttcataaccttaaagatattttagtgtgggctggtattaattatttcttaatgtttgccatcatttttataggtacaaaaatactaaagttttttatgaaacaatcaaatgctttaaaatttatagagttatctgagagaaatttggatttaccgctcacggaataccacttagcagaaagaaaacaaaaataa

SEQ ID NO: 55315 - DNA, 552 bp, Acinetobacter baumannii
ttggaaccatgtttagacgatcttttttacaaatattcagtcaccaagctgagtagtaaaaattatgcaagaaatttaacaagattaattactttcttagtatctaaagggcgttttctcgaagctagattttatttagatcaattagaaaaaacacatagtaaaaatataatttctattcgtctaggttataagttagcaatcactctttttgataataaaaaagtggttaagtacgacagattattattagaaagaaaaaactattttgagctagaatggtatagattacagtattactattccgtcaataatattcctgaaattataaaaagcactgagtttttattatcaaaaaaaaatttagaacaagagtatatacaaactattttggaggctgtttggaatatacgtgactataaactctcagtaatacttcatgaatatattattaaaaataggatgcgccttgctcctcaaatggagcaattaattagaaatattgttctagaaaaattaagagactctttggcgaaatataaaaatgtttaa

SEQ ID NO: 55316 - DNA, 831 bp, Acinetobacter baumannii
atgaaaaagaataaaattctattaatagttcttgtggttggtattattgttttaggtattgtaatttttataaaatctcaagcagttacagaaacaaaaagattgggtaacggtgaaaataccaaccataatgaaacgagttcatcttccgaaccatctattcaaaatacaaatcaaaatacagaattatcgaatacaaatcaaagttcgttagctaaaaatcaaaatgatgaatcatttatatttaattctgatttaaaagctttaagagaaaaatatcctgatggtgtcatatatactaaattatcagaagctaagctaagtaaagctcaaaaagacgatttagcaaaaaatttcgacaatttaaatcgttatggaagctttagtggtggaaagattactaatgaattttctaacttagataaaaaaagagctgcattaaaagaagaaaaacctttagattttaaaccaataaatacagatggtttagttccagatttaaaactatcaggaaagtggtattctggtgcaataaatgaaggaaaatacaactccctttatcggttatatgaaaaccaagatggtagtactaaatttgaaataaccgaaatgtatttgaatccaaataacagtgctattgtagaagttttccaagaaagtttaaatcataatgtaaacaatgttccaatgactattgaaacattgagaaatgaaaatgggcaagacatttataatgttcacttcaattataataatagatattattcgttatctacggaaaacatgaaccgtacacaagtagaaaatatcattaatcaaataactaaataa

SEQ ID NO: 55317 - DNA, 402 bp, Acinetobacter baumannii
atgaaagttaaaatttttcttggcttaataagctttatttctgcctcaccttatgctgctacagttccagcagaagcattcagccgtgccaattgtgaagcatatattccaagttttggatatggttggtataacgaatctatttcttatgatgctttaacaggtgtacataaaaatctatatgcaaaaacagatcaaaaagctactaatggcaaccaacgaacagataattcaagtaacccaagtgggtatcgtgttagagcagggtttgttgatcctaaaagtgataaaagattttggaatgtatccggtacacactatgaaaccctagataatgggcgagctgtttctcaatacacatctgcaaaagattgcaattttaaatttgggcagtttttataa

SEQ ID NO: 55318 - DNA, 186 bp, Acinetobacter baumannii
atgaagaagcgttatttagttataccgaattctagaatgagttcaggttcagaaataagaacaaaaagtcttttttttgcttggattctttataggattaaattcaaaaagcaagctttagtctgggatactactggttgggtagatcagtctgaatatagatgtgatttgacaacacaaacgtaa

SEQ ID NO: 55319 - DNA, 1041 bp, Acinetobacter baumannii
atggttcaaacaacaatgaagtcaatttggcatatgatattgctttttctggcaataatagcattagtaacatcttcaatttttattgtcattttaaatttttatatacagtcaactaatacttttatttggctaaactttataatcattgctatttcactgatttatatattgtcttttatctggaatactttttctgaattactgaaagaaaatgattttaaaataatttatgtcgggcttactttattgttatttatgtcggtattagcatcaggcacgtatcttcatttgtatactttacgtgatcaacagaattttaccaaattaaataatgaagacgctaaaagtaaagaatttggaattattcaaaaaattggccgtgacaatgatgtgtatataaaacttggaaatacaagaacaagttgggcactaacaagattagcacctatacccgactcttcaggtgcttcaatgtacttaatgaacggatactgttctttgaattattctgatgtttctagtcaatatatgaaaaaagaaatgataaagaatatatcaaataaaaggctcttaaatgagaacttagatattcctaagttgtcaataatgatgcatgagtttgcacactgtattgatattaagagagattatttaacatttaatatcaatgcagataattctaataagacaacaattttaggtacaaatgctattacaccaaaatttagatcacacgttaaagatttaatcacttatcaagagtttgggagtgcttctacattgtggaaagaggtttttgctgatctttatatggcaggttatctatatataaatcatcccggcattgcggaccaaattgtacaaaattggagtaaattaagggaaaaaaatgcagaagaagatgaaggtcattcaactagttgttggttaaatattgcacaaaaattaccaaaacctaagacgaacaaagaattaattacatggtctgacaatattaggtccaccagcaaatgtaaaagtgatttttataagtcttaa

SEQ ID NO: 55320 - DNA, 459 bp, Acinetobacter baumannii
gtgacttatgaaggtgataactataatgctatgtcacaaggtaaaaaagcatttgttgtattaaaaatgactttagattgcagtgatagtaagtgcccaattattattgatcaacctgaagatgatttagataaccgagcaatatataccgaacttgtaacttacttaaaagagaaaaaaactcaacgccaaattatcctcgttacacacaatgccaatgtagtagtcaatgctgatagtgagttagttatagtcgcaaatcaacatggctcccaaagcccaaacaatgaagaaaagaagttccaatataaatatggcagtattgagtgtttaacaaaatcaaacaatccaaatgcttccattcttgaaagaaagagaatcaaagagcatatttgtgaaatattagaaggtggacatcaagccttcaaattaagagaacggaaatatgatatgagttaa

SEQ ID NO: 55321 - DNA, 1269 bp, Acinetobacter baumannii
atgtgttgtatcatacctataaatctaactcgtgatacacgaaatatcttatttatgaaaagaagtgcaattaaaaagcgtcccttgtctgacaccacattgttgaacctagaaccagaaaataaagattatagggagcgtgatagtaattcgctttattttttagtgcaaaagacaggtaaaaagtcttggcaattacgttacaagaatgaaaatggcaattggacttggatgggattgggggcttatccagaagttagtggggctttggcaagacgtaaagcaaatgaacaattagaaaagatagcacgtggtgaaagtattgagacaaaatcgatattaaaatcgaagcagcaaaaagtagcgaatcaaaaatttagtattttgattaatgagtggttaaatacaaaaaaagctaattggggaactcctacttttgataaggcaaaaaaatctattgagcgacatattattccagtttttggtgatagggattttacaagtatttcgcctatagaatggtttaccttctttcaaggattgcaaagaaatttaaatattcatactcaagtcgaaaaattaacatcctactgtcgtaatacatatgattgggcaaaatttcaaggacgggttaactctaatcccttagaaggtataactaagcatcttgataaaagtgttaatgggaatatgaagtttattgagttagatgaacttcctactttagtaagatcagttcgtaattatcccaaaagaaatttagccataggactagagcttttcattttattgtttcctagaccagttgagcttcgttttgctacttgggatcaatttgatcttgagaaagcaatatggttgaaacctgctgagattatgaaaaaagggatagctcatgctgtacccttacctaaacaagctatcgttctactaaaagagttacaactctataagacagaatctaatttattattcccaagtcgtgggagtttaacaaaaccaatttctgataatacttttaatatggcactaaatagaatggggtataaaggtagacaaaaccctcatggttttagacatattgctagtacagccttaaacaatagatttagtgataaagcacaagttattgaggcatgtttagctcatataaaaaaaggggtaaaaggtgtttatgataaagctgcacacttcgaggaaagaagagtagtgatgcaatggtgggcagacgaaatagatcaactttcattgggtcataaaattacttaa

SEQ ID NO: 55322 - DNA, 483 bp, Acinetobacter baumannii
atgaaaagaatacatacaaaaattggagatgtatttgtagttaagttggagaatggaagaaaaaaatattttcaactagtggtttttgatttaactcaattaaatagtgatgtaattcgagtatttaagacatcctattctgaagataataactgcaatttatctgaaatcattaatgatgaggttgatttctatgcacattgtgtaactaagtggggcattcagctaggtttttgggaaaaggttggaaagtccttggaagttggcaataacgatgtgttattccgtagtagtagcgatgaccctaaaacaaaaatatcggataactggtggatttggaaagttaatgaacaacagcaatatgtaggaaaattagaaggggaaaataggcttgcagaaattggtagtatcataccgccagatagtattgtttatagaataaacacaggaaaatatgattttgtatatcctgagtttgaataa

SEQ ID NO: 55323 - DNA, 498 bp, Acinetobacter baumannii
gtgaatgactttgaaacaaatattgaatgttgttatttgggagtaattcccgtaaaaattttaaaagaacgattaaactttaaggatattagtgactatctatttgcaaaagaattattaaagattgccgaaaatttaagaaatagtgatgcagtacatctggcatttcttatatttgatgattatatattacaagaagaagatttcggcttattggatatctttttttcagactggcatgatgcacatgaagatatcgtttttacagtgagtagaattagaaattgtaatttggtggagttttttaaaaaagctatcaatttcatcccaagttatatggtggaagatgactcgaatgcaattgctcggaaagccttttttggcttgggtacaaatataaattgttctaagtctttagaatatttaaataactatgctaactcatcagatatagtattaaaaaagtttgcgatagaacagcttgaattattatcttaa

SEQ ID NO: 55324 - DNA, 558 bp, Acinetobacter baumannii
gtgataggaggaggtaactctggtgctcaaattcttgctgaagtttcagaagttgcagacactatttggatcacagtaaatcctcctcaatttttatcggatgatgttgatgggcgtgttttattccttcgagcaacagaacgtttgaaggcacaacaggagggacgaatagttgatcaacccattggtggtctaggggatattgtcatgattgatagtgtcaaagatgcacgtgaacgtggggtattacatagcagagaaccctttaaagcatttaaagaatattcggttgtttgggaggatggttcaacacaattggttgatgctgtgatttggtgtacaggcttcaaagcatccctaaatcacttaaggagtctaggagtgatagaacctaatcagactgttgctgtcaatgatgggcgttcaataaaaataaacaacctttggctagttggttatggtgaatggacaggcatggcatcggcaacattaattggggtttctagaacagccaaagcagtagtcgatgaaatagctgtttacttagctatagattaa

SEQ ID NO: 55325 - DNA, 885 bp, Acinetobacter baumannii; identical to SEQ ID NO: 52892

SEQ ID NO: 55326 - DNA, 651 bp, Acinetobacter baumannii
atgagctaccagaaactcagccgtgaccagattgcacaacgtgtggcacaagatattcccgatggtgcctatgtgaacttgggtattggtttaccaaccaagattgccagctacttacctgctgacaaagatgtcttcctacattctgaaaatggcctgttggcttttggcccaccgccagcggcaggtgaagaagaccctgaactgattaatgcgggtaaagagtttgtgaccatgcttgaaggcggcagttttttccaccatggcgattcatttgccatgatgcgtggtggtcaccttgatattgcggtgcttggggcatttcaggtggcagcgaatggtgacttagcgaactggcacacgggtgcgccggatgcgattcctgccgtaggtggtgcgatggatttggcggttggtgccaagaaagtatttatcactacagaccatgtgactaaacaaggtgagccgaagattgtggctgagctgacctatccggtaacgggtaaacactgtgttgaccgtatttacactgacctgtgcgtgattgatgtgaccagagatggtttaaaggtgattgagaaagttgaaggtcttagctttgatgagttacaggctttaaccggtgcaactttgattgatgcaacgaattaa

SEQ ID NO: 55327 - DNA, 1881 bp, Acinetobacter baumannii
atgtcagtgccagttcaaacgccatcaaaagaatatatcgcgaatggaacaacaactgcttttccattagagtttaattgtgataaagcagagtatttaattgtcacccttaatggtgaggaagcgcctgtaggttcatggacattggctaatgatactgtcacctttaatgtagcacctctaaatggtgtggtcgttaatttggaaagaaatacgccatttcagcgcaccactaattaccaactttatgacaactcatttcgcccttctgctgtaaataaagactttgatttaatctggtggaagcttcaagaacttggttatcgtgatcaggttatttggcttgcgcttttaaaagaaattgcagatagaatttctaatgatgaatcgattttagaatatatagactcgcaaattacaacatctaaaaatgactatattcaacgcgataatttattaaaatctgactatatagagcgagatacaactttaaaaacttatatagatcagatgatcgctttagttactggcaatcctagttttaatggaataactacagattttgttttacaaaacggaagaacccagcgtgaaattaatgaacaatatttgcatctaactgactttaaacatttggctgtagtcggcttggcagagggctatgattggtctgatgcaattattgcagctgaagctgaggcatatagcagaaacatggggttaaatatcccaagcggtatttacggttattcaaaaaatataacatttcgtgttcatgtctttggtcaaggccaacacaatacacaactcaaaaaactcgcacctgcaacaatcactcttctgaatggatcattgcgtgatattacgattggggtaaaaacaccagaggagcttctacccggcgatacaagtgatggtttagtggctgatggtttagatcgaaaatatattgaaaatgttcttgttaattaccacggaggtcgcggctttgtttataaaagaggtaacttgtcacgcttctttctgcgaagtcgtggaaatcttaaacaaggaattttctttgctaaagagccacttactggtgacaataagtgtgttgagttttggtttgaatccactggtaactgggaaaatggttttgaaattgaagattcaacgaatcaaagggatgtaagtggacaacaccgtggatatttaatagcacaaaataacggtaggtcaaataagcccgatgcgaactatgatgcagttttcacaggaattggaaatgatatcactgcttatacggaatatggctacggaacttggcataaatccggtttaaaagcatctcgtattttttatcaaaatatgagtcaccctcagtttagaaatgagtcaaataaatcaaatattgtttcgtttgcagacagcgcacttggaagccgaactactctttatgaaattttcaacacgttggaaattcaaaatgcaaaaatgatcggtcaattatttctaactcaagtaggtgatagaaaattttctttagattgcacaggttcaacagccgaacaagagttgattcttggtgataagttgatcttaaaaaagggcacaatggagtatcttcgtgcttacaacttaggagcaactttgaatttcagctccattcccgcaaattctagtgttgagcggcaaattccaatcggagtttcattggcaaactcaagagtcaatgttagtgcaacaccatctagtcctttacccgatggtctcttatataatagctttgttaaaccagacgacttatcaaatgtaactgtaagggttagaaacgtaactagttcggcaattagttcgggtggagatatcgcttggcaagcgctagttcatcttagatag

SEQ ID NO: 55328 - DNA, 225 bp, Acinetobacter baumannii
atgagtaataagaaaaaatccccatacacagattactataaccatgaaatatttgaaggtgatctaatacaacatccatcaggtgaaaaagggattgttgtgtttgaggaaagaactgaaaacaattcggataattggcttatccaatatgaagatggaattaaatcgcggttatgtcttcaagttggtgataaaggtcaaggtattgtgatgaaggtacattag

SEQ ID NO: 55329 - DNA, 195 bp, Acinetobacter baumannii
atgaataatgaagaaattaagagacttcaagaagaaaatccgcatgctcttattctgtctagtgagcaaatcaaagaaaatcgtcctgaaggagctgttcgttacaatattgtagggcgtagccttcattattattcagaaactggaaagttgttagcaacattaagaaaagaagatattaaaccgctcccttaa

SEQ ID NO: 55330 - DNA, 2043 bp, Acinetobacter baumannii
atgcgtattcctatttctcgtggtcgtgaagcaccacaagctcaaatgcaatcgtttacgcctaacactggcttggctgaaattggccgttctattggtggggcaatacaggcacgtgatgaccagcagcgtcagcaagaagttacagctaaaaatttagagctttacaacaaccagcttgcagaaaaagaaggcaagttaaagcttgatgagtcattatctactgacttcaatgacaaagtggtggacattaaaaaccgccttggtaatggtgtgatcaatacacagcaagccgatgaagaacttaacacttggtcgaatgctaagttttcggaactgcaaaacagcttgccgggccacgctcaggaagatttaaaaaaatactgggatagcaacgtaacgcgccaacgtacttcgttcttgcctttacaattacgtgcagatgagcaaaaaggcggggttctagctgatcggttcttcgatgtggctacacgtatgggtcgtgaagcaggcaaagaatatcttttaaaaaacattgttggcctgccattgtcagaagctcagaaaagtgagctcacaaataaatatgagacaacacgtgacatcacagatattaactcgcgtatcacaacggcaattgctcaaaacagtgttgaaggacttcaagaagttgcgactggtctaaaagactataagtttattgatggtcaagcggtacaaaaattccagactgaaattcaaagtaagatcacaacgctgcaacaacgtcagcaggtgcaagagaataagcggattaatgaagctgaaaaagttctaaatgagtataagcaaaatgttttgacaggtcgtccgttggatttgacctatcaaactaatgtagaaaaagccgttaaaggtacaccttctgaaactgaatataatttctatactaagcaatctagtgattttttgaggttccagaagctatctactgatcaacaattggctgagatcaataagcgaaaagccaatatgaaaaatttatcttccgctgatgcagttgcagaaaataaaatcttggcgacctatcaaagcatttacgacaacaagcttaaaactgttaaggaaaacccgactcaggcattacgtgaaaagggtattgagctaccggaagtaaacccattaacactaaaagttaatccaagtgactttgctaaaaacattgtgaccattggttcttatcaagtagcacagcgtgataaagatccaaatgcaacaatcaaacctattcctaatgaagcgctaccagccgctaagcaagcatgggaagaagcaaccgtagatcaaaagttaaatttgattagttctatgattgcccaaaccaaaggtgtgaagaatggtgcaaagatttggggcgaagcgttagggcagttaggtaatggcgatcaggcttaccaaatggcaggctatgcgcgtgccaataatttccgttccgatgcaggtttagatgttgcaactgcaattgttgcaggcaaacaggctctaaaaaataagcaaatgattcaacctaaggacactttgcttaaggaaaaatttaacaagtacgttggtcagtcggtatcgggtgaaacagccaaccttaactatgctgctttccaagctatctatgcatacttaactgaagcacgtgggcaaacccataaaaatgctgatgagtacaaagaagaaatagggcgtactgcgctgggccttgctacaggtggtgtttatacgcaaagcggtcgattcaaggattatacagatcgtggcatttcagactggaaagtgtctaagccatacggaatgacggacgcaacttttgaagcaaaaattcaaaaaggatatgccgatatttcaaaagcgactggtatgtctgtaaatgatttggacaatttccgattagcacgttctccaaccaaagcagccaatggcgacttgatgtatgacttaatcaatgagcgtggccgtcctctcgttgtgaaaggaaatgtttggcgcatccgcatgaatggggtagataaataa

SEQ ID NO: 55331 - DNA, 171 bp, Acinetobacter baumannii
atgagtaatgttgaagagttaaaagaggagctacttggacagttagaatcagtagcgaactttatgcgtggcatggggcttgacccaagaattccaaatgatactaagcaagcattaagcaagcgcgctcgtgatattgatgagttggtagaaaagtatttggaagaatga

SEQ ID NO: 55332 - DNA, 240 bp, Acinetobacter baumannii
atgtatagagtctggattgaagaagaaaaagcgcctgatggggttgtagagattgtatatgaaactctggatgaagctaaagctgcattaaaagtacttgaaattctagcttggaatagaagtccgtggcttagagaaatgcacccaaatgctggaccgcatgaaattgcaaaagaatacgtattatgtggaattcttgaaaagatagatggaaagtgggtggactataaagtgatttaa

SEQ ID NO: 55333 - DNA, 210 bp, Acinetobacter baumannii
atgaatatcattaaagatcttaaagagaaaataactttcctagaagaaagcgttaagaagctcaaagagtcagaacaatacatgatgtgtgatgagcaagcttatttggtcagaagtgaaatctatatgacgaatgacttaatcgacaagctaaacgaacgcttagagtttgaggaagagtactttaaagcgctcaagggggaaggatga

SEQ ID NO: 55334 - DNA, 429 bp, Acinetobacter baumannii
atggataagaaagcattgcaagaacaatttgaagctattgcggttcagaactgctggaacatcaataaatatcctgccggttgggatggtcatggtgatgatgaatatgcagatgatttcgtaagcggtgcttggtggggattccagcaccagcaagcgaaagtggaggaggcaaacgcgaaagcgcaaatgtgccgagatgaaaagaatcatgcaattaatcgctggtcagcagtttgtaaggaacgtgacgagctgcaaaagcgggttgattcaatccgtgaagtattggatgagttacaagaacaggcagatgtaattcgtaaacgtgggcagaagttccgtgattctagtttcttagccagtgccgacatgatggacatttgcattaaagagatagagcaagcgctcaagggtggtgaagcatga

SEQ ID NO: 55335 - DNA, 261 bp, Acinetobacter baumannii
atgagcactaaacgtattaagaaagaattgagcaaaaagggctatgagcttctagaccttaaattattgcgtggtaatggtgtttgcgaaacagaatggctgttcttggttcctgctgagcaacggcaaaagattattgaattaggttctgacttcttctgccatcaagacttttcagatggctacttgggtggcaattcggattacatcgaagagtgtctagaaatgctgcctgatttaaaaggagccagcaatgagtga

SEQ ID NO: 55336 - DNA, 378 bp, Acinetobacter baumannii
atgaaaccagaacaatttattcgtgagtacggggtggagaacgtcaaaaccttaattgaggattatgagaaagatcaatttgcatttaagagttttgatcctgctgctgactgttgttttgatgctggcttatgtatggggcaagaaaaagcttggtgggatatctgtatttatgacctcaagcgtctggtggagtcggttgagctaatcagcttgtttggcagcataaagatagcaaaagacaaagtgaagatggctgattttaatggattcttacttgtctcagttccaatcgaaaacggcttggcagatgtctatatccataaagtagaacaagccatccgcgaccacgaatcaatatacggagaagaacaatga
